United States Patent Application Publication US 2019/0348154 A1 - sequence listing, part 117

SEQ ID NO: 440335 - DNA, 741 bp, Serratia marcescens; identical to SEQ ID NO: 190889

SEQ ID NO: 440336 - DNA, 663 bp, Serratia marcescens; identical to SEQ ID NO: 103791

SEQ ID NO: 440337 - DNA, 906 bp, Serratia marcescens
atgggaggaaaaaaatctgataatgatatttataattactctggatattttgatggtgcatacaggataaatgacaattgggagttaggtgcaggggctcgtttttctcacgaaaaagcaaaaactcgaatgattattttagaaaaaggaaaaggtgagtctaattataataataatgcagtttttaatgcctttattccacgagcaagtatcgcctggcttccaaatgagcagaatcgtatatggtttggagttggccgcggttttaaacctggtggttttaacaaagaaggggttgataaactagctctgacttcttataaatcggaaattgccacggaaatggaattaggttggaaatggcacagtgttaatgataaccatatggccgaaattactttatatcaaatagatagtaaagatgttcaaggatatgtaggtgttattggttatcaggcattatctaatatgggagattcaagaagtcgagggatagaatatctttggaaatcaaagcttacccctaatcatagtatttcactgggtggcatgttcaatcaatcagagtttaccagtggagaacataaaaataaaagacctgcttatactcctagttatagttcattaatttcatgggagggcttatatggcaaggagcaaaagtggtcttctcggattgcagtcagatttaatggaccattttactttaatgagcaaaataatttagaacaagggcattatactgttgttgatgcatcaatatcatggcaccctacaaagcaatatgaacttagtatctatgcgaaaaatattggtgatgctttatatcgaacgtatgcatttggtaataaagcacagctaggtaatccgagagagatcggggttcagggaagtattaacttttag

SEQ ID NO: 440338 - DNA, 177 bp, Serratia marcescens; identical to SEQ ID NO: 14595

SEQ ID NO: 440339 - DNA, 348 bp, Serratia marcescens; identical to SEQ ID NO: 190917

SEQ ID NO: 440340 - DNA, 135 bp, Serratia marcescens; identical to SEQ ID NO: 103823

SEQ ID NO: 440341 - DNA, 144 bp, Serratia marcescens; identical to SEQ ID NO: 29491

SEQ ID NO: 440342 - DNA, 669 bp, Serratia marcescens
atgaagctgcagcctaactactatcgcgaccgcgtctgcctgaacgtgctggccggctccaaagccaacgcgcaggacatctacgccgcggcggaaggccatgtgctggtgggcgtgctctccaagaactacccggacgtcgacagcgcggtgaccgacatgctgcgctatgcgcgcctgattgaaaacgcgctgtcggtcggcctgggcgccggcgatccgaagcagtcggcgatggtcagcctgatcgctcagcaggtgcagccgcagcacgttaaccaggtgtttaccggcgtcggctgggtgaagatctctaccggcccattgagcgccgcggcgccggacggcatcgtgccggtggaaaccgccatcgctttgctgaaggacatgggcggcagttccatcaagtatttcccgatgggcggcctgaagtgcaaggaggaataccaatacgtcgccaaggcctgcgccgagcatgacttcatgctggagccgaccggcggcatcgatctggaaaactacgagccgatcgttgagatcgccctggcggccggcgtgaaacgcgtgatcccgcatatctacagctcgatcatcgacgccgccagcggcgacacgcgtccgcaggacgtgaaaaccctgctggcgatgaccaaaaagctggtgggctga

SEQ ID NO: 440343 - DNA, 336 bp, Serratia marcescens
atgaacactgcatcctgtttaccgattgaagtccgtaccgccgttttccgccgcgccgtggcgcaagcctatctggacacctgcgccttttaccgggtgagcctcgggtacacgctggacgagctgcagatgacgattgcgttgcgtttggaggggcactttgtgcgtcagtacggcgcagaagacggcatggacatggcgtgcaccatgctgagtgacatggtgcagccggacgttctggtggccgcgccgcgcctgaccgcgctcgggcaaaagatgatggacgagctgtgctgcgaccgcctgtcggcatcgcagaacgccaccgtacactga

SEQ ID NO: 440344 - DNA, 2439 bp, Serratia marcescens
atgaacgatgatactttccctgagtcatttgatccttctcgttgtattatttttctcggagcaggtttctcggcagactcaaaaaacaagataaatactaatcctcccgtaggaaatgggttgaataaagagattaagaaactagcaaaaattccagaggatgaaccatccgacttcacagattcagcagcatatgccatatcagaaaaatttgatctatttgaattgcttgaaaacctttataccatcagagaaataaccgattctcagagggaaatattatcccttccttggttaagaatatatacgacgaactatgataactcagtgtcagtttacagagctgagcaaaatgaaagtgtagatatttttgacctgacagatcaaccaccgaagaaaattaagaaaggatcagttattcatttgcatggttctatagcaaagtgcaatcctgataatctcaatgactctattgttttaacccgacgttcttacatagaacagagggttaagaaatcgccttggtgggattggtttgatagagatattaaaatctcgcagtatgttttttttctagggtacgatataaatgactttgaacctgctagctatttaataaagtatcctggaatggaacaaaggcgacacttcattttgagagatactcaaagtccgataattgcatcaaaactgaaagaatatggcttaaggcattcatttgaacttaaaggttttgttgatagactgaacagagccacagttgcaaaaacaccatctcatgaaaacgaattaagatcatttatttatgttgatctttcaaaagacaataagttaccctcaaaaccaacctcagctgaaattcaggaattactcgcatttggaagagttagatttgacgcaattagctctaccatgcctgaatcagaatatgttgtgtttagaaaaaaatcattaactgaatgcaatgaagcacttaaatacaataaaactattattatccacagtaaggttggaaatgggaagtcaattgtaatcaatgaattaaaggttttattatcgcagcaaggtcgacgctgctttacattaagagataatatttcacctctcccccaagatcttgatttcctgtccgggattgacaatcctgtaatatttttccctaattacgatagtgcctttgaaaacatccatttatttgaaggtttatctgagaatgcaaaattcgtggtggaaattacatcaagcatcttgcaggttagaatgcaggaagttaaacggaagttactaggagatataaaaagggtagatgttgatagattagatgaaaatgatatttcctacttgagagaacttcttaaaaaggctgggttaactactctgtccgagacaataaaatcagttggttctttggaatttagagagtttttattaaaatcctatgaagaccctgaaattgccatacggctcaaaaaagttattgaaccattacttaactcttcttcagcaaaaaaaatgatatgtattagttcaatattgaaatttagcggtcagcctttagatattggttttattcaagatgttacaggagaggacccatattccgttctcagcactttaggagacaaagtttttgagttaatgaattatagtattgataaaatagagatgcattcgtctattctttcagaacatattttaaaaaaacacattgaaataaatgattttttcgatattatatttaaacttgcgggtgaggcagcacgcaggattaatgatgagcatgacttcaactctgagcgattccgcagagctcgtgcacttctttcagcagttcttcgattcagtttccttgattctattactgggcaaaagcaatgtagtaataaaaccattgaaaaactgtacgaactctgtcgccgtgattctttaattgagaaagagccacttttttggcttcaatacagtatcttctggcagagcgtgcctcgatgggatctggctgaatcccatatgattgaagcctacgcacgtagtgctgcgcgtactggttttaagaccttccaacttgatacatattggctcggtttattatgcgatctggaaatttcttattctgaagtaggacaaccagttactcgatttgataaaataacaagcatgatggaagtttgtagaaatatgattgatagtggaaatcacaggtatcatgttttaaagtcattcttaaagttagaaccgatggtttcgaagagaaaaaacgaccttaccgagtctcaatgtataaacttggcctatattttaaatctaattgtgacgcaactagataatttatcagatatcgataaagccacgtggggaacagagccatgcaagataagtcttctgaattgcgtggatttattagacgtacgtaacaaaatttatattgaaaagatttaa

SEQ ID NO: 440345 - DNA, 984 bp, Serratia marcescens
atgaaccagttagtaaatcaaccaataaatgacaataagaaccatctgccacaaaatgaatacgtggatgcattttatagaatatacaaaaaaatcaataaaacactaaaagaaacatcaaaaacatatgaaaacgatcttcttttagagcttggtgacataagagagattcatttaaaaatatctcaaactataaaaacattcaaagcgagcggaactacattaaaaataaacctagagcaatccgaaggtgaggattatatattcgacgactttgattcattttatcaccataatacaaccagcccgtatccaactcaggcagttttctttgaatataagtttttaatttacgacaaggaagataataagtttgagaattatgttataagtttcagacttctttctaggctcgcagctttcgaaaagctgcaaaatgactcacctgatttcataattgacctaatgtcttcactgcaaaccactgtagcaattatgaacattgagtattatgattacgtaaaagcaaggacattcctagcaactttcgatgagtgggtaaagggatgtacggaaagtcgtagctcaaagatattaagtatcgcaaagaaatcttcgaaatacataaagaacactggtagttttattatcttacttctacttacctgtttgacaataaaatcaataccgtcagagatgactgatcttagctttattttaaagtttgctatcgcttatggagctatttttatatttataagaaagatttccaaaatgttattaggcggcattaatagagctgtaagtagaaacataccattatcctatctaaaaataaataaaggtgatgagaaattaattggaagctacaaaaccaagctaacaaggagtattataagttcggcaatagcaatcttagccgctattatcattgggctatccacaaactttatatacgatatcatcaagcactttcttaaatag

SEQ ID NO: 440346 - DNA, 978 bp, Serratia marcescens
atgagcgataccccacgacacgcggacgacgcggcgatcctggccgccttcgcgcagcagcggcggcaaggtctgacccggcgttcggcgctgcatcaggccctgatacaactaatcgccgccggagaactgccctggcggacgcagctgccgccgagccgcgcgttggcggcccggctgacagtggcgcgcgacacggtggaacagacctacgcgcggctggaagcggaggggttcatcagccgaacggtggggcgcggcagctttgtgcgttatcgcagtgacatgctgctcggccgtgaactgctggcgacggcgacggggcaagaggcgcggctggcggagcgcgagctgagcgatcgcggccgggcgctgctggcggtcagccatacgccgcacaccagccgccaggcttcgctgacgccttcgctggcggacctgcgggcgttccccatcgagcaatggctgcagcaggaaaagcaggcgctacggcggcacggcgagcggctgttggggtatgccgatccgcaagggttgccggagctgcgcgcggagatcgcgcgctatctgcagcgggagcggggcgtgaaggcgacggcggaacaggtgatcgtggtgaccagctctcaacaggcgttggcgctgtgtacgcaggtgctgttcgatcccggcgatgcggtgttcgtcgaagagccgggttaccagggggcgaaaaagctggtgcagtcggcggggctgcaggcgcggccgatcggtatcgacgagcaggggctggacgtcgggcagttgatgcaggcctcgggcggcggacggggtgtttacatcacgccgtcccatcactacccgctggggtattcgctgagcctcgagcggcggctggcgctgctgcagtgggcgcagcggcagcgggcctggatcatcgaagacgactacgacgccgagttcaactatgaccggcaaaccaaggcggcattgtag

SEQ ID NO: 440347 - DNA, 1116 bp, Serratia marcescens
atgcgcatcgtcaaaatgatggagaaaatggaagttgagtatggtggcatgggttcgcaaaaacttcgtgaactgatgagttttcatctgaagatgggaaaaactgaagaagaaaccatgttcttggttgcggatagagctgaagaagtccgcatcatgcaaagtaattctaggcaacaagaaattgaacaggcgatggtttatatgtggcagcgttatcgtggccgctggccgattgtcgttgcacataaagcgcatagccaatccggcatgactaactatcactattcagaacccgatggcattaaagccccacccttttggagcttctttatcgttgatggcaaattccttttatcacgtattagaatggggggagtagggaaagtcgccttcagccatgaggaaatgttggccaagtttgccccgaagccctctgaaaatgccgcagggcagatagctggttatgttcataaaaatccagatccgaagcatcagatcgatcctgtattggttcgtcggttatattccggtgcagatttccagccctttggtagtgtccggaatgcattcgaaacactgaggattggcgtcgatgctgaagcacgaaaattccgacgcgttctgaagcaagaagaccgtgctttctggccgccgactaatcccgaatgggaattcctgctcaaatatccgcgtaaaactgagcgtgagctggttcaggagcgcgcccatgaagatggcccaataacccagactcgtaatcgtaaaaatcaagacgagttcagggacgatgtggcttataactgttatgggatctgtgtattgactggggccagcgctcttcgttgcgaagccgcgcatctggttccccatgcgcgcaaaggcggagccagctatctcaatggtattttcctgcgccgtgatcttcataaattgttcgatgataatctttgcgctatcgacccagtcacgatggaaatgatcttttgtgatgctgtacttgcaagcgaccctgaccttcgccctctccaccggcgcaaagttgtaacacgtaatcccctcaaggctgaaaacctctataatcgttgggaaatctatggagcaggaagtgcttaa

SEQ ID NO: 440348 - DNA, 1011 bp, Serratia marcescens
atggaaagcgtaaaatctgacattgaaaaagcttttaaagagagagctgctgggcctcttgggtatgtaaccttgtctttcgttgcttataactggacgtggttctactttgttttgtttagctccaaaagcgcagaggttaaaatagcgagtgtgattaatggctttcaaaaactaccgggttttggatggccgatcctcacgggattgctacttcaaatagggattccatatttgaagatgctaataacatttttaacctcacttgcaaaaaaccttgaaaacagaatagaacaccattctgataactatttggggattcttcaagaaaccaccaaacaaacattgatagataaaagattggaaatcacagctgcaggtataaaaatagaaaacatgatacaacagcgggatgagctaaatagcgaaatgagcgtactccgtgatacaaccaataacctaagaaaagatgaattacaactaacccaattaattaacaatgcaaataaagaacgtcatgagcttgaagtgtttttatctactaacaatgtcacaaaagagagatttgagctacttatgaatgtactgcaacaaaaaagcatagaaaacacaagcattaaaaatgcagttctaatcacgaaaaattgcgcagaaaaactatcaaaaatcgcgatgaacatggagatatctccaggcgtaatgactgaaccggatagtgttgaacttgctgcagtgatgacagagttaaatgagatcccatcgttgatagaaggagttttaactgcaagagatggggctcacttcaatgatgaaagaaatgaaatgctcatccctccgtctacttcagaggctaagataaaagcgtttttatacctcataaatagcaaaggctttagcgcatcacttggtataaaggaacctgatggaacaatagtcgttacatttccaagaaagcttgggtctttagaaaaaagaggcgttattagttattacgaggagtctaccatttaa

SEQ ID NO: 440349 - DNA, 1854 bp, Serratia marcescens
atgctggaatcatccgttgtcgaaaatattgaccatacattaatcactggtaatgaaagatccttagattttggtgcgttagcattatcgttactgtcatcaaaatccaatcacattgaaataataaaacatctagatcaccttgtgacttcaagtggaagaaataaccatatagagatatcaatattggaggcatttttcgagaaactataccatataaaacttggtgaagggacaataaaggatgatatttttgtcataagctcaatcattgatatgtcaatgtacatatatgaaaaagataaatatgaaaccttcttcaaaaaagtgaatcgttttatatctcacagaacgaaatatggtgatgacaagattaacaatccctgtctggaatactatatcacattaacaattatgcacattaccaatatgtattataaagcatttgaagaaaatacatgttacttggctaatgacttaaagtatcttagcaaaaccagaatggataaaaaattaaatgacagacaaaaaaagctaatatcttgcatgagagaatgcatcgctctattaactgtcaggttcgattttttaatgagcagagacagtaatgacaacgataaaattgaattagaaaaaatagcatcgttaattaatcagtggtcaaacccttcatttatggaggaaatatacttcctccaggaaacctatgacacattatttagtatacctagtgacttttcaagcattcgtgctgaaatgagcctcagagaaacaccagatggtgtcgctacatgggtaggggtaaatcatagtttttataaagccattgctattttactttaccagttccctatgaataaaaatcatcttagtttaatttttatatcagacaaaaatcaatttctccagaacacaaaattaacaacgcaaatgattggaagcattgttgattatgtaagaacgagtgattttttactgataattaatgctataggaaaacataatgaattagatgaaaacattaaagtaaaaacagaaaagttagccgattcgcttgaaaaaatgaagagtgaaatcacaactataataacaaaagaaatcgaatatgcagaacttgacatggcgttaatctcacagtatcaaaatgagatcaaagacagagcggtagagaagataagtgaatttctcaacattgacaatgcagaaaagacaatgaaagttaaggacagcattgattactgcagtcttattgacaagcgcgaaattttgccatctatagatggagttcatttctcaatgaatacagaaaaccatgcagcaagtgccgtgttcagtctgataagaaaatccctgaattatattaataatgataatgtcgtcattgaaacaatctacgacacagatcagttagaacataacaattatataaccattgaatacatggttaaagacagagtaaacacatataaattctctaaaggactacgtatgtatgacaatgacgggtaccttggttttgaaaagtctggtatgtattatctgaatttggataaagaacttgacgtgaaattaaaccccgatgagctagtatcaactaaaataacatcgataaacaataaaaacattgatggcttatatgaaaaattcgcacttaacaaagatgatgaaaaccttctgcttcgctcagaaatagatataaccttcaatatattcatcaataaaaaagaaagtaccacgctacttttcctttctgaagaaaaatgtaaggaattaaatgaaaaagaagagcggcaataccaacaattgataagaacaaacagagattcgattgataatacactacaaagccaatag

SEQ ID NO: 440350 - DNA, 843 bp, Serratia marcescens
atgaaaaaaacctcagttagcaaaagaattgaattatcacaaaattcaaaattgaatggcttttgtcttatatgtggcacggaaggtaagttaacgaaagaccacgtaccgccaactaactcacttttaactatcgttgatagtcaaaaaacagccgtggagtttttttctagggaaggtagcgtaaaaccacagcgaataacaacaggtaactactcacgcacgctctgttctgattgtaataatgatgttttaggttctttagactcagaaataggcattgcgcataaaatgctatcagcggaaatattaaaaaaaataaataacaagcaagggtgcaatgatgccattaatgtcgcagttaatatctccaagtacatgagagcaatggtaggtcatataatatcagcattgccctcgttcttttgctcaatgcctttagatacgccactctatacaccattaagaaactttgtcttaggcgatgaatcaggtgctgataatttcgaattctattactggtttttccccatgaactatcagatggttattaataattttgcctttgaggatttgaagcagctacgattcacatcaggttcgataatttcattctacccaatatcatttatgattgtagataagagcagcgaaaaatataacaacggatatagtgttgcaataccacctggagccgtgaaaatggagctggccgatgatgcgctagaaataaacctttcatcctggaatgatattaaaacagggttcccttacacagggattaatgagtatgagttactcctattagatgaggatctttcatttataacttataagaaataa

SEQ ID NO: 440351 - DNA, 810 bp, Serratia marcescens
atgagacgagaaatccctcagcccatcattgatgtagtggctgagtacatatcagtggttgaatcccatgctcagttaaatagtctatttgaatacgttgatgctcctggtgaaccaccagaccaaccaaaaaaacccaagtcactagcatggttgagacgtataaataaacaatgtgatgaacctttagttgttttaggtaaacttgttgaaaaatatatggatgcagaacaacctgttgatactcgcaaccagtgggacaacgatctaaaaggttttgtagaatctatacatagacacttagacaagtatggacttaaatacgtaacaggtggatttattgtcgatggctcatcgttcacttctttatcacttcgtaatgcaataaaaaatcgcgatatcccagctgttgaaaacgagtttatccgggctattaaaaatatacattcagatccgcgtgaggctgtttccgcagcttgtaatattatggaatctacttttaagatttacatagctgatgaaaaaatccctccccctacgaaacaagacttacaaggattatggaaagtagtacgtgattcattaggaatggataccaagtccgttgaggatgatgatcttaaacgtattctgagtggactatactcaataactgatggtattggtgcattaagaactcatgcaagctccgcacatggtgctggcaggagaatctataacttgaagcctagacacgcccgtttagcaataagctctgcccatgcattaactatgttcattctcgagtcatgggaagaaaaaaagcaataa

SEQ ID NO: 440352 - DNA, 921 bp, Serratia marcescens
atgaaactgcctctggtgaacgaacactggactctgacctgttctggcaaaaaaatggagcgccgaaagtatctggcaggagactttcagtcagtaacctatgatgaggcctgtgcccgcttgggtgacgtgttggaaaaaccacttgaaaaaaagactgcagatctctttaacaaggtcaaaaatcatcgtaaccgggttgtccatttctaccataacgaactcagtgagggggatcagcaacaagtactgaccgaacaggcagatgcctggtttgcactgaatcgacttatgcgtgaagactggtcttctctgtttggctgggagctgagaagaaagcttgcagaagacgaaacgagaatgctgcaaatcagtgagttttatgcgggggcaaagttccggcatgaatccgtgcaggaggaactcgctgttgaaatcagagaaggtgcttccatcagtgaatgtcctatctgcggctatgctgccgtgcttaaacagatgctgatacctgaaatctctctttatgataaaacctgtcttgtgtgtgatgagcaggatgtatttttggacctggattgctcacaatgcggggaagctgtaatgatgaaaaccggcgatgatgattttaagtgcagcagttgcggttatgaatccagccggtatgaagcgttcaatccgactcctgccgatgaacgagataaatccgatgcggcaggttgctcaaactgtttacgcattgactctgtatgttccttcaactccctgtatgacaattttatctgtgtgtgttgttttaatacttatgaaaatgtggaacagtgtgaacgctgcttgagctggagttcggatgtacctgcacgcagtttaacagaggggtgcttattctgtagtaccaaaaaatatttgcatcaagcaaattaa

SEQ ID NO: 440353 - DNA, 792 bp, Serratia marcescens
atggaaaacgaatattactggtggggattagaagattcaaaattcaaaggagtgctttacgactctattaatacatattttttatacgatcatccttataagagctgggatgagttttctaaagcagatccccacatagcctatgcgtacttgacatatgtcagatttaattctttggaacaacagtttgtagacttaagagtcataccccaaatgctcggcgttaaaactatccctttagaatcttctgtaaaaaacatcaacagatatgactggctcaaatcaattgttgacttaactctattcagattctccagcgttagagatattgcatttcatcttgtcaatgaaattttggagctcaacatcccagatcaaaaattaaacatcaagcaattacataaagttcttaaatctagtcatcagaaaatctatgactacctaaaagagattgatacctcaggtatacctctgcgttcagacagaaatgaaagagcgcataaaggattttgtcatctctacactaatgatgatgaaatgtttaaaaacatggcctgggcagaaagcgttggctcgcaggtggaaggttatgatttacactctgtatatgaaatgtcgatagataaaatatatgatattgtagttaatgaaacaaaaagagcccaatcttcctgtataaaactgacagatgaactctatgaatactatcgagacagacatgaaaatttatcgacaaactccagaagtggtttgtcttctcattttaaaatccatcataaaaataaaacctag

SEQ ID NO: 440354 - DNA, 894 bp, Serratia marcescens
atgaaggcaccgagaagtgagttgataagcagggcaggtgtgcattatgcaggttacatattttctctagaaggtctgattttcagggagactggctctacagatgttggcattgatgggcaactggaattagtcacctcagagggtatagcgactgggttgctcgttggtattcagattaaaagtggtgattcttttgttaacaaagatacacgtgttttttcttttaaagccagtaaagagcactttctctactggagaaatttatgtattccagcgataggtattgtgtactcccccgctttgcgcactgcatcctggtttgatctggctgaacagaccgagaggatcctgaatgatgaaagtccaccagtgatcagacaggtactgaacaagagcaatatagtagatattggcacaggattagccaccttaatatcaagaatacacaattattataaaatacctgtcgaaaaagatagtattgttaaactcggctctatacaagaacaatctgacagtaaaagtatagctaccaaagaggcctcctggaaaaggttaattttcattttcttttcgcctgacagtgacactgaaactattagttcagctggatacgctctgtcctggtacttcccaagtgtttccgaagagcagaaaattcaatttaagaatcgattacaacagttatcactttcagaattaaatcgaattgttggtgctatcggcttagcaatatcccgggatagagatgacgttatgtcactgattcttgatcttttatcctatcactctgagataatatctcttttgcataaattggacactgagaattttgttttgcaaaaagataaatggttgatagaacaaatgatagagtatatcaacgattag

SEQ ID NO: 440355 - DNA, 2040 bp, Serratia marcescens
atgtttttgcaaatacaggatattattgatctgcaaaccctcgttgaatccgagcaggttgagtttaagttggcaggtggcaaagacggcaaaggtgagttaccaaaggatttctggccgacctattctgctatggccaatggaagaggtggttgggttatcttgggtgtcaaagaacaggggggtgaattcacgcccgttggcgtagttgacccccaaaagattaaaactgatttattcaatcagctgaacgaccgtgatcgtgtcagtgccaatgttcttcaatccgagaaagatgtgcagttagtgaacttacagggcagggatgttctggcaatacacatttctcccgctacgcgaaaacaaaaacctgttcacttaaaaaaatcaccttttggtaacacctatcagcgtctacatgaaggtgatcgcatttgcgatgatatgacggttaagcgcatgcttgctgagcagatccacgacagtcgtgataatgaagtcctctccgaacattatggttttgacgaagatattgatctcgacagtctgaaagtttaccgcaacctgctttcgtcaaataatccacagcacccctatctcgcctgcgaaccttttgagttactcaagatggtcggtggctggcgtaaagaccgtgaaacgggaaagcagggtattacacttgcgggaattttgatgtttggtaagtgggaggccattattgctgccttacctaattatatggtggattatcaggagcgcccggaggccaaaacggaactgcgctgggtcgacaggataacccctgacggtacgtggtctgggaatctatttgatttttatcgtaaagtttatcaaaaacttgttgccgaccttaaagtcccttttatccttgaggaaggtcagcgtaaaaccgatacgcctatccacattgcattacgtgaagcgttggtcaatacactggtacacgctgatttttcagatcgggtttccattctgattgttaaacgacctgatatgtttggttttcgaaacccgggacttatgcgtttgccactggaagatgtggttgcggggggcacaagcgactgccgtaatcgccttctgcatcaaatgtttctgctcattggactgggtgagaaagccggttcaggcatgcccaagattttcagtggctggaaatcggctaactggcggacgccaaagttatgggaaaaaactatcccagcgcaaactttactcgagctttctactgcgagccttattccacagcacattcttgatgtgttgcatcagcaatttggtgagcggttcgagctgctagatgactttgaacaggtcattattgcaacggcagctattgaaggctgggtgaatcatgagcgcgcctgccagctgacaactaagcatccacgagaagtcacactgacgttaccccggctggaaagtaaaggcttcctcaccgccggtggcgagcagaagagtaaacactacacgctgccaggtgtttcagtaatgaccccggatgaagttttcactcagggagcagttaatgtgttaagcagctccacatattacggagagggctccacacttaaagatcagcgctccatatatagcgagggaggcatgacacaaaacgagatcatgccagagcgtgcggcgatgagcatgtctgatatagaggatggtcatcaatgcgttgtaagggatgaatatggacgaatattaaaccgcttcatcgacttaccctacattgactccgtagctcatctgacgcaaccgttccgagatatgttgttcgcgcaagccgcaatcccgcgtgaaaaattgcgcctaggagacaaggagctgatgaaaactgtaatattgactgtatgccaagggcattttatttcagtatctgcgttgggggaaattctgaaccgtaaccccaacgcgctgcgccagcaatatctaaagcaactggtggatcacgggcaactgaaactggcatttcctcagtacaaaaaccattctaagcaaggatacagtacggtttaa

SEQ ID NO: 440356 - DNA, 489 bp, Serratia marcescens
atggcacctagcgtattggattattttatccaacaagcttcccgttatccggaaaaaaccgccgtcgtcggcgataataaacatctgacctaccgtcaattggatgaagccagcagcgcactgtgcacgcgcctgaaacaggaaggggttcggcccggcgatgccgtgccgctggtcgcgcagcgcacggtggaattgccgatcggcatgatggcgatcgccaaggccggagcctgttatattcccattgacgcccgctatcccgaacggcgcattcgcaatattatcgaacaaagtggctcgccgataatcctcttcagcaaccatgacgctcgtgtaaatatcgacaacctcccgcgcaaagtcctttccattgataatatttccctgcctaaagtttccataactgtattttcccctccgccctccgatgcgctgcctatattattttcacctccggcaccaccggcgcgcccaaaggcgtcatga

SEQ ID NO: 440357 - DNA, 1458 bp, Serratia marcescens
atgaaaatgacacttactcagtcgattataatcaataagttatctatcgacgtgaaaccagatctcgaccagcaagggcgagtagtctacttacccaatcctgaacgaaagccgtatattatcactgacaaccacagggattcacccgtaggtttcggtgtcaaaatcagtgccaccaaaaaaacctatatcattcaacgacgggtggcgtcagcagacaagcgaccctcgacgggtggcaaggcaccgaaacaggttatcagatctacgattggtaatgtttcagattttgccaacattgatcaggcacgcgatgctgctcgcaaattcgttgaaactatgaagttgaccagacgaaatccgaatgcagtaaagcgagaagcagaggcttctgagctaacgatcagtgaagtttttgcgcaatacagaagtcatcttatgggcagatcgaaaccggcaaagcccaacacattaaatgtgctgaataaagccgaaaaccgcctgaaagagtgggaaaatcttagagtaaaagatctgacaggcaacgagatattgcgcaagtttgatgagatcgcttcaagagccagaactgcggcagagcagacttttcgctgggtgaatgtggcggtaagacatgcgattgagatcgaagcgggaaatgctcagacacaacaacgacaaccgacactaagctacaaccctttctcaattctgacgatacagaaaaaattcagaatccgttcacagcttgaagaaagctatcgcgcaaaaggtgtacgaaacccactgtcgccaaaagacaccttggggcgatttttaacggcattgcacaacaagagaagcttcaaccgcctgggatgcgattatcttttgctgactgttctgacaggagccaggaaagaagaaacagcttcattgtgctggcgagaagctctgacagaagaagaagccagaacgaccagctatgttgatcttgaaaataggataattcgattttacgacactaaaaaccgcaacgaccatgaacttccaatttgtgatgctacgaagcgaattcttgaagaccgaagagatttagtcaacgagactgaaaagcgagcagataaacgcaaatgggtttttcctgcccggtcgtcgcgaagcaaagttgggcactattcagacagcaaaagcctacgcgagtatatctgccaggaagcaggaatatcgaagctggggatgcacgacctgcgaagaacctttggtcgtgttgcagaagggctcacttcatattctgtggtgaaaaggttgctcaaccatcgcaataccactgatcctactgaacggtatgcaatgcctgataatgatcgaatttatgaggcacttcaaagtattgagctccatatgcttatgactgcaccagagttgtataatacacttctggcttcggcgaaatatcaaccattgccaacaaattag

SEQ ID NO: 440358 - DNA, 1275 bp, Serratia marcescens
atgtcacaaactaatgtcccgcttcgtttgccggttgagcttatgactatgccccgccagtttgaagcggtgttcaacggcaacatctacgttggaaaagtcgatacagatccaaccgctcccattaaccaaatcaccgtctatcatgaggccgagaatagcgagctaatccccatagcgcaacctatcaacatcaatgccggcggttatccagtagtcaacggccaggttgttaagttggtggtcactgaggattacgccattgccgtgtatgaccgcctaggggctgaagcgttttattttcctcgctgttctggtccatatgtgctgagggtgttccatgatcagacgctgcatggtgacggtactgaggccgatccacttggcgtccagctatcggaagatgatggcaacctcttggaaattcgtgatgatgggcttttctacggcacgaacgcagctgaccatttactaaatctgtatgttgatgctgaagccggcgacgatgctaacattggctctcgtgaagagccgttaaagaccttggctgaagcactcagaagaacacccaataacaagagcaacacaattcacttacatgcagggcaaactttcgtgctggatgttggtaccgatgtgtttgttattggttgtacccgcgttattacgccatatgcggacccatatgttgatggcgataaagtgccaaaaccaagcccagaagaccccgcatattatccatgggcagctcgcgacctagcccggccaactatcaagactaaggttaattacaatgatgtgactcgtgtttttgttgttggtaccctttggcctaaagaaggtggaaagctagagattcaaggggttattttggatgctgtgccggtcaatgatgaccagcaaccgaattatgttgcgttcaaccaagccatgatttatggagacgctacagccggcgtcaatttatttggttgtgtgttggtatcaaaatcagttgtgggggagcaatatctttggggggtattctctgggtattcagatggggggattccgtccgtaaatatgtctcgctgtatgcatcttacgggtgattattacgccatgttgttggcatgccccgcgaaaatatttgcaactgatgactggccggcacctggaacggttccataccttgaggcgaacattatcccagcgacaaagaatggcaagcttcgggatatcatgcgtgggcctaatggtgaacctcgtaacttggtaagcaatataattgtttga

SEQ ID NO: 440359 - DNA, 2163 bp, Serratia marcescens
atggctaaggcatggaaagacgttattgtatctccccaatatcaggctttagcgccagaacagcaggcagaagcacaggcgcaatattttgaggaggtggttgcccccaaagttagcagtgatgaatggggagcagcacgagatcagttttattcagcatatccatcatcaattgcccagcaacaggagcccgcacagcaacaacgtgagccaacgatgctagataatgcagaacaggcggcacgcgggcttgtaaatatacctttcgatgctcttcaaggcggcgctagcctaatcaacgcaattagccaagggttgggcggaccaaaggtgttagatgatgtctaccgcccggtagagcgtcctacggataaatgggcgcagactggtgaagaaattggtgggtatttactaccgttcggtaccgccgccaaagctgccggcgtggtgggaaaagtgccaggcatgagcaatagcgctagtgctgcggggaatatggtgatgggttctctatcggaggcaggaaatcagcaaggcgactttgccgaaaatgcagcgacgaatgccgctctcaacctgggggcacaaggcgttctgtctggtattggcaaggtaattgcgccacggaaaacccaagcgttaggtagcgctgcgataaactctgccgatgaagtctccaaactggcaaaaacacggtcaggaagagaaatgctttccggtcaggctgcaaacatatctgatgatgcggcgaaagcagcggaaattacaggcgttgatattaatgccttaacaccaggaatgaggtctggaagccggggaatcgcacaagcggaaggtattttggcttccaagcctggcattacgcaagacgctcatatgcgggcattcgacgagatccgtactaagtttaattccgccctggatcagcttggcgctgaagttggaagcgcgagcgaaaagagcagtgctattaagcagcgcgttcttgccggcattgacaaaatgaaggcatcggaaaagtcggcatgggacgatgtccgctcaacaatgccggatgcgagggctcgcatgtcaaacaccaacgcaaccattcgtggcgacatcgacgctggcacgccgcttacacctgaaatgaaacaatttgcttcggaatacggtaagagaggggagcgcgggatcacctttgatgcaatgaaggtgtggcgtggaaaactagccgatgcagagcagaaatatattcgctcgggagaagctaacgccgcccggcggatgggtgagctacgcgatgccgcaacagaagacatgcgcttaatggctcagaaaggcggatttattgaccaatggacggctgcaaacgatttgtctaaagcccgctttgcagcgcaaaaacaggccgagaccgcgctaggaaaagaccttgcaacggatgcgctagttactaacggggttaaagcgctggagaattctgcgaaaaccggctctggaaagtttcatcagattgtcggttcattaccagaaaaagagagagcaccggccattgcctcaatgcttcaggatgcattatcgcaaggcgtgcgcggtagtaagggggaggatgcaggaatttcacatatagcatcaattctcacccctcaaaacgttgcggccatgagcaaatattcaagcgagataggtgggattgccagagcttacggcgaacttgcacgagcagcaacaaaaccgctcagatatattgagaagacggggcgatcggtgcctgcgattgagactcttgagaaggggcttcacccagttatagaaggcgctctgtctggtgcttttcgcgtggcagggggggttagtgggtactctggtggtggagtgtttggagcgatagcaggtgcagcagtaggtggcgctgttgataacgtagcaaaaggcgtaatttctaaaatatcctccacaaaaagtggccgttatgccattgagcgagcggtagaggaggcaacaaaagccgtacggttgggagcttctccggaggctattgctgccgcagaaaagcgcctactcaggaacaaggtagctgtgaaggctatacgaaatgctgtcgggaacgaagagtttcaacgcttaatgagaatagggatggtagtaaccatgtctgggataagtgatggtatttag

SEQ ID NO: 440360 - DNA, 1350 bp, Serratia marcescens
atggcaacgctacagggtctcggcccggttaactactatgattccatggttcctgattttcgcggagaagcgctccaggaaacgcaaaatcaagtaggtcgagcacaattgcagggattaattacacagaaccagcatgcacaacaacaggcaaagcaacagcaacaattccgccaagactggcagcaggcttacgcatctggcgatcctaaagcgcttgaagccattgtagccaagtatccagagcagatggaaaccgtacagaaggggatggggtttcgtgatgaaaaccaccgtatgcaattgggtaatgccgcccgcgatttacggttggcgttggcgtcaaagcaacccggagcggtaaatcaggctgcgcaggctcacgccgatacgctggcgtccataggctcaagtcccgaaggattattgcaaatgttgcaagatgatccgcaagggctcgcccgcactatcgacctggtcggcatgagtgcgctgggggtaaaggattattacgatacggaacataagcgcgatcagctggcagagacggtgcgtagtaataaagctggagagtccttgacggcaagaggacagaatattagtgcacaaaactcaatgcgtagtgctgggggggctgtaccggcttctgttcgggagtaccaatatttcaacagcttgtctccagagcaacaaaagacctatcttcgcgtaaggggccggccagatgctggcggagataacgttgtacagttggctgatggacgtacagtcaatattaccggcaaactccatgggcaaggtgccagcgctttctacgagggggttgatgattctgggaatatggttcgagttcctgctagtgctattgcagcaccggcaacatcggcagcaaatgcgcaaaattatgcgatgaaaaaagacatcgacctaattgcaaatgctggcgctgaccagcttaatttcatgactggtataactggtggttcgggtaccccctccattgatgcagaggcaagaagtcggctcccaggaaacaaagatcagcgccagctttataatgctactcggcgaattcaagggcgcatgcaaaaccaaggtgtggcagcggcgcgtgacatgggggccagcgggattaatactgtggcagaagctaagatgtatttccaaagcatgccacagattgattactcgagcccggaggctatgcagcagtctctaagcgatattcaggagtataccggcaactataacaggcaatatcaggtggacgttggcggcaagcgtaatactgacaatacgaaagctacaccgaagcaatcttctggttaccaatctctatggggtgattaa

SEQ ID NO: 440361 - DNA, 621 bp, Serratia marcescens
atgggcggtgcagtaagcggtgtaacaaacgcagtcggcggtgttctcggtggtgtaggggcaaaccaggctgcgaaacagcagattgcggccaacgatgaagccaagaatctgtggcagcagatgtatgacaagcaaatggggctttaccagccgttctacgatgctgggcaaagcggattgacgggcttattgaacctggtgaataaccgtcagggcgctctgaacgacttttacaactcaggagagtatgccgggttagcaaaccaggcgcgttatcagcaactggcgggcgctgaggcaaccggtgggttaggctcaacggcgaccggtaatgcattggcatccattgcaccgcagttagggcaaaattatttgaatagccgatacgacagtttgatggggttgactgggcttggatttaatagcgccggcaatatgtcccaagcgtctggtgattatgccaatgctatgtctgggttgctcactcagggcggacagtttaaggccggcaaagcggcgatcccttggcagactgccgcaagcgcgaatagcagtctcggcaacggtgtgtcacaagatgctaactcattttatgggttcctcggagggctgttctga

SEQ ID NO: 440362 - DNA, 489 bp, Serratia marcescens
atggcaagtgaagatatccagctcgtcgcaacacatattgatgctttgatgctgccggcgaacttctcacggccctatcagatgtacgtgttggagcaaggagccaacatggagaagatagccggcaaggcaaatagtgcaggccaggaggcggctaccgcacaagagcagaatgaagagcaggacaaaaagatagacgcccactccgaacaactggaggagttgtccgaagattacatctccaagagtgcaaccgtgccgcaaagtgtggcgtccacgtttggcgcgatctcttttaatgtgcaaggcgttaaggttgttggcgctcgtgtcgttggctttacggcagcaaccggaacggccctgaaaggggcatttgatgccgataaaaatttcgatcctgattccgcacctggtggcctgaaagaggcgagacaacgcattaaggctcttgaagatgcgctgcgccttcatggactaatcgactga

SEQ ID NO: 440363 - DNA, 1782 bp, Serratia marcescens
atgactaaagttcagttgccgttgatgcgcggcctgaaaaagcacgcggcaacggtagattatggagacgtgctccccgtcaatatgcttgctgttgtacagcctgtgttgaatgcgtccggttatatgcgttcgttccccggactgagcgagcgtcagagcgttgatggtgcttcgcgtggtgcggagtacaacaccaagcaaagcctcgtctatcgggtgtgtggcggctatctgtatgccggcggggagcagaccgaagccgttatcccaggaaaaggccgtgcgcgccttgcacacagctataacagccagggtataggggcagacggtaagttattgctttatcgttatgatgataaagaactgaaaacgctagagaactggcctgagcgtgttattgagcaagagggctatgagaagaccctgagcacttgggcgcatagcgaaggcagcagcgatgctttctatgttcccgaagaggcaatgaaggggaaaatctctatcacaatcacccctaccaatgctgctggcgtcagtggtgagggtatcacgattgaggaggaacgctggggcagtgaaattaaccaggaaaagccggatgatgacgttccatggttaacgaaaattattgtgacaggcaataagcgcagcggcacgcttgtaacgcttagctgggagttcaacgggccgggtgtagatgctagccaggtgagcgtagacctcaccgtcactgaggtggcgacagattacgcccaatacgaaatcggaaccgtaggagatatttgccacaatcgcagccgctatgtatgggtgaaagaaggctccgatacctttggcgtaacagacctggaggacgagagccaccctgacagattccgcccattctatcgcgctgagtctatgcctgatggcatccttggggttgataattggcgtgacctggtggtgtgttttggttcggcgaccattgaatatttttccctgacgggtagcagtgtggccacggatccgatttatatcgctcaaccgtctttgatggtgaatgttggcattgctggccgacactgcaaggtgcgttttggcgatagcttcgccatcctcagtcatccttccagcggtgcgccatctgtttacctcattgatagtggcagcaagaagcgtattgcgtcccgacagatagagaaaatgctgctctcgtattctgctgaggaattggcacaggctgtgatggaaagcgtgcgctttgaggctcatgaactgctgatcattcatttagcgcggcatgtgctctgttttgatgcttcagtatccgtcgacggtgcgcaatggtgcctgttggcctctgggttggatggagctccgcaccgtgcggttgactatctctatgatggtgccggcgtgagcgtggctgataaacgtgaagggcggatcggcgtgctggatatgtccagtgcggcgcaatatgacgatgccggcgagttgttgctgttcaccccattgctgaaagcggataacaccccgttgttcgatttcgaattggagtcttccggcggcctggctctgttcgctgaaaaactgtttctttcagcgacaactgacggcatcacctatggccgtgaacagttggttaaatcggatgaccgctaccgctacgacgctcggatattatggcctcaggttgggcgttgccgtaagaacatcgggttccgcgtgcgattgattacgcgcacgccggtatcgctggcgcagtgccagctaagggttggctatggcaagtga

SEQ ID NO: 440364 - DNA, 474 bp, Serratia marcescens
atgagactgaagagtaaaggtgatctggtccgcgcttcgttgcgcaaaatcggcgtggcctcaaatgccacgctaacggataccgagccgcaatccattgaagatagcctcgacgacctcgaaatgatgatggctgagtgggagaacggcgacagcgacaaggggatcgccctggggtatgcattctcagatgatggtgttccacctgggcctgatgacgtccactcactgccaacgtacagcctcaatgccgtcatttccaatctggctgtacgcattgccaacgattacggctttgacccgcctcaaacgttggtgttgaaagcgcgtcgtgggaaagaactgctgattaaggcgttgtctcgcaagcgcacccctgtgctgtcttaccctaatcgcatgccggttggctccggcaatcgtctgtttaatggtcagcgttatttccatcgcaaggacaaaaaccatgactaa

SEQ ID NO: 440365 - DNA, 558 bp, Serratia marcescens
atgtcccagatgatttataaacgcggcggcgacacgttggtatggggcaagcaagcccatgtgaaagtgatcgaggtcgacgaactggaagcgcatttagccgacggatgggtagatcatccatccaaactctcagccagtgaaaacgcgggtgagaacattgccggcgcaggttctgatgatattgataagggtgaaatctcggacggttatcacaccttcaatgagctttatgcgcatcgtgttcgcctgttctcaacgttaatgcgtgcctttgctgataaggcgtggtggagctttagcggcagtgatggggagaagtgggaaggctggattttggcgggtatcgctacacctgaaggggatgtgacctatcaccttcccgaaactgagatcccccatttgcccgaaggcacggaaattgaggttggcaaagaatgggatgggcatacagctgatgatgttctggagcgtttggttagcttgaacctgccagagccagaaaacaaaaagcgtggccgcaaaccaaaggcggaaaccaatgagactgaagagtaa

SEQ ID NO: 440366 - DNA, 1290 bp, Serratia marcescens
atggctcttaatgaaggtcaggtgaccacgttcgcgcttgatgaaatcatcaatacggtggagaacatgacaccgatggcgcagcgggtgaagaaatacactccaccggcaggatcaatgcagcgttcggataataccttctggatgcgtgttgaacaggaagcaccaacccaggaggggtgggatttgaccggcaaggagacggacctcctggaattgtcggttaaaggtaacatgggggagccggacaacgacttcttccagttgcgtgctgatgatttacgtgatgaacgctcgctgcgagcgcgtattaatgcgtcaggtctgaagctcgcaaacaacattgagaaagcgatcgccaagcaggccgttgatatgggctcgttggtgattaccaatccacaacccattggcaccaccaccggaagtggctgggacttcttggctgatgctgaagagctgatgtttgcgcgcgaattgaaccgtagcgccggcctgacctatttcctgaatgcgggggcttataagcgtgcggggcatgacctgaccaatcgtgacatgttcgggcgtattcctgaagaagcctacaagagcgggactatccagcgccaggtggccgggttcaatgaagtgctgcgctcgccgaaattgccaacgttaaccgcgtcatctgcaacagacttgaccgttgatggtgcgcagaaattcaagcctgaagcgtggcgtttggatatcgacgagaacaaggagaacgtagacaaccgcgtagcagtagtaaaactcagcgctggcacaggcttgaaacgcggcgacaaaatcagcttcgcaggcgtgaagtatttggcgcagatggccaagaacgtgcttacgcaagatgcgaccttctctgttgtagccgtcaatgggaacgaggtcaccattacaccgaagccggtagccctggacgatgattcactgacacctgaacagcgtgcctatgccaacgttaatacctccctggccgacaagatggccgtgaacattctcaatgtgaagaccaccgcatcaaacgtgttctgggcagatgattctattcgcctggtatctcaaccgttgccggtcaatcacgagctgttttccggcatgaaatcgcgttccttcgatattcctggtgtaggcatcagtggcgtttttgctacgcaaggggatatctccacctttaccggtaagtgtcgtattgcgctgtggtactccgctgttgcggtgcgccctgaggcgatcggtgttggtctggaaaatcagagcgcttaa

SEQ ID NO: 440367 - DNA, 915 bp, Serratia marcescens
atgaccgataccaccgaaattcaggccgctgaaggccaacccctgtccgtcgatcctgcggcggcatccgcaatcgatcctgcgtcaaatgccaatgatgcaacgggacaggagtccggctttgagattgtcttgaacgacgatgagggcagtaaacatcacccggagaaagatgcacctaacagtgaaaaggcccggttccgtattgagcgtaagcgccaacgggaattggagcagcaggccgaagctgttaagcgcggagagctgccggagcacttacgggtgactcctgagttaccccagcagccaaactacaacgacttcttctcggaagaagcgctggcgaagtatgactatgaccaaggccgcgcgcaggccgccttccaacaggcgaacagcgagtggcaaatgaaggccatggacgcacggagtagcgctgtcgcagagcaaggccgcaaaactcaggagtacacccagcaatcagcgcaatacgtcgatgctgcacgtaaacactatgacgcggcggagaacctcaatattcctgactatcaggctaaagaggactcgtttatgcagctggttccgcctcaagtcagtgcggacatcatgctgctgttccccgagaaatcccccgcgattatgtaccacctgggcgcaaacccagagaaaacgcgccaattactgacgctgaacccgcagcaagcgttgattgaactcacacgactatcagagcgtttaactctcaaaccgcgcggtaaacaggtttccggtgcgccggcggctgacgagcccgtaaacggccagccagccgcagccgctaaagcgtcgcttgaaaagcagatgaatgctgctgctgataagggcgacctggagacttatcgcaagattaaacagatgattaaggaattacgataa

SEQ ID NO: 440368 - DNA, 2175 bp, Serratia marcescens
atggcggacaatgacaagcagcgggacaggctgaacaccattctgacaatatttgatcgggactggtcgtccagcgacgaagcccgaaccgaagcttccaacgacttattcttcagccgcgtaagccagtgggatgactggttgagccaatacacgacattgcaatatcgtgggcaattcgatgttgtgcgccctgttgtgcgtaagcttgtatctgaaatgcgccagaatccggttgacgtgttataccgcccaaaagaacgcgcaacgccggatgcggctgataccctgatggggatgtaccgtactgacatgcgccataatacggcgaaaatatctgttaacgtggcagtgcgtgagcaggtagaggcgggtgtaggtgcatggcgcttggttaccgattatgaagatcaagacccgaccagtaacaaccaggtgatccgccgcctgcctatccatgaggcctgtacgcacgttatttgggacagcaatgccaagcagatggataaaagcgatgcgcggcatgtgacggtaatcaatgccatgagcttggacggttggaaggcatatgctgaagagttgggttttgaacctgacgaaatacctgattttcagcgccctgatccaggctggctattcccctggctgacaaatgacgtggtttatgtcggcgaatattacgaagttgaagaaaagaaagaaacggccttcatttatcaggacccattgacgggggagcctgtaagctatttcaaacgcgatattgcgagtgtgattgatgatctcgccgaacgtggcatgcagaaaattgcagagcgtaaagtaaagcgtcgtcgtgtttataagtcgattattacttcatcgtgcattctcaaagatagggaactgatcgccggcgagcacttacccataatccctgtttatggggagtgggggttcgcgggggataaggaaatatacgaaggcgtcgtgaggctcacgaaagacggccagcggctgcgcaatatgattatgtccttcaatgccgatattgttgccagggctccaaagaaaaaacctttcttttgggctgagcagattgaaggctatgagcatatgtatgacgggacggttgattacccgtattacctgttgaatcgtaccgatgaaaataatggtgacctgccaccgcagccgatcgcctatatggaaaacccggaagtgccacaggccaatgcttacctgctggaatcagtaacgggatccgttaaggaagtggcgacacttggtgttggcagtgaggccgtaagcaagaatgtggcgttcgatacggttaaccaactgaatatgcgtgccgatctggagacgtttgttttccaggataatcttgcaacggcaatgcgccgcgatggtgaggtttatgcgtcgatagtgaatgatatttacgacgtgccgcgccaagtgctggtgacgctccctgatggcagcgagaaggaagtgcagctgctgtcgcaggttgtcgattatcagaccggcgaaattgtcacattgaacgatatccgtggccggtatgagacttacaccgatgttggcccatcatatcaaagcatgaaggcacagcaccgcgctgaaatcctcgaattgctgggcgcaactcctcaagggacgcctgaattccagatgctgttattgcagtatttcaccttgctggacggtaagggcgtggaaatcatgcgtgaatatgccaacaagcaattggtcatgatggggattaaaaagcccgaaacacctgaagaaatacagatggtgcagcaggcggagcagcagcctaaagagccaacgcctgacatgcttattgcacaggggcaatacctcgccggccaagctgaattgctcaaggcgcagaatcagcaacagcaaattcaggtggatgccgccaaggttgaaagccagaaccaacttaacgccgccaaagtggcggaaatcttcaatggtatggacctggataaacaggccgcattccgtgacttcctgaagatgatgaatgcattccagcagcaaagtagcgatgacgccagagcgaacgtcgatttaatgctcaaaggcgcagagcagcaacataaacagcggctggatgtttctacccacctgcaatcgcagagacaaaatacctccaccggcagcgtagccgagtaa

SEQ ID NO: 440369 - DNA, 1452 bp, Serratia marcescens
atgggcaccatgacgctggagaaaaaacgtgagctaattctgttgcttgaagagaaaaagcggcgtttgaatgtttaccgttaccgctcgtattacgacacgcgctacgtgtggcaaaagaaattcatagcagcaacggcggagttcacccagtgtgctcttattgctgcgaaccgggtagggaagactgataccgcgacttatattgacgccattcacctgcttggtgattacccggatgattgggaagggcacaagttcgatcatgctcctcttgtctggtgcctgggctattcgggggaaaagtgccgtgatctgttacaggcggcgattattggcaaaaaggtggatggtgtttttagcggtggattaattccccctgagcgcattgtttcaactgaacccatgacggggacgccaaatgctgtacgttctgcctatatcaagcacagcagcggtgagttaagcaaaatacagttctggtcctatacacaggggcaacatgctctgatgggggacagcgttgactggtttcacattgatgaggagccagaagatcaaaccatttatccccaggtgctgacacgaacggctaccggtgaccgggggagaggtggtcgaggcattttgacgttcacgccagagaatggccgtactgaactggttattaaattgctggatgatccggctgattctcaattctgcatgaacgttggttgggatgacgccccgcaccttaccgaagaaaccaagaaaaacctccttgagtcgtacccggaacaccaaagggatatgcgcaccaaaggcattccgatgttggggcatgggcgtatttatgactttggggaggagtccataacctgtgagccattcgagattcctaaacactggatggtgattgatggaatggatttcggatgggaccacccgcaggcacaaatgcaactcgcgatagatctggataacgaatgtttctatgtcacgcgggcatggaaagccagtaagacatcaccttcagaagcgtggggggctgttaaatcgtgggcatccaaagttccaacggcgtggccgcaagatggtctgcaaacggaaaaggggagcgggttacagcagaaagcttattacgaaaccgccgggttcaaaatgctgcgtgaagaagcgcaatggccggatggctctcgttctgtcgaagctggattgtttgaaatttacgacctgatgcgccagggaaaattcaaggtatttcgtggccttcgtgattggtttgaagaatttaatttttatcatcgggatgataaaggccgcatcgttaaaaaacgtgatgacctgcttgatgccacccgatatgcctacatgatgcgccgttttgccaaacgttacggcgaactgtttaaacccaaagagaaaaaaattccagcgccaatacggcctattccacgccccacgaggtag

SEQ ID NO: 440370 - DNA, 303 bp, Serratia marcescens
atgcgggcgatgacaatcgcgggcctgtgtttgtttttggatatcagcgatgagacgtgggcaaactatcggtccagggaagatttttttggaatcatttccagggttgaaaccatcatttacacgcagaaatttacaggtgcagcggctgacttgctgaacgccaacattatttcgcgagagcttgggctgactgacaagcacgaagtgaaaagcacgattatcgacatgacggaagaagagcttgaccagcgtattaaggagctgacagatgggcaccatgacgctggagaaaaaacgtga

SEQ ID NO: 440371 - DNA, 207 bp, Serratia marcescens
atgatgggggccggtagcggtggcatctgtgccgtgcaggaggccaagcacagcgtcaggagcgcggccacgggcgcactcatcgtttttgatagcatcctgatacttcctttgatagatttcggcctgctggcgcagctgctgttctcgttgctgttgtgctgcttccagggctctattcttccgctcttgttcttgcagtgttga

SEQ ID NO: 440372 - DNA, 321 bp, Serratia marcescens
atgaaaaagatcagttacaccaaaatgagagaagagctggctgatgttctggatatgcttcgaaacggtgaagatatcacaattacacagcgcgggcgtcctgacataacaatttcggcaagccgggagcgttatgcttcggcattatacatttcgtataaagatagcgataagtatgaaaaagcgtcttgttctagcaagaacgaacaagctaaatttagaattgttatcaattctaaaggtaaggtatcctttaaagatgcgaaggaaaaaacgcaaagcaagcatgctgcaataattaaagcattggaagataaatga

SEQ ID NO: 440373 - DNA, 408 bp, Serratia marcescens
atgagagatatccaggaggttctatctcgctggggtgtgtgggctcgtgataatagcggagttgattactcccatattgctgccggtttcaaagggcttttgccacagcagaagggcaagccatcttgcagcgacagtgacgggctgatcatcgatggagctgtacgccgcctgcgtgatgtgcgcaaacccgatgagctacatctgctgatgtctcactatgtggatggtgagtccaaatcgtctattgctcgccggaagaaatgtagtgaacgtgaggtgcggcggcagttacagattgctgaaagcttcatcgacggctgtttatgcatgcttgacgtgaagctagatatggatgcatacgttgaaaaaatactacctcggcccgaaaaaactgttgtaatgtga

SEQ ID NO: 440374 - DNA, 408 bp, Serratia marcescens
atgaacggtttaacgctgaagcaggggaaagtcctgaattttattaagcagtttattgctgagaatggttgtccaccgacaagggttgagatagccgagggttttggttggaaatcccccaatgcagtagagattcatctgcgggggttgtgtaccaaaggggcgataaatatcaagcctggcgtgtcgcgtgggatccgagtcctggaggatgacaaagaggtcacaatcacgcgcgcgcagtaccggttgatgtgcaatgcgctcatcaacaccggtaacttgaatgaacagcttttactgctctcaactgccgataagcagtcggaaaaaattcatcatcaagccagcaagcttttacagacaattcgtcagcagctgtctgaagctgtgggagagagcgcatga

SEQ ID NO: 440375 - DNA, 471 bp, Serratia marcescens
atgaccgatgaaacgaacatccccgacaagagcgataacgtgctgtcgttcaccaagcgctttgacgagaactccgaaattcgcgaaatgcgcaatctgacccaggagccgaagcccgcgaacttgccttatcgctgtacgcacatgaagttgcatgttgacagtcatcaccgatcgctgacgtgccggcgctgcggtgccgccgtggacccgtttgactggattaattcggttgctgagggcgaaaccaaggtggaatgggaactgaaggagttgcgccgtgaaatcaccgatcaccggcagggactggagaagctgaagcgcgaagaggtgaactgcaaggcccggattaaaaacgccagcttcaagctcaacgacctccgaattgagactgagaaggtcgagaaagagcttaaatttctgactgaccgcctggagcaagtgcgcgggctgcgaggagcgaaggcgtga

SEQ ID NO: 440376 - DNA, 198 bp, Serratia marcescens
atggagcgattacctttaccggcctatgtgcagatccatgggcagggcaagacagcacaagagcttggcgtttaccaaagcgccatcagcaaggctttaaaaaataaacgaaatattactgttttggtgcacgaaagcgggatggttgaggctgaggagctacggcccttcccgagcctaagtgcaaagcgcaaatga

SEQ ID NO: 440377 - DNA, 159 bp, Serratia marcescens
atgaacactactcacgatatgtgcaacaacgaaacagtaaagaccggcgttttcccgaacagcgacagcacgtttacagcaatgacgttcacaaagagtaaacctttcaaaactgagtctgccgcgaagcgctggtttgcacgccaaatggccgactaa

SEQ ID NO: 440378 - DNA, 360 bp, Serratia marcescens
atgagctgtggataccaaggttatgaatttggcgcgcattacccagacagcatttgttgcgatggctatctgtgggatgcagacgcttacgaagatggcatgttgaccagcggcggcgatattccctgccctcagtgcaactgcgaagcatggatggcgtatcaccgagaagacatcatcggaattggctttgaacagggtgatgccggagagaaaccgaaattactgatgtatggcggttacccagaagtaatacgcgccgatagccaactgatgaaaaaagcttggcgttggattaaacgcggttactaccaaggaaaaaaatcagccgcgcaagataagctttcctccccaaactaa

SEQ ID NO: 440379 - DNA, 312 bp, Serratia marcescens
atgaaagaaaatgttcaggttcacattcaacggctccatgccaatattttttccatgagcattgaaaacgaaagcatcggttatcttttcgtaaatgacgaaagcgaaaataaaagtgaaaaagtcgccgtcgtaaaaactaacggcgaaaacatggggaattattgctgtatgcgccacgctactaacgctgcggtaaaagcccacctgaatcttggcgacgattacatcgtactcgataatgatacccctatcgacctaatcaaaaagctcattcttgcctcactgttatctgaaatcacccgtcattaa

SEQ ID NO: 440380 - DNA, 162 bp, Serratia marcescens
atgtcagaaattaaattcaaccggcgtgccggccatttataccgcctaaccggcgatgatgtcactaactatggacgcagcgaatcatccaagggagaaactgtgttttattcaaccatatttattctcggaattatggcgttgggggttgtatggaactga

SEQ ID NO: 440381 - DNA, 927 bp, Serratia marcescens
atgaaaggcatcgacttattcgcaggccttggcggttcgtccaccggtgccagcaaagccggcgttgatattgtttgggccgccaatcattggcaagcagccgttgatgtccacgcgcttaatcatcctgacaccattcacgcatgccaggatctgcatcaggccgactggggaaaagtacgtgatttagttcctaaactcgaccttttgctggcctctccgtgctgccagggacatagtaaagcacgcggtaaagcaaacggtaacccacagcacgatgcaagccgctcaacagcatgggcggttcctgctgctgctgaagtgttgaaacccgagaagctcatcattgagaacgtccctgagtttctgcaatggtccttgttccctgcttgggaattcgcaatgcaacgtctcgggtattctctgagctcacacatagttgactgtgccgatctgggagtgccacagaaccgcattcgcctgtttattatctgcacccgcagcaagaacccattgatactgaaacttccaaaactaccgcatgtttccgctgagtcattcattgattttgatgctggaaggtggtcatcagtaaacaagctggggcgcgcgtcggcaacactcgacagagttgcaaacggccgcgcccaattcggcgagcgattccttatttcgtactacggaaataccaagagcgggcgttctttgaatcgcccgattgggactatcacaacccgagaccgctgggctgttgttaacggcgaccgcatgcgcatcctgacaaaggaagaaaacatgctggcgatgtcgtttccttccgactacatcaaaccgccatcacacaagttagtcgttcatatggccggcaatgctgtgccaccaaaagctatgtatcagatggtgaaagcactaaaggagcaagcgtga

SEQ ID NO: 440382 - DNA, 222 bp, Serratia marcescens
atggctacgcctaagagcaatccaactgagaaaaatgcccaaggttggggatttccctacctagcgaaaaaagcgcattactttgccaacggtagcgctgaaagcctgtgcggtaaatggctcttcactggcatcctaattgatgagcaccacgaacacccggataactgctcggcctgcatgcgcaaacgggccaaactccaggagaagaacggtgagtga

SEQ ID NO: 440383 - DNA, 516 bp, Serratia marcescens
atggataaattcagtgaactgaaagcggccgcaatggccgcaactcctgggccgtggggatcggtatacgacgactggagcgacggtgatgatgcgctaatttcgtctgaatccagagacggaatggtggctatcgcgaaaatcgagggcggtggccctgattctggttatgacgagccattcagcaccgagcagcaggcaaacgcacggtacatcactgctgctaaccctgctgtcgttctcgccctgttggcagagcgcgattcaaaccaacagagctaccacaatgccatggaagaactgaggattgaacgagcacaacggcaggcagcagatcagcgcatctccgaactggaaaccaagatggcaaagccgatccaaatcgtgaactacgacgagttcttcatatgccatgtatcaggtgccagcgatgactactgcaagggctgggttgatgggcgtaatgctgctgcgcgtgacgttgagaaagctggtttcaccgtagagggagattaa

SEQ ID NO: 440384 - DNA, 177 bp, Serratia marcescens
atgacactatcgaccaatctgcgaatgtgcatctacacggcagcaatctgggcgctgggctacggcctcgactggggaatcgttaacagcgaatggtttcgactaggaatggctacggtcgccggaatcggcatcatcggattcgcatctcattttgctatggggaaaatcaaatga

SEQ ID NO: 440385 - DNA, 735 bp, Serratia marcescens
atgacactaacgactgaaaaactcaacgaaatttacgaaaacccggagcagtgtagctattctgaaattcaggaaatggccgcgatgttggctgaccgggaagtgcggtctatgtatcagtaccgcatgcacaatccgtacaacggccaggtgacggattgggaaaccatcaagcctgaacaggtagacctcatcctgaaggaaactattgcggccaacgttgagtttcgaatcattgccgccacgccagcgccaaccaatgcgcaaatcgcggggtatttcgtgcggcagcgcccccaatgggacgaacgcgctccgtggacgccttggaaagaggttgatgaggcgtcatacgctgacattgtcaaaatcattgcgaccggcgaagcgtactgcgggtggttctacgacaaccgtatcctttacacagcaccgccagcgccagcagtggtcaatcttccggctgagttctacagcgacgaagggatagtggttcagctcgaaaaaatgatggctgctctcgcggtttctggcgtgaaatacgaacgctggagtgatgctaaccgcaccacaattctaatccaacctgtaagacaaaatcacaagttagtgccaactgaaccgacgccaaaacaatgggccgccggagtcaaagccatggatgcagggatcgataaagtaacgctcgtatacaaagcgatggtggacagtgcaccggaggaaggcagtgattga

SEQ ID NO: 440386 - DNA, 510 bp, Serratia marcescens
atgaacagccaactcgtgcccgttttcgacggaaccatcagcaacgaatctactttgctttgtaatgctcgcgaccttcataaattccttggtgtaaaacgcgacttttctacctggataaatgagcgtgtttcagagtatgaattcatcgcaaacctagactacatcgagttttccccaaattcggggaaaaccggcgggcgtcgtcgcaaggactatcacctaaccctcgacaccgccaaagagctcgccatggttgaacgtaacgagaaaggccggcaggttagacgctactttatcgagtgtgagaaacggattcataatcaggtcgcggtatccccgcaacaaaaaccagtcacgccaccccaaccggcttatatctcctgtcgggttctgcatacttataatgaagtggggataatagttagctctcaggtcgccagggtagatgaaatgttaaccagccccaaagggttcatcgaactaatgatgcgccgccaaggcctataa

SEQ ID NO: 440387 - DNA, 1164 bp, Serratia marcescens
atgtcaatcaaacaacgcggcggcatctggcattgcgacttcgtcacgccaggcggcgaccgagttagacaatctcttgggacagcggacaagagggaagcacaggaacttcacgatcgtttgaaagccgatgcatggaggcaggcgaaacttggagagtgcccaaggaaaactttcgatgaagcctgtctaagatggctgcgtgaaaaaagtgataagcgcagcctggatgatgacaaatcaaggatagggttttggcttgagcatttcagggggattgagctttctgaaattacagaggtgaaaatctatgacgccgtggacaacatgatcaatcggcgtcacctcctgaactgggaagcgatgagggatagcagattaaggtctgggagaccgataccggagtacaaacccaagcccgtagcacaagggacacaggcaactcacttagccttcatccgggcgctgttgaagctggccgccggaaaatggaagtggcttgataaagcgccagccatcacatcaccaaagcccaaaaacacgcgggtaaggtggttaacccctgatgagtcacagcggctatttgcagaactcgcccctcactttttccctgttgtcatgatggctttgaacactggcttgagacgctcaaacgtcattaaccttgaatggtcacaaatcaacatggagcaaaagatagcgtgggttcacccggaagatgccaagtcaggaaaggcgattggtattcctctaaacgaaactgcatgcggaattttgcgcggacaaattgggaagcacgacagatgggtattcgttcacaccaaagcagcataccgcaatgacggaacgaagacggcaacggtaaggaaaatgcgcggcgacagcaacaaagcctggcagggcgctctgcgccgcgctggtataaagaacttccgcttccatgacctcaggcatacatgggcaagctggcttgttcaatctggggtttccctacttgcccttaaagaaatgggcggctgggaaagtttggaaatggtacaacggtatgcccatttggcagcaagccaattagcggccaacgccaacaaattggatgccattttgcagcgcaatggcacaaatacggcacaacctaacaacgtggagtatctaaagagagggtaa

SEQ ID NO: 440388 - DNA, 516 bp, Serratia marcescens
atgaacccgagtgccttgcagggaaataccaaagcaatatcactcttgttccctatggaagcggtatttgagtcatttgttgcacaaacccttcccgacgaattaccccctcaactcaaagttaaatcgcaggctaccacttattccttggtgaagcatgggcctaatgactgctttaaacttcgcccagacttattgattcagtcgcgccaaccggctcaaacaaaaatggtgatggacacaaaatggaagctggtggataacaacccgcaaaaaaaatcactgtacgggctggcgcaatctgacttctatcaaatgtttgcctatggccaaaaatatcttgatgggaaaggcgagatgtatctgatttaccctgcgcatgatgactttagccagccgatacaacagcattttggtttctcagacgatttaaaattatgggtggtgccatattttattacggcaaagcgtggtaagaaagtgatatggcctgatgagacattcacttgcatttga

SEQ ID NO: 440389 - DNA, 726 bp, Serratia marcescens
  misc_feature (6)..(15): n is a, c, g, or t
atgttnnnnnnnnnnccaatgagcgagttgaatgttcatgtttattctggtattcgcactggtttctcaagcgcatacatttttccagacaacggggaatttattttttcccaagaggttgatgaaaaactacttaggccaataattttgccagctaatataaaaaaatgggccggaaacaaaagaatgcataagatacttttcattcctcataagacacaaataaatgatgaggaggttctggagtatttggaaaaatataaggaccgcttatcctcacgtactgaagcaaaaaataattattggtatgcattgagagtgtgtaattattatgatgaaatgcttaaaagaaaaatagcattccctgatttgtcatcaacgcaacgattttccattgttgaaaaaggcactctaatacctgatggtgcatattttttgaatactgataatctggttatccttggaatattaaatagttctttagcaagggaatattttgttaacaactgctcaagtgtaggtaatttaaacacaaaaggtagatttagatttaaaaaagaatttgtaaaaaaattcccacttcctaaaaatgtatttgagaatggccccattcagaatgaaattaaaattttagttgaaaaattgattagcattggggataataaagagttatcctgtgaaattgataggctgatcgccaagctgtatcgggaagaagatgattga

SEQ ID NO: 440390 - DNA, 1125 bp, Serratia marcescens
atgattgataaaattttaggtaaagaagtgtattcttcaacgggattgaaaccaacttgttttgatttgttttccggggccggtgggcttagtgttggttttgcaatggctggcggcactcctctaggggcagtagatattgataatgattctataactacatataaaaagaatttccctatggctcaagatgttgcttgctgtccaattgaagagtggaagccgcgaactgtacccggaaaggttgatatcattattggaggtcctccctgccaaggtttttctttggctagaggacaacgttttttagatgattctagaaaccacttgtacaaatacttcgttgatttagttggtttatacagaccaaaatggctagtgatggaaaatgttgagggcatcactaatattggtggaggagttattttacaacagataatcgaagattttgcaaatatcggttatgaattagattataaagtaatcaacatggcattatacggcgtcccgcaattacgcaagcgagctattttcgttggaaataatcaaggggtaaagtttaattggcctgaggtgacgcattatgataatagaaaaaacaaacagcatcctaatgtagatgcacaactagagccatttaattctgttaactatgcattaagtgatttatttttaccccagggtaactatttttcacaccgagctaatgcacaaatgagggggcctcgaaatcgtaacgctcattcagagcctgcatttactctaagagttagaggggatgaatttgcattatgtgaaaatccggctacatcagcttttattccgggccccgcaccagatgaagaggtaattttactcgaaccacaaaacgagtttcatgaattgatgaggaatagatacccttcatggattaaatgtgagaagttaaaaagtatcaaatataaaaaactacctgagctaataggtacaaggcgattgactattcgagaacaagcacgtcttcaaacatttcccgactgggttcagtttgaagggaagattacatcaaaagctcgacaaattggaaatgcagtacctccactcttttctgcacaattatttgcaaaagtttttgaattgctataa

SEQ ID NO: 440391 - DNA, 1200 bp, Serratia marcescens
gtgttagagtcattgaatgactgcgcatataataatattatttatgaaagtttttctgatttgacccaattcaaaacatcggcagtaagatttagtactgctgagcaggcacttatttttgccagagaactctatacaagaaataatgaacaggaaactttaaatgagtgccattcatttgtttttcagagtaaacttaaaggttttgaagagccttatgagttaaagttttcctttgttgagcaacgtgattcattaataccatcgaatataaatattatcatagggcgaaatggcacaggaaaaacgcaattattatcagatttagcaaaaacaatatctggctacggctatgatgataaaaatgaattggttagtgcaaggaaaaataaattcaaaaatactacacatggatttggtaatgtgatagttgtatcttattccgcatttgataattttgaaatcccagggaaaaatgatgaagaaataaaagaattggattctcaggggcatatatttggttataagtactgtggtttaagagaaagaatagatggcattaatgagtataagcttaaaaatgtagatgaagtggcagatgaattcaaaaagaattatgaaaaaattaaagaagatggggcattaagcgattggaatgaaaaaatcaaacctgtaattaatgacccttcttttagatttttagataagaggcagtttataaaaagttttgacaaattaagttcaggtcaaaaaattgttctttctattttaagtagtatttatgagcatatcgaagataacagtctcgtcattatagatgaacctgaaactcatcttcatccatctctgattgcgtctttcatgcattcagttcgagctatgctcactaagtttaattcatacgcaataattgcaactcattcacctgttatattacaagaaacaccttctaaattcgtacaggtattagatggtacaatattatctccgaaagtaaaaaaactaaaaaaagaatgttttggtgaggaaatttcaactctcacagaagatgtgtttaaagtttcaatagaagactctaatttctatcaaacactaactacattagctggagatggatattctgcagatgatgctgataaattatttgggaaacgtttaggtatgactgcaagatctttcttaagttcattcggtaaataa

SEQ ID NO: 440392 - DNA, 843 bp, Serratia marcescens
atgagaaatttgccgatcccagcgacagacgataaaatttctttagatactattataagtgaaaaacgtggtatcaataaaacaaaccttactgcgatatctcaaaatgtaaaaaatgcatatgacatgcatttagctaatagtacggcacaagagaatcttgttccgattgtattaagtagcgaccaaaaggttagtttgcatcatgcgtacacatccaaaactaagacttttaaaacaataagtagtaatattctttttcctccaaatatagatgattttgatgagtgtccatattgtggcatcggagatccatcaacactcgatcactatatcccaaaagaattattcccagaattttcagttttttcaaaaaaccttatccccatttgtgcaacatgtaatagttcttataaaaaaacgaagtttaaaatgcgaaatggaaagcgaatttttattcatacatattatgatggatttcccgatctatattttttaactgctaacattatcgttaatcaaaagattaaaattgattttacaattaattctcaaattttagaacctgatttttcagagttaattcataatcacttcactcatttaggattgaataaacgctttaaaattaaagctgttgctgagatatcgcgtaaaaaagcaacttttcaaaggatatttaacacaaatcactctgcacaggaattgtctggcttcttacatgaagaggccattagtttggagaggagttactcaaaaaaccattggaaaacagctttatatatagctcttagtaattgcatggatttttgtaataatggctttctcaaaccattaaaatag

SEQ ID NO: 440393 - DNA, 201 bp, Serratia marcescens
atgtacttgaaccggcttcacaccataaaactgatcccagggttattggtggcaatatggctggcaaccatatcgttgaccttattcgcgagtttggacaaacaaaacttttacgacctgatatcaaaaaaccggtatggcacaactctcttcgcttaccgcatggagaaaaattgtcagaagcacaatgggcaaccgtag

SEQ ID NO: 440394 - DNA, 585 bp, Serratia marcescens
atgagtgcaatcgatactttaagggagtatgccgaagtatggcggctatttggtagtatgccagatgatgcaaccctgagtgctgaggtttcggctctttatcttggtgtaagtgtcaaaacattggctcgttatcgccagactggtaatggccctgcttatatccaatatcaggcagaagacagcaaagcaaggaatcaacgagtaaattatcttttaggtgatttaagaacatggcgtgatcgtcataaggtcagcagcacaatggaggctgcacaggtccgtggactggcttttacttcgttggttgactttatcgaaccggaacctttctggactattgataataaaatttattcacatgttcttactgtttctgacgaaatattcaaggaactattaaatacaagccgtgcagaagttatctggatctctgtggaaaaagttttgtctgaggactggcatactgcgagagaacggcagagatggaatgatttgtttgttggggttatgacaggattggtagatgcttgtgtggctgagcaggagaggcatgtattgtatgaagaatttttgcaatcataa

SEQ ID NO: 440395 - DNA, 147 bp, Serratia marcescens
atgcgcttgagaaaccagtgcgaataccagaataaacatgaacatttaactcgctcattgggattgtatttttataaattgcaaatgtattttttaatgagctcatggattcatgaaaagaccacccatctgttccacttcgattga

SEQ ID NO: 440396 - DNA, 1425 bp, Serratia marcescens
atgaatggccctggcaatcttctcctgatacgcgctactgcccagcagccgctcctccgtgctattgctgataaatccggtttccaccagcagcgagggaatatccggcgaacgcagcacgcccaggctggcgtgttccggccggcgtttatgcaacgatccgacgctctgcagttgctgcagcaccttcaccgccacgtcgtatcccacgcgctgcgagtggccgaactgcagatccagtaccgcctggctcaggtaagggtcagcctggctgttggccagcagatcgccggcgccgccgagcagctcggactgtttctcatgctgttcgagccagccggccatttcgctgttggcgcggcgattggacagcacccagacggaggccccgctggcgctgcggtttggcgcggcgtcggcgtggatggagaccagcacgttggcgccctgtttacgcgccacatcggagcgccccatcaccgagatgaaatagtcgccggtacgggtcagcaccggtttgaactgcggatcggcgtccagcatcgcctgcaggcggcgcgcgatggcgatggtgacattcttttctttcagcccgctcgggccaatggcgcccggatcctggccgccgtggccggcgtcgatcgctaccaccacccgatcgccggaaccggcggaaacgcggctgctgcgcggcgtgacctctgtggcggtgcctgcgaccacggtctgtttattggtgaagggattcgatcctgtcggcgctttgcgcagcggcggctccggcgcttcacgcaccgcgaccggcgcctggcgcggtggctggctgaccgtgaccggcgcctgacgcggcggtggattgaccgcaaccggcgcaggcgtttgcaccggcgctttacgcaccacggtattggcgccgccttcggccgtaatggtgaacaccacggtatgcacgccgccgttctggcgggtggcgacgcgggttttggcgcgctgggtcagatcaaacaccaggcgcacgctctgcgcgtctttcggcgcgctggaacgaatgcttttcaccaggttttgcccgctgaaattgagcggaagaccgccgaccttgcccttctggttaacgtccagcaccacgcgttccgggccgtgcagcgggaaaaatgtatagtccggcgggccattgaagctcaccgacaccgtcgcttcgcgttgggcgttggacactttgatatcggacagcgaggacgccgccagcgcgttcaacgcgccgagcggccccagcacggcgatcagcatgatgaccgcaaattttttcaacacgtgcgtcattgcagcatcatccctgtgatccatgaatgcggtctaacagctggctgccgtatgcggaaatcgcctcgatcttcgcctctcgcccctcgccctgatagctaa

SEQ ID NO: 440397 - DNA, 861 bp, Serratia marcescens
atgagcaagatgattaccacagacgatttaagagagctttcaatcactttctgtcccgagttggaatatattatttataataactcactagagtcaatatccacttgggggaaaggactacaaacaggaaagtcgatagaatttataacattattaagtatattgcataatgctaagagattggggttcagtatagaaatcccgcaaattttttttgaagagccagctttgttttatcaaagaaatgttattccttatcatcatggagcacaggctggccattctaattcaattagagacaatataccattaaacttaaaatttctggcatcgctaacaccaaaagctattttaaaatccccagataatagaacatttttattattcagagaggggcatccaatacatcttattgattatgctacaaaaaacaaggggcaattttattttgaaagaccggatattgtcttatgtgaggctcaaataataaacacgctggctcaaggagttattaatttccactatatctcatgtggaaaagaaatctctggttctctgaagacaattaatcaaccaacgataccattaattacatacaataacactggtgttacaacagaatttactgcgggaatcgtagaatgtagtgtgggtaaaaattcgagcaatgcagatacgcaattgctttcatataaaaaaatattcaactccaacgctacttctattttagttaatgggaaaaaagacattacgaaccattatgatatacaggtaactcttgacctaaataattttagacctgagtcatttacctcaattctaaactctggagtattaacctttttgaaaaattttatttaa

SEQ ID NO: 440398 - DNA, 1200 bp, Serratia marcescens
atgaaaggtatgcagaaaatcaagagaggtaagcaatttacaggagtagttgtctatgtacttgaaccggcttcacaccataaaactgatcccagggttattggtggcaatatggctggcaaccatatcgttgaccttattcgcgagtttggacaaacaaaacttttacgacctgatatcaaaaaaccggtatggcacaactctcttcgcttaccgcatggagaaaaattgtcagaagcacaatgggcaaccgtagccgacgactatatgtcccgtatgggttttaatgatacacatcttcgttgttatgttcttcataatgatgaggtgggacagcatattcacattattgccagtcgtatcgatattactgatggaaagttgtatcttggaaaaaatgagaaccttatcagcactcgtattatcagtgagcttgaaagaatacatggtctcacagaaacagcaactacttcaaaccgacgatctcagagcataaagaagctttcgcgcaacgaaaagatgctctctgaacgaacggcaactccctgcccaaaagccgctttgcaaacttgcatcgataatgtgttagccaatcgcccagatttgttatcgttcattcagcaactggaacaagtgggtgtaacctgccagcccaacattgcttcgacgggcaaaatgaatggtttttcatttgaatttcagggaattgccttcaaagcttcgcagcttgggaaaaggtatgcctggtcaaatattcagacacttattgattactcgcctggacatgtaaaactacttaatacaagatctaaatttgctccagctccttgtaaacagcaagaagcacaacatcccagcagagaaactattctcgataaactactacaactcgacgagcaagtcagaaatgaaagggagaatgaacttgcccaaaccatccagttgaaccaaaaactacgctttacggcccatcagatatccagacaacaccaatcccacttccagatgtggcttccatttcttagcaagctcatacaactgctcagacagttggatagttctctgttgtatgcgaccgctcgtccctttagacaaatttatcatcttcacttacttgcacacaaccctgagtcttttgacaaacagttttcagaacaatcagttagtaaaactcacagctacaagccacaccacaattag

SEQ ID NO: 440399 - DNA, 180 bp, Serratia marcescens
atgctccgccatgccttcgtctatacgccctgcataagtagcctgaaattctttggcttcctcgaggatatcgcggatgacctgactaccgttttgctcaaggaatccgtcaattacatcctcggccgtttcggcatcagtaaacagatcataatcctgaccgaagtaaatactgaataa

SEQ ID NO: 440400 - DNA, 1521 bp, Serratia marcescens
atggatcaggtgcaccggcccccgctcttgcaacaaccgcgcataagcgcccggatcctctttctcccctccactaatcagatatttcaactgcgccagtgcgccgctgatgctgtgcacatactgattgaacagcgcagtggtcaagaacagcgtggtgatgcgatggcgttgcagttcggccgccagacgctcggcctccatcatcacctccggcgcgatcaccaccagcgcaccgccattcaacagggcggcccaaacctccatcgtgctggcatcaaatgccggattggcggcaaaggcaatgcggtcgtcggcgtcaaaagcggcgtagcggttgttgcgcaccagacgcgtgatcccctggtgcggcgtcatgacgcctttcggcgtaccggtcgagccggaggtatacatgatgtaagccgtcgcgccgctcgacacgcgcaacgccgggttaccgttatgatcttcagcttcgcgatcctcgaccgtcagctgcgggatctcctcgtcgccgatggcgtccgtcaacatcaggcaggcgccgctgtcattggcgatccacgcctgacgcgcggccggcaattgcggatcgatgggcacatacgccgccccggccttgattaccgccaattgggcgcagaccagttcgatgctgcgcgccagccgcaccgcgacccggtcgcccggttgtacgccgcgctcaatcagccgatgcgccaaccggttggcgcgcgcattcaactgtgcgtagctcagccgttgcgcatcctggatcaaagcgatggcctgcggcgtcagccgcgcctgctgttcaaacagttcgtgcacgcaggtatccgccgggtaagcttccgccgtatgattccagcggcacagctgcagcgcatactcttcatccggcatcacctccagttcacagaccggtgtctgaggcgcctgctccaatgcctgcgccaatgcgctcaacgcctgcgccatatagccacacacgcgctgcgcttcaatcggctgcctgacctgcgccgtcaggcccagcgaatcaccgccgtcctcgaccgacagcacgaacggatagttggtgcgttcctggctatcgagcagcgtcacgccggtcggcaatgcggtgtcctcgccgctgttatgccggtagttcagcagggcactgaacagcggcgtgcccgcggcgacgccgctgcagcgctgcgccaacgccagcggcgcatgctcatgggccagcagcccgctcagccggatgtgcgcctgcaacaccgccgattccgcgccgacctcgttgacatccagccgcagcggcaacgtattgataaacaatccgagcgcccgttccgccccgtctccggcctgcatgcggcccaacaatacggtgccgaataccacctcatcgcggccggtagcgcgcgccaacacctgcgcccaggccaggtggcacaggctggccaggctgacgcccagccgccgcgcctgccgccgcagctgttggttgagcgcaggcggtaa

SEQ ID NO: 440401 - DNA, 579 bp, Serratia marcescens
atggatataaacccagcgaagaagcaactaagatttgcacggcgtgctttggatgatatgaaagcatcacaagatttggatgatgcggagagaaattggaatagttttctcaatcacatcgagcaggttttcgaaaaaataaaaatagcttgctctacagtttgtaaaaaatatccgtcatttatttcaccaatcaatgcccaaagaagtagcgatccattacttgtttatctcaagcaagctcggaatgccttacaccatggcattaaagagatcgctgagcgggatccagcgcacgtaacacaaactataagcggtgatgttgtatctgttgataagttggtaatgaaacaaggcgttgtggtggagtactcaggcagcaaccccattcatacctaccttgtccctgaaagaatcgttgtagttgatatcgtaaatagaatggtgcgttatcctgttccaacgcatcatttaggctgcccaatacacaccttaaacccaatagaaataggtgaacatggattcgcttattatgataatttcctgtcaatggttgaggctgaattaattaacaattaa

SEQ ID NO: 440402 - DNA, 633 bp, Serratia marcescens
atggcgccgggctccgcgaatcaatcccgcagcttggggatcatcaaatgctcccgcctcctgctctaccgagttttgcaccgttgcattaagctgctggcgctgcgcagatgcggtttgactgatttcgaagtttttatacgtactggcgcggcggatttgcgcggctttccattgagcatcgaagtaaatttgctggcttggaggtactcttttcctggcctcgtcataatcggttgcgtcttgcttatccatgtcaacgccgacgccagcggaattgaacccctgccgtgtaacaagcgcgcctgtttcggggttttcccaccgatcgttagacttcgcttcgaggtcggtaaggatcgcctgagtcgctgccaaatctgctttatcctggacgcgctgaatatcgccagcggcctgcccaacagcgacgccgaggccagatactgcaccaccaattgcacccgcccccctaacatcgactcgagtaggattaacctccggcgtcacattgccaaaatttccggttggtatccgcatcagcgcacccccatattcgagaacatgttattcgacgccgcggtaccggtattcgtcgtcgttgttagattggcttttttccagccggagtaa

SEQ ID NO: 440403 - DNA, 2226 bp, Serratia marcescens
atgtcggtacctaaccagaccccatacaacatttatacggccaacggcctgacaactgttttcccatacgaattttacctgctgaatgccggtgatttggctgtatccctcaatggctcagtgatcacttccggctatacgatttccggcgttggcaacgtggatggcggcgatgtttcatttctgaccccgccggcgaatggcgttaccgttatgattgagcgcgtgatccctacctatcgcctgaccgattaccaggacaacggcgatctactggcagataccgtaaacaaggattttgatcggctgtggatggccattcagcaggcgtttatttatcttggccttgcgctgacgcgcccgttgcttggcggcccattcaatgcaaaagggttccgaatcgaaaacctcggcaatccggttaatggttcagatgcggcaaccaaaaattacgttgatgaaacagggaaaaccaatcttcagcgggtattgcgattccctgaaaacgtagctgcgatgcctgatgctgaaacgcgtggccattcactccagggctataccgaagagggtagaccaacccccgtattttcgatgactgatactgccgatcttgcgttaaaacttgccagcaccggcggggcggggctggttggttttgacattgaaaagacttacccaattgcaaccattggccaccagttcactaatatttttcgcaatgcacagcaccttgaattttattacgacaagcttggcgattgggatgaggcatattttcaagcccagatgaacgtattccgccttggattctcacctgagatacttcttcccggcggagttgtcgatatttacaggccgtttttcggtggcccggcaattggtgacctgattcacgcccgccatccagagcttggcctgtataacggggatggaacttataaggggacatggccgcttattcttaaaggtgtctacaagaagaatgaggacgggttaactaacccgtatacagggacacaaattgttttccacggctgcgcagatcaaagcgataacacatggcgtgattttggcgtaatacattctgcgcctacaaatctatctgagagacgcgtccctgtaccagtgaaacagtggtttgggacggttaaggttgatgacctaaatattcgtgtccttaaccgagataatagtcgccatggtaaatgccacggcatctatagcttctacggtccaaagagcgaagttaataaagtcgtcgtctaccagccctatggtggcgggattatatgcgatctgatgtgggattctgcacttcgcgattgcgttttgctacagtgtggccgtatgagccctaacattggtgattatcaatccgcgaagaatgttgacataaaatatcaaacctatgccccgctgcatattctatattctgcaacaggctccgataatagcaacttcatcagaatcgaaaacttccacttcgaagacaattatcattctgtagctgacgttatcgtcagtggtgactcatcgccgatccacatcatcaatagccaccacgaaactgatcgcgcggcgggcgtcccggctgtggttaatggtggcttcaagaagcggcttgccgctggcaccgttggcgttaggtacatggggcaggactccgagccagggtttgactataccgccggaccatttactgcgcgcggcggatacctgcatgcagacggtgccaatggttatcaactgggttatgacgatgtgtattacggcggccgttacacaggcgcaatacttgaaaatatcaagtttccgaactctggcggcattaaggtagcggcggggaatactgcatgcaccgtggtggcgtctaacagcactttcacagatatcagttttagtggcggtaacgaaagtttttgcccgctgaaaatgtctaactgcaatatcaaatcgttgacaatgagttatgcatacggatttaaattgtcaaacgttgaagtcgagtcgtctataacgctatcaaatatgtatgtaaaccctaatggcgtgtgtggttttagtaatgtttcatccgcaagtttcaccggaattattagctatggtacgggtgacttaacattaacatcaccatcggttaagtcagaaattgtctgttacttcgggagtgtaaatattccgcgttattcgtactacaacaatgtgattttaggaggggcgccgtaa

SEQ ID NO: 440404 - DNA, 384 bp, Serratia marcescens; identical to SEQ ID NO: 149085

SEQ ID NO: 440405 - DNA, 1242 bp, Serratia marcescens; identical to SEQ ID NO: 104974

SEQ ID NO: 440406 - DNA, 858 bp, Serratia marcescens; identical to SEQ ID NO: 180739

SEQ ID NO: 440407 - DNA, 561 bp, Serratia marcescens; identical to SEQ ID NO: 104073

SEQ ID NO: 440408 - DNA, 867 bp, Serratia marcescens; identical to SEQ ID NO: 220108

SEQ ID NO: 440409 - DNA, 546 bp, Serratia marcescens; identical to SEQ ID NO: 186049

SEQ ID NO: 440410 - DNA, 348 bp, Serratia marcescens
atggattttgaagcgcggaaacaaaaggcgctggcgataatggccagccgtaagatgtggaaaagcaattatgcaccgcttctgatacgcctgctgtggcggctggggataaagattccccctctgccgtttgctccgctctggcaggtttttggcgtgatgacagcctctttctccgtcggatacgggctgtggatgtactggatggtgtggcgggcccaggggatgtcccccctgttcgcttgtaaaatcagtcttatcgccggcgtgttatttggcctgacgatggcgttgtttcatctgtggcgccgaaaggtgaataaattacctgactggaaagatttataa

SEQ ID NO: 440411 - DNA, 597 bp, Serratia marcescens; identical to SEQ ID NO: 229315

SEQ ID NO: 440412 - DNA, 726 bp, Serratia marcescens; identical to SEQ ID NO: 215807

SEQ ID NO: 440413 - DNA, 5259 bp, Serratia marcescens
atgcttagtttcagccaggttaaatcagctggcagtgccggtaattactatacggacaaggataattactacgttatcgggagtatggacgagcgctggcagggtaaaggcgcggaagcgcttggtcttgaaggaaaggtggacaagcaggtcttcacggagcttctgcagggaaaactacctgatggcagcgacctgacccggatacaggatggcgtgaataaacaccggcccggttacgatctgaccttctcggcccccaaaagtgtatcgatgctggctatgctgggcggcgataagcgtcttatcgatgctcataatcgcgcggtgacagtggctcttaaccaggtggagtcccttgcctccacacgggtaaagagagatggcgtttctgaaacggtcctgaccgggaatctgattattgcccgctttaaccacgatacatcgcgcgctcaggacccacagatacacacgcacagcgtggttatcaatgcgacacagaacggcgataaatggcagacgctggccagcgataccgtcggtaaaaccgggttttccgaaaccatactggccaaccgcatcgcattcggaaagatataccagaactctctcagggccgatgttgagtctatgggttacaagacagtggatgcgggtaagaatggcatgtgggagatggagggcgtgccggttgagtggttttccacgcgcagtcaggagctccgggaggctgcaggacccgatgcctccctgaagtcccgggatgtggccgcgctcgatacccgcaagtcgaaagaagccatcgatccggcagagaagatggtggagtggatgaacacgctgaaggagaccgggtttgacatccgggggtaccgtgaggccgccgatgcgcgggccgcagagctggcccgtgcacctgccgcgccggtgaacactgacggtccggatatcacggatgtggtgacgaaagcgattgccggtctcagcgaccgcaaggtgcagttcacgtatgccgacctgctggcacgcacggtcggccagctggaggcgaaggacggtgtctttgagctggcgagaaagggcatcgatgccgccattgaacgggagcagcttatccctctcgatcgcgagaaaggcctgttcacctcaaacatccacgttctcgatgaactcgccgtcaaagccctgagtcaggaggtgcagcgccagaatcatgtctctgtcacgcccgatgcgtctgtggtgcgccaggtccctttcagcgatgccgtcagcgtgctggcgcaggatcgcccggtcataggtatcgtttccggtcagggcggtgcaaccggccagcgggagcgggtggccgagttaaccctgatggcccgggagcaggggcgtgacgtccatatcctggcggccgataaccgttcacgagattttctcgccggtgatgtgcgtctggccggggaaacggtgaccggtaaatccgccctgcaggacgggacggcgtttattccgggcggaacactcatcgtggatcaggcggagaagctgagcctgaaggaaacgatttccctgcttgatggcgcgatgcgccataacgtgcaggtcctgctctccgacagcgggaagcgcagcgggaccggcagcgcgctgacggtgctgaaggacagcggcgtgaatacgtatcgctggcagggtggccatcagaccaccgccgacatcatcagtgaaccggataaaggagcacgctacagccggctggcacaggagtttgccgtcagcgtgcgtgaagggcaggaaagcgtggcccaaatcagcgggacgcgtgaacagagcgtactcaacggcctcatccgagactccctcagacaggagggggtgctgggtgagaaagacacgaccattacagccctgacgccggtgtggctggacagcaaaagccggggcgtgcgggattattaccgggaggggatggtgatggaacgctgggatccggagacccggacgcacgatcgctttgtcattgaccgggtgaccgcgagcagcaatatgctgaccctgaaagaccgggaaggggaccgtcttgatctgaaggtttccgcggtcgacagccagtggacgctgttccgggcagatacactgccggtggcagagggggaacgtctggcggtgctcgggaagataccggacacacgccttaagggcggggagagcgtcacagtgatgaacgtggaggacgggcagctgacggtacagcggccggggcagaaaaccacgcagaccctggccgtgggtgcgggcgtgtttgacggtattaaagtcggccacggctgggtggaaagtcccggcaggtcggttagcgagacggcaacggtctttgcgtcggtgacgcagcgtgagctggataacgccaccctcaaccagctggcacagagcggaagtcacctccggttgtactcggcgcaggatgcggcgcgcacgacggagaagctgtcgcggcataccgcgtttagcgtggtctcagagcagctgaagtcccgatccggcgagacggatctggatgcggccattgcgcagcagaaggccgggctgcataccccggcagaacaggccattcacctggccatcccgctgcttgagagccaggacctgaccttctcccggccccagctgctggcgacggcaatggaaaccgggggcgggaaggtttcgatggcggacatcgacacgaccatccaggcacaaatcaggtcggggcagttgctgaatgtaccggtggcacccgggcgtggcaatgacctgctgatatcccgtcaggcctgggacgccgagaaaagcatcctgacccgggtgctggaaggtaaagacgcggtggcccccctgatggaccgcgtgccggacagtctgatgacggaactgaccgccggacagcgggcggcgacccggatgattctggagagcacggaccggttcacggtggttcaggggtatgccggggtggggaaaaccacccagttccgggcagtcatgagtgccatcagtctgctgccggaagagacccgcccgcgcgtcatcggtctggcgccgacgcatcgcgcggtcggggaaatgcagagtgccggcgtggatgcgcgcacgacggcgtcgttcctccacgacacgcagctgctgcagcgcaatgggcagacacccgatttcagcaacaccctgttcctgctcgacgagagctcgatggtggggctggccgatatggcaaaagcccactccctcatcgccgccggcggtggacgggcggtgcccagcggggataccgaccagctgccgcccatcgcgtcgggccagccgttcaggctgacgcagcagcgcagcgccgccgacgttgccatcatgaaagagattgtgcgccaggtacctgagctgcgaccggcggtctacagcctgattgagcgggatgtgcaccgcgccctgaccaccattgagcaggtcacgccggagcaggtgccgagaaaagaaggcgcctgggcgccgggcagttctgtggtggaattcacacagaagcaggaaaaggagatagaaaaggcactgagcgaggggaaaaccctgccggaaggtcagcccgcgacgctctacgaggcgctggtgaaggactataccggacggaccccggaggcacagtcgcagactctggtgatcacccatctgaataaggaccggcgggcgctgaacagtctgatccatgacgcacggcgggagaacggggaaaccggcaaagaggaaatcaccctgccggtgctggtcacgagtaacatccgtgacggtgaactgcgcaaactgtcgacctggacggctcacaaggaggcggtggcgctggttgataacgtataccaccgtatcagcaaagtggataaggataatcagctgatcaccctgacagacagtgaaggaaaggagcgatttatctcaccccgggaggcatcggcagaaggcgtcacgctctatcgtcaggaaaagatcaccgtgtctcagggggaccgaatgcgcttcagcaaaagtgacccggagcgcggctatgtggccaacagtatctgggaagtgcagtctgtttcgggtgacagtgtcacgctgtctgatggcaaaatcacccgtacgctgaccccgaaggcggagcaggcacagcagcatatcgacctcgcctacgccatcaccgcccacggcgcccagggggccagcgagccgtatgccatcgcgctggaaggggtggccggtggccgggaacagatggccagctttgagtctgcctatgtggctttatcccgcatgaaacagcatgttcaggtctacaccgacaaccgtgagggctggataaaggccatcaagaattcacctgagaaagcgacggcgcacgatattcttgaaccccgtaacgaccgggcggtgaaaacagccgatctgctgttcgggcgggcaaggccactggatgaaaccgccgcgggccgggcagccctgcagcagtccggtctggcacagggaagttcaccaggaaaattcatttctccggggaaaaagtaccctcagccgcatgtggcgctgccggcatttgataaaaacgggaaagccgccggtatctggctcagcccgctgaccgatcgggacggacggctggaggctatcggcggagagggacgaattatgggcaatgaagacgcccggttcgtggcgctgcagaacagccgcaacggagaaagcctgctggccgggaatatgggggagggcgtcagaatggcccgcgacaatcccgataccggggtggtggtgcggctggccggtgatgaccgcccctggaaccccggggccatgaccggcgggcgggtatgggctgatccggcgccggtgggtccggtaccgcaggccggggctgacattatcctcccgccagaggttctggcgcagcgggcggcagaagaacagcagcgccgcgaaatggaaaaacaggcggaacagactgcccgggaagtggccggggaggcgcgtaaagccggcgagccggcggaccgggtgaaagaggttatcggggacgtcattcgcggactggagcgtgaccggccgggtacggagaaaacgacgctaccggatgatcctcagttccggcgccaggaggcggcgattcagcaggtggcctcagaaactctgcagcgtgagcgtttgcaggctgtggagcgggacatggtgcgtgacctgaaccgcgagaaaaccctcgggggcgactga

SEQ ID NO: 440414 - DNA, 2310 bp, Serratia marcescens; identical to SEQ ID NO: 220106

SEQ ID NO: 440415 - DNA, 732 bp, Serratia marcescens; identical to SEQ ID NO: 259668

SEQ ID NO: 440416 - DNA, 531 bp, Serratia marcescens; identical to SEQ ID NO: 185372

SEQ ID NO: 440417 - DNA, 2850 bp, Serratia marcescens
atgcttgaggtatatgccattgcaggcggtgactggttacggggcaacctgaacgcgattgcggcgtttatggagaccggcacatggtcgaccatagaaaagatgtgtatcgccatctcggtactcattgtggcggggaactgggtaaaaaaacacaacgtgatggaccttttgggctgggtcttttccctcaccctggtctctatgctggttgtcattcgcacccctgtgcagatcatcgattacagtaacgttgcgcaggtctatgaagtcgataatgtacctattggtctggccattccggcgtcgctgacaacgcgggtaggaaacgcgcttatccagagttatgagatggtcttcgcgctgccggacagtgtcacgtacagtaaaacggggatgttatttggcagtaatctggtcgcgaaaagtacggattttttgtcacaaaatcctcagattacgacgctgttttccgattacgtacaaaactgtgtgatgggcgatattttcctcaatcataagtactcttttgaggaattactgaattcacctgatccgtataccctgatttttgcaaacccgagtccactgcgtggcgtgtttgacaaaaacaaccagttccagacatgcgaggaggcctcacgggatctgaaatcggctctcgcgctggatactcagacaggcggtaaaacctggaactactatgttcgtcagctgtttggcggcaaacctaatcccgatctgcttttcagccagatgattggcgacagctacaattacttctacagctcgggacagagcgccgggcagattatccgccagaacgtcacgatgaacgccctgcgcagtgggatccagagttatgcggcccgcagcggggacaccgccagtctggtcaatatggctaacacatcatcccttgaaaagcagcggctggcacaggccacaatggggcaccaggcgcttcgcacacttccgctgatgcagaccgttatcatggggataatgattgggatgttcccgatcatggtgatggccgccatgtttaatatgatgactctgcaggtgctaaaggggtatgtgtttgcgcttatctggctgcagacgtggccattactgttcgccatcctgaacagcgcaatggcctactatgcgaagcaaaatggcgtcccagtcgttctctctgagttgtcgcaggttcagctcaaaaactcggatattgcgaccaccgcgggctatattgccgtgatgataccgcctttgtcgtgggggatcgtgaagagcatgggagcagccttctccagtgcctacagccatttttcttcatcggggctcagtgcaacatcgcaggctgcctccggcgtggtggacggcaattactctttcgccaacatgcagatggagaacgtcagcggctacagctggggtaccaacagtacaaccagtttcggacagatgtcacggcagctggcgaatgggggcatgagcacgcagacgagggatggatcgatggtctgggacagtggtggtgcaatgtcaaaactgccggtggatatcaacgtcggtcgtcagatagccagtgcgcagcaacagatggcccgtgaggctgatgtccaggccgaaagcgcgctgcatggctataacagcagcgtgacaagtgcctggaatagtctgcagcaatttggcaccaataaagggaacagcgcctcaacaacgaccggagctgatactaccgattcttcgcaggactcgatggccagaagcaagatgtggaatgcggttgttgctaatgcgaaagccaacaacatcagtaatgaggagtctttccagcagttgatggatgattcagctaaaagtacgcagggagttgatttatacggatctggtaagtggagttcaggggatcagctgtttggtaagctaggtaaatggggaactgggttatctgctgaggccggagttaaaggcagtgcgggttggacccacagctcgggtaacacagataatgttggcacttccggtcgtgaatcgaatgacagccgacatgataccagtagtcaggcggccaaagactttaaggaagcatccgattactttaccagccgcaaaaccaccacatcgggcaacattaccgataataatgccagctcgcgtgttgaccagtttgccgcgtcactctccagtgccaaaaacagctatgaccagtatacaagcagccggacacgcagccatgagtacagtgagatggcgtcacgcacagagagcatgactggccagatgaacgaaaacctgactcagcagtttgcgaactttgttcagcatcgtgctccacaggatgccgaggccattctgaccaataccagttctcctgaaattgcggcgcagcgtgaagccctggcgcgtgaattcgtcaaagagcaggtagaacccagggttgatgctgcgtatcaacagggtcgtgaaagcattggacagaatatggctggggtgtcaggtggtggtgacaatggatcggtaatggccgactaccgacaaaattctggtcgtatcgatgctatgacgcaagatgcgggtattaaggataatgtggatcagaaagttggtgggatgattacagagaataaacaacagcagcaggaaacccgcgaaaacatacaacggcaaggcgcagaggtgaaaaatgagaatactgaaatggaaaaggaccataaaacaaaagcaaatgagtttaaaggtgattataatgaaagaaagagtaaggtgaaatctttaccaggagctgactcgcctactgagttagaggcaaaagcggcgaaaattcaaaaggattatcttgatggtaaaaggtaa

SEQ ID NO: 440418 - DNA, 1392 bp, Serratia marcescens
atgctgtgcgtaatggaggacaggatgcgaattaaacttctgtcactcttctgcggtgccgcgcttggcctgtcatttagtgccgccgccgacgtgaatggcgacatgaaccaattcttcaataagcttggctttgcgtccaataccagccagccgcaggtctggcagggacaggcggcgggttacgcctccggcggttcgctgtatgccagaacgcaggtgaaaacgatccagctggtcagcatgaccctgccggatattaacgccggctgcggcggcatcgatgcgtacctggggtcgttctcatttatcaacagcgagcagctgcagcgcttcggcaaacaaattatgtccaacgccgcgggctacttctttgaccttgccctgcagaccacggttccggagatcaaaactgccaaagacttcctgcagaagatggccagcgacatcaacagcatgaacctcagctcctgccaggccgctcagggcattgtgggcggtctgttcccccgcaaccaggtggcgcagcaaaaggtctgccaggacatcgccggtgagagcaacatttttgcggactgggcggcttcccgtcagggctgttcggtgggggggcagatggacaaagtgcaggataaagccagcgataaggacaaggagcgtgtaatgaagaacatcaacattatgtgggatgccctgtccaaaaaccggctctttgacggcaataaggagctgaaagagtttgtgatgaccctgaccgggacgctgatttttggtgagaacagtgagatcaccccgttgccggcacgcaccactgaccaggatctgattaaagccatgatggagggcggcacggctaaaatctatcactgcaatgattcggataagtgtcttaaggtcgttgctgatgccaccgtgaccatcacctccagtaaggcgctgaaaagccagatttccgctttgttaagcagtatccagaataaagcggtggctgatgaaaaactgacggatcaggagaaagggtttatctccagcaccaccattccggtgttcaaatacctggtcgacccgcagatgctcggtgtgtctaactcacttatttaccagctgacggactatatcggctacgacatcctgctgcagtacattcaggaacttatccagcaggcccgggcgatgatctcaaccggtaattatccccagtcgacaatggatatgatcatggaaaacctcaaccaggcgagtgtccagattgccgctttccagtcccgcgttcaggttcagcaggacgccttgctcgtggtggacagacaaatgagttacatgcgccagcaggtctctgcccgcatgatgacccgctaccagaataactatcattttggggggaatcagtaa

SEQ ID NO: 440419 - DNA, 444 bp, Serratia marcescens
atgaacaaatatatacgttcgacgggactgtatgcgtttttatttccagccagtttaaaagcacccgggcagacagcagcagaaaaaatagaacaactgaagccggaatttgtccaccgggaaaggcgtatggaaatctatctggaattattcattgtgtttctgactgcaggtgccctgctgttatggataatgagatttttatttaatctctgcgtggctgactggatagccagcggtgacctgcgagtaaaagacctgtggaatattatgatgtacgccatcccttatgcgctgatggctgtcgggatggggttctttgttgccggagtgacattagcaatcctcaattttttcagtcatcacctgaaaatcctttttattctgagaaataacagagttaaaaataatgctgtgcgtaatggaggacaggatgcgaattaa

SEQ ID NO: 440420 - DNA, 558 bp, Serratia marcescens; identical to SEQ ID NO: 104055

SEQ ID NO: 440421 - DNA, 240 bp, Serratia marcescens
atgcgaaagattcgttttccggatttagatatcaccgggatgtgggtgctggccgtgggcgtgtttttccacctgatagcccggcttgtcagaaagcagcctgagctggccgtccaggccggggaaatcttcgggctgggaatggtggtgttcgggggataccgcattcttaacgccctcattgctgaagccgaaaaagaggagaaagcctgtgaaaagcatcctgaagaacatcgctaa

SEQ ID NO: 440422 - DNA, 753 bp, Serratia marcescens
atgcgaacaatacatgccgccatgctggcggggtgcctttactgcgccctgatgccggctttcgccaaagatgcgggctggcagtggtacaacgagaaactgaagccccgtgatgaggaaaggccagccgcaccagcggcaccaccgccgcaaatggatattctggagaaactcgccacactccaggcggccaccaaacggtcgctgtacgaagccattctgtatccatcgtctgaaaacttcgtgaagtacttccggctgcagaactactggacgcagcaggcaagtttgttctcgatgagtgcgaagaaagcgatgctggaaaacccggaactcgattacaacctgcagtacagccactacaacggcacggtaaaaaaccagctcgccgccgactatgccgaacagcgtcaggctatctccaccctcgcacagcactacggcgtgatgttcttctaccgggggcgcgaagcgatcgatggccagctggtccaggtgattaaaaacttccgcgaaacctatggcctgagcgtcataccggtgtcggttgacggcgtgattaaccccatgctgcccgacagccggacggaccagggccaggctgagcagcttggcgtgaagttcttccccgcgatgatgctggttaacccgaaaagtggccaggtgaagcctctcagttacggctttatcagtcaggacgacctggcgaaacagttcctctatgtctccagcgactttaaaccgaatttctaa

SEQ ID NO: 440423 - DNA, 327 bp, Serratia marcescens
atggaagagaaaaaagcatacgggctggtcatggtgtttgtcggggtgtttgtctttctcctggtcagcattatgtcgtacagcctgtggcgggacaggcaggttaacgcatttatgacaaccaaccgggcctgggggatccagtgcgacactgtttctcagaccgcgtgggtggtcagggacggggagcgggtggaccttcagataaatcatctgcctctgtactgcagcggttaccgctttgaagcccgtgatgatgcaggaaaggtacagcgccagctcgataaatacagtgtctatcagcatctgtcacgccagtcgcaataa

SEQ ID NO: 440424 - DNA, 267 bp, Serratia marcescens
atgcaaggaaaagcaaagatgaatcgatatatcacgattgagaaatttatagacattctgaatgaagagaatttaccccaggagcatcatgttatggtgctggctgttcttgcggatatctctctgcatacagacaggttcctgattaactcgtccgaactggttcagatggccgctcagtactcacctgctttccagaaactgccagcggaccggcaggcttttatatcttcagtactgagcatgccgctattccttattatgtga

SEQ ID NO: 440425 - DNA, 255 bp, Serratia marcescens; identical to SEQ ID NO: 185374

SEQ ID NO: 440426 - DNA, 1956 bp, Serratia marcescens; identical to SEQ ID NO: 185375

SEQ ID NO: 440427 - DNA, 648 bp, Serratia marcescens; identical to SEQ ID NO: 104044

SEQ ID NO: 440428 - DNA, 177 bp, Serratia marcescens; identical to SEQ ID NO: 104043

SEQ ID NO: 440429 - DNA, 990 bp, Serratia marcescens; identical to SEQ ID NO: 229343

SEQ ID NO: 440430 - DNA, 402 bp, Serratia marcescens; identical to SEQ ID NO: 185377

SEQ ID NO: 440431 - DNA, 636 bp, Serratia marcescens
atgatacgactgaaagactgtctgctcgccgcctgcctgttatcgccgctgactcaggcggctgatctcggtacctggggggatttatggcccctccgtgagcaggacatgctgcagctcatcacgcagcgtctgcagtcgctgcaatcctctggccagtgggaccagacgatggacgcgtttaagcagcgggttatcgagaacagtcagcgtccggcgccggtggaaggcattaagcgtgcggagaaatacgagcagcgctggtttgatcccagcatccgactgaccgaagacctgaaggacaatgaggggcgggtgtttgcccgcaagggcgaagtggtaaacccgcttaaaaccgtaccgtttgtccagaccctgtacttcatcaatggtgacgatgccgaccagctggcctggatgaagcgtcaggtgccggaaaccctgatgagcaaaattatcctggtgcgtggcagtatcccggacacctccgcagcgctggacagccggatctatttcgaccagaacggtgtactgagcaagcgatttggcctgacggcggtcccggcgcggatcacgccggcgccctccggtgaacggctgaatattgagaccttcccgcccgtcccgcacccctga

SEQ ID NO: 440432 - DNA, 390 bp, Serratia marcescens; identical to SEQ ID NO: 259676

SEQ ID NO: 440433 - DNA, 2640 bp, Serratia marcescens; identical to SEQ ID NO: 259675

SEQ ID NO: 440434 - DNA, 129 bp, Serratia marcescens
atgccgacaggcgcttttaccagccctgttaataaactggactgtgatggcatcatcattaatgtgcctggtgggcagtattattcctatatccatcagtgggaattatataaagctaactcaaaatga

SEQ ID NO: 440435 - DNA, 234 bp, Serratia marcescens
atggatgaattattcaaatggacgatggcgctggtgtttttattgacaggttatcgcctgcttttttctagtgacagtaatacagtgcccgaagttctttctcatcactggaaaaatgactgccggttgcttgagactaatattgataaagggttttctctccagcgcaaaatagacttcagtgtggtgatgttattgaaaatgtcagcaaggctgattatgacagagcgataa

SEQ ID NO: 440436 - DNA, 585 bp, Serratia marcescens; identical to SEQ ID NO: 242927

SEQ ID NO: 440437 - DNA, 180 bp, Serratia marcescens
atggctaagtctctcattactgctgttctgtcagcactgcgctgggctcactggctggttaagtgtgcggtggtgtatccgctggccatgatgatgttactggttgttctggtgttcctgacgggaccgtacacgttcggccagacgctggtgaaaaccgtagagtctgtgcagcagtag

SEQ ID NO: 440438 - DNA, 1425 bp, Serratia marcescens
atggccaacttcaacacgctgatcaaacgtaagcaatatatctggctgggactcattctggcgggcggcgcggcagccgtcggaggcgggctgtatctgtcagatctgaacatgagctctgatgaggaagccccggctcagggcgaacccgcaccggatatgaccggggtggtcgacagcagcttcaacagtaaggtggagcagcacgcgacaacagaaatgcaggcgactgccgctgatctcaacaagcgttttgactccctgcagggggaagtggacctactgagtaaggcgcgaaccgctgaccagatacgtatcgacaagctcagcagtgacaatgaagccatgcagaatcagctgaaggcgctgggcgtgaaaccggctgtctctggtggcgagcccgcgccgactcctccgtcaccgccacccggtccggaaggggagccgcagccagccagttatccgccgcaaaccggcgccgcggtaccgcctccgacggcattctatccggggaatggtatgacaccgccgccgcaggtcagctaccagtctgtaccggtaccaaaccagatacagcgtaaaacgttcagttacgacaaaggaaaaaaaacgaagtcattgccgtacattccgtcggggagctttgcaaaaagtatgcttatcgagggggcagatgccaacgcgtctgttaccgggaatgaatcaactgtaccgatgcagttgcgtatcaccggtcgcgtggaaatgccaaacagcaaaacctacgacctgacagggtgttttgtgggccttgaggcctggggagatgtctccagcgaacgcgccattgtccgtacccgcaatatcagctgtatcaaaggtgataaaaccatcgatcagcccattaacggccacgtttcctttatggggaaaaacggggttaagggagaggtggtgatgcgtaacggaaaaatcctcggctgggcatggggggccggttttgttgacgggattggtcagggcatggaacgggcttcacagccggctgttggcctgggggcaaccgcaactgttggcgccggtgacgttctgaaaatgggggtcggcggtggtgcatctaaagctgcgcagacgctgagcgagtactacatcaaaagggccgagcagtatcacccgatcattccgattggtgccggcaacgaagtgaccgtcgtgttccaggatggattccagctgaaaacgattgaagaactggaagcggaaaagaacgggcaacagcaggctcagaatcaggaggcggagccggcaccgcaggctgatgcacatcatcagtcaggcggcggtatgaacggattcaatactgacgagatgctgaagaagctgggcaaacttgatccgcgtgagttctctccgggcgcagcgccgcagggggaaaataatggctaa

SEQ ID NO: 440439 - DNA, 741 bp, Serratia marcescens
atgaaaaaaattaacccgttatttatttcaggctgtctgctgttggtcgcccctgcgatgtccgcgaccctcagcggtacgctggagccgacagtggttcccctgaccaatggcggtcaggcaaatattgccgtgagtaacaccgatccgaatctgttcacagtacctggcgatcgcatcacggcgataaacagcctggacggcggcctgacaaatcaggagcagaccgacagcggcggcgccattctggcgaccgtcagtaaaaaaccattcaccttcattgtggaaaccgaacgcgggctgaacttctccattcgtgccgtgccccgtgcgggctcaggccggacaattcagctggtcagcgagctggcgggtacccccggtccggcaaaagcctgggaagagtcgaacccctatgaatcgttactggtttcgctgaatcgcgccgtgcgtcagggcagcgtacccggtgagtatcagtctgtccccgtcacttctgaagtactgcaggtgccggctggtctgcgcgccactgccgatcgggtctgggtcggtcatcacctgaaagttgtccgttacagtctggacaatgtctccctgtcggcccgtatggtgcgtgaaagcgatttctggcagcccggaacacgtgccgtcatgttcagtaccccggcgggcctgctgactgccggtggtcgcatgcagatctgggtcacgacgtcagatgaaggagtgaagcgctga

SEQ ID NO: 440440 - DNA, 567 bp, Serratia marcescens
atggaacatggtgccagacaaaataccacccgcgttatcgctgtgggatttatcagtctggggacactcctgaccctcagtcttgcaaccaatattatccaaggcataaataattaccgtctgcagacggaacagaaagtggcggtgacaccgatgttattccgtgcaccctttgcggtgtctcagaaccaggctgacgcctcttatattgagcagctgggcctgtcctttgttgccctgcgtctgaatgtcacgccggaaacggttgatgcccagcatcagcagctactccggtatgtattacctgcctcgcagaacagcctcaaggtccatctggctgaagatgcgaaacgcattaaagacaataacgttaattccaccttttatatgacgtcgatgcgtgcctggccggcagagaaccgcgtggatatccggggtgagctgaaaacgtggattggggattccaaaccctacagtgaaattaaaagttatgtcattcagttcagtcgtgtcgatggtgtcagctggctggcgcgttttggagaaataaataatgaaaaaaattaa

SEQ ID NO: 440441 - DNA, 306 bp, Serratia marcescens
atgacgggagacgaattaaagcgataccgtttcccggaaacactgactaaccagtcccgctggtttggtttatatctcgatgaacttatcccggccgtgatttgtctcggctggggtttctggaccagcaagttcatttttggcatagcttcagcggtactggttttctggggtatcaagaaactgaaaaaagggcggggcagttcctggctacgcgacctgatttactggtatctgccaacctcccttcttaaaggtttctttcatgatgttccggactcctgtttccggcagtggattaaataa

SEQ ID NO: 440442 - DNA, 369 bp, Serratia marcescens
atgaatgctgtattaagtgttcagggctctgctgtctctgaaaaaaccaaaccgtcttttatgtcccgcgttttcaataaaaagaaagccctgaaagtcgctaaagttgcgctgccggttgctgctgtggcggcgttcttcccggatgctgcgatggccaccaccacggcaaccgacctgatgaagtccggggatgcgaccgttaaaggcacgtttggtaagcaatccagcgtagtcaaatgggttgttctggcagaagtcgtcgccggtggcatcatgtacatgatgaccaaaaacgtgaagttcctgtttggcttcgcgattatttccacctttatcaccatcggtatgtcggtcgccggttactga

SEQ ID NO: 440443 - DNA, 720 bp, Serratia marcescens
atgtgtgcgaaggatcgtagtcatattgctgtgcgcagtcaaacagattccattcattctatgcgcgagatgcttaatatttcatcttgccctgcttttattcgtgattcccggggcgaagtaattcacaccagcccaacctttgacaaaattttcttaacatctggtggaactggagcatttgatacacccagagcacctggaagctggtttctggatctctccctggagatcaaactggaactgatgcagtcagaactgaaatcgttttcagaaggttctgctgtacttgttaaaaatatttggttggcaggttcactttggactgtttttattgaaacgttctcgattaatgaagatacatacagtaaatgggtttttataaatgaagatgaaccgatgcctcatccttcaatggaatacaatgacttttctataaagatgcaaagatatatcgaaagaattcagcgttcagcaaagtctgactgggctatctttaatctgtatgcggttgggttttctcatgcatctatttcgaagattacaggtgttggggtgcaaacctcaaaaaatacagttagtaaaataaaaaaggaactgagctttgataatcgtgactatatcataatgtcatcgatctatactctaagttatggaaagtttatatcgaatgtggtttcgatattaaacgatggtgttaattttttgttaaatcaatag

SEQ ID NO: 440444 - DNA, 225 bp, Serratia marcescens
atggaaagaaaagattcagggtttaaccaaactgagtttaataagattttgcttgagaatgtcatgaagactcagtttaccgtatccaaacttttggctattggctctctaagccctcatgttacaggtgatgaacgattcgagttccgcagcatggtgagtaacattcgagaagatgcaaaagatgttatttctcacttcttccccgagcaggaagaagagtaa

SEQ ID NO: 440445 - DNA, 294 bp, Serratia marcescens
atgcaaattgactcgcagcatttcaacgaactgtcgcgatatggaataaaaccggatcatcttcttagcgatgcttgtcttaacatctacaccggagcctattatctggctcaggcgtttaaaaagtggggcgtttcgtgggatgcagtcggggcatacaatgcaggcttcaaaaagaccccgcgccaggcagcaagacgttacgagtatgcgaagaagatccattactactacacggctatcaaagcaagcaaacgaacttcttctaaagatcagaaaatcgccatgaactaa

SEQ ID NO: 440446 - DNA, 822 bp, Serratia marcescens; identical to SEQ ID NO: 230358

SEQ ID NO: 440447 - DNA, 1476 bp, Serratia marcescens
atgatgtctcatcctgcactgttgattaacggcgtctggcggcagggccgcggtgccgagttcggcaaggccgatccggtcggcaaccagccgctgtggcgcgccaacgccgccgataccgacgacgtcgccgccgcctgcgaagccgcgcgcgccgcgttcccggcttgggcgcgtacgccgttcgagcagcgcgaacagctggtaaaacgcttcgccgccttgctggaagaacacaagcagtcgctggcggaaaccatcagccgcgagaccggcaaaccgcgctgggaaacgctgaccgaaattcaggcgatgatcggcaaggtgggcatttcgctgcaggcctatcagacgcgtaccggctttagccagacggcgatggccgacggcgcttcggtgttgcgccatcgtccgcacggcgtgctggcggtgttcgggccttacaacttccccggccatctgccgaacggccatatcgtgccggcgctgttggccggcaactgcgtggtattcaaaccgagcgagctgacgccgctgaccgccgaggagaccctgaagctgtggctgcaggccggcctgccggacggggtgatcaatctggtgcaaggcggccgcgagaccggcgaagcgctggcggccagtgcggatatcgacggcctgctgttcaccggcagcgccggcaccggctatcacctgcatcgccaattggcggggcagccggagaagatcctggcgctggagatgggcggcaacaacgcgctgatcgtcgacggttttgacgatcgcgatgcggcggtcaacctggctatccaatcggcgtttatctccgccggccaacgctgcacctgttcacgccgtattctggtgaagcagggggcggaaggcgacgcctttatcgaacgtttggtccaggtggcgggcgaactgcgcgtcggccgctgggatgccgaaccgcagccgttcatgggcggggtggtgtcggcagccgcggcggaaaacatgctgaacgcgcagcagcgcttgctggcgctgggcggcaaatcgctgctgagcatgcgcctgctggaaccgggcagttcgctgctcagcccgggcatcgtcgatctgaccggcgtggccggcgtaccggacgaagagtatttcggccccttgaccaccatcgtgcgttaccgcgatttcgacgaagcgctacagctcgccaaccggacgcgctacggcctgtcggtggggctggtatcgccgcagcgcgagttgttcgagcgcttgctgctggaagcgcgtgccggcatcgtcaactggaacaagccgctgaccggggcgtccagcgcggcgccgttcggtggcgtgggggcctccggcaaccatcgcccaagcgccttctatgcggcggactattgcgcctggccgatggcttcgctggaaagcgaaagcctgtcgctgccggcgacgctctcgccgggcttgtcgttccgttaa

SEQ ID NO: 440448 - DNA, 1221 bp, Serratia marcescens; identical to SEQ ID NO: 26773

SEQ ID NO: 440449 - DNA, 462 bp, Serratia marcescens; identical to SEQ ID NO: 222821

SEQ ID NO: 440450 - DNA, 276 bp, Serratia marcescens; identical to SEQ ID NO: 10326

SEQ ID NO: 440451 - DNA, 351 bp, Serratia marcescens; identical to SEQ ID NO: 10325

SEQ ID NO: 440452 - DNA, 1827 bp, Serratia marcescens
atgagtgataatgatacaatcccgaagaagtctacaagccagattaacaaagcggtattctttacatctgctttgctaattttccttcttgtcgcctttgccgccgtattcccggatgtcgccgacaaaaattttaaactactacagcaacaaatcttcacgaatgccagctggttctacatccttgctgtggccctgattttactaagtgtcacgttccttggactctcacgctacggtgatatcaagctgggcccggaccatgcgcagcctgatttcagctaccattcctggtttgcgatgcttttttcggcagggatggggatcggcctgatgttctttggcgttgccgaacctgtaatgcattatctttcgcctcccgttggcacgccagaaaccgttgcggcagccaaggaagcaatgcgtctgaccttcttccactggggactgcacgcatgggcaatttatgccattgtggcgctgattctggcgttcttcagttaccgtcacggtctgcctttaactctgcgctccgcactctatcccattattggcgatcgcatatacgggcctgtaggccatgcggttgatattttcgctgttataggcacggtctttggcgtcgcgacatcgctgggttacggcgttttgcaggtgaatgccggtttgaaccatcttttcggggtgcccatcaatgaaacggtgcaggttattctgatcgtggtcatcacggggttagcgacgatttcagtggtgtccggcctggataagggaatacgtatcctgtctgagctcaatctgggtctggcgttgttgctcctggcgctggtcctgtgtctgggaccaaccgtgcttctgctgaagtcatttgtggaaaatacgggcggttatctttcggaactggtgagtaaaacgttcaacctttacgcgtatgagcctaagtcgagcaaatggctggggggctggacattactgtactggggatggtggctttcatggtcgccgtttgtggggatgttcatcgcacgggtctcccgcgggcgaaccattcgcgagtttgtcaccggcgtgctgtttgttcccgcgggttttacgctaatgtggatgacagtgtttggtaacagcgcgatctatctcattatgaaccagggggccacagacctcgccaatactgttcagcaggatgtggcgctggccctgtttaatttcctggagcatttcccgttctcttccgtgctgtcattcatcgcaatggcgatggtcatcgtcttctttgtcacgtctgctgactcgggggcaatggtagttgatactctggcaacaggtggagtggcaaacacacccgtctggcagcgaatattttgggcctcgctcatgggcattgtcgcaattgcgcttctccttgccggagggctaagtgcgctgcaaacagtgacaatagcgagtgcattgcctttctcagtgatcttactgatatccatatacggacttttaaaagctttgcgccgggatttgaccaagcgtgaaagcctgagcatggcgacaattgctcctacggctgcacgtaacccaattccctggcagagaaggttacgcaatatcgcgtatctgccgaagcgatctcttgtgaaacgttttatggacgacgtcatccagcccgccatgacgctggttcaggaagagctgaacaagcaggggacgataagccacatcagtgacgcagtcgaggatcgtattcgtcttgaagtcgatttgggtaacgagctgaattttatatatgaagtgaggcttcgcggggctttgttgaataaatcgaacttttgctga

SEQ ID NO: 440453 - DNA, 1005 bp, Serratia marcescens; identical to SEQ ID NO: 154540

SEQ ID NO: 440454 - DNA, 2181 bp, Serratia marcescens; identical to SEQ ID NO: 186045

SEQ ID NO: 440455 - DNA, 201 bp, Serratia marcescens; identical to SEQ ID NO: 101187

SEQ ID NO: 440456 - DNA, 867 bp, Serratia marcescens
atgcagcttctgttcgtcagttcggagtccacgttcacctattttgaagccacccggggatatctggagcgctacggtaagcctctggcattctacagcgacaaagccagcgtcttcaggatcaacaacaagcaggccaccggcggagatggccagactcagtttggtcgtgccatgaacgagctgaatatcactggtatctgtgccaacaccagttcagccaaggggcgtgttgaacgggctcatctgacattacaggaccgcctggtcaaggaactgcggctccgcggtatcagcacacctgaggctgcaaacgcctttgctgatgagttcatggaagattacaaccgtcggtttgcaaagccgccacgtcacgattttgacgtacatcgccagctggataatggcgaaaacctgcaggcgacattcacctggcgcgagcagcgtaaggtctcgaaaaacctgacattacagtatgataaaaagctttatctgcttgaagataatgaagaaaaccggcgttttcaggggaagtacatcgaggtatggcaatacccggatggtgacattgagctccgggccagcggcacttccctgccctttaccacttacgaccgactgggagaactggaccagggcgccatcatcgacaacaagcgtctgggacgtgccctggaaatgataaagctggttcaggacaaacgggacaacacccgctcacaggccctgccatcactggacggccagacctcacgcagaaagaaacaacccggcaagaaatcacaacgaagtctggaccataacgacatgctggaagccctgcagcaacttcagacccggagtaaagacatcttcggcaaaggctga

SEQ ID NO: 440457 - DNA, 279 bp, Serratia marcescens; identical to SEQ ID NO: 101140

SEQ ID NO: 440458 - DNA, 513 bp, Serratia marcescens
atgttcagcgacaacagcctctccgtcaacagggttgtgttttcacgggtcagcgatattgccttcagcaacagcgatgtggtgattgtggagtcagagctgaacaccggcgatgccgaacgtctcaagtacctacacatttcaccggtcaatcttatctttttattaaaaccggcgtcaggaatgagcgggacagggcgtgaagcggtatgcattgacactgaattaagcggtaatgaatatctcatgatgaggcaggcgtttaaaaaaatggggatcaatctgaagagggacaagttgtcatttaccaaaagagaaacacatgttatcaatatgattttaaatggttattcgatagatgaaatttcccgtagcctgctgatctccaaaaaaacggttcagtcttttgtcggtattgttttgcataaactgaataccaccaaaataagtggaatataccgcaaaaaaaatctcatcatcgacagttttgccaggaggagcctgcatcgttag

SEQ ID NO: 440459 - DNA, 1644 bp, Serratia marcescens; identical to SEQ ID NO: 180769

SEQ ID NO: 440460 - DNA, 2448 bp, Serratia marcescens; identical to SEQ ID NO: 180770

SEQ ID NO: 440461 - DNA, 1407 bp, Serratia marcescens; identical to SEQ ID NO: 180771

SEQ ID NO: 440462 - DNA, 1284 bp, Serratia marcescens; identical to SEQ ID NO: 180772

SEQ ID NO: 440463 - DNA, 2193 bp, Serratia marcescens
atgtctgattataatgaaaaaagtgcgatctccgcacttctcgcaggtcattgttccgatccattttccgtgcttggcatgcactcaaccgatgcgggtctggaagtgcgcgcattattacccgatgccaccgatgtatgggtgattgaaccgaaaaccgggcgcaaagtcggtaaactcgaatgcctcgacacacgcgggttctttagcggcgttctgccgcgccggaaaaatccttttcgttaccagctggccgtcacctggcacggtcagcaaaacctgattgacgacccctatcgctttggcccgctgctgcaggagcttgatgcctggctgctcgctgaagggactcatctgcggccctacgagacgctgggagcccatgccgacaccatggacggcgtcaccgggacgcgtttttccgtctgggcgccgaacgcccgtcgtgtgtcggtggtcggacagttcaactactgggacggccgccgccacccgatgcgtctgcgcaaagagtccggcatctgggagctgtttgtccccggcgcgcataacggccagctgtataagttcgagctgattgacgcccacggccacctgcgggtgaaatccgacccgtatgcctttgaggcacagatgcgcccggaaagcgcgtcgcttatctgcggcatgccggaaaaggtcgaacagccacagtcccgtcagcaagccaaccagtttgatgcaccgatttcgatttatgaagtgcaccttggctcgtggcgccgccacgccgataaccatttctggctcagctaccgcgagctggcggaccagctggtgccttacgcgaagtggatgggcttcacccatctggagctgctgccggtaaacgaacatccgttcgacggcagctggggctatcagcccaccgggctgtacgcgccgacccgccgttttggtacccgtgaagacttccgctacttcctgaatgctgcccatgccgcgggtctgaacgtgatcctcgactgggtgccgggccacttcccgtcggatgactttgcgctggcatcgttcgacggcaccgcgttgtatgaacacagcgacccgcgagaaggttatcaccaggactggaatacgctgatctacaactacggtcgccgtgaagtcagcaactttctggtcgggaacgcgctgtactggattgaacgcttcgggatcgacgccctgcgcgtggatgcggttgcgtcaatgatctaccgcgactacagccgcaaagagggggagtgggtgcccaatgagtacggcggccgggaaaacctcgaagcgattgaatttctgcgcaataccaaccgtgtgctcggtgagcagacgccgggagcggtcacgatggcggaggagtccaccgacttcgccggggttacacgaccgtcttcgacgggcggtcttggcttctggttcaaatggaacctcggctggatgcatgacaccctcgactatatgcagctcgatcccatctatcgtcgttatcatcacgacaagatgaccttcgggatgctctacaactacaccgaaaacttcgtgttgccgctgtcacacgatgaagtggttcacggcaaaaaatcgattcttgaccggatgcctggcgatgcctggcagaagttcgccaacctgcgcgcctactacggctggctgtttgccttccccggtaaaaagctgctgtttatgggcaacgagtttgcccaggggcgggagtggaaccacgacgccagcctcgactggcatctgctggaagggggcgacaactggcatcacggggtgcagcgtctggtgcgcgatctgaaccatacctatcgccaccataaggcactgcacgaactggattttgacccctacggctttgaatggcttgttgtggatgaccatgaacggtcggtgtttatctttgtccgtcgcgataaagccgggaacgagataatcgtggcgagcaacttcacgccagtaccgcgtcacggctatcgcttcgggattaaccagccggggcgctggcgtgaagagctgaacaccgactcgatgcactaccacgggagcaacaccggcaacggcggctgcgtggcaagcgaggcgatcgccagccacggtcgggagcattcgctgtcggtgactctgccgccgctggcgacaatctggctggtacgggaatctgcagggcaataa

SEQ ID NO: 440464 - DNA, 426 bp, Serratia marcescens; identical to SEQ ID NO: 220104

SEQ ID NO: 440465 - DNA, 1272 bp, Serratia marcescens; identical to SEQ ID NO: 229282

SEQ ID NO: 440466 - DNA, 252 bp, Serratia marcescens; identical to SEQ ID NO: 225086

SEQ ID NO: 440467 - DNA, 174 bp, Serratia marcescens; identical to SEQ ID NO: 185435

SEQ ID NO: 440468 - DNA, 972 bp, Serratia marcescens; identical to SEQ ID NO: 185436

SEQ ID NO: 440469 - DNA, 1167 bp, Serratia marcescens; identical to SEQ ID NO: 185437

SEQ ID NO: 440470 - DNA, 1011 bp, Serratia marcescens
atgacgagcgaaaataacagcttacttctgaaccttcaggaagttgataagacaaccggcgaagttgttaagctggatgtcaacagcaccagtaccgtgcagccagtagcgctcatgagactcggtctcttcgtcccaactctgaaatcaacagggaagagcaaggcgaaccggaaaaacgttacagacgcgactgaggagcttgtacagctgtccattgccaaaagcgaagggtacactgacgttaagatcaccggttcgcgtcttgatatggacacggattttaaagtctggctggggataattcgctccatgtcggagtatggggtaaaaagtgacaccctggaactgtcgttcgtcgaattcgttaagatgtgcggatttgactcccgtcgttcaaacaaaaaaatgcgcgatcgcatcagtaattccctgtttaaactcgcctcggttacgttgaagttccagagcgagaccaaaggatggaccacccatctggtgcagtcagcctattatgacatcaacgaggatatcgttgagatcaaggctgaacctaagctgtttgagctttaccacatggacagaagggtactgctgcggctgaaagccattgacgccctgcagcgcaaggaatcagcccaggcgctttatacctacatcgaaagtcttccccagaatcctgcacctatttccatgaaacggatgcgtgagcggctgaatctcacctcaaatgtctatacgcagaaccacacggtgcgtaaggcgatggagcagctgcgggatattggttatctggattacaccgagtttaaacgtggccgagccacctatttcagcgtgcattatcgcaaccccaaactcatcagtggccctgtgaaggttccgcgcaatgaggaagaagagaaggcgccagagcaaaattatgacgaagtcattaaggcgctgaaggctgcgggcatcgatcctcttaaactggctgaagccctctcagcgatgaagccagaaaattga

SEQ ID NO: 440471 - DNA, 741 bp, Serratia marcescens
atgaacagcatcattcccctgcagaattcaccagaacgcgtctccctgctgccgatcgccccgggcgttgattttgcgaccgcggtggcactccggcggatggccacctcaacaggtgccacgccggcttacctcctggcgccggaagtgagcgccctcctctggtatatgcctgaccagcgtcaccacatgttgttcgccaccatgtggaataccgggatccgtatcggtgaagcccggacgctcaccccggaatcgttcgacctggatggtctgcgcccgtttgttagggtgctgtcggagaaagtgcgcgcgcggcgcgggcggccaccaaaagatgaagtgcgactggtgccgctgacggatgccagttttgtgcgtcagatggaaagctggatggtcaccacccgcccccgccggcgtgagccgttatggccggtcacggatgagacaatgcgcaactggctgaaacaggcggtgaagcgggctgaagctgacggcgtgcatttttcgatccccgtgacgccgcatactttccgtcacagctatattatgcacatgctttatcaccggcagcccaggaaggtcatccaggcactggccgggcataaggatccgcgctcgatggaagtctatacccgggtatttgcgctggacatggctgccaccctggccgttccctttaccggtgacggtcgcgatgccgcggagatccttcgctccctgcccccggccggctga

SEQ ID NO: 440472 - DNA, 948 bp, Serratia marcescens; identical to SEQ ID NO: 180766

SEQ ID NO: 440473 - DNA, 564 bp, Serratia marcescens; identical to SEQ ID NO: 185378

SEQ ID NO: 440474 - DNA, 1356 bp, Serratia marcescens; identical to SEQ ID NO: 185379

SEQ ID NO: 440475 - DNA, 231 bp, Serratia marcescens; identical to SEQ ID NO: 185380

SEQ ID NO: 440476 - DNA, 228 bp, Serratia marcescens; identical to SEQ ID NO: 185381

SEQ ID NO: 440477 - DNA, 318 bp, Serratia marcescens; identical to SEQ ID NO: 185382

SEQ ID NO: 440478 - DNA, 426 bp, Serratia marcescens; identical to SEQ ID NO: 104046

SEQ ID NO: 440479 - DNA, 231 bp, Serratia marcescens; identical to SEQ ID NO: 180737

SEQ ID NO: 440480 - DNA, 1434 bp, Serratia marcescens; identical to SEQ ID NO: 180736

SEQ ID NO: 440481 - DNA, 687 bp, Serratia marcescens
atgtcgcctaaaaaagtaataatagactctacttctcttgatttccctgaaatattgtatcttttttactccattaatatgattgaaggtatagaatcatttactgttctctacattgaaccgaaagaatacagtaagtcgccttcgactgagggcggggatgaggagtatcaattaagcgatggccgacagccattttcttctcttcccgtattttcactgaatacaatcacatctggcttacaaaaaaccagcctggtttcattcttaggatttgaaaactctcgtctaggccagattttaagtaatgatgatggggcaagcttcaataaattactggcttgtatatcagtcccagcttatatcccaggctgggagaacaaatcactcagaaagcatttattacatttcgacagcatggagacagatctaagaacctgtcctggtgcaaacccttacgccgtatatcagaccttattagatatatatgcagaaaacccaagactggtgctgacatccttaggtacaaagcctacggctatcggtatctgcgttttcttaattaacaatcatccaaataatagcgttgaaaaacaattgggagcaatatatgactatcctataaaatccatcaaccgtacaattggaattggtgagatttactcctacgaactatcaataagctaa

SEQ ID NO: 440482 - DNA, 1437 bp, Serratia marcescens; identical to SEQ ID NO: 129159

SEQ ID NO: 440483 - DNA, 156 bp, Serratia marcescens
atgaacgattcagtgttgggtgatatgcagaaccatgttcatgacatctttgctgcgttcggtcgtggagccaaaaatatgaaccgtaacaaccctaagcaatttaatcctgacgcaggtgtagataagagcaaggacggcatcaaaggagcttaa

SEQ ID NO: 440484 - DNA, 327 bp, Serratia marcescens
atgaagtggcgctattctctgcgctggaaactgccgcacaggccctgcccgggtccacaggaactgatttccgttgtcgtggaggcagggcaggcggcacctgaagaggtgatgtcacgctgggtggctggctcaggttacgctgtatgcgtggattttctcggccagaaacagatccaacgctggagcgatgaacggaaagcagcggtgagaaggcgcaacatgcaggcacgtattaatcgtgttgcccctttgtttgccgacgagttaatcgagcgtgaactggctgcgcgtccggagtatttcaatggcaagtccgcccgatga

SEQ ID NO: 440485 - DNA, 729 bp, Serratia marcescens
atgatcccgtcatccagtgctcttgtatccctgaaaccagcccgtcaggcagcgctgcaggccatcatgacggtggaagaggctcgccagcgcggcgcacgtctgccatcgatgccacacgtccggacattcctgcgcctgctgacaggctgtagccggattaacagtgacgttgcccgccgtattcctggccttcaccgtgatccaaaagaccgcctttccagcctgaaacaggtggaagaggcgctggatatgcttatctccagccacggggaatactgtccgctgccgctgacaatggatgtgcaggctgaactttttccggaagtccttcatacccgaacagtacgaaggctaaaacgtcaggactttgccttcacccgaaaaatgcgccgtgaagcccgtcaggtcgagcagtcctggttactgcgtcagaacctgctgggacaggctgtcacagaactgaattttcagtcaccggaaaccgtctgcacctggtacacccggtggagcgacgagtttgacgcggcagagcttgcagcaccgttctggcgctggcagtcgcgattcgaatcgctgaaggaacttgactggcttcgcatcagcggtgagccgctgtatgcagtgatgtacgaaattccgtttattgtccgggaaacacctgagcatattcgtgttgctgaacgctggcaggtgccaaataagctggctgatcggagtggtgtatga

SEQ ID NO: 440486 - DNA, 432 bp, Serratia marcescens; identical to SEQ ID NO: 238408

SEQ ID NO: 440487 - DNA, 2058 bp, Serratia marcescens
atgtctgcaacagagtctaaggtaaaaactgcaccgaaaaccagcaaaaaaacgcttaagtctgccgaagctgaggcgcttaaagtggctctcgatgccgcacaggtcgagtatgtcccggtgacggcactggtgaagtctcccctgaacgtcaggaccattccctatccggcggagaaagtctgttcaatggcagattccattgaagccattggcctgttgcagaatctggtcgtgcataacctcccggatggtcgctgtggtgtggctgccggtggtcgtcgcctgaaagcgctgcagctcctgcagagtgaaaaccgtatcgatgccggatatcaggtgatggtgaaaaaggtacctgatgaactggctgttgcggcatcaatggcagaaaacgaacagcagatggcaatgcatccgtctgaacagatcgccgggttccgcacactggcagagcaggggaaaacccccgcgcagattggcgatttgctggggttcggtacgcgtcatgttcagcgcatgttgaaactgaccgaactggctcccgaaattctggcggcgctggcgaaggatgaaatcaccaccgaacactgccaggcactggcgctcgaaagcgatcagaaacgccaggtggaagtgctggaatccgcccgcaaacggtcctggaataatgaagtatcagtttcctcgatccgtagcctcattacctcagaagaggtttccacaaacggcgacaaattccgctttgtgggagaggccgcattcagtccggatgaaatccgggttgatctcttcagcagcgaaaacggcggctatgtcaaaagtgcatcgctcgataccgccctgctggaaaaactgcagaacatcgcggagcacctccgcgaagcggaaggctggtcatggtgtgatggtcgtcttgacccgatttcacactacgggaaggacactaaaatctggcgcctgcatgctgtcccacctgtggaatataccgaagccgaatcagaacgtcttgcggaactggaagctctggaagctaagtatgaagacgagaaccccggcgtgaatgatgacgtcttggccggggctctggaagctgtctgggaagaacagcagaccatcgcgcaccgggcaaaacaccgggcatggacggatgaaatgaagcaatctgccggagtggtggtttcctggactggccaggaggtgaaagtacagcgcggtgtggtgctgtgcgccgatgaaaaaatggaggagaaggatgcatccaccgatcaggcccctgaaaaagtcgatccgctggacgccgtcagtgtcccgttgctgacccgcctttcttctgaacgcacactggcggttcaggcggccctgttgcagcagccgcagaaagccgtcgcgctgatggtctggaaaatgtgtaactcggttttccataccacaacgtccgtcaaagagccgttctgcattagcgtgagtgtgtcgcattacgcgctgacccgtgaagcacctgacggtgaaaacagcgttgcgtttcaggccatccagtcagaaaaagaacgtcttgaagccctgctgccggaaaactggcgaaaggatatgaccaccttctttacgctcgatggcgcaaccctgatggcactgatggctttctgcaccgcctgttccatagatggtgtacagggcaaggatgaatttggtcgtaaacaccagagttcgctggatggggtggaaaacgccattcagtttgaccttcgtgactggtggaaaccgacggctgataaccttttctcgcacatgaagctgccacacattgtacaggcactctctcagaccggactggctggcgcagcacaggacgccgcgaagatgaagaaaaaggatgccgctgaacatgcagagcacttcctctcaaaaatccgttgggttccggaatggatgaccagtgctgacaaccagaaacagcttgccgcaaagtctgaactcagtctggcaacaagtcagagcgataccgacgctgatgccggcgacgtcaccgaccataacaacccggcctgcgccgcctga

SEQ ID NO: 440488 - DNA, 249 bp, Serratia marcescens; identical to SEQ ID NO: 209381

SEQ ID NO: 440489 - DNA, 543 bp, Serratia marcescens; identical to SEQ ID NO: 231437

SEQ ID NO: 440490 - DNA, 1089 bp, Serratia marcescens
gtgaccctatcaccatttgtcttcagacgattcgaaactgatatgtattcaaaaaactttagcgctgttgtcggaaatagtaagcatgacaggcattacttcaatataggacctgatgctcctcttcttgatcggcatgatagcgttccactaaggtttagagtgtttagggcatgtagcctacattatgatctctgtgttgcaggaggtgggtattttacggggatattttcagagcactggagcatacaaatgttattagtaacagtgtcactactttccggtttaatgatttatattatcattatgaacagagcagaactcaatagttcactatctgcaaggtttgtaaaggctttgaaaaatgaagccctgtcgctggtctatcaacctatttacagaattgaagacggacagatctgcggatttgaggccttgctcagatggaaagatgaaagactcgggaatattagccctgaagtatttataccgctttctgaaagggaagggttgcaggaggatgtgactttattcgtcattaaccatgctatccgagaatttatccatactgctattcagaatgaaatatttttgagcgtaaacattaatccaagcgatcttgattcagaaaaattcagggataaactactaggattaatttctgaatataacatcccatataaaacaatccttcttgaaattacggagcgtcaaggaggggattttgaaggtatgaaaattcacattgataaatataaaaatcatggtgtcaggtttgccatcgatgactttgggacaggatattctaatcttaatctggtaactgcgcttgatgtagatgaaataaaaatagacaaatcgctaactagtgctattggtactgaatctttacgatatgatcttcttcccggactgcatgagatgttccgctccattgcagataagattgtgtttgagggtgtagagactcaggagcaggtgaactatctgaagacgttctggccacagagttatgctcagggctggtattactccagagcgcttccgctggaagaagcgagaaaacttaccatccgggaattgaactga

SEQ ID NO: 440491 - DNA, 1278 bp, Serratia marcescens; identical to SEQ ID NO: 230196

SEQ ID NO: 440492 - DNA, 204 bp, Serratia marcescens; identical to SEQ ID NO: 270163

SEQ ID NO: 440493 - DNA, 402 bp, Serratia marcescens; identical to SEQ ID NO: 236619

SEQ ID NO: 440494 - DNA, 192 bp, Serratia marcescens; identical to SEQ ID NO: 233630

SEQ ID NO: 440495 - DNA, 750 bp, Serratia marcescens
atggtgacgagaaggtacttactaggtggtgaatatccctccgaggaatttgttcaagcttctttagaaaaatatttttttcgacaagggttcgatatagatacgggttcttatattgaccttatttgtcgtgataaagaatctagggatgttgtgtggcatattgaagtaaaaggaaaaacatcacagccggggttggattttcgaacttgtcttggacaattagtgcagagaatgacaaaagataatattaattatgctattgctgttccaagaataaaacagtatgaaagattaatagaagaaacgagcattcttgctgttagtaaattgaatttacactggatatttgttgggcctgatggcagtgtgacaattaaggaacctgatagctctacgatgaaaaatggtaatggtaatggtaatggtaatggtaatggtaatggtaatggtaatggaagagaagtttctcttgtgaatggggggtttaaaagatttattacgggggattttatgccaacttgctcatatgggaaagctcctgttgtatttaaatcatctcggcgagaaatgtgggattggttggacgattttgttatttcaaatggggtgatcccaagtattgctgatattaaaaaagaggctgaatcgcggagtgggaaatggacgctttctaatgttaaaatagagtatcagttttggaaaatatatcacttgtataaggggcattttttctatcaatctgagtag

SEQ ID NO: 440496 - DNA, 135 bp, Serratia marcescens; identical to SEQ ID NO: 231294

SEQ ID NO: 440497 - DNA, 1005 bp, Serratia marcescens
atggaaaacattgcgctcattggtatcgatctgggtaaaaactctttccatattcattgccaggatcgtcgcggcaaggctgtttaccgtaaaaaatttacacggccaaagttaatcgaatttttggcgacatgccccgctacaaccatcgcaatggaagcctgtggtggctctcactttatggcacgcaagttggaagagttggggcattttcctaagctgatatcaccacaatttgtccgtccattcgttaaaagtaacaaaaacgactttgtcgacgccgaagctatttgtgaagctgcatcgcgtccgtctatgcgttttgtacagcccagaactgaatctcagcaggcaatgcgtgcgctgcatcgtgtccgtgaatccctggttcaggataaggtaaaaacaaccaatcagatgcatgcttttctgctggaatttggcatcagcgttccacgaggagctgccgttattagccgactgagtacccttcttgaggacaatagtttgcctctatacctcagccagttattgctgaaattacaacagcattatcactatcttgttgagcagattaaagatttggaatcccagttgaaacgaaagttggacgaagatgagattggacagcgcttgctgagcattccctgcgtcggaacactgacagcgagtactatttcaactgagattggcgacgggaagcagtacgccagcagtcgtgactttgcggcggcaacagggctagtgcctcgacagtacagcacgggaggtcggacgacattgctgggaattagtaagcgaggtaacaaaaagatccgaactttgttggttcaatgtgccagggtattcatacaaaaactggaacaccagtctggcaaattggccgattgggtcagggatctactgtgtaggaaaagcaactttgtcgtcacttgtgctctggcaaacaagctggccagaatagcctgggccctaacggcacgacagcaaacttatgtagcataa

SEQ ID NO: 440498 - DNA, 978 bp, Serratia marcescens
atgcaaaaccctaagctacagaaccttacagattacaaccctgacgataagccgtgggacgctcacaaaggccagtccgatgatgttggtggtatttacctgcgtgctgctgaatttgagtcctacgcggcccgtatgcgcgattgtggcggtttattacgttttggctggtcaaccctcaaagacaccggagaaacgcgcctgcggcttcgtgaggctcatttttgccgtgtccgtcattgccctgtctgtcagtggaggcgttcgcttatgtggcaagcccgtttttatcagtccctgcccaaaatcgttgctgattatcctgattcccgctggatgttcctgacgctgactgtccgtaactgtgacattgctgatttgggcgatacgctgacggcgatgaatgccgctttccagcgcatgaaggttcgtaaagagtttaagccggttcagggctggattcgtacaaccgaggtgactcgtggccgtgatggttcggcgcatccccattttcacaccctgatgatggttcccccttcgatgctttctggtagagcctacgttgagcattaccgctgggttgaattgtggcgtgactgtctccgtgttgattacgatccgaatgtcgatgtccgttcagttaaaccgcgtaaaccgaaaaaggggaagtctcttgcatgtgctactgctgaactcgttcgcggcgcggtctctgagactctgaaatactccacgaagccctccgatatggtggcagattctgagtggttccttgagctgaccaggcagacgcataagcgccgttttgttgccactggcggtgctctcaaggatgttctcaaacttgagcaggaaacagatcaggacatggtgatcggggacgatatttctgagggtgatgatgatggttctcgcctcgcttttggctgggaggctaagcaacggaagtatcggcggttgcctgaacgtgataagtga

SEQ ID NO: 440499 - DNA, 396 bp, Serratia marcescens; identical to SEQ ID NO: 101138

SEQ ID NO: 440500 - DNA, 1359 bp, Serratia marcescens; identical to SEQ ID NO: 101137

SEQ ID NO: 440501 - DNA, 357 bp, Serratia marcescens; identical to SEQ ID NO: 215846

SEQ ID NO: 440502 - DNA, 213 bp, Serratia marcescens; identical to SEQ ID NO: 215845

SEQ ID NO: 440503 - DNA, 225 bp, Serratia marcescens; identical to SEQ ID NO: 209380

SEQ ID NO: 440504 - DNA, 279 bp, Serratia marcescens; identical to SEQ ID NO: 198457

SEQ ID NO: 440505 - DNA, 186 bp, Serratia marcescens
atgattagcgatgccaataaagcggtgaatgacctggcgagtattgtccctctgctgggtggcagttcgtcccgcaaagattacgaagaggcacgtaaactcgttgaatatcttctggaacatgatccggacagcccgctggttgatatgctgacggctttgttgaataaatcgaacttttgctga

SEQ ID NO: 440506 - DNA, 351 bp, Serratia marcescens; identical to SEQ ID NO: 215847

SEQ ID NO: 440507 - DNA, 135 bp, Serratia marcescens
atggggagtacgctttcctgtggcgcttctgaggacgatctggccagtgttgcccgtaaatggtaccgacagttcgtgagggagcggcgcaaattcttaattatgtcgggccagtattctgaggataacccatga

SEQ ID NO: 440508 - DNA, 162 bp, Serratia marcescens; identical to SEQ ID NO: 223067

SEQ ID NO: 440509 - DNA, 264 bp, Serratia marcescens
atgaagaagcgtttttccgacgaacagatcatcagtattctccgcgaagccgaagctggggtacccgcccgtgaactctgccgcaagcatgccatttccgatgccacgttttacacctggcgtaagaagtatggcggtatggaggtgcctgaagttaagcgcctgaagtcgcttgaggaagagaacgccagactcaagaagctgcttgccgaagccatgctggataaggaggcgcttcaggtggctcttgggcgaaagtactga

SEQ ID NO: 440510 - DNA, 831 bp, Serratia marcescens; identical to SEQ ID NO: 237838

SEQ ID NO: 440511 - DNA, 267 bp, Serratia marcescens; identical to SEQ ID NO: 229369

SEQ ID NO: 440512 - DNA, 1281 bp, Serratia marcescens
gtgaagcgcagcgtgttcgatgatctcaatcggggcggtttgctggcgattgatgagggaatgggcgcctggacgccaatcaaatacgcgttttacgtcgacgcggaaggccgattacagcgctatcccggtagctctcttcctgccttttatcctactgggcgcgtggtcgcccgctatgaagaaatggtcagccgctatggccagcgggcaaaaccgacggtgctgccggcgaggcagaatacgacccggaatccccctctgcagcaagccatcgctaccgcagtggcaaccgttgccgccacggtacaggccattcgtccgatgactaaggctgaacgctggcaagaacgccagtacctgatagggcgaggcaaccgcagcatttaccctgatgcgcgcatggcggcacagcgattggcggagaacaacgtcgcggtcgaaaaagcgaagctggctgagaatgtttacaagaccactaacccactcaaggacacgatagacatccctgagggttggaaggacatcagtaacaatgatggggcgctgggccggcttggtttgagcagtaacatgctttatgacaaaccaatgaatcctgactttttagcccgagtttatcagccagacgaaagtgtctttggcaaggcgatgaacccgacggtggtattccgcggatcgcgggcaccagaattcccggagggaataagccgcgcaacccaaaaagccttaataaggggtgacttatcaggcattaaaaatctcagtgactggaaaaacaacggtgctcagggaatagggcttaattctgaatactacaaaaaagcggttggtattggcgataaaatttcaaaagtatccaatatcgacgttgcaggtcattcattaggcggtggcatggcgtctgctgcctccatggccagcggcaagccagcttggacgtttaatgccgctggattgcatgcgggaaccgtagaaaaatacggcggctctataataggcagtgtcgataatattcaggcgtatcgcgtgaaaggggagctgttgaccaagctgcaggaggttgatttgtgggaggatgccaaagacctcaaattttatccgccggcggtgatggcgaaagagcggttgtccatgttggcgcctgacgccgtgggagtaaaacacacgctttccggtggaacaggctcattgctggataagcacggtatagaccaggcgatacaatgcattgaaaatgaaaaagacgatgacattgccacaatcaagggaagaatatga

SEQ ID NO: 440513 - DNA, 621 bp, Serratia marcescens
atgccactatatgaaaattattacatgcgtcaatgcgatccgttgtgggggaaagtaaccaatgtaaactccagtttttctggagatccggatataactttaacatgggttaaagattcaacatttcctagaaaaacccttgaaccggaagacttcgacaattgcattgctatcggtaatggatgctatatagagtctttaaatagattggcttttcaaaatggaatcgtgaagcttacatcagtcaaagttaatgaatctcgcccaggagtgattattattgggaataatgtagttatccaaggtgtgtctattgttgcttatgagaacgtaaccattgaggataatgtgactttggggccaaatgtaactattatggatagtagtggacaccctttatgccatagaggcactgaaaatgaagcctcgcttataaaaaaaagtcctgtcttgataaaagaaaatgtttggataggcatgaactcaatcatccttaaaggagtaactattggtagaaactctattattggggctggtagtgttattcgtgaaaatattccagatgattcagtggcttatggaaacccggcaataattacaccacttaaaaaggagatataa

SEQ ID NO: 440514 - DNA, 774 bp, Serratia marcescens
atggataatacaataataattagtgatttagatggaaccttgctgtcgtcaaatggccggatatctgaagctacgtttgagtggatatcacattggcttaagcaagatcgtcatttcattatagccaccggtagacactatcggaatgttattggatattttgataggttacctcgaatacctgacttgattacatctaacggagcgatgattaatgacaagttaacattccctatagaaaaatgtaggcttaattgccttaggcaattaaaagtccttgctaatttccatgagattagttttagcgtatttacagaagaaggttggcatgtgacagaatataatgaaatgattgtatcccatgacttcaaggcaattatgaccccccctaaacagttttttaatttgaatgcttttaaaggtttgttttgtggtgatcctgacaaattgcttattctccagaactatctaagagaggaattcagtgattatgtgtcggtgcgttctgatgatcgttggcttgaaatccactggaaagaaataaataaatttgccgcattaaaaaattttctaaaagaatcaaaactagataaaaaaatgacaattgcatttggagatgggctcaatgatgttgaattactcaaaggatgcacgctaggagttttaatggataacgccatgccagaattaaagtctatcttacacggccatcctattacagtcagcaatgatagtgaaggtgtgcgcatttttcttgagcaatttttttcatga

SEQ ID NO: 440515 - DNA, 135 bp, Serratia marcescens
atgttacttctactctccggcaacctgacgttatggttctgtgccttacagtttaagcacagttatctatattcatcactgaactggcgctctaacaccgtcgatttgactaccgaggtggcggggagtgcttaa

SEQ ID NO: 440516 - DNA, 336 bp, Serratia marcescens
atgctgcaacattacgtcagccatattccggcgcggtattttaaaatggtgcggcactacggttttctggccaaccgcaagcggggcacgctgctgccgaaggtttacgacgcgctggcgatgacggtacgggagaaaccgaagcggcctgggttcgcggtgctgatgaaagtctttttgggcaccgacccgtaccaatgcatcctctgcaaaggccggctgcgttttgccggagccgtggcgggcgagcacgccacaaaaatgctcttcgacaggctgcagcggatggcgaaaaaacgatggcttcaggcccagactttggataagtgcgcctga

SEQ ID NO: 440517 - DNA, 624 bp, Serratia marcescens
ttgaaccacacgcatatgcagctggcggttcttcaacaacaactgccccctactcaacgacctgttccgctgcgccacccgctccatgctccgttgggtaccccgcagggtatcgaagtgggtatcttctgcgcgctccgcacctacggccggcaacgcaatcagcaaccgcatatccacgtctccgttacccgcggtgttctcgacatcaaacaccacgtctggcggcagctgttctttaaaaagaaagaggtcgagcaaatatggcgcaacgccgtcatttacctgctacgtgacaactatgcgcgcatcaaccccggcggcctgccgggactcggccatatccgcaacgaagaccggtgccatcgctacctgcatgcgcaatatcgccgcgcctggaaggtgcattttgccaaaaagatccgcggcgcctggcgcagcgtgaaatacctcggccggtacctgaagcgcccgcctgtggcagcttctcagctgcgccactatcgcggcggccgtgctccatcagtattacgatcaccgctcgcagcagcacaaacgccagagaatcagccaggaggagatgctgcaacattacgtcagccatattccggcgcggtattttaa

SEQ ID NO: 440518 - DNA, 657 bp, Serratia marcescens
atgggtgactggtttattgccaccgaaggcgtgaagatcgtcaaagacagccccgacctgtggccgcagatcctcacgggggttttgtccgccggcgcggcattgggcggtgtgtggcttacccactactttgcccgtcggcgtgaggagagagcggcggcggctaagctggccagtgagcggtatttcatcgccacggagctggtcttcaagctggaagactatgcggaaatgtgtgctgaagtctcgcaagatgatggcaggcgggatgaaggagatgaataccggcctactgtccgcgcgtactcccttgaatttgatgatgtgaccggcgactggcgcgcgctgccgcccccggtcatgtaccgggtgcgggaaatgatcgttctgcaagctgaagcgcgtggttcgattaacttccactatgacgtcgatacttcctcaaggcatgacaccttttatcgggagcggaagtatcagtatgcatacctcggcctgcgggcactcttgctggccaagcgtctgcgcaaactgaccggcatgccctcttcccgcctggacaagtaccactggtcggcgcagcaaaccctgtggcaaggctggcgcgaagggcgaaaatatcgacttgagcagcgactggatctggatgaggaataa

SEQ ID NO: 440519 - DNA, 801 bp, Serratia marcescens
atgagcggtttagtggtaccggaattctactcggcgatgccggcgcaacgatcggcgccaggcgtttcgttgccggtcgccatcgactacccggccgcgctggcgctgcgccagatggctctcgtccatgaggaactgcccaaatacctgctggcgccggagatcagcgccctgctccactacgtgccggacttgcaccgcaaactgctgctggccacgctgtggaacagcggcgcccggatcaacgaggcgctggcgctgacgcgcgagaatttctcgctggcgccgccctacccgttcgtgcagctggccaccctcaagcagcgcacggaaaaggccatgcgcggcgccggccggttgccggcggccagcacgccgccgcgcgtggtgccgctgtccgatccgcagtacgtcgcgcagctgcagacgatggtggccacgctgaaaattccgctcgagcgccgcaacgcgcgcaccggccggatggaaaaggcgcggctgtggaccatcaccgatcggacggtgcgcagctggctggcggaggcggtggatgccgcggcgcgcgacggggtgacgttctcggtgcccgtcaccccgcacactttccgccacagctacgcaatgcacatgctgtatgccggcattccgctcaaggtgctccaggcgctgatggggcacaagtcgatcagttcgacggaggtgtataccaaggtgtttgcgctggatgtggcagcgcggcaccgggtgcaattccagatgtcggaggccgacgcggtggcgatgcttaaagagcgtcgctga

SEQ ID NO: 440520 - DNA, 342 bp, Serratia marcescens
atgcaacacaatgcactcgttggtcgactgatcactcagcctgtcgttgtagtcaaagacgacacacggttttgccgtttcaccgtagctgaactgagaaaacgcagtggtaaccaaaccaaaatcgaattcaccgcttttgatgccgtagcctcgcatattgccgataagtgcctggtcggcgataccgtttccatcaatttcaccatcaccaatgctgtctatgagtcagatggtgttaatcatcatggctatcggtttcaggcgacgttagttgaattcgttgccgccggcaaacagcgccgtgagcaagagagtcaacgtattggacaaggtcgttaa

SEQ ID NO: 440521 - DNA, 1329 bp, Serratia marcescens
atgaaactggtaacgaagaaatcacccagaggtcgactgttccgtgaattatcgtcggaagaggctacggcggtaggcaacgtttgtggcagaggacgcgttacttcgctggctgaaaaacagttggctgaagcggtgctgagaagcatgcgtgatcatgacctttggctgtcttgtgggtgtcgcacgactgcagaagatatgccacttaacaccgccagtaatcgcgacggcactttgtttctggtgaatttcagcggagagcacagctcggattgtccgctgtatcgttcaaagcggggggatgatggcacagggcagggcggcgggcgccgaacagccggcgccgtgcgtgttgattttcgctcgttcttgccgcgagacgataatggggctcgtatctctgggccggcgaagccagacagtcagggcaacgacaaaacaagtcgtcgccgtataccggcgttggcgcgcctgctgctgaccttgatcgaggccgctgagcttaatcgcatcgacccggtttaccctcagccaggacgaaccaaaacgcaggcgctcaatgccgtgaagttggttaccgagatggagcactttgcacaggggcgtcctctgagcgagattgtattcttcgacccctggctgaaacaagatcggctcgacgcgcgcatgcgcgaacttgaaaacaagggtaaagcctggcctgcagggagagcacgaactttctaccagatcctgttctctgagcaggtgacacaggatgaggtcgttttcacaagtaagttcggtgagacggtatttcgtcctgaaaagcgagtgagcatcaacggcgaggttgatggtcatcgggagaaatactgggtgatcctgatgtaccggcgcaatgatgctggtacggtcgtttgccgcgatgcttatgcgcatgcgctctttgattacgcctgcccggttccggtcgacagtaaccttgaacgtgaaaccattaactccatcatgactggggggaagtggctgcagagttcgggctatgagttatcccttaacaaaccgctgttcgatatcactgtggaccttgatggcgagaagcggttcgtcttgcctgacttccttttgactgtcaaacaccctgggagggggcgaacgtcggagcttgttatcgagacgatggggtatactgatgatgactatgtcgagcgcaaagcgaatcagcataaagggatgagtacattgggtttgttgctgaaagatccccctcattggccagagcctgccgataagcatgatgcatttgcgcggtatttgtatgggcgaattcagcaccttaaatag

SEQ ID NO: 440522 - DNA, 429 bp, Serratia marcescens
atgtataagttatcggccaaaatgcttaattttgcattgttacgtccatacctgtgtttaactatcgggctggtttttacttggttaagcgctgggcaggcaacggagtatttgtattccggaaggcatttaacccgttttctgctctgcgtctctttatttgcaatcggcggtgttttcgtattctatttttttatgcgacactctttactgatggtgaaggtccataacttattgttaagtaatgaaagtggtgttgcgcgcggtgcgttgttggtccatctaaaggcgttggcaaagcgaaataacgttgagcaagaatttgaagcttatttgtcgtcgcaggaacaccctcaaaaagttgaaatctgcatgaataagataagggagcttaccttaaaaaaacgtaacgaccattcacgttcttga

SEQ ID NO: 440523 - DNA, 204 bp, Serratia marcescens
atgaatcattaccccgctgaatatgcagaaaatatcaatgccctgaaaaacgggcagggcgttgttcgaatcgaatcatggatgcccgacgaggttattgggaaactcatccgccgaaaactggaacaggcggagggcgccgatattacggtgacgtatacggtgatcacggatgaaatgcagcaggcggcccacaatttctga

SEQ ID NO: 440524 - DNA, 645 bp, Serratia marcescens
atgtcccgctatatcttgggtgactccgtgcaagtcatgtcttctttcccagccggcagtatcgactttatcctgaccgatcccccatacctggttggttttaccgatcgctccgggcgctcgatcgctaacgatacgaacgcggattgggtgctgccggcgagccgggaaatgttccgcgtgctcaaacccaacagcctgatggtgagcttctatggctggaaccgtgtcgatgcctttgtcggcgcctggaaggccgcaggcttccgtatcgttggccacctggtgtttaccaagcagtatgcttcgaaatccgcgtttgtcggctatcaacacgagagcgcctatatcctggctaaaggtcggccggcgctgccggcacaacctctcgcggatgtacagagctggcaatataccggcaaccgccaccacccgaccgagaaacccgtttccagcctgcgaccgctgatcgagtcctttacccagcctggcgccatcgttctcgatccgttcgccggctccggttcaacctgcgtcgccgctgcattgtccaggcgccgctatatcggcatcgagctgttacctgaataccattccacgggctgccgtcgcctggctgcgctgcgcggccggcgcgcggcataa

SEQ ID NO: 440525 - DNA, 222 bp, Serratia marcescens
atgaactatcagggccatgagaaattacgcgccgacgtggcggcgctgtcaaacgacatgtgggagctgcatttgcgattgagggaactggtcagcacgcatttctggaacagcgatgtattggccgatcgcctggccggccacattctgcgtgatgcgcacgatcgctaccttgaggtctgcaaagcggtcaatgaactggatcaccatttcagggaatag

SEQ ID NO: 440526 - DNA, 426 bp, Serratia marcescens
atgcaacatgctcattccgtcaacctgcaggtgtgtgaagccgatcgtctgtcattcctgccgtacctgttcgacggcgatttcctgcgcgctgaaatgcagatttacgccaccgccgatcgctacctgtcggggtatagcggcgggttctggcatttcatccgccttccgaatggcggcgggtatatggcgccggatattgatcaggtgacgttgaacaatgccgataactggttcgaaaaaaccatcagcggcgatgccgccggcattattttgacgtcgctggtcattaaccgccgctgctggttccatcacgaccgcggcaatgccggcatggtgcaaatgtatatccagcgggaagaccagttgaaagcctacatcgatacgcacccggagcgggctgatatctggcgcgccctcgactga

SEQ ID NO: 440527 - DNA, 177 bp, Serratia marcescens
atgaaactggatgaagaaacccaaaaacgtctgcgccgataccaggcgatcatcaatgaagaccgtctgcaatatggattatctccgctgacgttgccgcaagtggtcgccgccgtttttgaatatctggcagatcagccgtgcatcttcttgcgcggggtatttattcgacagtaa

SEQ ID NO: 440528 - DNA, 444 bp, Serratia marcescens
atgaactccgccaaaaactttttcctcccttcggtcaaaaaaactttttgtctccgccccttggtgccgctcttcgccgtgctgaatcagtttattgcgacggcgaatactcacagcggcatcagttatcaccccacggaggatttcaacatggctcaacaaaacgtcaaaggcgcgacatcgaagcctacagcagcatcagcactgaaaaacggcggacgttctgacctgcaggtgtatgagctgtttctcgctgtgcagcgcgcctgcggtggccgttcaaccggcacgagtgagccaccgtccgtaccggctgatgctgagtatctggtcatcgatcaaggggagtttgactctctggccgtttggctggtcgagggggttccgatcgccgccagcgatgaaatgaacctgacgcactgggtgatcagcgcagggcagtaa

SEQ ID NO: 440529 - DNA, 2079 bp, Serratia marcescens
atgtctgacatcgatactaaagcacctgcaaaaccaaaatcaaccgccaagaaaagcccggccaaggctgcatcagccaaaaccgcagcggcgaagtttgttgaagccgcactggacaaggccgagcgtaaaaatctcatgctcaaagagattacctttacggatcagaatgcgcgtattaccccccgcactcaggaagagatcgaggagatggcaatcagcatcgaggccaccggtctgttgcaaaacctcgtcgtacaccgtatggctgatggtcgatacggtgcggccgccggtgagacccgccgccttggcatggatttgttgatggtgcaagggcgttcagctgctggcgtaccggtaacgccggagtttatcgttcctgttttagtcgtcgatgaacaggatgcctatgcgatttctgtcgcggagaatgtgcgccgcaccaacctgcaatctgccgatcagctcgaaaatatccgcctgttggcgacgaaaggaacgccacctgagcaaatcggcgccatcctcggcttcagtaccctgcatgttaaaaaatgccttaagttgacaaccgtagcccctgcgctgctggagctgctgaaaacgaatcaaatcaattttgaccagctggcggcgctgggcgcaacggatgatcaccagcgtcagcttcaggcatgggaaaagagcagctattacgaaaacctccggaaaccgaaggcgttacgcgaagctgtgctgaacgatgaagtatcggcggcagacagccatatcgttgaatttgtcggactggaagcctatcaggctgcagggggtgaaacccgagaggatctgtttgctgaaagcgtcatcctgaccaatcctctgatgctggagacgttggctatggccaagctgcaggcggcggcagatgaggtggcgaaaaatgaagggtgggcatgggcagttggccgcagtcgtgaagtgcggcgttatagcggggacgaaaagaccttcgagatcctgtttgctcaggcgaaattgagcgacgaattgcagacagaaatggatcagctgctcaccgagcaagaactgctggatgacatgtttgatactgctggactcgatgcagacgatgaatgggaacatgcgccgcgcgttgagcagattgaggcacgcatcaacgagatcaacgacgccgccgagatcaataagtggtcgccggaagttcgtgcgacggcgggcgtagtcgcttacctgaaagatcgccagatccaaatccaacgcggcttgatgaaagtggaagacatcaagcaacaagaaaaagccaaccgcgaagaaatcaagaagaacaccccaccgtcagaaaaggggctttcccaagtcttggtgagcagtttatccgccgaacgtactttggcagtatctgcggcgctggcgcagaacactaacgtcgcgattgcactccatacgttcacgctggcacggcgggtgttcgacgcgggatatttctatgtattgcacacctcagtagaaagcatgcgcagcggctgcttatcccagtcagaagaggctggcagcgtgagtggcatcgctaacctgaaactgaacgagatgcatgagagctggttgaaccaatttcctgaaaattggagcgaaagttttgagtggctgctggcgtggccacagggtgacgttctccggttgttggcatactgcgtttcccacggcctcgatggccgagacagttatctcaaggataagcgggttggcaccaagctggattcggtagaaaaagccctcgatttccagatcggggaatggtggaaaccgacgagtgacaactatttttcgcggattggcaaagaccagatcgttgatgctcttaatagcgccggtgaaagcgggaaggccaaagatgccgagggcatgaaacgtaaagatgctgcagagttcgccgctgcggtgctgagcgaaaccggctggttgccgagctgcatggcaccgcagccgcaggccgaatcggaaaaccggacggatgccgctgccagttccgcaaacgccaatgatactgacactgacgatggcgttgccgcctaa

SEQ ID NO: 440530 - DNA, 465 bp, Serratia marcescens
atgaaaaaccaaaaattgagcttttcgcagttagccgtgatgagtgcctttgaactggaacagtatcgtgaccggggcagtgaggcgcggcggcagctgaacaatattgtgcttggccagcttgcgctgccggatggggggagcgccgttgcggaggaggccagcgagttttgcgggctggtgcctgtcgtttgccggatcagtccacggggggatgacaatctggccatattcctgtgcagtgccgggaatgaagtgccggaatggtcagcttttctcccataccaggaaacaacaaatcaggcagaccagggcaatcgtgttgcctggttgcacactgcggaaaattttgacccggagacggtcaacaaagttctggagactgtcggcgattactaccggcacgggtttaaccagtctgcgcagctggccgccgcgctgcggatgggagggctgtgcgtatga

SEQ ID NO: 440531 - DNA, 732 bp, Serratia marcescens
atgagaattatacaaatcactgatacacatatttattctgatgataataagtttgggttaaaacatctttctaacctgaaatatattgttgactttatcgagtcaaatgatgagcagattaacgcagatttaatcatggttactggagatatatctcatgatggtggagaggcatcttacgagaggttttttaagaccatgtgtgatgtttccttacctttctatgttattcctggaaaccatgataataaacaggttttgcattatgtttccgataaatatgattgtggtttaaatgtcaattcatttagtgataaagattggcgtatactgagtgtcgattcagttgtagataatgaggattatgggtttataaaaaataaagagttggttgattttgaaaaagaagttttagcaagtcgaagtaaaaaaattgcagtgttcttacatcatcatcccattcaagttggcactccgattgtagatgattgtatgttaaagaacgcatctgaattccttgatatttgtcagcgtctgaatgttagttttattggttcaggacatgctcatacactgtttcaacgtaagattggagataccctggtgtcagtctctccagctgcgtgttctcaatggaagaatggaactaaagaggtttgcttcattgagaatagtgcgtttagtgtggttaaccttggtgaacatgtacatgtagcaccttggtttatttga

SEQ ID NO: 440532 - DNA, 615 bp, Serratia marcescens
atgtcattgaaaatgataggcgaaaaccttacttatctcatgcgtttgcatggtgttgacgccaatcggctaagtatcgaaacagggatcggcatagctactatcaacaacctcagaaagggagtgggaaatccaacgatatccaccctttcctctattggtgattatttcaacgttaaagtaggtgatcttacagataacgatttgagaattgctggggacgttaacaagaatgtaaaatcaatcccccttataacctatagtgatatagagagatatctagcaaataaaatcagatcgactggtacatacacaacagaggttgatgacgttgaagatgattcgcttttcgctgttgaaataacaaacaactccctttcccctgaattagatcgtggcacatattgcgtaatatctttaaatgaacaatattgtgatggtgatatagttttagttaaattaaagaactatccaatatgcttgagaagagtattcgtttcagatgaaaacttacaatttacaaatatatctcttgaatcagacaacgtagccaagtcttatagtgactacacaattgtcggagtattattaaaaacagtaaagaggatgaagtaa

SEQ ID NO: 440533 - DNA, 168 bp, Serratia marcescens
atggccactaaaaataagctcctcagcattctttcagatgccgaacaggaggcactgtatggcctctccgatttcgatgatgcacagcggctggagtttctggctctggatgaatcggagctggcactggccagtagtcgtcagggacttcatgctcagatttattaa

SEQ ID NO: 440534 - DNA, 900 bp, Serratia marcescens
atgtataaacctcaagtgaatctgaaagatgaaagtaagaaatcctttgctgatgacgtggatatgatatggagaaactacggcgagtctaccctggtttctacctttagcgaggatttaaaaacctttatgcatacaattaaggaagacgtttataaggagggagcgaagcataccgaagatgccggagaagctgataaacatgcaacgcaggtggctaattatatgaaaggcgtcatttcaaaaatttatgaaaaaaatgaattagacaagaagacaatgagtgtattttctcatatttacacatctcgagggtatgagaagataaatgatgccatgcgaaaaaacaaacctattgacctgaaaggttgggaggtgattaattcaattaagaatgtacatggggaggatacgttcaagggttctgtgatgaaatccgttcaatcagaaatagagtctgagactaataagttgaatgataacctggttaatcttaagagaattgtctataaagataaaaatactcagaaaagagatttttatcgtggacaagaccttcctgattccttagtattaaagtacaaagacgcaataagtaaaaaaacggtgttctacagtccatcattcctgtccacatcaacagataagtcagtagccgaacgttttatgaagccaagtgttggcaacgatggagttcttttccaaataaatggatttagtccaacgcttatgcgatcaaactttgcacctaacaatgaaaagggggagtacatattctctccacttgccagttttgttgtcgaagccgttgggacccgaccagtaaatgctaaacaacgcataatcaaactgaaagaggttgatggagatcattcagataaaactccattgttttattaa

SEQ ID NO: 440535 - DNA, 327 bp, Serratia marcescens
atgaccattgcacaaaaactggaacaaaaaggcctggagcgcgggctggaaaaggggcgtttagaaggacgccaggaaggggtgtttgagggcaagcttgccgttgcccgcactatgctggctaacagtatcgatcgcgattccgtaatgaaaatgaccggtctgactgccaccgacctggcgcaaaagtttttcaggtctgcgtgtggttggtcgatggctccgtcgcatgatgccggtattgtggaagctgttctgagtaaaatgcaatttaataaaacaatggagttttatctgaatgatctccatcaacctctttcagtttga

SEQ ID NO: 440536 - DNA, 984 bp, Serratia marcescens
atgttggtgactatgtctgataaagagttagttcgcgcccagattatccagtctgtttgtgaaaaacggttacgtcgtcgtgatgcagcaagccagttggatctcagtgaacgtcaggtccagcgtctgatggataagtttcgcttgtcaggaactcccgggcttgccagcttaaaacgaggtaaaccgggaaaccatagtcttccggagcaactaaggataaaagttctggcactgctgcgtgaaaactacagcgactttggacccactctagccacagaaaagctcagcgaacgccaccaaatatcgatctctgtagaaaccgttcgtcactggatgattgccgacggcctctgggttcctcatgctcgacgcaagcctcgagtctatcaaccacgctatcgccgcgactgtcttggcgagctcattcaaatcgacggctcacaccatgactggtttgaaggtcgtgcatcaaaatgctgcctgttggtttacattgatgacgctaccggtcgactgatgcacctgcggttctatgaaacagaatcggctttcgattacatgctggcgacgcgggaatatattgataaacatggtaaacctgtggcgttctacagtgataaacatgctgtttttcgcgtcagccaggctgaaactcgccgtactggcaccacgcagtttgggcgcgttctgcatgacttgaacatcgagctcatctgtgccaacagctcccaggccaaaggccgcgtcgaacgtgccaacttgacgctccaggaccgactaatcaaagagatgcggctcgagaacatcaacagcatcgaggaagccaacgcttggctagacggcttcattctggacttggacttcaaccgccggttcgccaaagccgcaaatgcaggttggcgatactgcctctccggaaacctttatccgcgagctggcacgtggcacgccgtgcaccacagcacgaggaggttcttatga

SEQ ID NO: 440537 - DNA, 447 bp, Serratia marcescens
atgaaaattaattccgcattgttaatgactttgcttttcataattcattctacctatgccattcaggaatgcacgtcattgacgagagagattaataacgaaaatatgaaccaatacaaggcgctggtgcatcagatcaaaaaagacgttaagtcatgggtagaaagtattcgcccccaagagaacttaagagcactattggatattgcttacagaattgaggggcggagcatcgagatttttatggtacagtcgcaatggagaggggggataccgagaaaaaaagagatccccacagtcaagataagccatatccacgccccggcagaatggcgaatttactgtatgcgagtcacgcaaaaatgggctttgtacgacagggcaaagacgttgagtgatgcgttagggattgtacatctcgaccaacatggctgctttttcggataa

SEQ ID NO: 440538 - DNA, 234 bp, Serratia marcescens
atgttcaacaataacgaaaagctggtcgcagcgattatggccaataaaacggcatggagcgcattgttgggggcgcttattgcccagggcacggttgatcctctactggtgcaacagcatttgaaaacctgtcagcgggaattccaccaacgggatttggccgtgatttcggaggcgcttgataagcatgttcaagccctcgaagcatggatacaaacgtcgtttaatgcgtga

SEQ ID NO: 440539 - DNA, 270 bp, Serratia marcescens
gtggaacagcggcacccggatcaacgaggcgctggcgccgccctacccgcagttcccgtcaccccgcacaccttccaccacagctacgcgatgcacatactgtatgccagcattccgctcaaggtgctgctggcgctgatggggcataagtcgatcaactcgacggaggtgtatacgagagtgtttgcgctggatgtggcagcatgccaccgggtgcagttccagatgccggaagcggacgcggtggcgatgcttaaaggtcggggctga

SEQ ID NO: 440540 - DNA, 132 bp, Serratia marcescens
atggttctggaaatcaaccgtcctctaagcttgtttgtgtgggcattatttatcttcactaccattgttattaccctgactatccatagtcaggatttggacgattatggaaataattttccccaggagtga

SEQ ID NO: 440541 - DNA, 543 bp, Serratia marcescens
atgagtgaacgggcatggttgtttgaggtctttcgtcttcactatcaggaacagctgtctcagaaccgcatcgccaaacagctggggttgcccaggtcaacggtcaacagctgtttccagcgcgctatcgcacttgcatgttctgaagcatcgtcccagggactggcaggagggcgaaaaaatcgccagaccgatgacgccgacgtgcttgcgcggatccatggcgttatcggtgaagtgccaacctatggttaccgtcgcgtctgggcattactgcgccccgaatctgagacgctggcagtggcggtcgtcaacgccaaacgggtgtaccgtatcatgtgccagcatgcgttgttgctgagacgaaaacccagaatgcagccggtaggtcgggcgcataccggaaaagtggccgtcagtgaaagtaaccggcggtggtgttctgacgggttcgagttccgctgtgataacggtgaaaaactccgtgtcaccttcgctcttgactgctgtgaccgcgaggcgttgcactgggccgccgagtga

SEQ ID NO: 440542 - DNA, 180 bp, Serratia marcescens
atggcagaaagcttcgtgaagacgatgaaacgcgactacatcagcgttatgccacgtccggatgccagaacggcagtgcagaatctggcgatggcgttcgagcattacaacgaatggcatccgcacagtgcattaggctaccgttcgccgcgggaatatctgcgacaccggcaggcctaa

SEQ ID NO: 440543 - DNA, 285 bp, Serratia marcescens
atgggaaaagctatcctgtctggcaccttgcaactcgaaatccttgactgtctgtttgcaaatcacccaaacactctcccatggtatacgttcgtcgaacaatttggcgaactggatgatccttacctcatcatcaatatacgacagctcatggccgacaagctggttaccccaaaagcaatcaccctcagtgatggtcaggagcgcattgtcacctctaaattaaaattgacgactgatgggtatcaatttatcgcgcataatccccctaggcataaatactaa

SEQ ID NO: 440544 - DNA, 1257 bp, Serratia marcescens
atgaagcatagaaagggatcgacactatatggcatggcttattggggagtattcgttcttatttacttcttattagctacaatttgccttcaaacaagagatccatggagcttatcgagtacagtctggctaccatcaggactgttactgggagtattatgtgttcttcctccttcacgttggccgctatgggtcattacagcaagtgctatacacttttctgtcagcctaatacatgataggcctgcagatattgctctaacatttgctattattgatccagtaataatttgtccactggccttcatctggaataacttacacaaatatgcaagaaatatatcgtatcgagcccagacttggctattactcgtgggtgtaaatttcggtagtattctgggggggctattcagtgatattcttttgaaaaaattaggataccctacctcggttacacatttccttacatgggggatatctaatgctaccggctgtttagctatagctccactatttattgttaatcaattaaacaaaggtcgtaggcaatggctctcatatccacagatgtttgcagctatgatgattattccattatgcatcaccccattttttttgcagtcacatctattttgtaatgaattggtatacaacacactactatacatattgctcatcttgtctcttctgctcgccgcatggttgccattgttcccattatgtctatatttcgttttactaactatgcttgctagcttagcaactttctataactatggcccttttcctgcaatgttaaaaggtatgcaaacgataatcgcttcccaaatttacttgctggtgctcatatcgcttggattattagtatctacaagagagcagcatcatcgttctaaatatcagcgactcctgcgccaaaaatgcttgctaaattcgttccttcagaacagacagcctgtttcgttctgtttatcgagagatactggaagaatagattggctatcacatgaaacagtgtatgggttatccccttcacaattaggtactttagccctcctgctggcacatattcatcccgaagaacgatataaattgctaggatggataaatgattatactggggaaagtagtgagcattgcttcgatattcgtatacttctttcagatggatgttaccataatttaagtgtttgtttttctctatacccatcccaagatgtattgggtatactagtactaaataacccactgaaataa

SEQ ID NO: 440545 - DNA, 624 bp, Serratia marcescens
atgcgtaaagtaactcaagtgaaaaacactatatccatatcttttatcgggggtgattgcttttttaatgagggagttcgtcaagctattaaactttacttcaacagcaaaaacgtcaaggttgtttgttataagagagataactatcggctggctgatattgttttccattcggtgagatgggaatgggaaaaatgtttttgcttttttgttcgcccttcaaacttaaaacaaataaacttcgctgtagtgatgcctggatgtaaaaaaatatcaagaaaaccaggttgtttttatgagtccgaattgatatatcataacatatcagttaaccaattggtggaacagataaaaaacacatgggagaacagaggaaagaacttatcatcccattattgcacctggtgttcaaagcattctctttcaccaagagaaaaagatgtaatgtcatgtatgcaattggaaatgaaacctttttatatagctaaaaatctagggttaagcccaaaaacaataagtgcacacaaaatatcggtaatgcaaaaacttggatttaaatccaacgtggaactctatgattggttacgcgatagaagggcattccaattcttaaacaagcattga

SEQ ID NO: 440546 - DNA, 1725 bp, Serratia marcescens
atggccgaaaaaatacacattgatatcacccggttgaggggcgcctttaaagagggggcaacccccaatgaacaggattatggcaatctcatcgatctggcctcagcggggagcaaggccctgggggctacggctacggatgccacgacccctgttcccggtagtggactggaggttcgggatggcaagctcgcaatcaaggcgggtcaaggagtctttgctgacgccaacggggttgccgtaaaggtcgataccaagacgctttgcgtgacaaaggaaaacgcactggcactcaagctgaagccggatggaggggtgggggctgttgacgagacagggttgcacatcaaggctggtaccggcctgaaaaccgatgcgaaagggttatcggttatcctggactccaagggggggctcaaaacagacaacaacaagcttgcggtggctgtggacggcgcagcgtcgggtttaacgtttgacagtaagggggcacttaaggtccatctggcgacatcagaggataattacctcaccgcagacgccaatgggctggcgattaccaaggctggcattgaaaaaatcaagaccatgctggaagcggaatcgacggcggcgctccagaaggctgttgagaataccgaccatggtgagcatccagacacaaagtcgggtggcgagaccgaaaccgccatcgctggcgcattaaataccgcttacaaaaaggggtatgaaaaaaaacacacgcaaaaccagctcaccgtaacccccgcactttcccaagtgttggacgtgggggcgaccaatgcgaccgtgtccctccagtcacacctcgctgccgacagcacgctgatcagcccgcatttttattttatgccggtgcagggcgatgaagctaactggaataaatttgtcggcacgcagggggtgtctgtcagtggggacctgcacctgtctgccgcgacagtgggccaaggcaaggtcaaggtgctggcgatggcggtggcgaatgtcgcatcggagccggggttaaatatcgccgcggcggaagtcacggtcgaggtcaccgtgcggccggtggtcaaagacgtcagtatttcaccgagcggggggctgtcagtgtatgagtctctgacgctcaactacaccacggttccggcggcgggtgtggcatgcacttatcggtgggaagtccgaaaatctggatctgacaccgcctggcagtcggtcacgggtgcgaccgcgcagacgtggacgccaggagcggcttatatcgaccacgaggttcggggatttgtggcgccggcgatggcgcacattaccggtatcgaggttcacagcagtaaccctgtcactatctatgataaaccgctcgacatcgcccatattgaagtgaatggccatacgtttaagcatgatgaagggttccccactacggccttcaaggcggcaaggtttaccctggtcctgccgtcagacattcgggcatctgactgtacctggagcaccgatgcgggtagagccattacggtgacagaggaggcttcaggggtggtggtgacttttgtcagcaagcctgcccgagcgcaggtgaccatcaccgggaagcgcactggccatgcccctatcgagtaccgtttcaccctgaagcactggtttaccaatcttggaggcagaaccatgacctggtccgcggccaacgaggcctgtaaacactgcgattcataa

SEQ ID NO: 440547 - DNA, 1707 bp, Serratia marcescens
atgacaaaaatcatcatggggcggttacggttacggttgcacacggaggagcggctggcggagcggttgcaaaaccgctgcagcatctggtttcgggcgcacctggagcgtgcgttggtggacgtgttcatggattacgccaacacggggaaggcgccgcgggtgatagaccggttgaccgtcaacgtgggcgacattccactgtcccgctttgaggcggagatgcttgagcgcgttctcacgcagttgaaagagcagttgaccctgcggtcgctgacgcgcccggtgcctgggcggcaggcaccggagcgcgccacctcggcagagccggggctggccgccgaaccggcctcggtggcctcaacggcccctgcctccaagcccgaggcggtatcggcgtcaccaccggcacgcctgtttgcgcatctgctgcgttatctggataccggcgtggcggttgacgggcatctctggcgttcgcaacaggcacgagatgcctggttgcaccaggcgcttgacggggcgttgcctgcggcggggaccggaggcggcacgcgacctctcccgccgcgtatcgcgctggcgttgagggtgctgcagccccgggcccgacagcggctcgtgacaacctggtcggggcaggcgataagcgcactggcctcctggttgaccccctcgctccggttgccgtctctggccccgtccgaggcgccaggaatggtgccgctggcggccctgctcgcgctgcaacgccaccctgtttccgtcccggatctggcggccatcatggatcgtgtttccctgagccacccccttcccgccgtgctgcgtgacggcgggaagggggcgggggaagataccgggggcgtgccatcggtgactggggggaaaggccgggtgacgttgccggttgagtctgtcgccgaacagtggttcggggcgctgcatcagacggctttgccggcggcgttgcgcggccccttgcgcgcctggctgtgcgaaccgatcctggcgcgggagagggggggcatcctggctgacgtgtcggtgtcggtgcatcggcaactgcgggcaatgctcggtttgccgttgctcgcgcaacacaagacggtggcacctgtcacgccgggagcgaatgaccggccctgtgcggtgaccgacgccggggaggccattgttcggagcgcgcggtcattcgccgacgaggacgatgttccccgtcctctgacaaatgggggactggtgttgctctggcctttactacctcggctgtttagtaccttcggctggctggatgagggacagtttatcgatgaacaggcccgctggcacgcgataggctgcctggactggctggcctggggcgatccggatctggcgcaatggcgtacgccctgtacagcattactgtgtgggctggacctggatacgccgcatgaagcctgcctaccgtccctctcacaccaggccgaccttgatgcctggctgggcggtgcactggcaacggtgcccctgctggcgcgctgcagtgctagcgatttgcgcacttttttcctgcaacgcacgggcacattcgataaggcttcccggcggctggtgattgagccggaagcccccgatgtgttgttacatcaattgccgtggccgctgacccccgtggtgctgccgtggctgcctgctcctctttgtgtggattggacctcatga

SEQ ID NO: 440548 - DNA, 1092 bp, Serratia marcescens
atggattataaagtaccaggggtgtatgtcgaggagccgaacgggctgtccttgtcgattcagacaggggaaacggcggtccccgtatttgcgtttgaaggcaaccatacctggctgggtgcacatgcggaaggtgtgactgctttctcatcatggttggacgtagtcacgcttacagcgacccaagagctgaaagatgacctgctgtatcagtcgctgaagctgtatttcatcaatggcggcggccattgctacgttgccccggtgagcaagctgtcagcgctggtgccggcgctggacgacgttaccttgctggttcaggccggcgtgtcactcggttcattcacgccgcaggtcgcaacattgtgtaaacagggtcaggcgttgtttgccctgttcgacggccccaagggcgaaatggctaccgctactgcggtgggggcagagcaggctaaataccccgaccagccgcaggcggcggtgtattacccctggctgactctcccgggtttaaacgccgacattccgccgagcggcgctgtggcaggggtttatgcccgggtagacagggagcggggtgtgtggaaggccccggcgaacgtcgacatcatcggggcaaccccaaagtacaaggtgtcagatgacgtggccggggcctgcaacgtgcccgacggcgggcatgcgttcaacgtcattcgggcatttcgcggaacggggccgctgatttggggggcgcgcacactggctgccaaagctgatacatggcgctatgtgccggtgcgtcgtttgtttaacgccgctgagcgagatattcgcatggcgatgagcatggcactcttcgaacccaacagccccctgacatgggagcgggtacgcggggcagttgaaagctacctccacggtctgtggcagcagggcgctttgttgggtgaaagcccacaacaggcgtatttcgtgcagattgggctcggaacaaccatgacccagaacgatattaaccaaggccggatgattgtgaaggtcgggttggcggcagtacgcccggcagagttcatcgtgctgcaattgacgcaggatgttgtgcctggttga

SEQ ID NO: 440549 - DNA, 291 bp, Serratia marcescens
atgttggcttcgcttgatatcaacgtgtgctcattaaaaaatcttttagacgccaacctgaggtgtgaggctacatgggaactaataatcatcattgatttatatttttgcagtgaggcacaggtgcttcttgaggttgaagaaataaaatctcagcgatcgggaagatttgttattttcagtgatattcccagaaaaagtagcgaggatgtgatttttatcaatcgaagcgagaaggctgacgaaatgaaaaggcagttgtatcagggaatcttgtatacgttgtattag

SEQ ID NO: 440550 - DNA, 2142 bp, Serratia marcescens
atggggctttgtatgggtaaatatcacaacgatcaaccgatacacggtgggataaatgatcctgacttactaaacagacttgactttgcaaataatttagcaaatatactattgttaaactacgatgatgattgtcttaccgtatctttggagggagagtggggatatggaaaaacgtcagttataaatcttattaagggggctttgaatgaaaaagattcgttcccaatcataattgaatataacccttggttagctggtaagcctgagtctttaattcaggatttcttacttcaattctcttcacgacttaatcttataaatggctctgcagtggctttaaatgctgctaaggaaataataaaatactcgagcttgttcaatgttgcaaagcttgttccaggagcagaaccatgggcatctataataggaaagtctctctctaaaattgggagtactactaagaagcttgctgaattagaaaacattgatcttttgggcagaaagaaaaaggttgaggcatctataaagaaaattaaaaacccgatagtggtaattatcgatgatatcgatagattgaccccatctgagacattccaggttttgcgccttgtaaaagctgtggctgattttcccggaacttcatttcttttggcatttgattcaaattatcttgtatctgtattggataagaatggtattgttaatacgtcggaatatcttaataagatagtccaactacgagtaccccttcctgtaatttcagaaagaagtatgaacgagcttgctaatttggagttggagagtctgagtgaaaagaatttaacagatagatttgaatatgatcaagaaagactaagttggatttatcacaattacagtaagcatttaatcaagaacccaagggagctgaaaagattttttaaccacttaaggtttgtgttagggcaggtagaggggcaggtatgcttctctgacctttttgcattatcaataattgccactaagtttaatttagtatatgaacatattaagagcacgccagaggcatatataggcaagaggatttcaaatgacgggcttatgatggataagctacaagaagtagtagattcatataggcaagagcggagtggaaagctaagtggcttaagtgaaaaagacaggaagttaattgaggagcttcttggggatatatttcctcttctggcctctggcggctattcgcattatggtgtttctgatgctgactctgcagggagggtatcagtaccacaaaggttgcatgttgcatttcattataaaacccccactggatacgtgtctgatcaagatataattgattttataaatggagatgttgataggaggggatttcttatgtgggtgaattctgaggatgctgatgatcggttctttgaaatgatgacaaattattcacgtatatgcagggataaaagttttgatatattgacttgtatttatgatgaatatcttttttctgaaaaactgatttcttcactggaagctaattatgggtttatatctaaagatttatacagaaaaatgaattggcttacaaataaaataatatcagattgtgatgaaaaatatacattgttgagggggttgatcggtagggaggaaagtgctcccttggctgctgatgttttatttaaagttcgaagtcaactgcatggcgacaactatgacagtccttgggctactgaagagcagttagctgaatttgagaaggtctatcaagaaatggctgaaaaagccatatttgataaaaaatatattgataatcatcttgaggcgcacatattttttgagttaaaaagatcctcaagagagagagcgacttactttgttaactctattttgtgtggtggtgaagatggcataattagagtggcggaaatcattgggaatacggggcgtgactctacaaatggtccttttgttcaagttgatgaagatacttttggcagtgtgattgatttagatgatcttaggagaagagtcaaagacatagagatttcaagctatcctatccatattcaagccacacttaatagtattcttgatggacgaaagtattaccttagagatgggacgttagtagagggatggtattaa

SEQ ID NO: 440551 - DNA, 171 bp, Serratia marcescens
atgatggggattatcccgaacaataccggcggcttcggggacgttaaaaaagccgctcaggtgtttgtacgcaacgagctaacaccgctgcaagaacgcatgaaggaggtgaacgactggatcggggaagaggtgattagattcgcgccgtatgagttgccgaccgaataa

SEQ ID NO: 440552 - DNA, 231 bp, Serratia marcescens; identical to SEQ ID NO: 432574

SEQ ID NO: 440553 - DNA, 486 bp, Serratia marcescens
gtggccgccgtgctggcgctggcggtgctgctgccgcaattcagcgcgctgcagatctctgaggccgggttgcgcctgctggccgatttcgagggctgccgtttatccccttaccagtgtcaggcgggcgtctggacaagcggcatcggccacacggccggggtaaagcccggcgcggttatcagcgagcgccaagctgccgttaacctcgttgccgacgtgtatcgcgtggagcgcggcatagggcgctgtatgcctgtcacgatgccgccgccggtttatgacgcggtggtgtcctttgcctttaacgtcggcgtcacggccgcctgcggctctacgctggccggtttcatcaagcggcaggactggcgcagcgcctgccagcagttaccgcgctgggtgttcgtcaacggcgtcaaatcgccggggctggaacggcgtcgggcggcggagctggcccactgcctgatcggggccgcgcaatga

SEQ ID NO: 440554 - DNA, 429 bp, Serratia marcescens
atgagccgcgcgatcggctggtttctggtgctggcgctggtcgtcgccggttggatgaaatggcaggttgtcacgttgggtgaacggctggaaagcgcccggcaggagaacggccggatagcggcggcgctgaccgatacccgcgcggcgatcgacacgctgcaggcggcggcaggtgtgctggcgcaggaagaggaaaagttaaggggcgacctaaacgccgcgcaccggctggcactgacgcgcgagcagaaaatacagaggctactcaatgaaaatcagcaattacgcgattggtttaacactgctttgcctgctgacgttgcccggctgcaccagcgccccggcttcaccggcgcctcggattatctacgttggctgtccgaaagtgagttcgtgccaaatcccggccagccgcccagcgactaa

SEQ ID NO: 440555 - DNA, 477 bp, Serratia marcescens
atgttaaaaccgcaacagctccgcgctgagctgacacgctgcctgccgtggctacagcgcaaccctgaaaacctgcaagttcgggtagagcgcggcaatgtggccgccacgcttgccgtctcgctgtcccatgagtaccgctatacgctgaacctgctgtttttggactataccggcgatctggatttaatcatggtgccggttcaggcatggctacgggaaaaccagccggacataatggcaacggaggaaaagcgccgcaccgggatcacctttgcgagcgactttaacaacaacggctcttacgatttcagcgtgtcgctgcagctgaccgaacgtgttttggtgaaagagcaaggcgatggcgcgttgcatgttgagcacctgccggagccgccgttaccggaggacgtgacgcggccgatgcagctctttgttcacggcgaattagtgagtgaatggcatgagcgagcttaa

SEQ ID NO: 440556 - DNA, 447 bp, Serratia marcescens
atgagcgagcttaacccctttgacacccggctggccgggctgattgccaagctgtcgccgcagtcgcgtaagtcgctggccgttgccgtgtcaaagcgactgcgcgccggtcaacagcaacacatcaaacgccagcaggcgccggacggtacaccttacgcgccgcgcaaaacgcggcttcgcagcaaaaagcgcctgcgcgatcgggcgatgttctccaagctgcgcacggcccgctatctgaaagcccatggcaacagcgatgcggccgtggttgagtttgtcgggcgtgtgaaacgcatggtaaacgttcaccattacggcctgcgcgatcggccgacgccgcacagcgaggcggtaaaatatgaggcccgtccgttactgggatttggcccggatgacgtcaaaatcatagaaacggccgtgatagaacacctcgcagaataa

SEQ ID NO: 440557 - DNA, 627 bp, Serratia marcescens
gtggctgaggtcgagctgaacgtgatcggctttactgcggcggcctttgttaaagagttcccccgaccagaacggataagcggagtgcgccagactcgacggagtggaaaagtaggtggtgcgccaccgcttgtgcagcgacatcccgctggcgactttgcgcagctcctgaaacttcgggatccagaaatactcatcaagatacagattgccggtgtagctctgcgcggtgcgcacgttggtgccgaggaacatcagccgggcgccgttcggcagcaccatcggatcgcctttcaggtcaacctcgaccagccgcgcaaaatcaatgatgtaattgcggaatacatgcgcctgcgccttactggccgacaagaaaatctgattgcggccggtggtcagcgcatcgagcaacgcctcgcgggcaaagaagaacgtggcgccgatctggcgcgatttaaggatgttgcggatacggtgttgcagcccggcgcgataccaccccatttgatactcgaaggtggtttccgtgaagatactttgcagtttctccacggcggcctcgctgaacacgttgcgctcggcgggcttgcgctcgcctttgttgcggttggcgacgttcgggtttaa

SEQ ID NO: 440558 - DNA, 282 bp, Serratia marcescens
atgaaagacgcaaaagaaaataccgttaccctcgacaccccgatccagcgcggcgaaaccactatcgccgatgtgcaggtgattaaaccgaacgcgggcgcgctgcgcggtgtcgggctggcggcgatcgccaatgccgacgttgacgcgctgctggttgtgctgccgcgtgtgaccgtgccgaacctgaccaaagaagaatgcgcgcgcctggaattgccggatttggtggcgctggccgggaaagtggtcggttttttgtcgccgaactcggcggcgtaa

SEQ ID NO: 440559 - DNA, 870 bp, Serratia marcescens
gtgaattacgatttccacatccgctacaacacccttgacctgtgggcccgttatcaggatttccagacccgtttacgcgatgcaattgttgaacgtcaggcgcttgaccgcatcatgatcggctttaacggtacgcaccgcgccaaaacctccaaccgcgttaaattcccgctgttgcaagacatcgggccgggctggttgcagaagtaccgcgagaatgcgccgggcagcgtgatgaataaagtcgtggcggaggacggcagcgtggtgtctgaaaaagtccgcgtgggtgccggtggcgattacgccaacctcgacgcgctggtgatggatgccaccaataccctgattgcaccgtggtatcaggaagacccggaactggtggtgatctgcggtcgccagctgctggccgacaagtatttcccgctggtcaatcaggaacagcccaacaccgaagcgatggccgccgatctgattataagccagaagcgcatcggcaacctgcccgccgtgcgcgtgccgtacttcccggcggatgcgctgctgattacgcgcatggataacctgtctatctactggcaagaggacacgcaccgccgccatatggtggaaaactcgaagcgtgaccgcatcgaaaactatgaatccatcaatgaggattatgtggtggaggattacgcctgcggctgtctggtggagaacattaagctgttaccgacggagccaaaaaaagatgaaatcgccgagctggccgaggccattgttaaggcggtcaaagtagccgccgcaccagcggagcctgccgctgataccgaggtgaaagccccggaggaagcaccggcagacgacaaagcgaaaggcggtaaataa

SEQ ID NO: 440560 - DNA, 408 bp, Serratia marcescens
gtgaccgtcaccgtgttgtcgcgggacggcgacggcaccgccagccccgagctgctgcaggttgtccgcgacgcgctgaatgatgaggacgtgcgcccggtcgccgatcgcgtcatcgtgcaatcggccaaaattgccccgtatgttatcgaggccgttttatacctgtatcccggcccggaggtggcgcccatccttgacaccgcaaacaaacggctacgcgcctatgtgcaaaatatgcggcgcctcgggcgcagtattcgacgctcaagcatgaatgcggcattgactgttgaaggtgtcgaacatgtggaaatcatcaagcctgctgttgacatcgtgctggataaaacgcaggcgggttactgcaccggcgtgaatattaccccagggcgagccgatgactaa

SEQ ID NO: 440561 - DNA, 486 bp, Serratia marcescens
gtggccgccgtgctggcgctggcggtgctgctgccgcaattcagcgcgctgcagatctctgaggccgggttgcgcctgctggccgatttcgagggctgtcgtttatcgccgtaccagtgtcaggcgggcgtctggacaagcggcattggccacacggccggggtaaagcccggcaaggttatcagcgagcgccaagctgccgttaacctcatcgccgacgtgtatcgcgtggagcgcggcatagggcgctgtatgcctgtcacgatgccgccgccggtttatgacgcggtggtgtcctttgcctttaacgttggcgtcacggccgcctgtggctctacgctggccggtttcatcaagcggcaggactggcgcagcgcctgccaacagttgccgcgctgggtgttcgtcaacggcgtcaaatcgccggggctggagcggcgccgggcggcggagctggcccactgcctgatcggggccgcgcaatga

SEQ ID NO: 440562 - DNA, 387 bp, Serratia marcescens
gtgcgtgtgccgtacttcccggcggatgcgctgctgattacgcgcatggataacctgtcgatctactggcaggaagacacacaccgccgccatatggtggagaacgccaagcgcgaccgcatcgaaaactatgagtccatcaacgaggactatgtggtggaggattacgcctgcggctgtctggtggagaacatcgagctgttggccgtcaagccgaccgagccaaaaaccaaggccgcactgccgacctccggcgatgacattaaggcgctggccggtgccattgttgaagcggtgaaggttgccaccgctccagcggagccagtcgccgaagtgaaagacccggaggaagcaccggcagacgacaaagcgaaaggcggtaaataa

SEQ ID NO: 440563 - DNA, 339 bp, Serratia marcescens
ttgttcctgttcgagaactacacccgcaccgcgcaggtgctggccgatacaatggccgaggcgcacctatgggccgttgaccgcccggtaacgcctacgctggtgcgcgacatgattgacggcatcaacgcgaaattccgcgagctgaaatccgcagggctgattatcgacggtacttgctggtacgacgaaagcgccaacaccaaggaaaccctgaaggcgggcaagctgtttatcgattacgactacacgccggtgcctccgctggaagatttaaccctgcgccagcgtatcaccgatcgctatctggcgacgtttgcggcatccgtgaaccgctaa

SEQ ID NO: 440564 - DNA, 213 bp, Serratia marcescens
ttgctctctgagctgctcgaccagccgcagaacgacgcgctgcgcctgcagatcatggccgcctgttacagcgcgattttggcgtgggagccgcgcgtcaagctgaccggcatcgcttttaataccacctatgacggcaagatggtgatcgacatcaccggcacctgcaccgatgcccccggcgcgctatcgctgtctgttcctgtgagctga

SEQ ID NO: 440565 - DNA, 219 bp, Serratia marcescens
gtggtgatcgttacggctgacaaaatcacgctcgatgcgccggaggtggtttgcaccaacaaactcaccaccggcacgctggaagtgcaaaaaggcggggagatgcgcgggaacatcgagcacagcggcggctcgttctcgtcgaatggcattgttgttgataagcacacccacggcggcgtccagaccggcggcgggagaaccgataaaccctcatga

SEQ ID NO: 440566 - DNA, 957 bp, Serratia marcescens
atggaaagttatacatttgaattggaaggtaatgtatttggattctttcagcgcaatgaaaatgattgtctattatatattgacaacggtatgttttctgaagtgcaaaaatataattggagcctttggaaaaaaggggaagataattaccacgaaaaatacccagacacagttgaccgtgaggaaactgctagggcaattggttacttttcttggcgtcagatttatgattactgtaaataccaaccacgggttattaatataaaagagaaatccgaagctggattatattatccaagaatgaacaaaggggagccaaagttacaccatcagcaaataaatggatctcaagtccttgatgaagtgagatcatatggaaatatatgcacctcattaacagagctattcaactatatagatcctgacgagagaaacctcaattgcttcggaagtaaagcaagagaaatattaattattgcttgtactgaagtagaatacttacttcaaagttttttggtagagaacaattaccaagcaaataaaggtagatttagcaccaaagactatgtcaaatgtctcgactttttaaaattaaacgaatactctgtggaattggtattctacccctctctgaaagattggagtccatttcgtgactggagtaagtcacaggccactaacagcctacattggtatgatgcatataattcagtcaagcataatcgcggtgcaaacaagcagaaagcaactcttgaatccgtagttaactcagtggctgcaattcatattatcctcgtagctcaatatggatacgaaatatttgacagccctctacagtcaaatttttccagcatatttaaaaccatcaaatatccaaatttctcaacaactgagcttcaatgcccattaatggataacgaaaaaatattgtggacaaaaaagggttacctattctga

SEQ ID NO: 440567 - DNA, 1773 bp, Serratia marcescens
atggctaatgaaaatctagatatcgattcaaaaacagccgaagaactatacgagtggtatttatctgaaaagttaattatcaatcgaagatatcagaggaaattagtttggtcattagatgaaaaaacagctctaatttcttccatgatacaacagtatccaatacctttacttctctttgtatctatcgacaataagagagagatcctcgatggcatgcaaagactggagtctttgatgagttttattgagcaaagattctcgttaaatggagagtattttaacttggatgcaatagccctcacaaaagaactaaaggatgggggaaaattgaatcagcaagagcctgttctgtcgagagagaaatcagcattaatcgcacgatatagattcgctatttcagagtattcctcttcagaagataacattgatgaggtgtttagacgaattaactcaaatgggaaaattttatcaaaacaagagctgcgtagtgcaggatgtgtaagcaacttttcagagttggttagaaaaatttcaaccgtcattcgtggggatactacccataccgatgttatggggctaaataaaatccatcaaatatcaataagcaatgatggattgaactatggaataagcatagatggtcacttctatataaagaatcatattttgaccagaagaagtattcgggactctgatgacgaagaacttgttgctaatatacttggctatataatgttggaggataagcctacatctggttcaagctcccttgatactttttatggtggtggggaatcaagccatgcggttggacagcgagcgcaattagatcattatgtccagactaatggctcggataagataatggataattatcttattgtttatgaagaaatatgttcattgtatgatgaaagtggccttaatttcagatctcacattttggggcaagagtccacatcgcaggagtgtcctcgttactatcaggctgtatttttagctatgtatggtttgattattgatgaaaatatgcagctggaagacagaagcggtttcttgcagcaattgggggatagtgtccgccgttcaatggtgcaaacagaaggtgggagatgggctgcaagcgcacgtcagaaatgtgttgatgacctgcaggctctaataaaaagatatttcaaacagtctgcaaaacaatatgagaatcatgcttggcagacacttataagaacaatattaaataattctaaaactgaacaaccttgttatgattttaaacaaggcttgttcttgctatctggtgagaacatagttgatgaagggtgcttgataaatatagttcagacatgtgttgcaattaataatattggcagaaacgtgagggggtatatactggtagggatttctgatacccaaaaaacagctgaaagaataaagaaattattcggtgtaaaatcggcagagtttaatggattttatattaacggcatcgaccatgaagcgattatacactcaggaaatatagataattatttccagtacattaagcaaaaaatacaatcatataactttactaacgctctcaagttacaaatattaaaagatatagagctttgtacctataatggtgtgcatgttttgaaaatcgatgttaaaagcattggtcaggtatgccattttgagaatcaattcttcatcaggcaaggttcatcaactgaagctgttgctgatggtgatggaatagcagcattacatagctcctattactcatga

SEQ ID NO: 440568 - DNA, 606 bp, Serratia marcescens
atggatgataaaataatcgtcgctattgtaagcgcattgagtggatggttcttatctgcaataaattctggctatagtggttatataaatagaaaaaaacttctgggaatcttactggtaaaactaataaaagtcgagaaccatacaaaaaagataatacttagcagtgaaaaaattaaagacttttgcgatggatgggagcagtatgaaaaagtcagagcaaatgtattttcaaggcattttcttgagccaaatgacataattgaaaatttaaaagtcgcaatcaataacatagcaccttactatccattgctaagtattaatttagaagctattttggagggtctcctaaacaacaaaaaagcaaccctaatgcagacatctaagatacctggtgacaaagacctttatataaaattactttcaacccatgaggttgggttagagctttcacagagggaattaagaaagatcatcagcactatcgctctaaagcacggatattatacattcataaagaggattattgatttgagaaaagaaaagaaaattatcgagaattactccaatataattgacttcctcgatctagataaactcaaataa

SEQ ID NO: 440569 - DNA, 138 bp, Serratia marcescens
atggggctgcgcgtaggcacgaataatcaaaaatggcacgaattgtctgcggaatggcgattttttatcttgttgaattttaatggaaataaatattacgcttattattggcgttattttattcagagcgcagggtaa

SEQ ID NO: 440570 - DNA, 516 bp, Serratia marcescens
atgcagatgtcctttttaatcatgagtgctgctccattcaaccctatacaccctgaagtcagcattccaaaatactttggcccgtttagtttcacctacacacggagaagaaacttcatggaaaagagagcctgctctttcgcttctgcgatcttactctacggcggtgaagcctggccgcgttatttctctgacaatgcgcggcataacaagagccctgttcgcttgccggggtcctccccatctatcccgaacatctcgcggccgactccagaactgcagatgccaaccagggatgcccccccattttcacgatatttcgtcgtcaaatatttaacagaagctaaacatcttagccacagtcgaagaacgccaacacttgctctagtaaaataccccgataacggttttgtcggcttatttattgttattattgcgatatgttctatcgcacagaacatttgtttttataaaaaggagaacatcatcacgcatagtgatatttggtatcaataa

SEQ ID NO: 440571 - DNA, 210 bp, Serratia marcescens
atggcaattaaaaaggcgccgtatagcgccaaggtaaaaatgtggctccctaccatgaccgctgatctcgagggcggtttgaggggctgcactgttgaaatgttccgttctcttcctgccgaccaacgcatgaaggctctgcacgacatgcaaaaagcgcacgaagagatatccgaacgcgaagcgcagaaacaagccgccgccgaataa

SEQ ID NO: 440572 - DNA, 285 bp, Serratia marcescens
atgcagccctgggaaatgacagcgttttgcccgctatgtcgtgaggtttttcgagcgtccaaagtcgaaaaccatacccgatcgcgccattcggaagagtccgatgagcgcaaggaccgcattcgctttgcggcggagcaggccgtgcttagctcaaagcggccagtaaaacgctcgtcaaaaaattcggtaaacgctacggatgtgctgcatggcagtaagcaacgagtcgggtactcgaccacagtcagcggcggcgcttttggccaagggaaaaagcgttga

SEQ ID NO: 440573 - DNA, 669 bp, Serratia marcescens
atgattaacacaaagattcgccagtctcgcaaagctcagaaattaacccaggaaggcctggccaaattactaggattgaccaaggctacgatttctcagtgggaatcaggctccactgaacctaacggcaaaaaccttatagcgctggccagagcactgaaagtatcagtggattggctattggacgatagagtgacagcgctaccgtccgaggaaccaccaatagccgaacctgcgcgagcaacagacaatttaattgaagtccctttctacaaggatattcatctttccgcgggtaacggatcctacggtgacgatcaagtttcagaaagagagattgttcgtttatctgaagcaatgctgcataaggccaatgtaaaagcgcacaatgccgtctgcgttaggatatcgggcaatagcatggaaccagttcttcccgatagcggtatagttgcggtggacacaaacaatcgtgaaatcgtagatggaaagatgtacgcaatcgaacaggaaggcatgcttagggttaaacttctataccgaaccccttttggcgtgcgtctacgctcctacaacgacaaggagcatcctgacgaagtgtatcaaggggcggacgctaacaaaatacacgtaataggctgggtgttctggtactcagttctgctgtaa

SEQ ID NO: 440574 - DNA, 177 bp, Serratia marcescens
atgaaaaagtcagaggctattaaaatcgcggggggaaaggcgaagctcgcgcgattgcttaatgttacgaaaggagctgtatcacagtggggggatgagatccctgaactgcgcgcgttacagcttgaaaaattggccagtgccagcagagaacaaaaacaattagaaaaggcgtag

SEQ ID NO: 440575 - DNA, 309 bp, Serratia marcescens
atggataaatttcaaagggttcacatgccttacggcattagagaagttaaagagggattctgggagctgttcaaccgggactatatcgcgctgggcgagccgttcaagttcgctagaaaactctcaacagcaacgataaaggcgctgtcggtacacggcagcgcgctcaagggcagcgggccgcaaactaacagcggtctgcaaactatttggttctatgacgacagcagcgtgcctaccgacgaagacgagcattggcaggtttacagcgccaagttgcaaaaattagcaagtttgaaagttgagtga

SEQ ID NO: 440576 - DNA, 546 bp, Serratia marcescens
atgccaactatccctgcactacgcagcgccctactggttatcgacatgcaggtcggcctgttcgcttcgccgaacgagcagccattcgccgccgaaacccttctggcgaagaccaatgtgttgatacgcgccgcgcgagcggcgaacgcgcccgtggtgtttattcgccacacggggccggcggggtcacccatcgccgcaaacagcccgctgtggcaaattcatccgggcatggaaatcaacgcgggagccgactggtttatcgataaaacccgccccagcagctttcaccagactggcctggcggaacggctcaagcaagccggcatcgagcggctggtgatttcgggcatgaaaacgcaatactgcgtagacaccacgtgtcggcgcggcgcggagttgggatttgacatggtgctggccgccgatgcccacagctgctcagacacggcggtactcggtgccgaagccattatccgtcaccataaccagaccctgtcagggccattcgtgacgctgacgttggcggaagatatgcggttctaa

SEQ ID NO: 440577 - DNA, 807 bp, Serratia marcescens
atgaaaataactatacgatttgtactggcctcggccttgatggctgtgtgtaccgctacaactgccggggatgcggtggtgactccgatacaagatccgcttccttcgactgggttggccactggtattggagggaaatggcggcacacatccaatccgggcccctgcttagcaacatatgcgagctacctcatggtttatggctctccggggaccgaatgggcagattatggagcctcttgggaatcgcctgaaattctaatcgactgtaaacgaaccgtgaaacagaacatggatgttgtggaagctgccttcgcccgggggatcacgtactctaagatattcaataagataggtaaatatccggggaggaccggctgttgggtaagttatggctggattcaaaacggttcaatgcacagttacgggttcggtgctagttatcctggtactacgtgttctcaactacctgtatatctgcctgtaaaatgtgatgtagcagtgccaagaccgatcgaacatggccgggtgaacgtcggtactaagagtacacggcgcggggatttgtccatcacttgcgataaaaaaactaccgtgaccgtcgacgtcggtaacggggccgtactgctacgtggttccagcggcacgatcacgtcatctttacgggtaaacaatgaggatgatctgaccacaacggttgttgctgaccgtacggcgactgtacctctgattagtgtagttggtgctcaacagactcctcccggtgcgtacgatggcacagccatagtgtatgtcacgtgggagtag

SEQ ID NO: 440578 - DNA, 534 bp, Serratia marcescens
atgaacgggggcagggcatgttttcatgcggcgctaattgccggggttctggcctttaacggcgcggcgcaggccgataacgttcgcctgcacggtgcgctggtcgccgaaccctgtgtgattgcgccgggggacgagaacgtgcgcctggactttggcacggtgatcgacaaatacctgtacgccaatgagcgcacccacgggcaggcgttcgatattcgtctgggggagtgcgacctgagcctggggaaaacggtgaaggtgaccttcagcggcccggaaaacccaagcctcaaagggttgctggcgattgacggtagcagtaaggcctccggcattgcgatcggtatggaaacccagggcggaaaacctttgccgttgaacaaggccggtgagagctatcggttggtaaatggcaataacaccctgacggtgctggcctatgtgcagggggagccgcaggcgattgcccaacgccgcatagtccgtgggccgttcagcgccatcgccacctttagcctggaatatgaataa

SEQ ID NO: 440579 - DNA, 486 bp, Serratia marcescens
atgaaacgctattcaggcattgccttggtgttggtcttcggtgcgctgagcacgccggggcaggcggcggagaacatgaagttctacggcaccctggtcgagccgccagcttgcaccattaataacggcgggaatgttgacgtcaattttggcaaccgggtgggggttaaaaaggtggacggggtgaattatttacaaccgatgaattaccagattacctgcgatcccaatgctaatgcctggcggatgacgctggagatcgtcggtatttcggcgaattacgaccgggcggcggtaatgaccgatgttaccgatttggctatccaaattaagcaaaatggcgtggcttttgagttgaataagccgatggccatcaacctgacgaacccaccgaagttagatgctgtgccggtgaaacggccaggggcgacgttaaaagaagggccgttcgaggccactgccaccctgaaggcggtttaccaatga

SEQ ID NO: 440580 - DNA, 798 bp, Serratia marcescens
atgaaatatataataaatctcaccctgattttcgatccggacagtcaattgttgatgctcaagaacgataacttactaacggtagggttatctaatccggctacacggttattaagcgagctgataaggaataataaaattgaattaacgcgtgaagcgctgatcaagcacgtctgggaggattatgggttttctccgtccagcgccacattgagcaaccatatcagtgagctgagaaaagcctttgaagcacttgggctaagcaaagacatactgatcaccgtgccgcggataggctttaaaatggatgcggaaatccacccggagaccaagccgccaaaggaatcgctatcggctgaacagatggatcttctgccgccgataagtcagcaggcgacagaggtaaacatcgtcgcgggcgatgtggccgtaagttcgaaaaaaccatcacgcaaaatgaaaatggcggcattgtctctccttcttgccctgggcgtcaccgcggcggcgacgacgtggttaaccctgagcaaaaatgaacaacccgcactcatcgggactcaggataaatgtcggatctttactctgggtgaagggaaacctgagcccgatcaagcaggtcgagtgaaaaagatgctggctgatgaagaggtcgattgcacgcagaccgatcgggacatttactatatggaagcgcgccctgccaacaacttgcttaaggtgtcttttatggccgcttgcgccaaaaacagcgatatgagctatacaaactgtaacaacttcaaacaggttgagtag

SEQ ID NO: 440581 - DNA, 486 bp, Serratia marcescens
atgaaaaagattgtgatcgttttatcgagcgtcatcatcgttgtcttgagtggcgcttttgtttatcgccaccacgagagctggaaaccttttcgctgtaacacgcatttgagttcgcacatcgtttcaaaagagggtaaaacgcttgaacttaatctggatatcagcgtcgtcaccgcccataaaggcagtagtgaattgctcgcggtgggctccctcaaagatcctgataatagttatgttatttccaggcgtcttttcatggtcattaagcaatctgattttaaaggctactcgaaaaccatgatcacccgggaagagcaccaccccatagatagcctaccagaccacctctggcaacagtatgtattgccagaagcacccggcatcgctttctatatggaaaccaagagattaaatgatgaagcctattttattaaagggctaaccaacccccattttgtttgcgtgaaaacaccagattaa

SEQ ID NO: 440582 - DNA, 636 bp, Serratia marcescens
atgaccagtacgaaaaatggcaccataaagacaacattggccatccgcataatcgacgatgatagcttttacaccatagggctcattaaggcactatccaaccatttaaaacatagaaacattcgtttttacactggtacctgtgcgggaatagctgctgatattgtctttcaggccattcgctgcggtacattaatctcacctggcaatcgaccagggggccacagtgcaacactttattttgccatcgcggaaagaaaagatgctcacctgcagcatctctatcgtggcctggccaagtccaatatcttataccggcatcaatcggtgaacagcgtgttgcagcttattgggaacaccctacttgccccgcaaccttcgcccgaaagaacgcgacaaggcagcaaagtttgccaccacgaatcactcacaccgcgtgagcaagaagttctgtatcaactccagcagggaaaaacacatgccggcgttgccagcctcttgggcattaaggagaagaccataagctcgcacaaacgcgcagcgatgaaaaaattgaattttaagcgaactaacgaactgttccattggatgctacaaggcggtttaaccagccatcaacaacgaaaaggaaattga

SEQ ID NO: 440583 - DNA, 165 bp, Serratia marcescens
atgaaagaccgtagtcataacgaggcagtggtcgagcttttccatgccaagccgttttatgctgtggagctgctggcgcaggttgttcaggcggatgagttggccactttggataggctgctatcggtagcacttgccgtgaaacagattaattcggcttcctga

SEQ ID NO: 440584 - DNA, 1692 bp, Serratia marcescens
atgtctgctgcaaccagtaagctatctcggctagcatttgcagaagcgaaaactgatattctcaccactccagtatctgctccgcgaatgcaagcggcaggtcttcttgagcatttgaaattcgacgtcgctagcccgattgtcataggtgatagggggatattagtccctttgtgcgctaataacgtgcgctacgttgttttgtatcgttccgatcccggcgaatccttggctgaaatggtgaataaatatcatcaagaacataatatcgatctttgtcaatatgtcgatgcattcttcttctttttagttcaggaatttgacattccattattgccaagcgtaatgaagtgtgatgttgagaagaatattataatcgaaaaagaccaagcgtttactgactttgattacgttatcggttgccatggttctttctatgcatgggaagttgaagaatctacatcttccttagagtttttagatttgctgacttggcaattgggtgaaaaacattccataggttttactgaagataatcaatcatatggaattgaacacatcaacccctctaaaattgattatatagatttacgagagctttgtcgtactgtcgtaaaaccaattgctaccgctactaataaaaaaatccgtcaggctgtcctaacttttcccacgcagggcctgcatggtaaaacacttaaaagtatttcgaaaagcagtgacgacttagtattcggtccaggcggcgagatctgttttaaattttctcaggatggaaatgagttcttagctttatctttagggaatttttatgaatatgaaatcagctctgtattagattatttaacaaatataagggtcaatgaagtagaatgggaatatacttacttcttgtcattcatgattacgtatgggcagtatcttaatgtttcccagaaatacttgtctcatccggaagaacttgaggacaaactcgacgttgaagatatattctcttgtacattagaggatataacctctgtctatgagaaagtgcgtgtctttgaccttagccaagcgtctctttcttcgccatttgaagtccttagccatttggcagcgcagtttagaaatgcgcgctccccctttattcctgagaacataattaatgtttctcagcatttactatcgcttcctaacgccccatacgaaaatatatacttatccctttcagccagtcattggaagcatgctttcattgagatatatcgagttcttgaaggaatttactattttggttggatgcatgagatcaagcagactttaggcggcaataaagcagagcatgatctatatttaatgtttaaaaagcagatttcttggaagtataaagaaagagaatccattgttaagttatttgaaatggtgcctaggagtgtactttcggcccatgatcctgtagcgatcaaatcattgagtaatagttttaaagatgagaaagatattgaggttatgaagaagttcgctaacttagtttattcaattcgcaattctaacgtgcatcaaggtgagtccgaagacggccagaccatagatgtcagtgctgattgctggcccaaactgacatattgcttgtttttgattgttgaacatctttattccgtatatcaggcgggtatgccacggtctcccgtgccacaatcgctcggttag

SEQ ID NO: 440585 - DNA, 4098 bp, Serratia marcescens
atgactgatgagtccgtctcccttcacccgggttcctatgttcggaaaaatgttcttgatcctcgtgggctcacggttactgaggttgcgaagttgatcggcgttagccgcccgggcgtttcgaattttcttaatgggaaggtatctgcaacgcccgatatggcggcacgtcttgagcgtgctttcgggatttccgccaagaccattctcgatttgcagactgcatatgacgcgcaatctgataaaacagcaggtgcagctcaaaaggcgcgcacatacgtgcctccttttctaaatgtccaggccaacgatctcataaattggttcacaacgacaattcttgcgcgcactaagctctcggtactcctgagaacgctcattcactcaacaggacacgatcttcagaaagtggacttccccggtaacgacgatgctgaacgtgctggctgggacggcttcattgaggccagttctggcacaccttggataccctctggtgtttctgggtgggagttcggtgtcactgcggacattaaagccaaggcagacggggattttgcaaaaagcgtccgagcgctcaagagcgctgaaagggcagatattacgtttgtctttgtcactccaaggcggtggccgggtaaggttgcctgggtcgcggaaatgaagggcaagaagctctggaaagacattcgtgcatatgacgccagtgatcttgagcagtggatggagcaatcactcgcggcccagacctggtttgcgaacctgacggatcgtccctctaatggtgtcagaacgctggagcgttgctggagcgattgggcaaacgtagcggtccccgcgcttcatccttctctttttgctactgcgaacgaggtgtggaacgacaggatcaaatccttcctagcgaaaaacgatgcgaaccccttagtaatagcggctgactccgttgaagaggtgcttgcgtttttaagtcaggtcctggcaactcccgagtttgaaaagtatagggatcgggtgttggtgtttgacaaggcaggagtactgccaaaactcgcccaaggcactaccgatttcattgcagtagcccatacacgggaagtggaacgtgagcttgggccctacagctcatcgctgcgaaccattgttgtttatccccgcaatgctactagcgtggagcctcatgtcgtgttggagccacttgggttcgagccattcactaaagctctggaaacgatgggcaaatcgcgcgatgacatagcgaaactaacgaacacctcggggtgttcattgacggttcttcgacgtcaactctcgaatataccggcaatccatacacctgcttgggctgaagacccaaaaatcgcatcggggcttgttccgctagtgcttatcggcgcatgggatacccagaacaaggcggatcgaactatcctgtcccatctggctgaggctccttttgaagtactggaaaagcgcattcttgatttgttgcggctcaacgactctccagtttggtcaattggtgggtaccggggggtgatttcgaaaatagactccctcttcgcaattgctggcgcggtttccaaggccgaccttgcccgctttcttgacgttgcgcggactgtactaggtgaagatgatcctgccctcgacttgcctgaggaagagcgttgggcggcggctgtgcatggcaaaagacgagagttctccggggcagtgcgaggaggcatttccgagactttggttttgctggctgtgtatggcaagaatctcttcgggaagcaccttggctttgatggggaacttgaagctgcgaaaatcgtgcgtgatcttcttgtgcctgtaacgactagaaagttagaagctaacgggcgcgaccttcctctttatgcagaagcggctcctgccgagttccttgatatcattgagcgtgatctgcgagcagaaaagtccgaagttatgggcttgctgagacctgtcgatacggggctatttggttcatgtccgcgcactggactgctttgggcgctagaaggacttgcttggaatccgactacctttccgcgggtagtaaagattttggggcagctttctgaggttgagattaacgataactgggcaaataaacctatcgaatcgcttggttccatacttcgttcatggatgccgcagacggctgcaaatcacgagatgcgcctgaaggcggtcagtatgcttttggataagcatccgacggtcgggtggagggtttgtctccagcagttcggtgattacgggagccgcgtcggcggctatagtcataagccgaagtggcgtccggaagggtacgggttcggggatcccttcaaaacatggggaccggtccatgcattcgtcagagagatggtgaaagtcgcgctaagcaggccgtcctatacggtcgagatgttatgtgaccttgtgtcaaggctacatgcactcgcgtcggaggaccaagtgcgcgtatggaagatcatcgaggagtggctcaacgcgggcgctcttgacgaggatgttgcgaagatacgcgagaaaattcgtgtgactgtcctctctcgccgggggcgtaaaaaggtcaatgaggaggggcaagcgagactgacagaaaaagccaaggaggtctattccaagttgcagcccaaggacattgtgaacaagtatgagtggctatttcggcagggatgggttgaggagtcggtggacgaactcacaggagacgagatggacttccgagctcgtgagcaacgcatagaaaagctccgcgttgaagccctgacatatattgcgcaagaacgaggtataccgggcattctcgcgctttctgaaaaaggaaagtctcaacgccaaatcggcgctcacctagtgtcaggcatacttaccgatgagcagattgaagatttgatcttgcaaagcctatgtccggcagaaaaagattcgattcgtgacggcattgtcgccggggcgctctggacgttggacgagggtaggagaaatgccatatatgcaagcctgcgggacaaagttgccgaagaggaagcgctccatctcttgctcctttcgccttaccggacttctacttgggagcttgtggatcaactttcggctgaagcccgcaatcggtactgggttgaagtggttccgcaatatttttttgactcacctgaggaaaacaacgagagcgttcgccgcctgcttgaagtcgaacgtcctagggcagccttcgcatcgatgcattttaagctagaagaaatacacccgcccctccttgtgaagacgctatctgccatggcgaaaaatagtaaggataaagctggagagtatcagctgcacgactacgatgtgcagcgtgccttccagcttatcaatcgcaacgcggacctcacactagaggaaaaagctggactggagttcgcatatttagatgttttggctcgctctttccgaggggaagaccagcagcagattcctaaccttgagagctacattgaggaacatcctgagctgttcgtgcaagctgcagtgtgggcctataagcgcaaagaccatggcgaagaccccgccgagtatcgcgttaccgaaggtcgcgagcatttggcacagcgcgggtaccgtctccttgaagccattgagcgtatccctggtcaagacaaggcaactaaagaggaacagcatgaaaagctctcggaatgggttgcaacgataaggcgatcttgtgctgaactcgaccgcgcggagattgcggatgtgtgcattggaaagctattttctaacgcaccggctggtgaggatggcgtgtggccgaacgaagccgttcgcgatgtgatggaggacttgcggtctgaggatatcagcagcggggcacatatcgggttgtacaacgcgcgcggtgcccattggcgtggggaaggtggtggtcaagagcgagagcttgcagacaagtatcgcgcttgggccgaagccttgcaattcacgcatccctttgtttcgtcatcgttgctgatgtcaatggtcaatacgtatgaaagggaagccgaacaacaggataccgaagccggaatacgacgtcgattaaggcattaa

SEQ ID NO: 440586 - DNA, 540 bp, Serratia marcescens
atgttagagactaatcgtctgatcctccgacaatggaaagtaagtgatttagagccatttgctaaactaaatgctgacccagaagttatgaagtatttccctgcaaccttgagttacgaggaaagtgataagttagcttggcgctttaaagaggatattgaactaaatcacggatgggggatttgggctactgagttaaaagcaactaatgagtttgttggatttgttggtttggcccatcaaccagaccgtttcaatttttcaccttgcacagaaatcggctggcggttaagtaaaaatttctggcataaagggattgcaaaagaagcggctgaggctgctctcgcttacgcatttaatatgctgaaactcgacgaggttgtttcattcacctcgattcataacgctccatcggagaatttgatgaaacggctaggaatgcataagcagggacattttttccatcccgccttgaatcaaagtgatcccctgtccgaacatgttctgtataaagtttcgaatgtgaatgtttctctttga

SEQ ID NO: 440587 - DNA, 549 bp, Serratia marcescens
atgcatttcccaaggtttgatttcagaaggagtgagagcggagtgactatattaattagcaagtggggcttaactcaacaacggccttatcaatatcttaatatcaaaaaagcaagacacctacggtgccttgcttttctttttacattagcaagcgccaaaaagaacgacagagaacagaacggaaccgttcagataaatagtggccttcaatcccgtaggaataaaggaaccacaggtctctgcgcacactttaagctgcccaccaatgggaattggaatcggcgaagaaacgcaaaagtcaccgtagataggaatggtaaaacaaatttggttgtttgcagggttataactggccccaacgcaaaccgaaagtttaagcgccaacacgccctgctgcttaaggtctacaggtaccggcgccggtgttttttgcgaaaatccaaccgcagtaaaatcagcaacatgttcattttgagcatgcggatcttgttcattgcatttacaatcagccattggaatatcctcgtaagtttttttagatattaa

SEQ ID NO: 440588 - DNA, 651 bp, Serratia marcescens
atgaaaacaccgggagaatgggccgttgacctgcaactacaactgcgcgcgctggacgacacgcctgccagtactcacgccaaaaagaaaacaataaaagaaagccaacggcttgcacatcaattagtgcgctctcaagcgctgaccggggtggaaagaagggcgctcatcagggaatactccaaagccatcagaacggtggcgatagaggaaatgcagcgtgagttcacattgcagcacgctaaaatgttgcaacgcgctgaaaccaaacgtgaacagcgagaaaaaaaatgggccgcctccaatgcacgcaggctgagtcgcacgaaaaaaatgcgttcaaatacagctccgctaaccagcggcggcatagcaattttactgttcttatttgccccgctgtctttatgcggattgtggcaattcggctctgtattttgggctggcctgcaaaccggcgaattaatttttaattcctgccgcactcctctgtcgtcttgcctctcccacatcgtgcaagcccatgaaccgttctatttttatagcgggatggcggttttcttgttcgcaacgctgttatgcgcattgatgttgctcggcattgctctgagcttatcacaagctggaaatacgcctgaaaaaaaacaatga

SEQ ID NO: 440589 - DNA, 654 bp, Serratia marcescens
atgaaaacaccggaagaatgggctgctgacctacagcaacagttgcacgcactggacaacacaccagccagcctccgcgccaaaaagaaaaccatagcagaaagccagaaacaggcacaccaaatgatatctgcccaagcaggactgatattgaaagaaaaaaaagcgcgtatcaaagaatactccaacgctataaggctggtggcaatggaggaaatacaacgtgagtttgcattacgtcatgtgaaaatgttgcaggacgctgaaataaaatacgcgcaacgtgaaaaaaaacggagtgcttccaatgcgcaaaggttgcagcggatgaaaagaatgcgttcaaacactcccccgttaaccggcaaaggcatggcgatattactggtagtgtgtgctccactgtctttatatgggctatgggcatccggtaggatattttggcacggtctgcaaaccggagagctaattttccgttctggctgccgtccacacgtagcttgtctgtcccacatcgtgcgagccaccgaaccattcaacttttatgccgggatgacattgtttttgttttttacactattatgcacattgatgctgcttggcaccgtactggcattgtcagaggcaggaaaaacgcccgaaagcaaacaatag

SEQ ID NO: 440590 - DNA, 762 bp, Serratia marcescens
atgaacgtgctgattgtgctggctcaccccgagccgcattctttcaatgcccatttggccgaacaggcgcggcaggcctggctggcgcaggggcatcaggtgaaaacggtcgatctgtatcaggaggggtttgatccgcgcgagggcgccggccactaccccagcagaaagcaggcggacaggttcgatgcgatgcaggagcagcgccatcactggacgatccaggcgctgccggcggagatccggcggcatatcgagctgctgagctgggcggatacgctggtgctgcagtttcctttctggtggttcggcgcgccggccatcatcaagggctggatggatcgggtgttcgtttacggcgggctctacgacagccgccaccgccatgagaacggcgtgatgcgcggcaagcgggcgctgctgaccgtcaccgccggcgcttccgcacaggcctgcgcgccggacgggcgcgacggcgacatgcggctgatgctgtggccgatcatgcatgcgctgcactatatcggctttagcgtgctggagccgttcctggtctatggcgtgcgcggcgggctggcgggcgaggagcggcaggcgcaaaacgccgcgttggcgcaggtgacgcaggcgtatcgggctggcttaagcgaccttgccgcctggccggcggtgccgttcaaccgtaatgaagattttgacgccgatctggcgctgaagcccggcgcgccggtctacagtccgttcgtgcggcaccgtgtatag

SEQ ID NO: 440591 - DNA, 390 bp, Serratia marcescens
atgtttacctatctaagactgtgttttagagctgctacgggcggatttggtagtacatacagccctgtatgggacgcaaccctacgccagctaatgcagcatggaaagcgcacagaagctgataaatactcggttactttcgtgctcggtgggaaagaatttagtgtttggcgcgctaacggtttctacagtatggggcagcctttcctcattggtaacaaaaccgtgggggacgaatgcacataccgcccgggtattaaaaccatcgccaaattctaccgcgatttcgtaataccagccgatcaagagttgcgcagactacacgcggagcacgtgaacgaattgttatcagtgaaaggagccggcaatgaccattatagaaatgattaa

SEQ ID NO: 440592 - DNA, 945 bp, Serratia marcescens
atggattttttacattctgcgttagaggatcttgtcagaggagatgatacctctttgaattcattttttcatgtcgtggatacagatgttactgtagatgaaactgctgccacatgtcattttcattgtattaatcttgacggcaatggaaggccaagggtagacgctctggttaagcatttggtttgtcatttagttgactacgctattccaaggaaacgtattattgaagcgtatgaagcccaaaaaaaaaccggctcaagcatggcaaccatgaaattgttatttgaggcaattggtttatttagcaggctagcaaaaagtggtgaaggaggcgagcttattttattccttttagcagagcgtttcttaaaacttcctcagctaatatgtaaaatgaacttaaaaacaagtacacaaatgcattatcatggtgctgatgggttacatattggtgttgataaagacaaagagaaactttgcttatactggggggaatctaagctgttctcgaatgtaacaggtggtgtgtatgaatgtatgaaaagcatagcgccgttattacttggtgagggtggattgggtagtccggaagaaagagaccttcagctcttaggccagtatgttaatgtagaggatcctgcgcttgagaatgcattaaaaaactacctcgacccagatagccctaactttaataaagttgaatttagaggactatgcttggttggttttgattctgacaaatatcccaaagaggcaaatgaactcaatatcggccaagttaaatctatcttagaaaaagaattactaaattggcaaggtgcagttaaaaaaagagtaactgaagaaaaaatagataaatttgccttgcatgttttcttaataccttttccctctgtagataagtttagagagtcatttaaatcagcactggagatgaagtaa

SEQ ID NO: 440593 - DNA, 261 bp, Serratia marcescens
atgtttgcagttgccacacagaccccttccacattcccgaccgtcccggtcgattacatgccccgtgagcgtttcattcgcctgcccgaagtgctttacaccaccgggctgtcacgctctaccgtctacgaaatgatgacccgcaagcagttcccggcccaagtttcccttggcggtaaaaccgtcgcgtggctcgaatcagaagtcgaaagctggatggctgaacgtatcgccaaccgtcatcagggggccgcagcatga

SEQ ID NO: 440594 - DNA, 192 bp, Serratia marcescens
atggctacgaccctcaccccgactcaccctacattctgctttctgtttgcggccgtgcgccgttctgcgctgacggcttcaccgcgtatcgtgcgcaccgtggcggattctgaacacagcgcccgccgtctgctggcgcgtgactacattctgtcgtttgcgggccgtctgcctgttcagggggtggcatga

SEQ ID NO: 440595 - DNA, 264 bp, Serratia marcescens
atgaatacgctggccgcccgtttccacagtgaaaccttctatcctattccgcatgctgatttcctgcgtcttcagcacgcgcattctaccggcgtgctgttcctcgacatgctggatacccttgaatcgaccggtcagcgcccggacgccgctcaaaaagccgcctttgcgtctgtcatagcggtactcactgaccagcttggacaggtcgtcaaaacctgtgactcccacatcatcgccagcatggaggcttccgccgcatga

SEQ ID NO: 440596 - DNA, 339 bp, Serratia marcescens
atgaacaccccacagtcttgtttacccgttgaagtccgtaccgccgtttaccgtcgcgcattggcccatgcctatctcgatacctgcgccttttaccgggtgaaccccggctacacgctggatgaactgcaaatggcgattgcgatggacattgaaggctactttgtccgccagcacggcgcagaggtgggcatggacatggcctgtaccatgctcagtgacatggtgcagccggatattctggtggcgccgccgcgtctgaccacgctcgggcagaagatgatggatgagctgtgctgtggccggatggccgtcacctgcaacaccaccgtgcactga

SEQ ID NO: 440597 - DNA, 2334 bp, Serratia marcescens
atgaccgcaacaagcgtttctcacacctcacgtgcagcgaccggtcactggccggtcttactcaccgcgctgggcattcacattactgcagggggccgggcgcagccctgcccggtctgcggcggcaaagaccgttttcgctttgataatctgcaaggccgtggcacatggttctgtaaccagtgcggcggtggcgacggcctgactttggtcgaaaaagcactggccgtgaccaccaaagaggccgccgcgaaggtagccgggatattaggtgaaccgtcatgcagcgccatgccggagcacaatccccagcaggtacagcaggacaaagcgcaggcgcggtatcatgcagcgcaacaggccaaaaaactgctcgccagtgcccagcaactggccgggaatagctatctgactgcgaaaggctggccggacactgacgccctgacattacagggggcgtcactgcgtgtcggcggtatcacttaccagcccggcgacctgctgttgccactgaccgacagcaccggggacgtggtcaacgtccagttaattaatgccgcgggcgacaagcgcacgctggccggaggacaggtgaaaaacgcctgccatttcctgccggggcaggatgacgccgttatctggctgaccgagggttacgccaccggcctgaccgtgcaccacctgaccggggaaagcgtctgcgttgcgctcagcgccaataacctgcccgcgatggcgcagcagttgcgcgctcactatccagatgcgctgttgttgctggcggccgacaatgacgagaacggcaccgggcaggcccgcgctgccgaagccgcgcaactgagtggcggtaaaccggcgttaccgtcagaaacaggcgactggaacgacgtataccagcaacagggcaagctggccgcgcttgcacaattgactgcctttagccagcccaagcaacccagtccgtttgatacgctcagcgatgccgacctgaaagccatgagcgcgagtgaaaaggccgaactgctggcggagcactaccagcacctgctggccgtgccacaggtcggtgaagacctgtgccgctatgaaaacggtgcatggcaggtgttgccgtaccgggtgcttagccgggaaattgccgccctgtttcagaaaatccgcgcgccgttctcggcggcgggtatcaacagcattctggacacactcaggctgatggtgccgcaaatgggcacgccggcacgacacctgattggctttcgtaacggggtgtttgataccaccacagggcaactcggtgcgcaccagaaaacgcactggctgcgcaccgtcaacagcgtggattacacgccgcccaagaccggggaaaatctggccgaccacgccccgcacttctggcgctggctgacccgcgctgccgggcagcaacccgacaagcaggcgcgtattcttgctgcgctgtttatggtgctggcgaaccgttatgactggcaactgttccttgaggtcaccggtcccggcggcagcggcaaaagcgtgatggccgcgatagccagtctgctggcggggaaagacaacaccacatcagccaccatcgataacctcgagtcggcacgcgagcgtgcattggttgttggcttttcgttgattattctgcctgaccaagaaaggtggagcggtgacggggcaggcatcaaggcgatcaccggtggcgatgcggtggctatcgatccgaaacaccgtgccccttacgcggcgcacattccggcggtgattctggcggtgaataacaacccgatgcagttcagtgaccgcagcggcggcgtgtctcgtcgccgggtgatcctgccgttcccggaggtgataccggccagcgagcgtgacccgcagttgctggcaaaaatcaccggcgagctggcggtgatcgtgcgccacctgatgcagcgttttgccgtgcccgatgacgcccgcacattgctcgaagcgcaacagaactccgatgaagcgctggagattaaacgcagtgccgatccgctggtcgatttttgcggctacctgctggcagtcaatgcgcctgacggtctgtatatcggcaatgccaacattaccccggcgaacccgcgtaaatacctgtatcacgcgtacctctcttacatggaggcccggggacacaagtacccattgaatctgaccgcgttcgggcgcgccgtgccacaaaccttgcgagagtatgaaatagcgctgttgaagcgcaagaccaatcaggggatgcagactaacctgatattaaacgaagactgtgaagccgactggctcccaaagtgtgaaatgcgctga

SEQ ID NO: 440598 - DNA, 1266 bp, Serratia marcescens
atggcaataacagacgtagcagcccgcacagcaaagcctcgcgacaaagaatacaaaatcactgactcccacggtttatatcttttagtcaaaccaaacggttcaaagcgctggtacctcaaatttcgacatgaaggcaaagagagccggatcgcttttggcgcttacccgattgtgacactggcgaaagcacgtgaaaaacgtgacgaagcaagagcattacttgccgatgggattaaccctagcgctcagagagaacagggtaaggtcgaggcattagctgaaaccttgacctttgaaaaggttgcccgtgactggcatgcgatgaataagcgttggtctgaaggccacgctttgcgagtgatgcgggatttagagaggaatattttcccggtgattggaaagcgtaatattgctgaccttgaaaccagagacctcttagtccctctgagagaggttgagttaagtggtcgtttggatgtcgcctcccggttgcagcagcgaattaccggcattatgcgttttgcggtgcaaagtgggcttattcctcgtaatcctgcccaagatttagcaggagcgattacaacccgtaaggccatacatcggcctgctttaccgcttgagcgtctccctgaattctttcagcgccttgatactcacaaaggcagaatgctgaccggactagcggtcaggttaacactcagtattttcattcgttccagtgaattacgttttgctcgttggggagagatcgattttaaaaaggcactttggacaattcctgctgagcgtgaagctatcgagggggttaagcattcgcaccgaggatcaaagatgcggactattcacctcgtgccactatccaaacaagcgatccaattgcttgaacaaatacacgaactttcagcaggcaatgatctggtttttcccggggatcaccatccacataaaccaatgagcgagaatacggtaaacaaggcgctacgctctattggttatgacactcaaactgaagtatgcggccatggttttagggctatggcatgcagcgcgctggtcgaatcaggtctatggtcgagggatgcggttgaacgccagatgagccaccaagaacgcaacggcgtgagggcagcatatattcacaaagccgagcatatggaagaacgccggttgatggtgcaatggtgggctgattatttggatatgaacagtgagcgttacatcacaccgtatgagtttgcaaaaatgacaaaacaacctcggtaa

SEQ ID NO: 440599 - DNA, 549 bp, Serratia marcescens
atgaaagtgaaattgaacaacgtccgcctggccttccctgctctgttcgaaccaaaagccgttaacggcgaaggcgacccacgcttctccgccgcattcatcttcgaccctaaacaccctgcggtggccgagatcgagaaggcaatcgaagccgtggcgaaggaaaaatggggcgctaaggccgagggcgtgctgaaaacgttgcgctctactctgaaagtctgcctgcacgacggcgacgagaaagccgaatacgaaggctatccgggcaataagttcgtctcagcctccaacaaagcgcggccgcgcgtggtagaccgtgacaactccatcctggtgcaggccgacggccgcccttacgccggctgctatgtcaacgcagtgatcgacatctgggcacaggacaacaacttcggcaaacgcatcaacgcctccctgggcggtgtgcagttcctgcgtgacggcgacgcctttgcgggcggcggtgtagccggcgaagaagacttcgacaacatcgaggaaggcaccgacgcaggcgagttcgtctaa

SEQ ID NO: 440600 - DNA, 426 bp, Serratia marcescens
atgcgcagaaatatgcaagaagttctagagcggtggggccgctgggcaatcagcgaagaaaaatgcacgtcggtggactggccggcgatgtccgtcacgccagcgcgccttccgatggcagggggcggcaaatcgtgcagcgatgacgacgggctgatgatcgacggctgcatcgccaagttgaagaccgtgcgccaggaggacgagattttgatgctcggcctgcgctacatagcccgcatgccgcagcgcgacattgccgatgctaccggcgcatctcggttgttcgtgcggcagcgcctgcaggccgccgaggactttgtggaagggtgcctggcgatgctcgacctgccgctggacatggatccggaagtggtcgaaacaaaaatacttgcgggcgcccagaatcctatgctatacagatag

SEQ ID NO: 440601 - DNA, 228 bp, Serratia marcescens
gtgaacaacatttcctgtgagagaaaaaaaatgggcttatcccagtctttgcttgctaacgagattggttggaagcgttcccgcctttccaactatgagatcggcctgcgttcgccaagcttagacgagtgtcgactcatcgttgaaacaatgaaccgcttgggctgtgactgcactttagacagcctattccctcctgagcctgagcttaaaaatcaggaggcttaa

SEQ ID NO: 440602 - DNA, 567 bp, Serratia marcescens
atgtcgttaacatttcaagatgttatcagggcaggtggccagcggctgagttcagggaatcagtcttcagtccgccgccgaacaataaaacctgacgctgtccgccaggcggtggaggaatggcagggcacgctgccaggccgggcgcaggagaccatcgccaagctggtcactgatgaatggttccggcgtggcggaaaaggcctccaactgggcgacattgagcgcaacaaccgacagaacatcttccgctggttagacaacccgaaccgtacggagaaatacgccggctacgtcctgcagctggcgccggtgatcgctgacgtgatgccgatcgagatcgccagaaaatacggattgaagcagggtaaaaccaagctcgagttggtggccgacgccatcaaagaatgcgcggacgccaaacaggcggcattactcggcgcgccactgcgcgagttggagaaagagatccgcgagggtatcgaatcgctggtgcgcctggcgccaccggacagatgggcggccgttatggccagcgccgcggcgatgttcagcggctgcatgtaa

SEQ ID NO: 440603 - DNA, 399 bp, Serratia marcescens
atgaccaacagagtaaccgaaaagcacagagtaaccgcaaagcagctcgtggatattatcctcggcaaagaaatgagcaccactgaaatttgggaggcggtcaaagccgcgcacccggcaaacacgatgacgcggcaggagctggcgctcaggctgcggtcgatgatcagatcgccggacgtaaaaatcacaaagaagggctgcgggccgagggcgctctacaaactgacaagcgtatccgacaaatttgttgagcgcgccgaggtgaattatcgcgccaatccccgtaccggcacgccggataaaacgctgtggcacttccaccccaaagagctgcagttctgcaacgtccacaagatgtttgatcaggcgctggccaacctgcgcgggagggcatag

SEQ ID NO: 440604 - DNA, 453 bp, Serratia marcescens
atgaattatggacaagtgagaaaatgcagaacaacaaacattaaaaaatatatagactgtgacgttattttccccgatctgtcagattcaccaatttcgtttacagcgatgcctaacgattcaactgaacacggacgcgacatttataatagggcgttgaatggtgagtttggcgtcatagttatcgctaaaaatgaagttggttattattgggatgggaatgagtttgtagaatacgattttgacattgaagcattgcacttcgatgaaatgaaaaatagattaataagtgaggcttcgcaaaaaatatcaattctatctgatgctgttgacttaggcattgcaacagatgaagaaaaagtaaatatagataagtggaagcaatatagggtgctagtaaacagaatgagcaaagagaatggttccggatggccggacaagccggccgattaa

SEQ ID NO: 440605 - DNA, 507 bp, Serratia marcescens
atgcttaaatatttcgcttacagtttaaaaaataaaataagccccactaaagcgaggttgtttttcaataacacatcacattcaaataaaaagaagtacaaaatcctctcaaaatcaggtgtaaacattagcaatagagccaatattatggcgcctttttattatgagtacggtaatatagagatcataggtgatgtattcattaatgctaactgcaactttcttgatgatgaaaaaataatcatcaacgatggctcaatgattggcccgggcgtgactttatcaaccgtaagtcaccatgtggctccagaaaagagacatgatagaaatgtaaccgctccaattattataggtaagaatacttggatatgtgccggagctgttattcttccaggtgttactattggtgaaaacagcgttatcggtgcaaatagcgtagtgaattgtaacgtaccagcaaacactatgtatgccggcactccggcagtattcaagaggaatatttaa

SEQ ID NO: 440606 - DNA, 264 bp, Serratia marcescens
atgcaaactttacccatagcgaacatcgaggcgttggccgcccgtcgtttgagcgagcagcagatagctgacgtgttggatatttctctggatgagctgaaaaaggacagagagcagctattgctatttcgagtcgctatacggaaagggcgggcaaaaggagaggctgagttaaggggcgcgctgtataggcgggccaagaacggggacatacaggcatacagcgaattgctgaggcgcgagaaacaacaggacagtgactga

SEQ ID NO: 440607 - DNA, 225 bp, Serratia marcescens
atgaaaaagaaaatcgacgttctcagggaacttgccagtaataacgattgggaagcggctatcaaacttgccggcagctttcctcgcctgggtaatgaagcgcgggtaatcacacgggctaaagaagccgtgctacgaccagagtttcaaatacagatgggaagagagccggctttactgattgccgccggtattgacgccctcaaggcgaaatatcgtctttag

SEQ ID NO: 440608 - DNA, 1368 bp, Serratia marcescens
atggcttatgcacgaaatgcccgaacccactccgaggagcaggttcgacagattgtcgccagcatcagtgagtacgggtggacgaatccggtactgattgatgaaaacgaagaagtgatcgccggccacggccggttgctggcggctgaacagctttttgtcgatgaagtgccgactatcacgctgtcgggcctgagtgagcagcagaaaaaggcctaccgcctggcggacaacaaactgccgttaaatgctgggtgggacgatgaattattgaagctggagttgagcgacttgctggacagcggctttgatatcgatctgactggctttagccaagctgagattgatgaaattttcactgtcgatgaggtgttgcctggtgaatcgaaggcgggaaacctgacagaaaaattcctcgtgccgcctttttctgtgctcaatgcccgagaaggctggtggcaagatcgcaagaaaaattggatcgcccttggcatccaatcagagtcgggccgcgaggacgaattgttgttcagcaaatcgacgcaaagcggtgcggtctacggcaagaaaaacgcgtatgaggccaaaataggcagggtggtcagctgggatgaatttttccaggcgcaccctgacctacagactttgccaaccacgagcattttcgacccggtaatgtgtgaattggcttatcgctggttttcacctgagggcgggacggttattgatccgtttgctggtggatcagttcggggcgttgtcgcggctaaattggggcgtcaataccttggctgtgatttgagaagcgaacaggtagaggcgaatcgccagcaatgggcgcagattgataccgatggtggcgttgcccctcattggcactgtggcgatagtcgtgacattcatcagcacttcaaaggggcgcaggcagattttttattcagttgcccgccttatgctgatcttgaggtctattctgacgatcccgctgatatttcgacgctgaactaccctgagttcctcatcgcctaccggcaaatcatcaaaaatgcgctgtcactgcttaaagaagaccgattcgcgtgttttgtcgtaggggaagtgcgggacgcgaaaggcatctaccgtaatttcgtcagtgataccgtgttggcgttttgtgatgccggcgcagcgtattacaacgaggcgatccttgttactcaggcgggaagtttacccgttcgggctgggaaaatgttttccgccagccgaaagctcggcaagacgcaccaaaatgtactggtgttcgttaaaggcgatccccgtaaagcagttgaggcctgtggtgtcgtagacgtcactgatattttccccgacgagccagactaa

SEQ ID NO: 440609 - DNA, 408 bp, Serratia marcescens
atgaaagttatgaacatcaagtgttggaaaattgaactatttggcgagccgaagcagctaacctctgttattagcggagcaataccatatgcagagaaccgaccattttttaccggttatgcgaaaaatccggtgaatctggaagagcttcgggatgagcaatttattaccattcatcgcgatctcgatagcctggaaacccgcacttttcgtatcagcagggttcatgaggtcaaatgttcaccagttcatgatgctgataattctttcgaagaggctgcaaaaccattgattaaatggttggcggaaaatgtacatccgcatcacaccgccatagttactagcaatagagcggagctgctaatgggtgagtcggtagtcaacactgacgaatatctgaaagattag

SEQ ID NO: 440610 - DNA, 198 bp, Serratia marcescens
atgaacgcacaccagcttataggccaagttgttcaccagttaatcaaagaaaattctcacatcgattatgagatcatccagcagcgtgtggttaacgagacaatgcgtgtatcgcggccaggaatggacagagacttagccgaagcgtgtaacctcgctataaaaatagtatccggagattacaagcctaaattttaa

SEQ ID NO: 440611 - DNA, 591 bp, Serratia marcescens
atgacaccgcaacaacgacgcaaacacttcaacgctctcaatgaagtggcgagcgttacgcacaaacgctatctgggccgtcctgcgttgctcacgggtatgcaatctgcatggattaaatcactgctctctgtttggggagagagcatgcaggggagaaccactccgctgaagccgaggagccattcctgctggcgtatggcgaagggcaaccggtggtctgataaagcgttagagcggtttaccaccgcgcttaagcgggctcgtgatgagggtttccagggacagcaggcattaaatcgcgcacgcgcaatcttatggcctaaacctgcggccaccgcaatagatatcgctattcacgatgatgatgtcaattttattgagcagtgtgttttgcaggcttttgatgtgagcgaaccggtatatgttgttggtgtgagttattacacctcacgcaaaaaaatttcagatatcacccgcgagttacagcaaattgcaccgtggctgacagtagagcaagctagagaaagagtgaaatggtgcctgcaaatattcagagccaaggtttttttatcggcaaaaaatagctga

SEQ ID NO: 440612 - DNA, 210 bp, Serratia marcescens
atgatttctgaatgcccgttgtttgatgtgcttcgtggtagttgcaggtttcgcgttgaggctattgaggccgatggcattatcatcagggagattgatacggggagatgcttcacgttaagttctgaggtgtcgcggctctcgcaagctgatctgtgcgagattgccgcgcaggcggggttaaatctgggtctacatcaggtcaaatga

SEQ ID NO: 440613 - DNA, 1623 bp, Serratia marcescens
atgagcgaattaattttaactgaggagttttttgctccagcagccaccgatctcgttgatggattattggggcagtacaagcatctgcgcgctgatattgagcagatggcgggcgtaattagcacacatcatgcatcggtgcatcatttcctggaggggaatcagaaccaagaccgacgccattatatcgggagtgtcgaccaactttttaaactcgaaggggccattgcgagcctgaactctacgttttggcaaaaagctctgaatatgactgacgtgtacgaatatatgccaaacaatcgccgcacagaatggaatgagcagatccgcgaaatgaaaacgccggattttgaagaggaaacggtgaggccaacaataatggaactgttgaactctcggcagcaatttttcgctgaacgtgtagacggcattttccgtgctctttccggcgatcatgttactaacagaccggagggtttcggtaaacgcatgatcctcgcgcgtgtgttcaacgagtacggatggaccaatcacgatgtgagtggttttatccaggatctccggcaggtcattgctaaatttatgggccgtgatgaaccccgttggcgtgtaaccgatgacgcgctccaggaggcccgtatccgtcacggtgaatggctgacgatggacggtggcgcattacgtgtccgggcctatctgaaaggaactgcgcacctcgaagttcaccccgaaatggcctggcggctaaattgcattctggcgcacctgtatccgatggcaattccgcctcagttccgccagaaaccgaaaaagaaactcaaagatttcactttgatggacaagccgctaccgttcgccgttctggcggtgctttcgggtttgaaagctgagtatcacaccccgatacgacgcaacaaatgggatgatcctacaccaccactgacaaccaatccgtttaaccgcagattcgattggcaagatgaagacaaggcaatccgcggacaagccggcaaggtgttggaaatgatcggtggtgtacttatcaaagccggcccccagaaaaatatcaacatctgggagttcgattacgacccatcccgagtgctgggtgagatcgttgcatctggctgtattccagactatcagtcgcaccagttctacccaactccggaatcactggccgaaagggttgtatgtgaggccgaaatacagccgggtgaaaaatgcctggagccgagtgctggcactggaaacattgcgatattgatgccggcagatcaaacctgctgtgtggaaatatcgaccctacattgtcgggtgctggaagccaaaggattacccgttgagcaggccgattttatcaaatgggctgcgtccaccaccgagcgtttcgataaggtggtaatgaatccgccttttagtgaagggcgagccaaagcacatgtggaaagcgctgcctcattggtaaatcggggagggcgtttggtggcgatattgcccctgggtatgaaagggaaagaaatattacccggctggaaggtgagctggtcagaagagatcagcaacgaattcgcgggaacaagtatttcagtagttattttgacagcagaaagagaggtatga

SEQ ID NO: 440614 - DNA, 669 bp, Serratia marcescens
  misc_feature (576)..(605): n is a, c, g, or t
atgaaagaaaaaattgttgataaaaacagctcaatccaagaaagactgctccaacttattgagatgcgcggactcaataaatcgaaactcgctcgtatagccggcgttacgccgcaagcggtaacaaaatggttcgatcgtggagaagttgggaaagcatctgcaatgaaaatagccctggctacgggcgtttcagttgactggatacttgagggtgggcctgaactgcacgagctgaacgggcatcgtggaaaacggctggttgaatggttcgataaccacgggggccttcctcaaggggaagctgaatttttccagcggttgattgatggcaccgctgcattcactgacaagacagcacgccggattgaaaaggaatatgggctacctataaatcatctagacctaggttatgacccatcctctccgcaaaagatgacagaccaagataagcaattactttattactttcataagcttaccaatgaagccaaagatgaaatccttgatttagtgaaggataaagctgatttttttgacaggatgtttgaagaattaaaaaaaattagagagtannnnnnnnnnnnnnnnnnnnnnnnnnnnnnacttataaccgccttgctggcggtttttttcgtccctttgattttttataaccataatgattga

SEQ ID NO: 440615 - DNA, 246 bp, Serratia marcescens
atggcacgtactcagttattaatggactgggcgatagaggagttcggagaagatgattgcccaagttacgcaaccattcttcattatgcaaaaaacaacatgattgacccaccggcaaagaaagccggtcgctattggcgtgtggacaaaggagctagatatatagggctttcatgcaaacctgtgacaaagaaaaacgacgatccccgtttgctgaggattttaaatgatgggcaggcctcgtaa

SEQ ID NO: 440616 - DNA, 282 bp, Serratia marcescens
atggataaaaaaccagaagaatcacaatctgaagacgccttgagcacatggagcgccttgctcaacagtatcagcaaggaagaaaggaaatccatattaaatcatgcacttgcaaatggaatgaccagcctaatacctagagaaacatcccagcgagcaataaaaattgccgaactgatagaaagcatgccagaggacgaccagagagagatattgcgcctcattgaagttaaaaaacttggtgcattattaaataataacccggaacgtaaaaaagcgtaa

SEQ ID NO: 440617 - DNA, 159 bp, Serratia marcescens
atgtgtttcagcgacggcatcaaatgccgtgaccacatcaatgccagtttccaccagcgtgactacggccagaacggcttcggttttcttctgtgcagcctggcgctgcttttcggtagcagagtcccagcggttccagagaacttcacggcagtatga

SEQ ID NO: 440618 - DNA, 1512 bp, Serratia marcescens
atggtggctctgcttggtcaatacggcaagagcattgaaacccgccgtaagaaagaagcggattgcgatcaacaagcctgggattttttcttggcggatttcctgcgccccgaacgcccggcgatgcgtaccgtgtatgcccgtttgcgtgaggccgccaaggcaaacggatggactattcctagtctttcctccatccgtcgcaaactagcccgtgaagtgccagtggagcgccaggtgttgcttcgtgaaggtgaacatgccgtgatgcgtctattcccttcacaggaacgcaccgtggccgatctgtccgccatgcaatgggttaatggtgatggttatcagcacaacgtgtttgttcgttggttcaacggtgaagtgatccgcccgaaaacctggatttggcaggacgttaaaacccgaaaaatcctggcatggcggacggacgtcagcgagaacagcgactcaatacggctttctctgtcagatgttattgagcgttatggcatccctaaagaactgaccatcgataacaccatggcagctgccaataaatggacaaccggcggtgtacctaaccgttaccgcttcaaggtcaaggaggatgaccccatcgggattatccccatgctgggtatcaatttgcactggacgagtgttctgtatgggcgcggtcacgggcaggcaaaaccggtagaacgtgcattctcccatggtggactgggggaagtcgttgacaaacaccctgcgctggcgggcgctcataccggcccaaaccctatggataagccagacaattacggtgaacgggtgattgaggctgaagagttcctggccgttttggctgaagggatcgcgttctggaatcgtcaggccgggcgtaacaccgaaatgtgccggggggtgctgtcattcgatgaagctttcgaggagcactaccagcaggccacggttcgcaaggccaccccagaacagcgccgcctgttgctgctgcctgctgaagcagtgcgcatcagtgagtccggcaccttcgttatggaagctggcggcaaagttcagtcacgcaagaaccggtatttcagtgaacgtctgctcggtatcaagccgaacaaaattgttgttcgcttcgacccgcagaacctgcaccagaacgtcctgtgctacacgctggacgggcgctttatttgcgaggccacctgtattgagaaaaccggcttcggtgatacacaggccgcccgtgaacacaagcgtaagcgtaaccagttcgtcaagagcatcaaggaagccgcgaaagccgagaaaagaatgtcggcccttgaagcggcagagcttatgccggaaaccgtaccgccggagccaccagaatcgcgtgtggtggaaatctaccgtccggcaggcaacaccctacggcgtcaaattgttgaagaagatgttgaatacgatgaaacagaagacgcctttgagaacgctgtgagccagctctacagcgaaaagcagaaacaccatatttaa

SEQ ID NO: 440619 - DNA, 273 bp, Serratia marcescens
atgacgttaatcgcctatgcctgggccagtggcttaatcgagtttggggagaaatacccagaaggtgcattgccaatcctcacaggtaacgacaaagaagtgaaagaagtcattgaggtgttggccaggcattctcgcacaaatgaccaattattagtgcctggtgtgccggaggccgatgaccagcattcagcattggatgcattaatttatttttcagatattgccaaaagagattacgcgaaattagttaaaggtgaacgacatgaataa

SEQ ID NO: 440620 - DNA, 615 bp, Serratia marcescens
atgaataagaacattgaacaaacaggctatcgccagaatgcccaaggtcacctggtgccggagaatttaatccgtcccgtggacaagctgcgtgacgacgttgtcctgaagctgattgaaaatgcgaaagtcgtacgccagcaaatggccgcattcaagattgaagcgctggcacaaattgccgattttgttgacctttccgccagcgagtacggcgtagagttcggcggcgccaaaggtaacgtgttgctcaccagctttgacggccgttatcaggttcgccgcgccgtcggtgaccaccgggtatttgatgaacgcatccaggctgcaaagtcattgattgacgagtgcgtcattgaatggtcagacggtgcgaacgataacctgaaagcgttggttgaccatgcatttcgcgtcaacaagcaaggccgtatcgacgttaaccaagtgctgagcttgcggcagatcgcgattgatgacccacgctggcaagaagccatggacgctattgcagactccatccaggtgaccggcaccagtcagtatctgcgcctatacgaacgacaggctaatggcaaatatgagcaaatcagcctggatattgctggggtgtag

SEQ ID NO: 440621 - DNA, 237 bp, Serratia marcescens
atgagcaaatcagcctggatattgctggggtgtagcatgaaagcgattaatgcccgtgagtttaatcaacgtcataaggttggaagcctgtttatttatcaatcgtgcccggctttgcgcggtggccccgtagtcaaaacggtcggccctgcaagagatttcaaggtgtcaggtacggtggtcgagataaatcaggagccttatttcgttaaggtcaccacgctgaccaaagcttag

SEQ ID NO: 440622 - DNA, 555 bp, Serratia marcescens
atgaataagccgcaattaatccgattaattcatgttgcaaagggaaagttaaatattcccgatgacgcctatcgcgcgttgctggctcataccgccaacgggaaaaccagttgcagccagatgaatatcatggaactgagcgacgtctacgctgcgttacaagataaaggttttaaacggagtttcaaacccgctgcaaagcgtgtgcgtgagaatgccaaaggcgctccgcgcgtggaggaaatcagcaaaattcgtgctatttggggagcgatgcaccgccatggctttatcgacagtggcaaggaaatcgcgttgaacaagtatgtcaaacgcatgagcagccagattaacgacggtgttggtgtggatgaagtgggctggctcaacggctatctggcgtttcgagtgctggagtgtctgaagcaataccatatccgcctgatgctggtgacactggatgcccgtaagcggccacgcccagtcaatccacaaaccggcgaagaggcgcggagctacgaccttatcctggcagcttttgaggaggcgttatga

SEQ ID NO: 440623 - DNA, 396 bp, Serratia marcescens
atggcggataatcttgatcttttcgatgacgaacaggatgactctctcctggaataccttgacaatgatgatggcgaacatgtcaaattccctgcgctactggcagagctaaacgagctgttacgtggcgaactggagcgcctcggtggtaacccgcgccattcactggagttggttattgcgatcagcaagcatattggcggtattcaagtttatttgcctcgcgggcaaacgctggagtatctggtgcgagatatgcggatttggcaagattttgatggccgtaatattcgtgagttggcaaagcgctataacgtgacgtttaaaacagtctataaagccatccggagaatgaggagacttgaacatttgaagcatcaaccaaaattattttga

SEQ ID NO: 440624 - DNA, 516 bp, Serratia marcescens
atgaagttaataggtaatctgtgtatcttggctttcgttgtctgggcggtgtcttttttttcttcaggtgaaaagaaaaagctcccatccaatgaagcactaatttcccagtttgatgaaatgggtatctttgacaagagcgtgtggaaaaagggaaatgttgtcgatggtatgcaggtttataccacccacacgagtgataaccttcttaaaagctcatgggttgtcggggataaacaagtgggcgtgattgcaatatccagtaatcgtgatccggcacttgagggggtatcctcattaggcttatgttacaagctcgtgaagggggtaatggcccgcgataacaaagaggattctagtcgtgtgaccgaagcctttaagcgggccttatcctcaaaatccgttgacaatacttatcatgatactgtgataataaatggctataaatttgacgtgaatatacaggctttggggccagattcatcctcatatggttgtgtcatcacagaaaagtga

SEQ ID NO: 440625 - DNA, 357 bp, Serratia marcescens
gtgaataacgtaatgaacatcatgaagaactgcattaactctgcctggctggttgctgcactgttactgacctctctactcctggcaacaacagtgccgcaggcgtctgtgtggtggtggctgctggcattgctggggggcattctcgtttatctggggatcaaggctgaagacactgacaatctcttttctccccgcgaactgatgtctctcctgttggtctctgtcggcaacctgtttggcatggccgctatctttttaggcccgctgggggttatccaatttctggttttcatcgccggtctgctggccgctcgccaggcttgctataaggggatgttgccgtggatccaataa

SEQ ID NO: 440626 - DNA, 570 bp, Serratia marcescens
atgaaggctggcccctccattctccgcactgtgggcggctggttcggcgcggacacggccaaaacggcagactcagtcgccgggatggtcgaggctgtcaacagcgcggttaacccacaagaccgccagcgcgttctggagcagaagctggccgagttgccaccggaacagtttgtgcagctggaatctctcaaggtcgagctggagaaaatccaagccgagcgtgaaaaaacgcagttggcagaccgtcaggcggcccatcatgagcagcaagaaaccatccgaagcggtgacaatgctgtggatgagtacgtgcggcgcacccgccccctgatggcccggttatcgctttatagctccattgcctatgtcctgttgctggctgtcggccaacaggccgcagccgttgccaccgccgccggtcatgccctgtcgatgccggagcctgattgggatattgccctaatgttggcgacgccagccctgggttatctgggcttccgtaccctggacggtttcgcccgtttcagcaaatccagcaaacacaagttaccggtggtcaaaccatga

SEQ ID NO: 440627 - DNA, 303 bp, Serratia marcescens
gtggagtggcaaaccattaaagagtattggggcatgatttgggcggtggtgatgaccgccgtcaacctggttatgtttctactggcaaaaacctatgtgaagcgtgaagaagtggatcacctaaatcagcgtatggcagcgatggaaaacgccattgctggtatgcccaatcaaaaggagctgcacgcgcttcagcttgaaatgagtaatctgcgtggggatctgaagtccctggcccccaagctggcacaggtacaacgcatcagcgatctcctcctggaaaatgaactgaaggacaaatga

SEQ ID NO: 440628 - DNA, 1602 bp, Serratia marcescens
atgacagcgatattgcctatgagtgccctaagcaagaaagcccagaccaacgcatcagccgccgccatcattggcggtgagtttgataaagaccaggtgctgttgccctatcaacggcgctggatcgccgacaaggcacaaataaagattggcgaaaaatcccgccgtactgggctgacctgggctgaagcggccgatgccgccctgaatggctcaatgtcgagggccgcaggcggctgcgatacgttctatgtcggcaccaccaaagacatggcccgcgaattcattgatgcctgcgccatgtgggccaaagcctataacctggcggcggatgatgtgggtgaagaagtgctggccgatgaagataaggacattctggtctacgtcatcaacttcgccagtggcttcaaaatcaaggcgctgtcttcaaatccatccaacctgcgcgggatgcagggtaacgtcatcattgatgaggccgccttccaaggtgacctcgcggcacttttaaaagccgcgctggcgttgaccatgtggggcagcaaggtgcgcattatctccacgcacaacggtattgataacctgttcaacacgctgataacagaaagccgcgcaggtaagcgccgctactccgtgcatcgtatcgacattgaactggctatcgctgagggcctctacaagcgcatttgtcaggtcacccgcaaggactggtcaccagagaccgaggccgaatggctggctaacctgctgagcgatacagcaaccgaggaggatgcgcgggaagaatactactgcgagccgaagaacggcggcggtacctacctggcgcgttcgctgcgcgagcgggcggcgtgcggtgacggcccggtgctgcgtttcaccggtactaccgcgttcaacgatacgccggaagtgatacgcgccagggaaatgcaggagtggttggagaagagcgtgttgcctgagctggaggcgctcccctcacacctgcgccactgcctgggggaagactttgcgcgctccggccacctgaccgtgtttgccccgatgacggtcaacaccgataccacccggacagtgccgttcctggtcgagctggcaaacgtcccgtacaaacagcaggagcaggcgttgttcttcatctgcgaccgcctgccgcgccgtgacggcatcaagctcgatggtcgcggcaacggtaactacctggccgaacaggcggcggagaagtacggcgcggaagtggaagtggtaatgcccacgcccggccattaccgcgagaacatgccgcgcttcaagtcggcctttgaagacaacgagctggtgttgccgaaacacgaggacgtcatcagcgacctcgggcaaatcgtcattctgcgcggtgtgccgggtatcgatgaccgggagaataccggcagcgacggtcacaagcgtcacggtgacagcgcttatgccattttcctggcctttcttgccagcaaggaagactgccgtcgctacgagctgcaccgcatcaccccatcacagcaacgccctgaagagcgtgatgaacgtcgtcaggtgcgcatcacgcgtgggctgaagaatcaacgaggactactgtaa

SEQ ID NO: 440629 - DNA, 1581 bp, Serratia marcescens
atgttgaacagactgacaggggctatccgcaaactgatccatccagccacgggggagccggtcaacgttagccaggaagaattacagaccgaacagacccgcgcacgggcaatgggcgtacggcgtccgcatcccggcatcagtgttgccagctcgttaaccccgatgcggcttgccagtatcctgaagcgtgccgccgaaggggatgccaaggattatttcatcctggctgaagagatggaggagcgcgacctccattactccagtgtgttgcgtacccgcaagctgaaagtggccggtatcgaaccgacggtggaagccgccagtgatgaggcccgtgacatcgagctggccgacgcggtgcgcacattgatggagcggccacaaatccccgagctgctgtttgatctgctggacggtttgggcaaagggctggccgtggtagaaatcctgtgggacaccgccagcgtgccctggacaccgcgtgattattcctgggtagatccacgtttcctcaagccagacaaggagaccttgcgcgaggttcgtgtactcaccgaagcagagccaatccatggtgaaccgctggccccgtacaaatatatgacgcatcagccacgcctgaagtcggggttgccgctacgcaacggcctggcgcgactggtggcggtcatgtacatgctcaagtcattcactatccgtgactggtgggcattcggtgaaaaatttggtctaccggtcaccgtgggcaaatacggcaacaacgccagtaaggaagatatccagacgctggttgatgccattgccacactggcttctgatgccgggtgcgcgattccgcaatccatgcagattgagatgcaagagacggccagccgccagggtggcggtgtgttgttcgaaagcatggcgaagtggtgcgatgcccaaaccagcaaagccgtcttgggccaaaccatgactaccgatgacggcagcagccagagccaggcgaacgtccataacgatgtgcgtatggatattgcccgctgggatgcacgtcaactggagaacacactcaacgaatttttggtgcagccattcatcctgctgaactttggcgaacaggagaactacccgcgcgtttgcctgcgtattaacgagccagaggatttgaaatcgctggttgatgcgttggtgcccttgcttgaccggggcatgaaggtgcaaatgtcagaagtgcgagacaagtttggtctgtcggagccggaagatggcgcggaaatattccagcccgctggcggtgcggccggtggttatgccatgttgcctgcgcttaaccgggaacagctcgctctgaaccggcagtctgccccggatgagattgaccggctcaccgatgaaggcttgggtgattggcaacgcgtcggaacggcgttcaccaatccggtattggaacttgcccagtcggccagcagctttgaagagtttctggctcgcttgccggagctgcaaagtgatctggatgctggggagtttgtggagcagctggcccgcctctgtttccaggctcgcggattgggagatgtgaacgatggctga

SEQ ID NO: 440630 - DNA, 843 bp, Serratia marcescens
atggctgacaatatcattcccaaagaggcattggcctggttcaaggcaaagaagcttcagcccggttttgactatcgcgacgtgtggaaggaagaacacagcgccgcgtttaccgttgccaagatgacacagttggatttgctcaatgacgtcaaggcactggtagccgatgccctggagcagggacagacgttcgccgagttccggcaactgattgagccattactggtcaagcgtggttggtgggggcagcgggacatggatgacccgctcactggtgaaaccagaaccgttcaacttggcagtgacagccgtttgcgcaccatttacaacacgaacatgcgtacagcgcgcagcgcgggacaatggcagcgaattgagcgcaccaagcgggccatgccctatctgatatatacgctggggccatccagggagcaccgggtagaccatttgaaatgggccaacacttgcctgccggtcgatcatccgttctggcgcacgcatatagggccaaatggctggggctgtaaatgtggcgttcgccaggtcagcaagtatgaatatgaccagatggtgcaaaacggcgtgacggagaccgcgccggtgttcgacggcaatgggcaacctaccggtcaggtcagccgctcacgggtgccgttaaagacccaggcccctccggttaagaacgtcaaatggttgaacaagcgcaccggcgaagaagagttattgcctgaaggtatcgaccccggctggaactacaatcccggtatcagtcgccaggccgctctggcccgtcagctcaaggcaaagcaacaagcctttgatgatgacgatcaaccctga

SEQ ID NO: 440631 - DNA, 954 bp, Serratia marcescens
atgtccgttgaattgctggcgctctgtttcgagctgccggacaccattgacaacaaactgcctgactggctgcccatgttgcctatcggcccgttcaaaggccgtgatggccgttcgtggatcaccaacgaaccggaagcggtgattgccgcgtcgctgcaatacagcgaggttccgttcgacatggagcacgccaccgagctgaaaggcccgcaaggcgaccccgcccccgcatatggctggatcaccgacctgaaaatcaacggtgatcagatttgggcgcgcgttgagtggactcccgagggggcagccctcattcaggggaagaagtaccgctactacagccccgcgttctattacaccgctgacggcctggtcacgaaactgtccagcgttggcttgaccaacaaacccaatttatttgtacccgcccttaactcggagaacaccgacatgaaactgcctgaacagattgcggcagcgttgggcctgggtgcagaagccaccgttgacgcgggggtgactgctatccagagcctgaaagacgcagagcaagtcgcgctgaaccgtgcgcaaaacccagacctgagcaactttgtgccgaaagaaacccatcagctggcactcaaccgcgcagaaacggcggaaaaccagctgaaggcgttggcagacaaggaagccgaagccctggtggatgcggcgatcaacgacggcaaagtggcacccgccaatcgcgccatgtacctggcgacgtgccgcacggaagaaggccgtgcgcagtttgccgacttcgctaaatcggcgcccgccatcgtcagtctcgacccggccaagaaagtgacagtccaggtcaacccgcagacgctgacggacgccgagctggcaatgtgccgccaaatgggcattagccaggaacaattcatctcagctaaatccaaacaggagcaacagtaa

SEQ ID NO: 440632 - DNA, 933 bp, Serratia marcescens
atggccgcagtctcccctgaaattatgcacgcactgaccaccgcgttgagtgctgcctacgtcaacggcctgaaaggcgtgacaccgcaatatctgcgcatcgccaccgtcgtgccgagtggctcggcatccaatacctacggctggttatctgacttgccgggtattcgtgaatgggttggcgatcgtcgtctcgctgagctggaacagcacggctacaccatttccaataagacctgggaaaactctatccgcgtgaaacgcgagagcattgaagatgaccaaatcggtcagtacagcgtgattgcccaaggttttggccgtcaggttggcgtattccctgacacgctggcgtttaagttgctgtccgaaggtttcagcaacctgtgcttcgacggtcagaacttcttcgacaccgaccacccgatggctggcgggacttacagcaacatcgttggtgatggtacggaaaccggtgagccgtggttcctgattgatgagtcgcaaatcctcaagccaatcctctatcagaaccgccgcgaattcgactttgtcgcgctggacgacttcaacaacgaacacacgttcctgaagaatgaattcctgtacggcatcgatggccgcagcaacgtgggcttcggtttctggcagaccgctgttgcttcccgtgcgccgctcactacggcgaactacgaaaaggcggtggcagtgctgcaaggtatgaagcgtgacgacggtgagccgcttggaatcaccccgacgacgctggttgttggtcgcaacaaccgtgctgcggcgaagaaagtgatcgaggcgcaactggtcgagggcggtgactccaacatctactacaaagacgtggatattgtgaacagcccgttcattgtcaccccggcggccacaccagctccaacgccaacgccggaaagctaa

SEQ ID NO: 440633 - DNA, 213 bp, Serratia marcescens
atgttgctggtgcaggccgtctcccccaacgggttctggcgttgcgggcagtggtggtcgcatgcgggggttcgtgttgtcgtcgatgatgggctggcggtggacattatgtccccctatatcagcgaggctaccgccgaacgcctgaaggcggacccacatctgcgcgtcaccgtgctggatgacaccggaaccgaagaccaggaggcatga

SEQ ID NO: 440634 - DNA, 435 bp, Serratia marcescens
atgcaatacgccacccgtgaagacctgatgacggccgacggctcctttgtctggaacgtcgccatggatacgcagacgcagcagcttgacgaagcagccatcagtcaggcgttggcggacactgacgaggagatcaactcctggttgtcacgccgttacaagctgccgctggaaacggcggtgccgcgtctcctgcaacgggtggcggtgtctatcgccttttactggcttgctgaccgggataaccaggtcactgagctggtgcaaaaacgctatgacgacgcgatcaaaacgctgaaggacattgccaacggtcagcgtgacctgggattgcccacacttgaacagccaacggaaggcaccggcggcaaagtcatcatggttggcgacaatgcgcgcctgttcacccgcaataccctgaagggcgtgctctga

SEQ ID NO: 440635 - DNA, 543 bp, Serratia marcescens
atggggatccaggtcgaagtcctgggcacggcaaggcttgccgaaatcaaggctgcgatggagaagctggcagataacagcctgcgggcagagctgcttgacagcatcggggcggttgtcgagtcccagactcgccgccgcatcaccgacgagaagcaatccccggatggtgagccatggcaagactggtctggcagctatgccaagacccgccatagcaatcaaagcctgctgctaggcaacggtgacatgctcgacagcgtcacctttgtggctgagcgcaaccaggtgcgagtgggaacgccgctcaagtatcccgggatccaccaggacggcttcaggggcaacgtctcaatcagcgcacaccaacgcctgatccaccaggcatttggccgggtcttgaaacaccctgtgtggcaaagcgtcagcgcccacacccgcatgatgaatattccccagcgtcagtggctggggctgtcgaacgccaacagcaacgagctgttagccgtgattggcgacttttggaaggaggtcttgccgtga

SEQ ID NO: 440636 - DNA, 624 bp, Serratia marcescens
gtgagtgaagaacgcccgcaactggtcaccgttggcagcaccgtgagtgcggccgaacggattgttgcctggctgaagccagagatggaaggaaacgagaaagagcctgaccgggtgcgcgccgtggaacggcacatcggccagttcagcaccccggatgatgtgaagcgttatttatcaggacgtgaaggtgctctccgcctggcagcactgcgcgtgcgagatatccagcaccagtccggtggcaccgttggcaccgtgacctgggctgcttacatcatggcgaccgacagctggggctatggccgcgatttacgcgcagaagtcctggtgggcaagctggcacgtcgcctgacccgaacggatgcggcccgtgcaatgggtgcagaaggcaaggcaatggacatgaccgccgacaacatctacagcggcagcctggacgacctgggactgaccatctggacggtgacctggaaccaggcattcaagctggatgaggaaacggatatcagcgcattacctgacttcctccgactgggcatgacggccaagccacacggcgggccagatattgatggcgtaattaacgtgcgagagagcattgatgaaaaagaaactgattaa

SEQ ID NO: 440637 - DNA, 216 bp, Serratia marcescens
atgaaaaagaaactgattaagccgcgcaagggattgcaggtgcgaaagcccgacggctcactgctggcagatgacggcgaagtattggcgttgaacgccttctggttgcgccgtattgcagagggtgacctggaggtcagcgatatccctgtaccgaaaatcgagaccgctcacgttactgagccggctcccaaatccaccaaggcggagaaataa

SEQ ID NO: 440638 - DNA, 1482 bp, Serratia marcescens
atgtctttaggctctatccccaacgatatccgcgtgccgcttgttgcgattgagatcgacaactcgctggccctggacagcgccccggcgcagcaacacaaaatcctggtcatcggtcatcaaggcgcgaatgcctccgcaccggtgctgacacagaaccgcatcaccagtgacagcagcgccgatgcactctatgggcgtggttcgatgctggcagaaatgctcaaagtgctgcgcaagggcaacaactacaccgaaacctgggccatggggattgcagaccttggcgatcaggcggcggctgcaacctctacgctgaagttttccggcaaagccaccgccgcaggcacgttggcactgctggtgtgcggcgtatccgtccaggttggcgtcaaggccgaagacacggcggccaatgttgccaccgctgtgattgccgcgattaatgccaatggtgccttgccggtcacggcaacagccaatgcggaagacgctgacgccgccgttctgacagccaagtggtctggacagacaaccaatgacctggatgtgcgcgtcaattactacgttggcgagcagacaccggctggccttggtgtgactacagccccgtttaccggtggcaccggcaccccggatatggctgctgtcgtcgctgcattgggtgatgagtggttcaatcatatcgtttgcccattcaacgacgtcgccagcctcaacgcattgcgtgacgagctgctggagcgctgggggccactcaagatgattgaagccatcgcgtataccgctgttcgcgggacacatgcgcagaccggcacctggggcagcacgcgtaacgattacctcatcacggctatcggcaccaatattgcgccgcaaccggcttatctgtgggcggcggcctatgccggtgtagcggcctacaacctggcgattgacccggcccgccccctgcaaacgttggctttgccagggctgttgcctccagccaaagaggtgcgctgggatatgccggagcgcaatctgcacctgtttgacggtgtggcgacccacaacgttgatgcgggcggcaacgtctgcattgagcgcgaaatttcaacctatcgcgttaaccgctttggcgatgcggatgtgtcttacctggacattacgtccccggcgacactgggccatattcggtatgtcatcaaaaaccgcttcagcaaccgctatccgcgtcacaagctggccgatgacgatgtgctggcaacgcttgaaccgggtcaaccggtgatgacgccgaaactgtgtactcaggagctgttggacattttcatcactgaactggagcctgccgggctggttgaggactttgatgattacaaggacacattgcaggtcacgcgggacagcgctgacaagaaccggctgaacttcgttatccatccgaacctgattaaccagctccgcgttctggcgggcctgatccagttcaagctctaa

SEQ ID NO: 440639 - DNA, 351 bp, Serratia marcescens
atgattttaggtgaagcagctatccgcgtgaatggccgcgaaatcaaatccaagggcgcatcgacgctgaaccctggcgggtttgcgcgcacgatgcacagtggcggcggtaagaactggggctactcccgcaaaaccactcaccctactgtccaggtgaccatcgccgctgatgaagacgtggacgtgattgagatcggtcagtgggaacaagtcaccgtgatgtttgaaggtgacaacggcctgagctatatggtgaccggcgcggcggcggagaacccggcgacgctgtccgaagacaacggccagattgaagtgacgttcatcggcaccaagtgtgtgaaggtgtaa

SEQ ID NO: 440640 - DNA, 384 bp, Serratia marcescens
atggcgcagatgacaatcacattagagcatggcctggtcaccggcaaaggcacatcggatgaagcccgacacatggaggttacgctccgcgagctgacgtctaaagacatcattgacgcacagctggccgctgagcgcgtcgtgatggcggagaacggcaaagcggtggcgtatgtttctgaagtcctttatgggctggagctgctgcgccgccagatagcgcagattggcacgatgcccgggccactgacggtgaaacagattcaccagttccatcctgacgacttcaggctattaagcgcccgagcggatgccatggatgggatgctgtcggaggtcgccgagcgggggcgaaatgatgccgatggcggcggcactcactaa

SEQ ID NO: 440641 - DNA, 144 bp, Serratia marcescens
atgatgccgatggcggcggcactcactaacctgctcgttaacctgtcgggacggttcagcctgtcctacctggaacagttgcccttgcggcagctgttccgcatcaccgcccagttgaggaagcaaaatggcaaagcgccttga

SEQ ID NO: 440642 - DNA, 423 bp, Serratia marcescens
atggctggccgagccattggcggtgctggcatggtctacggcatgacggaactggcggactatggagccaaaacactctacgacaccagcggcgccggggattgggccaaaggttcgtcattccgtaactgggtggacacctctgtagacaaatcgcagctgcctgagaaaacatccattggcgcagtatggcaggaaatcaaagactttctgaccaccgcgccggacacgtcgaacatggcgaaatacccctgggaaatgagccgtgacaccccgcagtatccgttcgtccctcccgaactccagggaaacatcgaggtgacggtgaaggatgaccgggtgcaagtgaccaaggtcaacgtgaacacgccgggggtaaccatgagtgccgccagtggcgtccgcaatgtggagcaagactga

SEQ ID NO: 440643 - DNA, 1257 bp, Serratia marcescens
atggcgattaaatgggaggaactccatgatgcggcgttccggggcgtggcgttttacgtcaaagatgtagaaggcagcagtggccgccgcgctattcctcgtgcctacccacgtaaggaagtgggctggacggaagataacggcgcggagctgactcagcagcaggtgaccggcattctcctgggcaacgattatctgactcagctcaagcagctgcttgccgcactcaatacaccaggcccgggcgaactggtgcatccctggtttggtgtacagcaggtgcaggccggtaaagtcacgcaccgcctgagcaccgaagaaggcggcattgcctatgtcagctttgaggtgtttgaggccggtcagcagttgttcccctccgaccaggaggacaccacagccaccacgctgaacgccgctgaccaggccaaagacgccctggctaacggtgactacttcggagccatcgacggcatgggcagcatggtggatgccttactggatgacatgcagggattggttgccaatctgccgacgctgccggatgccctgaatgaatggatggacaggttaaaccgcttcaaggatatggcggggatactgatagccacaccaggagaactcatccgcgacgtcacagacctggtcagcgacatgaaagacctagtcagtgagtcgccctgggcgctgcgcgtttatgaccagctccgtgaccgatgggatggcgaacgcgccgcccaggcagcgaccaagtcgctgtccgataacgtggcagtggatgccgatagcggatttgccagcagtgtgacgccgacggcgctggttgatatctcaaacgctatggcggccaacattgatgacttcaaattgctggttgtgacctcagcactggtcgccaaggcggaggtcattgccacggcgacctttgaaaccagccaggaagcacaaagcgccggggatgcgctggcggagctgcttggtgagcaggccattgtcgcggtggagtccgggcaacgtgatctgtggcgcgcgctgcgcgagctgcggtttgccgtggttaacgatgtgcgcctgcgcagcgttcagttgccggagctgcgccgcatccaggtaggtcaaacaacgccggtcatgctgctggcctggcgagaactgggggacgcagagctgcgagacaatctggttttacgtaaccggctgcgctatccctcattcattcttcctggacaacgtattgaggtgattgataatgcatga

SEQ ID NO: 440644 - DNA, 1092 bp, Serratia marcescens
atgcatgacgagctaaccctgaatgtggacggtaaaatctggggcggctggacagccatgaccatcaaccgaagcctggacagcatcgccggtgagttcgacctgacggtaacatcacaatggtcgaaagcggccccgcgctcgattaaacctggcatgccatgcagtgtcactatcggcaaagagcgcgtgctcaccggctacattgatgattttattcccagctatgacgcgcagaacgtatcactgcgggtactggggcgagataagaccggtgatctggtcgatagctctgtggttgataagtccggtcagtggagtggccttaagctggagcatatcgccgccgccatttgcaagccctacaccattcaggttatcaccgagaccgataccggggatgcgttcagtgcggttacgctggagcaaggtgaaaccgggttcgagctgctcgacagactggcaaagcagcgtggcgttctgatgacctccgatgccctggggcggctggttattacccgcgcgtccacacaacgggcgacggtatcgctggcgctggggcaaaatatactggccgctcgcggccgcttcagttggcgcgaacgtgccagccagtacatcattaaaggctcggtggcggccggaggctcaacgtgggatgaccagcctgtcaaggttgtgggtggccgccagacggttatcacggatgccgatatcacccgctaccgtcccaaaatcctggtcaacgaagataacctgacggtgggcggctccagcgcccgtggtgaatggtacaaggcccacgccctgggcgaagccaatagcacggaaattacggtgaccgggtggcgggaaaacggtgacgccgggccgttgtggcagaccaaccgcctggtgagcattaccgacgtgatccagcaactggatgtgtcatggctgattaaaaccgtgtcgttttctcacgatgacaacggccgcattaccgtgctgaccctggtgccgcctgagtcgctggacatgccagcagagaaagccaagggtaagaaaggcaaggccaagaaaacagccaagtcggaggtcacatgggactaa

SEQ ID NO: 440645 - DNA, 540 bp, Serratia marcescens
atgggactaaatgcagccaactttgcacgctcgatcacctcaatggggcgacgcctgcgcctgatggtagaccgcgccgtggtgcgcatggtgactgatagcctggggcgacagaatcttcaggtgcagaccctggcgaatgagaccaacgacaatgtggagcgattccagaattacggggtttcatctgtaccgccgcccggcgctgaagcgattgttgtcgctgttggggggcgacgttctggactggttgcgctggccgtcgaggataaaaaatcccgccccaagggactagaccccggcgacgtttgcgtgtatcacagtgagggccacaccattaccctcaagcaagatggcatcatcgaaataagggggaaagcggttaatctggttgctgaagaatcctgtgacattgtgagcaaactcattaatgtcaccggcaaagccaacttcagtgaagatattcaggttaaggggaaaagtttccttgaccatatccacaaggatggcgacggtgctgatacaacgaaaccgttatga

SEQ ID NO: 440646 - DNA, 450 bp, Serratia marcescens
atgaccatcagaataaattggcacctccccgcaggcggtgatatcgaagtaacccacaatggcctttcgtctgacgagggccttgttactttagtgctgatttgtctattcaccgacgcccgcgcagaagagagcgatattctccccgatggcaccgatgaccgtcgaggctggccgggcgactctttcagtgatttccaatggggttcaaaactgtggcttctcgctcgtgagaagctcactgaatccgtgcgtctgcgcgttgagaactacgccagcctggcaatgcagcccctgctgcaaacgggttatgcccgcagtgcccaggtcaccgccaccgttgtttcttccgagcggattgatttttccgttgtattggcccgcccaggcaaatcagccctgactgtcgaaatcaaaaagcgttgggaggcgttagatcatgccgtttaa

SEQ ID NO: 440647 - DNA, 1074 bp, Serratia marcescens
atgccgtttaatgtgcaaagcctgcgccagttaatcaaaacaggcgagcaagatattgagatagagctgggagagaaattaccgcccgtaggtgttgaacgtgcgctgaatgtcgcgttcagcggggccgttcgtgacgtgtacgattaccagacctggattgctgatcaggttgtgccatcactgaagtctgatgaccagaccattatcgatacggccagctccgagggggtaatacgcaaagcggcgacctacaccagcggcaatgccacattcaagggcacgaagcccattccgctcaatacagaaatgcaggccaggaacggtcacgggtatcacgtcatcaaggcgaacgcccccgttaacggtgcgcagactatcacggtgcaggctgatgatgttggcgcagccagtaatctggacgctggggaacaactcacgctgatatcacctattccaggtgtggacagcgtcggcgttgttgacagcgacggtctgaaaggcggcacagatattgaacccattagcgagctgttagaccgcttactgtttcgcaagcggaatcctccggtgggtggcgcagtgcatgattatgtcatctgggccagggaaatggccggggtctcacgcgcctgggcctgggatgcctggcatgggccggggactgtcggtctggcctgggtgtatgacagccgtccagatatcacgccgacagcggctgatcgtgacgccatgaatgcctatctgttccggcatgctgacccggctaccggtaatttcatcggcaagcccggcggcattgaggtgtggatcatcacgctgaccctcaagcaggtgaaacctaccatcaaactggtaccggatacggctgaaacccgcgatgcgacgctggcgaacctcaacgcactgcaaaaaacattgtcaccaggttcgacgctgctgctgtccagcctgcgcacggccatcggcacggctactggcgtgactgactacaccctggacattaacagcgacatcaccagttcgagtggtgagcttatcaccctgggggaagttatatggcccacagcgtaa

SEQ ID NO: 440648 - DNA, 585 bp, Serratia marcescens
atggcccacagcgtaacggaatggcaagacgtccttcagcaaaatatgccacgtggtcgcgcctggccgcgtgatgaaacggccagtttaaccgaccttataaagggcgttagccgtcgtttaaatcagctggaaattaatgccgacttgttgctggcggaaatgcggccggaaaccaccgtgcagctgctgcccgagtgggaaacctatttagggctgccggagtgcaatatccccaatgacgattttttgtcacgccgtgccgccgtcgttgagaaatatcaccgcaagggagggttggcaccctggcaaatagagaatgtggcccgcgcgttggggtttgatattacggtaaaggaaatattgccgcatcactgcctgcgtaattgcatggcgcgtatttatcccaagcgttaccgctttctattgtcactcacggtacatgacaccccagtcacgcggtttaccgtcgtggaggatgtgcttacgccattaattgaataccacacgcaaatgctggagtgcgtattaaccaaatatcgcctggccggttacggctatgaatatatttttgaggtggaatga

SEQ ID NO: 440649 - DNA, 765 bp, Serratia marcescens
atgtattacatcgataaccccagcagtgtggccgatatgccgcccccccatgccacgctgtttgatcatgcacgctggtttaccgagggcggtgacggtattgaaccaacttatcctggctgcgactggttcaacattatccaggccgagctgattaacgtggtcaaactggccgggcttacacctgacaaaacccagcttgaccagttcgcccaggctatccgcatgatgtctaccgactacatgctgcctgttggcattccgctgccatggccgggttcgtcggccccagacgggtttgggctaatggtcggccagacgttcgacggtgcggcgtatccgaagctggccgccgcttatcccggcctggtcattcccgacatgcgcgggcagaccatcaaagggttacccggagcaggtcgcgcgctgctcagctacgaagctgacggcaataaatcacatgcccatggcatggaaattgataacacagacctgggcacgcgtcagaccagcgccgacggagcctatcagctcaagctgcggtcataccgctctaacacttcactggatggcggggaaagctcgcggcataccctcgagcaggacagaggctttaccgactttggactcatagagccgctaccggcgcatcttcacaccctggcattaggttggcacggccatgtcggccgcgtactggctgacgggaacgcggagaccaccgtcaagaacattgcatttaactatatcgtgaggctcgcataa

SEQ ID NO: 440650 - DNA, 885 bp, Serratia marcescens
atgagtgaattttccttctctgacaccgaccaggcgttgtggctttttcattttgatgcccagggcgtttttattggcagcgggctaaccattattcccaaaaacaccggactccccgccaataccacgacagtgaagtgcgagccgcaaaatggatttaccggtgtatggaatggtgaaagctgggattacgtgcgtgataaccgtggcgtgcgctactggaataaatatggcgctgggtcggttgtggtcaatattactgacgtcattcctgacgacgcgatcttaacggaacccccgaaaaaagaaccgggcatcgtgtatttgtatgagaacggcgcgtggcagcaattccaggacagaaccggccagaactattacggcccgctgggccagatgctttatatcgatacggcctatttcacgctgcctgacggctgcacattcactgcgcccccggagagccgcgccggttacgtcactcactggaacggcgacgcctgggaatacgttgaagaccaccgcaaccagactgcctaccgcaaggataacggcgcgtcggtcatcgttaatgaggttggccctctggatgaatcgttgacctttgacgccccttccacgccttatgacgagtgggttgatggtaaatgggtgaccaataccgacacgcagaaagaagcgcttgttgcctcggccaacgcgaaaaagaacgcgttacgcgatgaagccgactcccacgttggcgtgttgagttctgcggtgaaactgggccttgccactgaagaagaaaaggcacaactggaagcctgggagcgctacaacgttgcgttgatgcgtgtcgataccaataccgcgccggacattgtctggcctgaaaagccataa

SEQ ID NO: 440651 - DNA, 2028 bp, Serratia marcescens
atgtatcatctggataatcccagcggcgtgccagtcatgcccaaggtgcaggacgtcaagagtgagacgccgctctatttcacggaagagaaagaccgtgccacttacccaggcgcggactggttcaatatcgtcacggcggaattgctcaatattctgaagctgggcaacgtggccccggataaattcagttttaaccaaatcgccaccgtattggccgagctgattaacgaccgcctggccgcccagtcgcaaattgtggactcaacggaagaaggtctgcaaaagacggtagacggccaatacttcagcgtgccggacgtaccgggcagcaatacgtcgttccggtattacaagaacgtgggcggcgcggcgcgtgaaattgccgattccccgtcgagcagcttcgtgaactttgtcatgatgatgggcatcaacatgttgccgaccaatggcattttccctggtcaatcccatcacccgctggaattcatgtccggggaggatgatctggcgttcggcgtcaatgctcgcggacagctcctggccccggccggtattgccgatttgttgggcgtgaaattccagccattgccaccagaaagcgagtacgtattagtctttgatgacgacagcggctgcgtggtgtttggtattggtaaagcggcctttgtggaaatcctgggtgtacggatagaactcgccaatatcgacaacctgctggagcttattgacctggaaggccgtattgccggtggcatcaacagaagcggggaatccctcaccgccagcccagctaaccctatcgttaaaacgcactactactgctttgccgaacgtctgcatatctttttgtacgggcaatcgttgagtatcggggcgctgggttcgccggtactggggacgcccacgccggatgcgttgatgtataacaccggcgtcatcagccggggtaaaacgccgacgtcgctggttgacctgaaagaaagcagcgtagagaccatggcttcagcgttggctaacagcttcgttaaccatgtcgaagcggccaacggtatggatggccgcaagttgatcctcaatgccggtggcgttggtggtgaacgcattcagaacctgacgaaaggcacagccccctataacgacctcatccggcaaatccgctggtgccacacggtaaaccagcaggatggccgtgaatacgcgccggattatattgtctggatccagggggaagccaacgctgctgacggtatgtcaggcacggaatataaacagcgtttatctcagcttagaacggacattgaagccgatttggctgatatccgcgatgcgtcaaaacccttgcaaatgatggtttaccagatggcgagccatggcttttatgtcggtacagaggagcatccttctgttgaaattcccctggcgcacctggcgatttcgcacgaagacgacaatatccactgctttgggccgaactacatgtttgccggttcggacaacgtccataagaccaaccacggctaccggcagatggggctacaagccgataaggctatccgccatcacatgaccaccggcgagaagttccgcccactagagccggtcagcttccgccgtatctctgacacggttgtggtcgggcgtttccatgtgccggtattaccgatggtgtttgatgacagtgtggtgacgcagctccctgacggccagaacggcatcgaagcctgggatgatgacggccgtgtgccactcgcggcgacggaaatcatcgcgggctgtcagctcaaggtgactgccagccgcccgtttgtcggtgacgtctacattgctgccggttataccccggacaatcgcgggcctatcaccgataaccgctataaggaatggtttgctggccctgtgacgggcgttcgtaccacgttacgggattcagacccggcgaccaccgaactgaccggcctggacgggaaaccgtacccacgccacaactactgcgttcacttttacatgagggttgaatcatga

SEQ ID NO: 440652 - DNA, 705 bp, Serratia marcescens
atgagcggcctccgcgtgactatcaccaatagctttaacaatccgttcctccagaagtctcaggtggggtcgccgttgctgctggacagcaccgtggccctgtacgagatgcgcagcatctatgaccgcagcccaaacgggaatcacctcatccttaacgacctggtgattgacgcgcaggggctattttgtgatggcatcgagggccacaacgcctacaccggtgtcacagagccagatgcatttaccgtggtcactgcgatcaatgtgccaaaggctccgccacagacctcgcagattttcagctctattgccgaatcaggctcaccgctgtccgggtgccgtctggctattaccagtacggggttgttgacggcttccatgggcacgtcaccggctgtcacccttttaaactgtggctcggccgtaggggcctggacaatctttgccacacggttcagtgatgacggcatcatgtgcctgcgtatggatggcagtaagttttcaactccactggcgggcacccgtaactatgccgtgcgaccgattatcctgggtggtggctatgtcgcgccgcacaacatcggcattaccgggcatattgggttgttcggcgcttatgatggtgcgttcagtgagtcagatatgatgtcgctgatccagaagggacgtgctgtcatgcgggggaatggcaccgttatttga

SEQ ID NO: 440653 - DNA, 171 bp, Serratia marcescens
atgatgatgaataagggatttcagcgcattgctgctgcggttgccattctgtctatcgttaccggcttaacgcactggcctgatgtgatgtttgtcgtcagcgtgctgtatctgccgctgtggttattgggcgagtacgccgcataccaggagcgccaccagaaaaaataa

SEQ ID NO: 440654 - DNA, 294 bp, Serratia marcescens
atggtaaacaacatagagcaggccgtattcaatcttgtcgaagagtataatggacgcagcctgctgacattcaagcgtttcaagctacagaatgatacggatctcaagacagactttcgcatggatcctgatgatgcttatgagttgttggagcgatacgcagagcagttcaacattaatcccaaagacattttctttgataaatacttccctgcaagcaaaaaggcctcccgctccccgctcacgattggaatgctgattgaatccgccaaggcgggccgatggttgtattga

SEQ ID NO: 440655 - DNA, 354 bp, Serratia marcescens
atgactgaaaacgaaaaagaatttaaaggcggcccatactcgcgggttttaacagaggatttcttcaagtttcttgataaaaactcagtaacaacgaactgcgttatgtgtggcaacggcgtatcgatagtgtcagagacgtcgaaagcaaatctcgcaaatccctatcagacaattacttatgtcactttattcaaacatgtgccggttattccaacagagcatgttttaaactattattatatgcttcactgtgagaaatgcggcttcaacaccacattctcggcgcacagggtccatagttggctaaccgcgcaacaagttaaggaaagcacggaaggcaaagatgaatga

SEQ ID NO: 440656 - DNA, 1107 bp, Serratia marcescens
atgaaggatgaaataaatagtttaataaaaacaaggaaaaatataggctcagttattacaactaactacgatcaattagttgaggatttttttgatttttacccattgattggcaacaacattcttttaagcaatccatacggctcggtttacaagatacacggttgtgtaagcgaccctaacaacataataattacaggggaggattacgcaaacttcgacaataaatacgagttaattcgcgcgcaattactctcaatattcatacataatcctatcatattcatagggtatagcattagtgataaaaacattaaatacttattaaaaaccgtattctcctatgttgatttaaacaccgaactcgcaaaaagaatcaaagataacttccttttggttgaatacgaaaaagatagcatgtccacagagattacggagcacgacatagatatagaaggcatgtcaatcataagaataaacaaaataaaaacaaataattacaaagctgtgtacgatgccatctcaggtttagttttaccagtctccgcaatggacataagaaaggttcaaaaagtctggagcaccattagaagcggaggcgaaataaaggttaaaatcactgagaatttggatgaacttcgcaatgatgagatggtcatagcagtgggttcggaaagaaccgtgcagtatatttatcaaaccaaatctgaaatgatgcagaactattttaaaatagttgacgaggcgaatactcaacttattgcgttgcttaacaagcaaaccatagctaacaacgaacacttcccgatatacgcctttagttctatctgccctgagttagaaaacactgaagtatacaagaaaaggcaacttgataaaatagtcgataacattccaagaattaaagcgtgtaaaagtgaagctgtttccattgacgacgtactaaaagagacaaaagcgtataaagttgctaacaccattatgtattgcgtattgaacgataccatttcgttaaagcaactaagagactacttaacttctccgggacacaaagttgacactcaataccgcagacttttatgcctatatgacttcttatcacattga

SEQ ID NO: 440657 - DNA, 141 bp, Serratia marcescens; identical to SEQ ID NO: 36145

SEQ ID NO: 440658 - DNA, 297 bp, Serratia marcescens
atgaaaaataaaatcatcatatacattcaagacagcgacatgttttttaccaaaggcatcaaatattccctgctggactattttcaccaaaaagggagcaacgttatctttaccgataacgttgctggtagccccctgatagatttcgcctttatctctgcgccactgaccaagcgagcctgttactgtaatatctcaccgcacacagtccatcatgacacccgattctttaccatcagggagcggcggcatcatagcctgggtaaggctttgttgaataaatcagatttcgggtaa

SEQ ID NO: 440659 - DNA, 264 bp, Serratia marcescens
atggacaaactctctgcaatggcgacgttcgtcactgtcgccgaagccggcagctttatcaaggcggcggaatgggggcgggctgggaggtgggtgcctgtgttgctgcactggcattttcaggcccgctcgattcatcttatttatctcagtaatgagaatctatccatgcgggtgcgttgctttgtcgactgggttctggcgctgatgaaagaaaacagcagcttgcacatgagcccgttagcgctggccgaaagtatgtag

SEQ ID NO: 440660 - DNA, 339 bp, Serratia marcescens
atgagcgtaactataaaagacgatcgactcaggactatcgcgacctttgatggcaagaccttgaaagatgatcgactgaggaccatcgcgacgtttgatggtaaagccctgaaagacgaccgactccgtaccatcgctacctttgacggtaaaaccctgaaagacgaccgactccgcaccatcgctacctttgatggcaagaccctgaaagacgatcgactccgcaccatcgcaacatttgatggtaaaacacttaaagacgatcgactcagaaccatcgcgacagttaatggtaatgtcagtattgttgttttggcgtttgctgctcggctattttag

SEQ ID NO: 440661 - DNA, 3117 bp, Serratia marcescens
atgacacaacagagacacaccattgctgaatccaataactttatcgtccttgataaatacaccaaagttctggataccggtgacagctaccagagcgaatcggaccttgagcgggagctgattcaggacctgcgtaatcagggctatgagtttatttccgttaaatcacagaccgcaatgctggctaacatccggacgcagttgcaggctctcaatggtgtcgagttcaatgaaagtgaatggcggcgtttcgcagagcagtatctggacagccccagtgacagcagcctggacaaaacccgtaaaatccatatcgactatatctgtgattttacgtttgatgatggtcgtctggaaaacatctatctgatagataaaaagaacctgctgcgcaataaggtgcaggtcattcagcagtttgagcagaccggctcacacgctaaccgttatgacgtcaccattctggtcaacggcctgccgctggtgcaaatcgaactcaaaaagcgcggcgtggctattcgtgaagcctttaaccagatacaccgttacagcaaggaaagctttaacagcgataactccctgtttaaatacctgcaactcttcgtgatttccaacgggactgatacccggtactttgccagtaccactaaacgggataaaaacagctttgatttcaccatgaactgggcaaagtcggataacactctgattaaggacctgaaggactttaccgctaccttcttccagaaacatactctgctgaatgttctgtttaattacagcgtgtttgacagcagccagacgctgctggtcatgcgcccctatcagattgccgccaccgagcgcattctctggaaaatcaacagctcttttaaagcgaagaactggtcaaaacccgaaagcggtggatttatctggcataccacagggtcaggaaaaaccctgaccagctttaaggccgcacgtctggctactgagctggactttatcgataaagtcttcttcgtggtcgacaggaaagacctcgattaccagaccatgaaggagtatcagcgcttctctccggacagtgtcaatggttccgataatacagcaggcctcagaagaaacctggataaggacgataacaaaatcatcgtcacaaccattcagaaactcaataacctgatgaaagccgaagctgacctgcccgtctaccaacagcaggtggtgtttatctttgatgagtgtcaccgcagccagtttggtgaggcccagaaaaacctcaaaaagaaattcagacgcttttatcagtttggttttaccggtacgcctattttccccgaaaacgcactgggagcagaaaccacaaccagcgtgttcgggcgtgagttacattcttacgtcattactgatgcgattcgtgatgaaaaagtactgaagtttaaggtggactataacgatgtccgcccacaatttaagtctcttgaaacggaaacagacgagaaaaaactcagcgcggctgaaaaccaacaggcatttttgcaccccctgcgtatccaggaaataacgcaatacatcctgaataacttccgtcagaaaacgcaccgtacttacccgggagcaaaaggcttcaatgccatgttagcagtgagcagcgtggaagcggcaaaagcttattacacgacgtttaaaatgctacaggaagaagcggagaagaaatctggcagctataaacgccttcgggtggcaaccatcttctcctttgctgcaaatgaagagcaaagcgccattggtgatattactgacgaaagctttgataccagtgcaatgaacagcagcgcgaaggaattcctggattcagctattgatgactacaacaaccactttaaaaccaatttcagcaccgacagtaacggcttccagaactactaccgcgatttagctcaacgagtgaaaaatcaggatatcgaccttctcatcgtggtgggaatgttcttaaccggctttgatgccccgacgcttaacactcttttcgttgacaaaaacctccgttatcacggcctgatgcaggcattttcccgcacaaaccgtatctatgatgccaccaaaaccttcggcaatatcgtgactttcagggacctggagcgtccgactattgatgccatcacacttttcggcgacaaaaacaccaagaatgtggtgctggaaaaaagctacgaagagtacatgcagggctttaccgatgcggcaaccggtgaggctaaacgaggttttatggctgttgtttcggagctggagcagcgcttccctgaccctgccagtatcgacagtgaaaaagagaaaaaagccttcgtcaaactgtttggtgaatatctgcgggcagaaaacatcctgcaaaactacgatgaatttgccacgctgaaagccctgcagaaggttgatattagtgacccggaagcggtagaaacctttaaagcagagcactatgtggatgatgaaaaatttgctgaattacaaaccattcgtctcccggcagaacgtaaagttcaggactatcgctcagcatacaatgatatccgggactggcagcgacgcgaaaaagcagcaaacgacagggatacatcaaccacagactgggatgacgtggtgtttgaaattgacctgcttaagtcgcaggagattaacctggactacatccttggtctgattttcgaccacaatcgtcagaaaaaaggtaaagaagccctgactgaagaggtcagacgcttaatccgctcaagtctgggcaaccgtgccaaagaaggtctgattgttgactttattcagcaaactaaccttgatgacatgccggacaaggccagtatcattgatgcattctttacctatgctcagcgtgaacagcaacgggaagcagaggcgttgattaaggaagaaaacctcaatgaagaggctgcaaggcgctatatccgcacatcactaaaacgggagtatgccaccgaaaatgggacggagctaaatgagacgctaccaaagctcagtccgctgaatcctcagtacaaaacgaaaaagcagactgtattccagaaaattggggcatttatcgaaaaatttaaaggggttggaggacacctctag

SEQ ID NO: 440662 - DNA, 1236 bp, Serratia marcescens
atgagcgttctgagctatctggaaaagttacttaatggagttgatattcaatggaagacgattggagaagttactctacgaacgagtaatataaaatggcgtgaggctacccgctcttatcgatatgtggatttaacctctgttgatattgaaacaaaaaaaatcactgagacaactgaagttacagcgaataatgccccgagtagggctcaaaaactcattgaggaaaatgatgttattttcgcaacaactcgaccaactcaacaacggttttgcctaatagacggtgagtactcagatgaagtagcaagcaccggattctgtgtcttaagagcgaaacaagatgaggttctgccaaaatggatttggcattggatttcaacaagttactttaaaaaatatgttgaagaaaatcaaagtggatcagcatacccagcgatatctgacgcaaaggtaaaggagtgctatattccagttccctgcccggaaaatcctgaaaagtctctgaccatccagtctgaaatcgtccgaattctggataaatttactgctcttacagctgagcttacagctgagcttacagctgagcttaccatgcgaaaaaatcagtacaactactatcgtgaccagttgctttgttttgacgaggccgaagttgagtggaaaacgctagctgatgtagcaatattaagacgcggaagagtcatgtctaaagggtatctcgaacagaatgcaggagactaccccgtttatagttcccaaaccgcaagaaatgggatgattggctcaatagatacttacgactttgatggtgaatttattagttggacaacagatggtgcaaatgctggaacggttttctaccgtacagggaaattctccatcacgaatgtttgtggactaatcaaaattcatgaaaaatatccaattagctataagtatctttactattggctttcaatagaagcccaaaagcatgtctattcaggtatgggtaatcctaagctaatgagccatcaggtcgagaaaattactgtgcctatacccttcccggcatcaccagagaaatcaatgctcgaacaacagcgaatagtcggaattctggacaaattagaggctataacattctcattgactgaaggcttacctcgtgaaatcgagctgcgccagaaacagtacgaatactatcgtgacttgctgttcagcttcccgagaccagaaaccgccagcaactaa

SEQ ID NO: 440663 - DNA, 294 bp, Serratia marcescens
gtggcgcacgtcttcggtgaacgcactctggccacactggagcgtcttctgagcctgctgtcggcctttgaggtcgtggtatggatgacggatggctggccgctgtatgaatcccgcctgaagggaaagctgcacgtaatcagcaagcgttacactcagcgaattgagcggcataacctgaatctgagacaacatctggcaaggctgggacggaagtcactgtcgttctcaaaatcggtggagctgcatgacaaggtcatcgggcattatctgaacataaaacactatcagtaa

SEQ ID NO: 440664 - DNA, 234 bp, Serratia marcescens
atgattatcgataaagaatacgcacttgtagatgcaacagcaagacttaacactgacctgagggattatgaatatgaaataaacaacgccgccatcataacatttggcaatgatctcattgaggtaatcgtatatcagttcagctttatcatcagcatcagggcagagggtgaaaaaataaagcacggcctacttgttaatttcggtaaaaatatagcaagacaggtttggtga

SEQ ID NO: 440665 - DNA, 714 bp, Serratia marcescens
atgacgctgataacacaagaaaacgaacatgacagactggcaacccgcctttccatcatcctgagccgtttgtttcagggtgaaaagctgcatatcgggacgctggcagaagaatttggagtaacgacgcgaacactgcgacgggatttcaacgtccgtctgacgtaccttgatattgaacagagcaacggcgtgtatcagcttgcttcgcattactttcgtcgccgcacggaacgggatatgaagatactggcgagactgctgcatcttgaccgtctgttacccgcgatggacgccaaactgctgagcctgatgcttgacggggaacgtccctcgccctacaggattatgctaccggagccgcgccagaaacccacgctctttggtgatttcagcagactgacgctcgccatacttaaccagacccaggtgcgtatcagaaccgacgaaaacgtcagccataccgttcatccctaccgtctgctttgcagccatgcggagtggtttcttgccggatgtacgtcatcgggcgtgttcgttatttccctgtcccgaatcaggctggttgaggtattaccggatacaacgtttgagatcgataacacactcatttcgctgattgaacagtctgactttatggaagccttaccccacatgaacattattcatcagataatgcattacgggtgtaaacagacgaataatcgtaattaa

SEQ ID NO: 440666 - DNA, 750 bp, Serratia marcescens
atggctacctaccgacacgaccccgaccttgagtttctgcgccactgccatcgtgacgatctggatttactggtttctgtgcttatctgcgatccgaaagatggactggcacgcatcacggaaacgctgacttacgatcctcagtataaaaaacacaagcccaatcatccgcgctactgggatgccattgccgccgaggttcagacatttggtgcaaacagctttgccacgctgctccgctggggtaaaggggtgctgtaccgggaaattcttaccgatgcctgcgataaaatgaaggtgaactacaacaacaaatccagtgttgaaaccattgaaatgaatctgctgatgaagatcctggagaaaagtcttgagaagatgacgcctgaccagctaaagaccgtggcggaagaattgcagacaggctacagcaaccccacgccggagttgctgaccatggcaatccaggcggggataaaaacatccgggtttgcggcctatcagatggcacttgttgtcacaaatggtgtggcgaaagccctgttaggcagagggctgaccgttgcaggaaatgccatgctgacgcgtaccatgggcgcttttgccggtcccgtgggctgggtgctcagttctctctggctgctgattgatttagccggtcccgcataccgggtgacgctaccatcctgcatttttattgcctacatgcgccagaagcatctttattcacctgagaatactgacgtttag

SEQ ID NO: 440667 - DNA, 384 bp, Serratia marcescens; identical to SEQ ID NO: 27381

SEQ ID NO: 440668 - DNA, 465 bp, Serratia marcescens
atgtaccggcttctgctgctgaacttcgtggattcatttatcgataactgcattctctcctgcgtcgatgaaccggcttacggtggtatcgtgcagtgcgaactgctttttggccttgccgcacacagcggtatctatgtgggtaacggcgatattgttcatcttgatggcgatggaaccgttatcaaaagtaaggccaaagggtttcttgaccggctcgatggctggaactccgctatctcggtgtataccgactgtatggatttgacgcctcagggttgtgcacaggccgctgaacgggcaaaggcggcagtgggtcagcgctatccttatagcctgctcgactttaactgccaccggtttactgcccgctgcgttaccggcgattcgtgccctgatatctggcttgccagacacctcgattcttttcagaaaggggaccgatggcgcgtatggcaacgatga

SEQ ID NO: 440669 - DNA, 429 bp, Serratia marcescens
atgtcatcacccgtaatattgcagggcggctatgtgctgccgctctcccggtcgttcacccaactgcttctggatatcctcgcgcaaaaaccgcctcatcgtcaccccatcaccggattaaccattaactttcgtgaccctgaatactcaccggaaaagggcggctggcatccggtcgaaatacgcctcatccctgccggagaagactggcagctcgattacgtcaccgattttcactatgcagggcatccatggcctgagcttgaaaaagatgtcgatgtgagctggacgcaacaatacacgtggctttcccgttgtggcgatatctctcatgtcgacgcccgtgagttctggtcgctgtgggaaagtaactttatggcttaccacgatatgggggttttcacggtccgtacgttgtgggaaagctga

SEQ ID NO: 440670 - DNA, 432 bp, Serratia marcescens
atgagtaagaaaaaaggcgctaccgaagccgccgtcaccgaaagctataccgtgttctacagtggtgaagccgagaaaatcagcccccacagtaaaggtctgctgacgtatgagctgggtaaggagggtgataccggcagccttgccctgcgcttaaccgccaatggcgaaggaggcctgttctctcgtgaatggatagcgcttgatgcgattcacgccattctggaacagcagcaggacagcttcccgtcccgtgtatttcgcccactgtttggtcagggcagtaccaacaacgccgggtttcttgctgctgtgctcagaagtccggatatctgccttatcgaagcggacagcagcagactctttatgcaccgctgctatgccgactggcagcatcgtatgacgcagcttgctacgctcagccaggactaa

SEQ ID NO: 440671 - DNA, 354 bp, Serratia marcescens
atgtttaaactcacgacccccaccagtcttctccttctcaacctgcccgcctccgcactggcggccctcagcaatgaaatccttggccctgtcgatgatatcgacctgtttaccaccttctggaacgaaacgggaaccctgctctggcatctcaaccacgatgacacactccccgaagacccgctgctggcagtggcactggctaaccctgaatacgtcaccgcgcttgatgatggctggtatctcctgctcggcatcgtctgcgataacggtcagggtatctatctggtgttcccggacacgaccgttatcactcaactccagaacctgattgaggcgctgacccatgagtaa

SEQ ID NO: 440672 - DNA, 1272 bp, Serratia marcescens
atgcaacacattgtcaaagtagtatttacaacccttctcttgatttgcagcacccttgcgtatgcacagcgtttaaccgttcccgcatacatggaggacgctgtgtcctgtacaacacaacctataagccagtcccttattcagagcgttcaggctgaatgcattcagaagggcaaaagtcgtgaactgagcgacagcagaactacgggttttaaggcgctggtcagtaaacgaggcaaggtcatgtttgccgcccgtttcagttgtggcgggagtaacgtatatcgccgtctgggtgattatccggcacttaccatcacgcaggcgcggtcagcagcacaaaaactaattgcagatatgcgggcagagtaccagctacgtggtgctaacctgttcgtttcgcataatttgctgttcagtggtctgctggagcgcttcgaacatgatgttctggacgctggtgtaaagcgttctgccgataccgatcgttcaaaaatccgtaactatctgcttccccttcttgggcattttaagattcatgatatcgatgagggcgttatcgggcgttatctcaatggcctgagcaatctgaaaccagccacacgtaatcgtcatctggctctgctgaaagccatttttggttatggtcgcagaatgaagctggtgacgacgttacccactgagtttatccggatgctgccggaaaccacgtcccgtcgcagggcgatgagccatgaggaatttcagcgctggtttaaggcctgcgagcaaaaacaccacaaggaacccgatagtgcagcggtcatgctgctgatgtttctgggcttaaccgggcttcgactgggggaaactcgtcaccttcgtctggaggatgtggaatggtcacgtaaggtcattacgctcagacagaccaagaacggcaggcagcgtcatgttccggtgtgtgataaagcctttgtgctgctgaccgaagcgcgtcagttcctgggggatagcggttgggttttccctggacaaaacacggataatccggttgcagaaccccgtcgcctacaaaaaacactttgtgaaacagcgggtatcccgtcctataccatccatgagttgcgccattcttttgcgacaatccttgtcgaaagtggcgcggatatccacatggtcaaggagctgctgggccacagtacgattaaagtcactgagatctatgtgcattccagtccggagcgatatcacgctgccgtcaatcaggcaatgggcgttgttaattcgtaa

SEQ ID NO: 440673 - DNA, 1890 bp, Serratia marcescens
atgagtggcgataaattaaccaatctggcagatgatattgatactgatattgatctgtcacttagtcagttccttacgcaaaagtcgcttaatgaggcgcgtgcggcaaaaattcttgacgatgcaatagagattgaactggatgaagatgaaccgtcgcagaacggaagtgcagcgggacttcctgcgggctactataacgggaactcgggtagctttttcgccagagggaaaaaggttgtacatatcagttccactcccataatcccatgcgccagatgctgctctaaaaacaaacagcacaacatgagcgttgatctgatgaccattaattacatcgggcaaaaggtcgtggtgtcggtatcgcttgacgagctggcaagaaacccggaacaggtcattgctgctctggcgtccagaggatttggtgtgacgacatctgtccatgccagggcttactttgagaaattcattcatgcgtgcatgaaaatggcgctgccaatgtatctggtggcagagtctatgggtatggtcgaaggagaagctgcctttttgcatggtgatatgccggttgccagggggatctccggttttgattaccttgttcctcataaatcggttttttcaggcattcgcatgtcagggtcgttagcagaatggaaaacgcttattgaagagaatgtttacggatggccccagttgtttgcgctcagcagctcgtttgcatcaatgctacttgggatggccgggatggatgtggcgttgtttcatttttatggtggttcgacaacagggaaaacggtagttcttcaggtgggaatgtctgtacatgcccatggcggtgagcccggtagtcatccggacgtcgctattctgcgatggaatacaacagataatgcactcgaaatcaacctcagcgagttttccgggttagttgcctgtattgatgaaatgggcgcttacagtgatcgaaaattctcatcattgttgtataacatgacctctggtcgctcaaaaaatcgcctggataagtcgctcacaggaagaaaacccgtattgtggaagacgttcattctgtcctccggcgaaatgtctataccggaaaagctagcttcccgcaatgaacagcttcagggagggcaggaacatcgggctatcagcctgaatattctgccggaagacgctgcaaaagaaggtgaacccgtcggagaggtacgtcgccgcgctgatatcctcaaagctgaactggcggaacagtatggcacggctggaaaagcctttattgcctgctttttgtcgcagcagaatgatgatggtagcttgatgtcatacagtgaattatccgaacagataaaggagacgacagaagaatgttgcaagatgctcgcggaggatctgcagtcagacggatatgttctttccgatattcagcaccgggcgttaaaacgctttgctatttgccttgttgctggcggtatggctgcggagtggggcatcctgccatttgaaccgcaaatgattaacgattcggtgatgagcgcggttcgccgctggctggatgatggacggaaccagtacaacccggttaaagaagcattaagcgccattcaactggaacttatcaaacgacaggccgcgcattttgtaccgctacaggataaagaggcttatatacccagcaatcactgggggtatacacatcctaaaactcaggatttgatgatttttgcgcctgtatttgacgactggtgcaggcgacataaccgtaaatccgcagaggtagctaagctcctttctgccaaaaattatcttgagccggaaagtaaagggcattacaaaaaacgtgttcagaacagtgatgttgaaggcgttttcggctttgttgaataa

SEQ ID NO: 440674 - DNA, 771 bp, Serratia marcescens
atgagttatacagaaaaggatccgcagaacgaaaacggcccaaaggttcctttaagtgataatcaaaaaggaaccacttttagcgacaggttgcggaaagcgatagacggcaagagcatccgtcaatttgcggctgattgcggaattagttatggggcgatgcataagtactttgctggccacacacaaccgacactggacaacttagttgtgctggcccgtacagctggagtgagtatcgaatggcttgctacgggtgagcagagcagtactggtaccaatttaatttcaaggccagcaactccaccaagtacagccataaatgatgtgcatggaaatgaagttgatttagaagagttcatttttgtgccgcgctataacgtgactgcgtctgcgggctacggtgcttggaatgatgatgaaacgcctatgttcacggtatcatttagacgttattgggtggttaatcatttgaaggctgatcccaaacagctgtctgttatcagcgtgcaaggcgactcgatggaaggcgtcctgaacgacaaagatatcatccttgtaaatcatggtgatcgggaacctagagagggaatctatgtattgcgactcgatggacaattaatcgtaaaacgagtgcagcgcttgccaggagcacaactcattgttacgagcacaaacccggtttacaagccgttcaacattgaccttaacaatgtcccatcggatttttgtattgttggcaaagtggtctggtatggtcgggtcatttaa

SEQ ID NO: 440675 - DNA, 432 bp, Serratia marcescens
atgccgccaaacgcagactcccgacgaggttctcatctgcgagaacacctgcttttcctgctgctgttgctgaccctgaacgtcttcgcaccaccggcgctggcgcaaaacgcgccgcccgcgcccgccgacaagagcgagcagcagaaggccgcctacgccgcgctggccgatctgctgcaagacgacaaagcgcgcgcggcactcatcaaccacctgaaacaggccgccggcgacgcccccgccgccgccccaacaacgccggaggaatcaacgccggccacgctgagcgacagcctgaactctctggcgcaggaaggcatcggcacctttaaccagaagctcggcgcgctgcaaaagctgatcgactccggcccgaagcgcattttcaatcccgccggtttttccgcgcgctgggttactttctgctga

SEQ ID NO: 440676 - DNA, 792 bp, Serratia marcescens
atggattcgtcgttacttgataaagttaaagaactcattatggactggaaaacctcattaataatttttctagccaccccactgttcatttatttcataccaagagatacacaaagtgagtgggttggtatatcaattgtcattgcctactttttatttttcttttcaggcgctagttttgtcgttagaattataagcatcacgatcgataattttcagaataataaaagaaagaatgagcgtgataaaaaagccgctgagttagttactcaactcatagagaaatcatctttaataatgaatgaaatgactcgcaatcagaaagaaatcatcagagatctactttcagggccaacaacattcgacacaagcagtctagcgaacccgacattaaacaatgacttgatgtttttacaaaatcacgatttcataagtctaattactaaaattgattatagtaagtacatgtttcgattgaatggcgctctatttgaagttatcaaaactgattttgataaagaaatagacgaagtttttgagtacatatctaaatttgaagatctcttggagttagttttaaataactttgactctagaaaacctcagattggacttcccagtgataaattaagctctgtacgcctattgtctggtgcatttaatttttatcatctcagcagaaatcaaattaattttaggtttaaaaaaggatacaaagagaagttcgaaaagcactatgggagagagttcagtgagtcagccactttcgatattttaaaaatcgagggataa

SEQ ID NO: 440677 - DNA, 453 bp, Serratia marcescens
atgcttaacaaaaaaaaggttgcgttcttttctttggtcgccgtagcggctctttggttggtttgggtgcttgtcaggccggctaatgttgtgcaggttgatggtgctgctgtttatgttcaataccttccgctgaccatggaaggtaaaatatcttggtggaatgataataaagataaacttcaggataagtatcatattatcaaggacgagaatcattttaccgttgccgtaatgaattttgacggctatgttgccgctccgactggcagcaatgatggaagtattgatgactatcattgtcttagcgagggtgataccaagaataaatgtatctataaggatatagcgatgattattaatggtgatgttaataaaagagtttttatcagtctggatgggaagactttcgctcaagagcctgacggtaagaccacgctgttaaaaaaatag

SEQ ID NO: 440678 - DNA, 321 bp, Serratia marcescens
atgtctaaaattatcccgctttccgtcgccatcaaacgtaccagcggcgaagagatcaccgaagtcaccattaccgacaccatgaagcaagtaggcgccctgcgcggcctgaagctctatgacgtcatgaccagtgatgtcaattcgctgatcactctcctgccgcgtgtcacctcaccacgcctgaccgaagtcgaaatcgcttcaatgaatattcaggacttttctgaattggcgaccggtgtagccacttttttagcaccgaattcggcgcaggaaatgctgccggaggacagcgcatcgttcgatgcccaagcgtag

SEQ ID NO: 440679 - DNA, 3105 bp, Serratia marcescens
atgacagaccgcaacctcaatattcgggtggcgctcagcgccgccaacaaactatccgggccggtcagcgctgcacaacgcagcgctgccgctctcgcgtctcagatcaaagccacccagggcagcatcaaaaacttgggcggtcaggcgaaaacctttgatcgcctcaacgcatccatcaacaaaaacgccgcggcctatgaagcagccaaagccaaggcgaaaagcctgcgggccgagtttggcccgctcaagcaacagaccgatgagcaacgcaaagcactggcggcatcacgcctcgaacgcgaccggttagggcgttctctcgacaaagaaaagcaaaaacttaatgccgtcacggctcaaatgtaccgccacggtgtctccgtgcgtcaaagcgacagcgccaccgcacagatcacccggcgaaccgaaagctataaccgtcagttagccgagcaacaacgccgcctcagcgcggtgacccgtatgcaagccaatgtcgctcgagcgaaggaggtacgcggcaagctcgccggcgctggtgcggcgggtatctcggcgggtggaggcatgctctacggcgtcggccgattcttgaagccgggtctcgatttttcggccggcatgtctgatacgcaggctttggctggcctggataagaacgctccagaactgaagtccttgcgcgaacaagccgagcagttgggcgcgtcaacggtgtttacgacaacacaggtttcatccgcacagaaatacctggcgcaggcaggggactcacctacagacatcatgtcggccacgccgggtgtgctgagcctggcgtccgccagcggggtcgaattgggtttttctgccgacctgatgtcggacattcgctcggccatggggcttactgccaaagagtccaaccatgtcggtgacgtgctgacagcgacatttaccaaggccacaaccgacctcactcaactgggcgaggcgatgaagtatgccgcccccaatttccgcaatatcggcgtctccctggaggatggcgccgccatgcttggcgtaatggcggatgatggggtcaagggctccatggcggggacatcaacgcaaggcctgacgcgtcttttcaccgagaagacatcaaaagcagcgctaagcgcccttggtgtaagcgtggcaaatgctgacgggagtatccgccctgttctcagcatcatggaagatatcagtaaaaaaatggggcgctttaaccaagtcagtcaagttcagcttggtaaagacctgtgggggattgaggcgcaaaaagggatggcggcggttgtcaaggcagcgggcagcggcaagctgcgcgaacgcgccgacatgaaccgcaacagcgacggtaaagccggtaatatcgcaactactaaaatagacaaccttcccggtgacatcctgcaaatgggatctgcatttgagtttctgcggatccagatggcggccagtgtagacgaaccgctgcgcgcattggtgcaagatatcactcaggtgctgatgcgcgtgggtgaatggatgaaggccaaccctaaattaaccaagatgctgacactgaccgtcatggtcataggtgcagcggcggttgctctgggggcactggcgctcgcagcggcagcgatcattgtacccttcgccatggtgcgcctcagtttgttcatgctgaccggcggccgcggcctgggtgcgcttatcccttcagcaaaagggttgactggtgcgctcggccggctgctcccctctttgtccggcgttgggcgcagcatcaaagattggcccggtgtattccgcggcggcatgactgcgctgggtaacctgcgcgctcgcgcatcacggcttggcagcagcctgcaagtgggtctgctacgcggcggtctggccgtcagtcgtgggctaactatggcctttacccaaccgggcgctgcaatcggtatgctgagtaacgggatacgcgcattggcatcgggcggtttggggctgctactcaatgtcggcaaaaccgttctgacaacactgctcggcggcttctccctgctgctgagtcccgttgggttgctggcaatggcaatcatcggcgccggcctgctgatctggaaattctgggagccaatcaaagcgttcttctctggtttctttaccggtctggttgaaggcctggtgccgatcaaactggcgtttgaagctgcatttgcgccgctggcgccaatattcgatggcatcagcagcgcgatcggcaaggtgtggaactggttcaaaagcctgcttgagcccgtcgaaacatccaaggaatcactggagaaatgcaccgccgccggcgaaaccttcggcaaggtggtcggcatggctatttccggcctgatgtggccgatagcgcagatcgccaaggggttaggctggatactggaaaaactcggcgtgataccgagcgccgccgaggcggccaaacaggcaatcgccgcaatgagccccgacgatgcgaagaagctcgcgggcaaggccaacctgctgctgcaagatgtcaacgccatcacccaggcaggcaaaaaaaccaaagaagccgaagagaccaaacaggaggcgataaaaaagacgggcgaaacggctaaacaagtttacggctctgaggtctatggcggagccactggtacaaaaagtaaaaaaggcgctgccggcggtcttaatgcggcatcgactgaaaacacatccgcgtcggacgtgaaaaaacttggcgatatcgtcttcaaaaatcggccaccagtagcggctattgacggactgtatcaagaaccgcgcctacagattcagcgatcatctctgctcgacagcctgaaacgctcagtgattggcttggctgacaacgttctgccatcaggcttaaagctcattccagagtcgcccaaccgctcatttggtagcaaccgccaggcggccagccgtgacaattacacgtttgaagtgcattttcatggcgtggacatgagcgatcaccgggcgttgggtgagctggtgaaagacaaattgcgggagctgatgcgcgaaaacgacacgcgccgccgttcccgcctgagcgataaggagtaa

SEQ ID NO: 440680 - DNA, 234 bp, Serratia marcescens
atggggaatggcacctggtttaccatcctcgatattccgggggtggaaaacctttttaatacccgtaaaaccaatgacctgattgactgcacccgctccaaagcacggaagctcgctgacctgattgaggcatgggagcctcctgaccactggttcaccagcatcggcaaatccgaaggaaaggcacttcttatcgccttcctgcgtaactgcaaaggctttcgcactcactga

SEQ ID NO: 440681 - DNA, 954 bp, Serratia marcescens
atgtctgactatttaaagggtaagcgcgttgttgacccggtgctgaccagcatcgctcgcggttataaaaatgccgcgttcgtcggcgagcatatcttcccaatcgttcagaccgataaggaaggtataaccgtgccgaccttcggcaaaacggcttttgtagagtacgacaccgagcgtgctgtaggagctgaaagtaatgtcctggtacgtgacaaagtaggcaaactggatctggttcttaacgaacatgatctggctgttcctgtggattaccgagaacagaccgagtcgatgtttaacgaagagaagaaagccacccgacgggctaccagtggcgtcaatctgcgacgtgaactgtatgcggctcgcctggctcaggacccgaaggtctacgccaaagagaacgttaaggcgctggccgctgccgaacgttgggtcggtggcaaaggtgacccaattgggatcattgaggctggtatcgaagcagtgcgtaacaaaactggtttgcgtcctaacctgatgaccatgggggccagcgtgatgtcgctgctgaagttccacccggcgcttcaggccgcgattggagccaacgaacgcaagcgtatcaccatcgaaattctgaaagaccttttccagctggaagatgtggtgatcggcgaaccggtctctatggcctccatgaaagatgcgcaggacaaggataaaaccccgaccgatatctggggtgacaacctgatgctgcattacgtcggcaaacctcaggagggtaccgacagtgccgacgaaaacgagccgtcattcggttacaccctgcgccgcaaaggaatgccggtagtagataaatacgatggcgtcggcaaaaaggtgaattactgccgttataccgatatctacaaagttgccgtggtcggtggcgatgccgggtatctcattagcaacatcgtgaaataa

SEQ ID NO: 440682 - DNA, 258 bp, Serratia marcescens
atgactttggcaactgctaaatccagctcactctgtctgatggggatcacctgcgatgagtatgaaactgcggcaaaaatttacaccctcagcgtcaatgctgacaatcttgcagaggcaataagagagatgcaggccgcgcttgagcaggtggagaaaacgccacgaatgctcactgaaaataagctgaaaggaatactcattggacagataagactgaccatcagcgccaatccaaaaagcagatcggcttgctaa

SEQ ID NO: 440683 - DNA, 573 bp, Serratia marcescens
atgtaccttccgttggaaaagtattacacgctcgattctgcaaatagtctgtttccatttcatgagataacgctgcgttaccacacccccaaacagccggagttggctgaattccttaatcaaatacatcccgatgggttgtcgaagcacggctataactatctctataatcctgcgcttttcgatgaagaccatcatagggacaacgccttactgattggtctcatccttgaacttgtacggcgtagcgaatttcctgataaaccgtcccgatatcagtctctgtttgcatgtcaggaaatcagcgaggttaaacaattcagggaattgctggccaacgagcgtggtgatgatggaatacggacagcgccgatatatgaagtaaggaaccagaaccctgttcaccgtggtgatatgagactgcttaatagtgatggtccgattctggatatatatcgtcgggcgcatctgtactggtcaggtgaaagtcttacatatgcaaatggtgaagatccattctgggagatactgatcccacttccggcatcaacaggcaggcgggtaacggaatga

SEQ ID NO: 440684 - DNA, 189 bp, Serratia marcescens
atgactgcagaacaagtcaaatcactcttccgccagcgcggggtcactttcacccgctgggctgaagaaaacggctacagccgcaatgaggtctaccgggttcttaacggcttcaccaaaggtcgttacggcaaatcgcacgaaattgccgtgaagctgggtctgaaaccagattcgaatgcggcgtaa

SEQ ID NO: 440685 - DNA, 909 bp, Serratia marcescens
atgggacgcacaaaatcacaaccagttgaactaatggaagatgcaccgctgagtgatggcctcaacgttagtcttaatgccatgaccgaacatcgcttcgaaatcatgcagcagttcggtgatggtctgccgtatgaacgtgatcgtattgttcacgaaacacggttttatatggcacagagtgctgaggcgatgctcgaagcaggtaagcgccttgtaattcttaaagaaaatgagccacacggggaatttattaacattcttgaaaatgagttgggcttaccataccgaacttctgtgcggatgatgcaagcatcgactaaatacttatcccccgcactgaaatcaaatgtgccaacgttggcacatttgggtaaatccaaactttttgaattgatgactgaagatgatgaatctcttgctgaactggctgatggtggcactgtagcgggtctgaaactagatgatgtcgaccgcatgagctgtagagaattgcgtcaagccctacgtgaagcccgcgaaaccaacgcagcacaacagcgcgtgctcgccgacaaaaatgaaaaaatcgactctctctccaccaaactggagaagaaatcccgtatccagccgcccaagcctgacgaagaggtgaagaagctgcgtgcggaagttacagcgttagcggttgaggcggaatctgccatcgccgttcgactgtccagcgcctttgagaccctgtgcgcatactgtgctgaaaatatgattgatacccccagagactttatggccggtctggtctgccagctggaaagcacagcgcgtagcctgcgctccacatttgacctgccggacgagccgacaggcaacgccgccccttcatggctgactgacccgacgccagagattaacgggcaggaggcataa

SEQ ID NO: 440686 - DNA, 273 bp, Serratia marcescens
atgattactgcaaaagaagccgaaaaacggacccgtgaaattgtcgcggaatatatcagtgaatgtggttgtgaaaatcccaaccatatccggcaggtattaatcaaattaatcagcatggcttcacacgccatcgtagcaacaaatggcctagatcaggccatttacgttcttcacgccaccagtgaccacctgagaaaaatgccgccgctgtacgagctggaaattactgaggacggccacgtgaaagttatcggcgtatcacgccattga

SEQ ID NO: 440687 - DNA, 291 bp, Serratia marcescens
atgagcaaatataaggcgatagtgacaaccgccggggccgcaaagattgccgcggcatccgctggcggcaagcaactgaaaattacacatatggcggtgggtgacggcaatggcgtgttgccgacgccaaacccggcgcagacgaagcttatcaatgagagagaccgcgcgctgcttaacacgctgacgatcgataaatccattgataaccatatcattgccgagcttattctcccggccaacgttggcgggttctggctgattagacttgagataaatgacaggggataa

SEQ ID NO: 440688 - DNA, 141 bp, Serratia marcescens
atgattctattgtttaccgtcggaataattgaggtggttctttctttcattgtcatcggttgttttgcattccggcaataccagtgctgccaagaatttaatgaacaggatttaccgcctgagctccgtaattatgattaa

SEQ ID NO: 440689 - DNA, 270 bp, Serratia marcescens
atgaaggctgatgatttactcatcaagtacccgcttgacgcggtgacgccagtgaagtttgccgagcttttcggtaagtccgtcaatgcggtggatatcatggtaaagcgtgacaagttgccaactattgaatatgccgatccggaaaagcccaacgcccgccaagagaagcttgtcaatatcgatgcgtttaataggggcgtccgtgaggcattcaacaacaaaccgaaggagttccgtgacgcttggttaatgtggctgggtctttaa

SEQ ID NO: 440690 - DNA, 264 bp, Serratia marcescens
atgacccgccaagagttcgccgacactgtcggattaccttacgggacattaaccaactatgaattaagaggaaaacaagtaacggagggggccttgatgaaggtagcgaagaacccacgattcaagaaatacgcctactggctctccactgacgagacgatgccggaggtaggccaaatatctccggctctctctcttgatgggtcagagcaacgggaggaagttccggatttaactcccaacacagcaaaatctcaccgttaa

SEQ ID NO: 440691 - DNA, 984 bp, Serratia marcescens
atggcgattaagaagctcgatgatggacgttatgaattggacacaagagttggcggccgcggcagcaagcgcgtacgcaagattttcgcaagacgcgccgatgcggtagcgtacgaacgttacatgctgggcaaaatagcgcgcaaagaatgggatccagcaaagccggttaacaagcagccgctggatgaggtgagaagcacttggtggctttaccacgggcagtcgttgaagaatggtgagattgagaataagcacctgattaagaccatcacggcgctgggaaatccaccggtcaatgaactggacaagcggatgctgatagaacaccgcagcctcaggttatccgcggggatcagcgcatcaaccatcaaccgtgacatataccggttatccggcatgtttagcgcgctgatcaaaattgacgagttcgccggtgagaaccccgtacgcgggttaccgccactaccggagaaagatcctggtatgacgttcttgtcggttgaggaaatcgcaaggttgcttgagatgctcaaaggtgactatcggctgatcgcattgctttgtctgagtaccggcggccgctggggggaagtgagtacgctgaaggcgtcgcaggttgttaacagccgcgtggtattcctggagaccaagaacggcaagcggcgaattgttccgatctctgccgaactggaaaaagagatacatcgcagcgccagcgcgcaactgttcaaagtggactacgaaaatttctgtagaaaactgcgaaaagtgaagcctgatttaccgcgcaaccaggctacacacgtgctacgacacacattcgccagtcatttcatgatgaacggtggaaatattattgcgctgcaacagatattgggtcatgccagcatccagcagacgatggtatacgcgcatctcgcgccggattaccttcagaatgctgttgcgcttaacccattaaaaggcgggctcggggtgtag

SEQ ID NO: 440692 - DNA, 249 bp, Serratia marcescens
atgccgaccgtgccgatgattgcgccaactatcggcgagctggcggcggatgatgcctacttccgttgcaacggactgatgctgcgcaatcccgcgatcgtcaatttcctcgacggctgtgcgctgtccttgccctgccagcggccgggcgccgcgccgatcggcctgatgctggcgggcttgccgatgtgtgatgaggcgctgctgggatgggcgctggcgatcgaacgccgtcttgccgaggcgtga

SEQ ID NO: 440693 - DNA, 558 bp, Serratia marcescens
atgcttattgggtatatcagggtgtcaacaaatgaccagaacaccgcattgcagcgaaccgcgctggaatgcgcaggatgtgaactgatttttgaagacaagatcagcggaaagacctcggagcgcccagggctaaagcgcgtgcttaagaccctgagaaagggggatacgcttgtggtatggaaactagatcgccttgggcgcagcatgcggcatcttgtcctgctggtagaggagttgcgggaccgagatataaattttcgcagcctgacagacagtatagatacgtcaacgccaatgggacgtttcttctttcacgttatgggggcactggctgagatggagcgtgagttaattgtggaacgcacaagagccggtcttgcggctgccagggctcaaggtagggtgggaggaagacgcccaaagtttacatcggaacagtgggagcagatgggaagattaattgcatctggagagccacgccagcgagttgcgcttatttttgatgctggtatatccaccctttatcgtaggttcccggcttcatcatttgaatga

SEQ ID NO: 440694 - DNA, 810 bp, Serratia marcescens
atgaaagtagtaagcccttatgaagaattaaaaagctggtttagtctcgaaaactatgagcagttaaaatcacttacaatcaaagaactgcatactgagcttgcctttagagaagcgattttcgacagtgtaaattttggatgggaagatgataatcaaaatttaaggtctatccttgaaggtaatcctattttaagcagacaagataataatcatggtcattttggcaagggccaaaggcatgttgcgcaggtcagctttggtgatataaagaaattagagagcaagttaataatgtttgacatggacttttttgaagaaaatggcgatttcaaaaaagaattgaaaaagaaaccaataacaaaaactatgagagacttttttctaaaccaaaatagcagcaagatgtatgtttcatttgatttaagattatccagtgatgaagaaattataacagccttacaaacgatgctaccagaccttaggaaagaatatgaaattgagccagtaaaaacagaaaaaattggacttgcaaaaataaggaaacttgtcgattacaatattatcccaatgatggatctattgatttgggcaaaatttaaaaaagtaaaaatctcaaatatggtgttgtctcgtgtcttgtatcccgactttacaaatgagatcagaggagaagatcacattaaagatacagacaggcctgttgcagagaagtcattgaatggagaaacaacccgtagtctggaatactttatcagcaaaaacagccatctcctcaacataccgatttctgaactcggttctttctag

SEQ ID NO: 440695 - DNA, 330 bp, Serratia marcescens; identical to SEQ ID NO: 34921

SEQ ID NO: 440696 - DNA, 1185 bp, Serratia marcescens; identical to SEQ ID NO: 56088

SEQ ID NO: 440697 - DNA, 264 bp, Serratia marcescens; identical to SEQ ID NO: 34912

SEQ ID NO: 440698 - DNA, 219 bp, Serratia marcescens; identical to SEQ ID NO: 34913

SEQ ID NO: 440699 - DNA, 489 bp, Serratia marcescens; identical to SEQ ID NO: 34914

SEQ ID NO: 440700 - DNA, 2988 bp, Serratia marcescens; identical to SEQ ID NO: 34915

SEQ ID NO: 440701 - DNA, 1341 bp, Serratia marcescens
atgctccggcagcaggccgacgcgttccagcagccaggccacccgttgctccgcctcgcggccgcgcatcacgttgtgcaccagcagcggctccatgatggaaaaaccgaccgtcagacgcggatcaagcgaagcgtatggatcctgaaaaatgaactgaatatcgcgccgcaggtgctgcagggccggccccttcaactgatctatccgccgcccggcgaaggtgatggtgccgctctggctgtccaccagcttcagcaaagagcgcccggtggtggacttgccgcagccggactcgcccaccagccccagcgtctcgccggggtaaagatcgaaactgacgttttccaccgcgtgcacccggcgagtaacccgattgaacaacccgccgcgcagatcaaagcgcgtaaccagatgctccacctgcaggatcggcgcggcgccgggcggcacggtatcctgcggcgccgtatccccctcgccgcccggcaacggaaacttcgccggcagcggccgatcggccatcgcccccagcttcggcaccgccgccaacagcgcccgggtataggcctgctgcggcgcggcaaacagctcgcgcacccgattctgttccacctgctcgccgcggcgcatcaccagcacccgatcggcgatctctgccaccacgcccatgtcgtgagtaatgaagatcacccccatctgcatctcccgttgcagcacgcggatcagctgcaggatctgcgcctgaatggtgacgtcgagggcggtggtgggttcatcggcgatcagcagcgccggcttgcaggagagcgccatggcgatcatcacccgctggcgcatgccgccggaaagctggtgcgggtaacgccccagcacctctttggcctccggaatgcgtaccagatcgagcatgcgcagcgcctcctggcgcgcgctgcggcgatccatgccctgatgcaggcgcagcgattcggcgatctgctcgccgaccggaaataccgggttgagcgaagtcatcggctcctggaagatcatcgccatgtcggcgccgcgcaccgtgcgcagcgtgctctgcgaggcctgcgccagatcgagcagcgcgccgtcgcgccggcgcagcgtcatgacgccgccgacgatgcgcccgccgccctgctccaccagccgcatcagccccagcgaagtgaccgatttgccggagccggactcaccgacgatcgccagcgtctcgccgcgatcgagatcgaacgacaggttgcgcaccgcttccacggcgccgtccggttgaggaaagctgatgctcagatcgcgcaccgtcagcacccgctgcggcggcaatga

SEQ ID NO: 440702 - DNA, 561 bp, Serratia marcescens
atgattattgggtatgcacgagtatcaagtaaccatcaggacaccgagcttcagatgcaggcgctcagagctgctggctgtaagttaatttttgaggaaaaggcttctggccgtaagacgaaccgaccaattttgaagaaagtggttgagatgcttgaacccggtgacgagctggtcatctggaagctggatcgtatcggtcgcaatgtgctgcacgcattattgacgtttcagagcctcgcagaacgcaatgttaacatccgttctattactgatggcgttgacctgagtaccgccagtgggcgctataacttccgtaatattctctctgcggcacaatatgagtctgatctgaatagtgaacgcactttggcggggttagcggttgcccgcgctaaggggaggattggcggacgtaagcctaagttcactaatgagcactgggatgcgtttgaacgggaaattaagtccggctgctcacatcgtgatatagctctcaaatatggagtcggcctgtcgactctctacaaacgttatccggctcagcaagagcatcagtaa

SEQ ID NO: 440703 - DNA, 288 bp, Serratia marcescens; identical to SEQ ID NO: 25034

SEQ ID NO: 440704 - DNA, 273 bp, Serratia marcescens; identical to SEQ ID NO: 34916

SEQ ID NO: 440705 - DNA, 222 bp, Serratia marcescens
atgccgcacatcgtggctggggtgttccagatgaaagctaaagaattcaatgccctttaccctaaaggcagttcatttatctatcagccagccacaggtttacgcggtggccgtgtagtcagaacggtagatgtggcaaatgacctttataaggtcacggtcgtggaaataaatcaggagccttatttcgcgaatattaaatcgcttaaacccgtcaactga

SEQ ID NO: 440706 - DNA, 720 bp, Serratia marcescens
atggaaaataaagagaaatatattctgagaattaaaaagctgctcgcgatggcgcgtaataattccagcgccgaagaagctgcacttgccctcagccgcgctcagcgtctgatggaaacccacaagctgactgaggctgatactgatttgatggatatcaatgaagcatcgacccagaaagcgccatctcacgcaaagagaatgcctgaatacatggcgtttcttgctgagatggtatcgcgggtatttggcgtgaagttttacagcagttatggccgggataactgggatgctcaggccagaatgaccatcacgttctacggtccggacgaacggccacaaatcgccgcatattcattcgaagttctgggtaaacaactggcgaaagcccgtcgtgaatacctctccacgttacgcaagaacatcaaacaggtcactaaagttgcccgcgccgataccttctgctccgcctgggtcaacggtgcttatgccgttgtcagtgatttcgccgtcacggaggcggagacaactctgatggagtgctaccgcagcaggaaattaagcgaacgcatgaaaaagctggagccgcgtaaacccggcaaagccaggggaacggataaggcggaaaacgaggggtatctggctggccgcaatgcgcagctgcatcacgcggtaagcagttcagctaataaatgcgaacagatcggagtaacaaaatga

SEQ ID NO: 440707 - DNA, 366 bp, Serratia marcescens
atgagcgaactaccgcgtaaacctgtcgttttcatagcggggccgatgaccggttatcacaactttaaccgtgatgaattcaactctgaggctcgcattctggaagaacgcggcttcaccgttctcaacccggccattcttcctgacggcctgcagcatgagcagtatctgaaaattacgttgtccatgcttgaacaggctgatgctgttttcctcctgaacggatgggaaaagagtaccggcgcaaccagggagtttgatcgcgcctgtgagcttggtctgttatttctttaccaggactgggaaagcgtgtcgattgcagcctatcgcaagcgcggtccgtcaatggaggagagttatgcatag

SEQ ID NO: 440708 - DNA, 216 bp, Serratia marcescens
atgcatagcgtaacgggttgccagttccaggataacggcaaccgccgtgtctggttcttccgtgataacagccaggttgttgagttgttgtcggttcctcttaagttgcggttcaactattacgacgcgagtaaccgcaacgttcttaataaggggattcaggctgatatgagaaaggcgattgagtctttcaagaaactgcggggaatacagtga

SEQ ID NO: 440709 - DNA, 216 bp, Serratia marcescens
atgaaaagtctgctcagaaacctgacggcgaagacatttaaccagcgctttcctgtcggctccagtttcctgtatcacccgacaccaggtatgcccgaacgggagaccgtaataacccgctcagaagcctggcatatgcgcaatggtcgtctggttgtcagggttgaagggaaaatcggtggtatatccgtcagcagaatggaaccctcagagtaa

SEQ ID NO: 440710 - DNA, 435 bp, Serratia marcescens
atgaatctggaacaggtaacggagctgctgccatcagcagtgatacaaatagctgacctgataggcttcccggcgaccgagcagcttctttctgcttttggtggcaccacgttcccgataggtaaaggcctccgcgctatgggggccagccgcgcagccctcctgcgcaatactatcggcgatgagaaaacccaattactcatcaagaattttggcggcgaagttctctatttaccccgctgtgatcgtgcccttcgtgaattacgtaaccgtcgctttctagccgagttcgccgaagtgcgtggacaaggttcatcctctcttatggccatgacctttctttgccctaagtatggttttagtgatcgctttgcgtgggaacttcttgcacagcagaaaaacaaagattgtaacagtcaaggaaaattattctaa

SEQ ID NO: 440711 - DNA, 507 bp, Serratia marcescens
atgggcaatgcaatgagatatgtggcatttttcttggtggtatttagtactactgcagtagcaaaaacagtacccaatacaaaagcagttgagacttataaaaatcaacttgaggaaactaagagaatatttaatgaaacgcagagcactttaatgggtgcaactgctgtttttgatatgtacaagagtctgggatatcttacacctgaagttgttgcagtgagtcgtcatttcctcctccttgatgaggatgcgaaaaaattgtatggggagaatcttcttttaaaccctacaccttttagctcttgcgctacgttaccagcagcagcttactcatattggatagcaaggctatcttcattaaaaactgataatgttaaggctgtgaatgcgcagggtgaatcatacataaaacagggtaaggaatgtaaatttgcaattaacaacccacctcctgcgcatattgaagaaagtgacgatgtagagataattgatgttagtcaataa

SEQ ID NO: 440712 - DNA, 645 bp, Serratia marcescens
atgcttttaacactcccacaatttcagcgagcagcgggcctttcgccagtgatggcgcaacgctggtttgaaccattcagtaaagccaccgctgaattccagattaatacaccagcccggcttgccgcctttattgctcaaaccggccacgagagcgcgggcttcagtcggctcagtgaaaatctctattattcagatgctgagcgcgtggcgcgtattttccgcagcgacttcgatctcaataagaatcgtattattgagcccagtgagattgaatttgcccgccgctatacccgtaaccctgaaaaaatggcgaattatgtttacgcaaatcagggtggtaacggtaatgaagcatcaggcgatggctggcgctttcgcgggcgtggcctgattcagattaccctgcgcaataattacctgctttgtggtaaggcgctgggtctcgatctcatcgctaatcccgatttgttactggagtatctcaacgcagcccgcagcgcggcctggtactggaaggctaatggctgcaatgagctggcggacaaaggcgattttctggctgtcacccgccgtatcaaccctccggctgaaggtcaggccgaccgcgtggcgcggctgaatgtcgccaaggcggcgctatga

SEQ ID NO: 440713 - DNA, 264 bp, Serratia marcescens
atgacgatctctctgcgcgatctggtgacgaacccggccaccggtcgtctctcaacgtcagacaccatcgtttttctggcctttctggtcagttccttcgtgctggtctggctcaccgttacccgtccagaaacacctggtgagctgtatctcacctatctgggcgcatgggtggcacagagccaggcatcaaaacacatgtccatcaaacgagccagagaggtgcgcgatgtgggaagcagctctgaaaatcctgaaggttag

SEQ ID NO: 440714 - DNA, 633 bp, Serratia marcescens
atgtgggaagcagctctgaaaatcctgaaggttagctggaaaccgctgctcgtcgtcgtggtactgacaggctgcgggatatggttcggcaccttcatcacaggcaacaagctggacgctcaggcgctggccttcagccaggagaagcaacgcctgactgatggtttcagtgaaaaagaacggcagtgggatcaggagcggctcagcgctgcgaatcaatatgcaactgacctgaaggctgcactagataagcagaacgcctggcagcagaaagcggatgcgctgacccgcgagctggctgaaaaacaaaaggcacatgatgagactgttcgcgatcttaaaaagaggcttaaagatgcacttgataaagatggtcctggttataccggcattggtcctggcggcctgcagctcttccgtgaagccttcggctaccccggaaccgaaagcctccccgctggtcagcatctgccagccaccgccagcggcacttctggtcattccggccaggccacaggcaccggtggcggactctcccccacgggaatagtgtcgttttcagcggaatacggcgcatggtgccagctccttgagggcaggctgcaggcaataaacgagtattacaggaagtga

SEQ ID NO: 440715 - DNA, 243 bp, Serratia marcescens
atgactcttgatatggcctttcagattgcgctggcgctggcagcgaccttcggcaccatctggatacgtcgtctgcaaaaagacatcaccgacctggaaaaggcggtagatcgcatccgggatgaataccagcgccgtgaggatgccaaaagtaactacaccgcaatgatggatgcgatgagggagctgcgagcggctatcgagcgcattgataacaaactggacaggaaacaggacaaatga

SEQ ID NO: 440716 - DNA, 285 bp, Serratia marcescens
atgaaagccagacacaagcgccgaacccgccgcgtgacaatcagccagagcgaacaggaaacgctgagccggatttcagctcagctcgaccgcctgcaggctcccgtcagcccggacattctgggcgggattaatgacaagctgagccggattgatgttcgtctcactaccatcagcgacgatgccgctcgacgtggtgcctctgccggtgcgattacaggtggcatcgcgggcggcgtcatcacggtagccattctgctcattcgcgcaaaactggagctgtga

SEQ ID NO: 440717 - DNA, 501 bp, Serratia marcescens
atggcgcatccgcaggaaacacgggaaaaactgcgacgatcttatatcttcggccagatgtcgcttgaaatagcctccgctcaggctggcgtggcatttgcgacagctcgccgctggaagaaggaagcacaggacgcaggcgatgactgggacaagttacgcgccgctcaccttatggccgggaacggtcttgaggagattggccgcgccattctcaccgggttaatgacccagtatcagaccacgctggagctgctgacaaccgagtctcagctccctccgggggaacgcgtcgagcttctggcaagccttgccgatgcatttaacaaagccgtcgcagcaaacaagaaaatactgccggaggtaagccagctggcggtggcgctggatgttatccagaagctcagcgcatttgtcgccgagcactatccaaagcatctggccgcgttcgtggaaatccttgaacccttcggcaaggagatggagcaacactatggctga

SEQ ID NO: 440718 - DNA, 207 bp, Serratia marcescens; identical to SEQ ID NO: 145129

SEQ ID NO: 440719 - DNA, 1650 bp, Serratia marcescens
atggccagaactaagttatccagcaaagattttcttgccgaactggcggaactctccgccagtcttcgtcgcaccattgaagcggaagatgtgggctttgacccctccgcagctgcaattgctgaacgtcgtggcctcgttgctgaccctgtaacggggtttgaatactttgtgcagcattattttccgcactatgtccgccatgccgcccgcagtgaattgcataactatctctataagcgcctgcctgaaatcatccaggctacgggaagccagaacgatgcgatagcggctccgcgtggtgaagccaaatccaccatcgtgagtcagctttttgtcatctggtgcattgtgctggcgctcaagcattacccggtcatcattatggactccatcgaccaggcctatccgatgctggaggcgataaaggcggaactgcagtttaacccccgcctgcttatggatttcccggaagcgacgggcggtggccgcgtctggcaggccgggaccatcctcacccgcaacgacattaaggttcaggtcgccggtagtggcaaaaagctgcgtggtctgcgccatggcccgtatcgtcctgacctggctgtgctcgatgatatcgagaacgatgaactggtgcgtaaccctgagcagcgtgacaagctcgataactggctcaaaaaaaccgtcctgccgcttggcggcgcaggggccaagtttgatgtggtgtatatcgggacaatcctgcactacgattccgtgctttcccgtacccttaaaaatccgctatggacgcgggcccggttcaaggcgcttatcagctggccgcacaatatgtcgctgtgggataagtgggaagaaatcctgcgcaacaacgacgaagatggtcagatgctggcgcaggcatactaccgtgagcatcaggctgagatggatgaaggtgcagttgtgtcatgggctgcgcgtccgctttatgccctgatgctcatccgtgcccgtgatggccacagtacctttgatgcggaatatcagaacgatcccgtcagcggcgaagatgcgccatttaccggctgcattaacttctgggtcaaccgccttaacgagtggcgcttctatggcgcatgtgacccgagtctgggtaaacacggcaacagccgtgacccttctgcgttactggttggcggtttcaaccgctttaccggcattctggacgttgttgaagcgcgtatccgaaagcgtgtgccggacaaaattatctctgacgttatcgagctgcagcgggaatataactgcctcgtctgggcggtcgagtccgtccagttccaggagttcctgcgcaccgaactggtgaagcgctccgctgcgatgggtatccccgttcctgccagagccgtcacaccttcggttgataagctcctgcgcatcgagtcactgcagccacatatggccaacggcctgatacgcctgcacccttcgcagaccactcttatcgaccagctccggcacttccccaaagctgaccatgatgacgggcctgatgccctgcatatgctctggatgctggccgtttccggcgctggcaatttcgaatttaaagctgttccccgccgtggccatagcggggacaggttcggtccttcaggaggattttga

SEQ ID NO: 440720 - DNA, 1569 bp, Serratia marcescens
atggttcagattcttgaccagtatggtcgcccgcttaataaagaggtgcttaaagccccccagacctcccgcacgttcgagctgcagcgtgactggccaactcacccctcacggggaatgaccattgcccggcttcctcgccttctggaagcggctgagcgcggcgacctggcggctcaggctgacctttttgaagatatggttgagcgggacgggcatatcttttctgaaatggccaagcgcaagaatgcgctgcttactctggactggagcatcgagccaccgccgaacgcgacggcggaagaaaagcagatcgccgcgatggtggccagctggttcgcggaccttcaggagatggaagatattaccctgaatgcggctgaagctatcgggcatggcttttccgctcaggagattgaaaagtgggagcttgacggcaatctgtggctgcctgtcaaaatcaaactgcgtccgcatcgctggttctgtaccacgccggaagccggggacgaggtgcgtcttaacaccggcacgctgggtggagaagaactctggccatttggctggctggtgcatacgcataacgccaagtcaggctatatcgcgcagtcagggttataccgcgtactggtctggccatatctgtttaaaaactacagcgtgcgcgatctcgctgagttcctggaaatctacgggctgccaccgcgtatcgggtcgtatatgtccggggccagccaggatgagcaggataaactcatggaagcgctggtcagcatcggtcataacgcctcggggatcatccctgataacaccaaaatcgaatttaaggatgccgctgaggggcagtctgatcctttcatggcgatgattaactggtgcgaacgtaccgaatcaaaggtcattctcggcggcacgctgacatcacaggcagacggcaagtcctcaacaaatgcccttggtaatgtgcataacgaagtccgccacgatctgctgaccgctgatgcccgccagctggaagggttttaccgtggcttcattcgtatgttactggccattaatggttataacgtcagcccgcgccgtcagccgcgcctggtatttgatacccgtgagctggagagtattgaaaccttcgccaatggtgtttccgcactggtacgcgccgggatggacactatcccgacctcatggatacacaaaaaggtcgggattccggtgccaaaagagaacgaggctgtgctgacgccgcccgcaactccctctccggtggggctgagcaccacgccggtattccgtcatttcgcggcactgagcaccacgggcgaggttgttgaccctgctcaggatgcgctggacagcgccacgtcgcctggggagagcatcgcggtggccatggataagctgattgctccgctggtctcggccctgagcaaggggcaaagccctgatgaagctctggatatcattgctgcgagttaccctcagctggatgacacgcagctgcaacagctgataaagcaggcgctgtttgtcagcgaggtctgggggcgactcaatgccgaaagctga

SEQ ID NO: 440721 - DNA, 1260 bp, Serratia marcescens
atgccgaaagctgatgttgatctggggtacgccatcgggttaaagcccgaagaagcgattgcctacttcgagtcgaagggctacgccaccggttttaactggcacgatattgaggcccgcgcccatgccaccagtttcaccgtggcgggcgtccttaaacaggatgtgcttgaggatattcataaatcgttgcgcgagcatattgttaacggcggcacgcttcgtgacttcgaacggcagattaccccaacgttgatccgtaagggctggctcgccgaccgtgccaggctggtcgctgatgaagatggcgttctggagggtaagcaactcacgccacgccgtctgcgcaccatctttgaaaccaatatgcaggcggcctatggtgccgggcgctatgtggagcagatggccaacgcggaatttcgccccatatgggaacgcgtggccgtcatggacatgcacacccggccacttcacgccagactcaatggttttactgcccgctatgacgatccagtgtggcagtttatgtacccgcctgacggataccactgccgctgccgcattcgtgcccgaactcaggcggatgcagaccgcatggggattgaggtcaaatcgtgggagcaggacattgtcacggtacagcaggcatggggaccaaaagaaacccgtgacgttaaggcgttacgcttcaacggcgagctttacacgcctgatgccggattcgggcacaatccgggtcagggctggctctcttctctcggacagcgcctcatggataaatctgcaactaccacgccccggattgcctctcaggccatccatgaaaccctctctgaacctgcagtgctggatgccgtcagcgatgatgtgcgtcgctgggtcgacaccgtcagcgtgcggcagaagacccgtggcgacctgagacgcgttggcggtatccagcctgagctgctgaatcgcctcgaagagcgtggtgttaacggtgcgatcacattaagcgttcacgaagaggatgtccggctggctccgggcccgatgtggtcagagcttcccgttctgctccgtcagccagctggtgtctggcttgatgatgacgctctggtgtggctcctctccgggcagaacggcacccgcgccgtgcgtggtgtgcagtctgacgatggctggcgtctgtcgcttgtaaacgccggtgccacagtcacccctggcgatgtgttatctgaacgcgcggcgcagctgctggagctgaaatcatga

SEQ ID NO: 440722 - DNA, 543 bp, Serratia marcescens
atgagctacgccatcaggtatgacattggtgactttgagcgctcactcggtgaactcattaaaaagctggaaaaccgcgcccccctgatgcgtgagatggccgctgccatgggggatgcggttgaagaaaacttcgcgcaacaggggcggcctgcgtggatgggctggagcccggcatatgcccgtcagcgccggggcggtaaaattctccagaagagcggtcgactggcagcgagtatcacgcagtacagcacgaatgatgatgcgacggtcgggaccaatgtgaaatacgcccgcattcatcaggaaggtggggaaatcagcattccggcccgcagccagaaagcctactaccgccagaacaaggatggttcagtgggtaaccggttcgttaaaaaatcccgttccaactttgagcagtggaacactatcggggcgtataaaattaagatgcctgcgcgtcctttcctgcatctcaccgaagatgacgtggagaagatggagagtacggctgagcaatatctgaaacgtattttagactga

SEQ ID NO: 440723 - DNA, 1116 bp, Serratia marcescens
atgaaaaagacactcatcgcttcactcacccaggaaattaacaccgccactcccggtgtcatccagctcttcccggctggtgaattccgcgcccgagatggccgtccgaccgaatgtgccgcctggctgatgacgcgtgaaatcgccgagcggttgattgccgcagccgatgcacgcgagacgccgtatgtcctggactatgaacatcagacattacgctcagccaaaaatggtctgccagctcccgctgcggcctttttcaaaaagctggagtggcgggaaggtgaaggcctctttgctgtcgatgttgagtggaccactgccgctgcagacatggtggcagcaaaagcatatcgctttatttcccccgtattttcttacgacaaaaccggtcaggtgctggagttgctcaacgccgctctgaccaatacaccagcggtcgacgggatggaggaagtgttacttgctgccgcctccctgatggccgcgcatttaaccacagagggtcagaccgaaatggatgaagaatttctcaacgagctactgagcaacctgcgctggatgctcaatctgccaaccgcttcaacgaaagaagagatcctggctgagctgcaaaaaatcatcaccatgatttccggtggccaggggactgcagcggcgtcggtcagtctgctggatatcctgaaccagaacgcgcagagcatcgccgacctgtcagcaaaactcgacacgcctgacccggctaagtgggtttcggtggaggtcatgcattcagccgttcagcaggcaacagagcgtgccggtgcgggtaataccgccgcgcttgccacacagcaggctgaagcgctgattacggttgccctcagcgacggtcgtctgcttccggcacagcaggcatgggctgcgtcactggcgaaatccgatccggccagtcttaccgcctttatcgaaaaagcgccaaagattgccgcactgactaccagtcagactcaggggcaaccgcctgcaggccttccgttacgcccgtctcagggtgctgaagatgatgcgattgacccggccatctgctccatgatgggcaatgacccggaaagcgtcgcgaaatacctcaaataa

SEQ ID NO: 440724 - DNA, 393 bp, Serratia marcescens
atggatcgtcataccccttatcgcgacggccagctgtttgccgtcccggttgcggcagccactgaactctttggcggccacattattgcggccaacgcagcgggctttgctgtgccaggcagcgccacggcggccaataccaccctcggcatctgtgatggctgggtggataactctgccggttccgccggtgatgcgagcgtgctggttcgtcgcggtaaagcctggttccttgccaacagcactgcagacccggtcacgcaggcacagactggcaaggattgctacgtggtggacagccagaccgtggccaaaaccagtgataccaacgcccgcccggtcgcaggaaaggtgctgggccttgagaatgatggcgtctgggttctgatttaa

SEQ ID NO: 440725 - DNA, 909 bp, Serratia marcescens
gtgttaattaacgtaaaaaatgtacgtcagattttcattaatctgaaagcgaccttccagaacgcctttgatcaggctccgtccgactggcagaagattgccatggtggtgccgtcgaccgggaaagaaaacgactacagctggctgagccgtttcccgaaaatgcgtgagtggattggcgacaaggtggttaaagcgctcgccgcgttcaactacaccatccgtaacaaagactgggaagcgacggtagaagttgagcgtaacgatatcgaagacgatcagatcatgggctatgccctgcaggcgaaaggtgcgggccagtccgctgcagaactgcctgccgatatcgtcttcgcgctcctgagcaaaggtttcaccaatctttgctacgacggtcagcccttctttgataccgaccacctttcggggggcaagtcggtctctaacaaaggcacgaaaaagcttgccgttacctcgcttgccgccgcaaaagcaagttacggggctgcacgaacggccatgcgcagcctgaaggatgatgaaggcgcgtccctgaaaattcgcccgaccatcctggttgtgcctccggctcttgaagacgatgccaactatctgatgacggctgaccgcttccctgacaatacgccaaacccatacaaggggacggctgaagttctggttgtgccggagctgacgtcagataccgcctggttcctgctggacacgtcaaaacccgtgaagcccctgatttatcaggagcgtaaaaaaccggtctttgtcgagcagaccgactacaacgctgacaacgtctttatgcgcaagaagttcatcttcggtgctgaagcccgtgcaaatggtggctatggcttctggcagatggcgtatggctccaccggggaggacgcataa

SEQ ID NO: 440726 - DNA, 408 bp, Serratia marcescens
atgccgattcaaatcactgcccgtcgcgatggctttcgccgtctcggcatcgcccacagcgcgaatactgtgacctggccggatgaccatttcagcgacagcgaactccagattctggaaaacgatcccaatctgattgtggttcgtttgcaggatgtgcctgaaaacgctggcgacggcgatgctgtttccgccctgaccaccgagcgtgacggcctcaaggcacgcgtcagcgagctggaggcgacggttctgcagctcaaccaggatggcgacgcgcttaagcagcagcttgccagtgcaaacggcaccatcacggagctggagacggtacgtgatgcactgagtcagaagctggatgcgctgcaggccggttcggaaaacccggacaaaaaggccaaggggtaa

SEQ ID NO: 440727 - DNA, 429 bp, Serratia marcescens
atgtacgcgaaccgggaggacatggtcagggcgtttggtgagcgcgaatgcgtgtcgctcaccgaccgcaactacaccgggcagattgacgatgatgtgctgaacggcgcactcgttcaggccagcgctgaaatcgacggatatctctgcggtcgctatccggtgccctgggctgatgagccccgtgttctcgttggtcgctgctgcaacatcgcccgctatcttctgtgcggctctgagacccagatgacagcagaaatccgcgagcggtatgaagacaccgttcgctacctggaaaaagttgcatccgggcgaatcaatctgggccgcacgacgacaggtgaagtggtgaaaagcggaaccggtgcgcggatggtgtcaggtggtcgcgtcttcgggcgtgaccagactggcggaggaagtttctga

SEQ ID NO: 440728 - DNA, 660 bp, Serratia marcescens
atggtgattacggatattgaaaaagccatcgtggagcgccttcgcaaaggtatggggcgtatggcgaagaatgtgcgctcctacggtggcgagctggatggcgagcctgcagaggtactgcgccagctgcctgccgtctgggtgacgttcggcggggtgcaaaaaaccgagccatacagcacagcacggcaacggtttgtcactcacggtcgctttgtcgtggtggtaggcgagcgcagcctgcgcagtgaagaagcggcccgtatgggtgggccgcacgtacaggaggtcggtacgtacattcttgttgctgccgttcgtcgtctgctgtccggtcaggatatggcggatacgggtatcaaaatcgacccgctcagcccaggtcgcgtgcgcacgctcttcaacacccagatagagtctcaggcattttccgtatttgcctgcgagttcgacacgaaatggattgagtcagcgctggagaacgggcgttacccgctgacggatgcgccggaaggccatgttgatcatatgttccagatttatggtggtgccaccaccgacgatgacccggcatggctgaaaacccgactcagttacgatcttaagcagcctgataaagacaatgcagcagaggacattatcagtcatgagcaaaattaa

SEQ ID NO: 440729 - DNA, 222 bp, Serratia marcescens
atgagcaaaattaaagtaaaagccgccagtgggttgagcgtgccgcgcgaagataatgcgcgccgctacattaccgatgcggaaccccttgaggtggagaacaccgcttattaccagcgtcaggtaatggccggtgatctgattattgtcaccagtagtgacaagaacgccaaaagcaaaaataacgttgccagcacggaggtgaacggtgagcagtcctaa

SEQ ID NO: 440730 - DNA, 1419 bp, Serratia marcescens
gtgagcagtcctaatatcagttttgacactatcggtacgaaccgcaaaccgggacagtattttgagttcaacacccgtctggccgttcgtaccctgccgggtaatacccagaaggtgctgatgattgcgccaatgctggcctccggttcgtctgcgccgcttgtcattcagaatgttttctctgatgaagaggccgcgacgtactttggccgtggctcaatggcgcatctgatggccacagcggctatcggtgcctatccctacctgcaactgcagatcgtcggggtcagcgatgcggccactgcaacagccgcgacgggcaaagtcaccctgaccggcacagcatcttccagcgggaagctgagcgtgaccattaatggcacccgtattgatgtcggtatttcggcagcagatacggcagagaccattgcggcagcgttgacggaactgattacccagaaagacgggttgccagtgacagcgacggcaaacgcgggggaagtgaccctgacctgccgccataaaggggcggttggtaacgacattattgtctcttccgccgtgacggcagcgggtatcacagcagcggcgaccactcttgcaggcggcaatgttgatccggatattacgccagcgctggcagcggcgttctcagcaggtcataacattgttgtttgcccgttctccacccaggaggcgatgacggcactgcgtaaccatctgacaaacgtcagcaatgcgatggagcagcgcggtgcaatcggcgtgggtggctggcgcaagtcgctttccaccggcattgcactggcagcctcactgaatgacgggcgtatcacgctgggctggcatagtggctcggtaaaaaccccggcgcagattgccgctgcctatgccgctgttatcgccagtgaagaagacccggcccgcccgctgaacacccttgcgatgagcacgctggatgtgactgcagtggaaagtcagccagggcgaaccgagcaggagaacgccctgcgtaatggtcttacgccgtttgagattggccccggtgacaaagtgcagatcgttcgcgctatcagcacctacaccaaaaacgcccagggcgtggatgatgtggcgctgctggatatcaccaccatccgaacgctggactacgtgcgcaaggcctgccgtgaacgcatcgctctgcgattcccgcgcgacaagctcagctcaaggacgccgccgaaggtgcgcagcgaactgcttgatgtgctttacaagctggaggagctggagattgtcgaggaggtggatgccaacaaagacggtcttattgttgagcgcgatctgcaggatgttaaccagctgaacggtcgcattcctgcggatgttgtgaatggcctgcacgtctttgccggtcgaattgatttgctgctctga

SEQ ID NO: 440731 - DNA, 375 bp, Serratia marcescens
atggctcttgaagaatatgttggcgcgatcgtcatggaagtcgacggcaaggaaattgaagttactgacctcaaggaagatgtgaccaccgggcgaaagcttgttaagacgatgaacaaaacgggccgggccaaaggtttctcccgtggcatcgaagagatccagctgaccgttacggtggtcatcccggaatccggcgacctgaactggggcggtattgaaggtgcgaaaatcacccagtatccactcaacagcagcggtaaacgtgtttcttacctggactgcttcagcactcaggccggggctcagtataccgtcgataacgaagcgaagcgcgatatcaccatgaatgcacttcgtcgggtggaggaataa

SEQ ID NO: 440732 - DNA, 393 bp, Serratia marcescens; identical to SEQ ID NO: 146053

SEQ ID NO: 440733 - DNA, 2241 bp, Serratia marcescens
atggcgcgtaacttacaactggcgctgcagttgctggcacgtgataccggctccaaagtgcttaagcaggcactgcagggtatcagtcgtgataccaaagcggcgcaaaaaaccgatgatgagctggcgaaatcccgccagcagaacgcagccacagcgattcgctcctcccgttctcttcaggacgaataccgtcgcgccagttcggcgcgatctacccttggtattcgttcagagcgagagattcagcgcgaaatacagcagactatggccgcctataaccgcttatctcgtaccggtgcactgtccgctaatgagcagacaagagccttctctgccatgaaagataaagtgcgcaatttgcgcagtgaattgaacggtgttggtgaaggtatgagccgaatgcaaaaactaggtactgcgggctcaactatctcagctgtagccggtggggtcatggcagcaggcgctacactggtccgtccggtctcgaatcaaatgagttaccagcagagactggcaatgatggctaacacagcctatgcagatcagggcctggagggccggcgcactggtatgaatgaaatggattcccttattcgtcattcagttaaaactggtggcgggactaaagaatcagcagcagagactctggatgcaatgcttgcatcaggctctgtaagcatgcaatcggcgaaatcaatattgcctttgattcaaaaatactcaactgcaacgggagcagctcccgctgaccttgcaaatatcgcaattaaattaaaacagtcatttggaattcaggatacagagcttgataaagcactcaatatgtcgatcagtgccggacaaaacggttcatttgagttgaaggatatggcaaagtggcttccatcacaacttgcaagcgccggtaatgctggtatgaaaggtctggacgactttgcagtgttattgggttggaatcaggcatcagccattaccgctggctctcctgaccaggcaggtaacaatcttaataatcttctcttgaaattaaatagccaggatgccgctaatgccgccgcaagagtaaaattaccgagtggtcgaggaatcgatctttcaggtagtctcgccaaaggtgttggtaaaggagttaatcctctcgaaacatttaaccaaattgtagataaggttgttgcatctaatcctgcttataaaaggctagaagaaaaacttaaaatagcgcctgaaaacgaaaaaagagaaattattaactctcaagcaaaaatactggaagggtcaggtattggaaaaataattgcagaccaacaggctttacttgcactcctgggatacagaggtaacaaatcctatacgcagggtgttatttcagaagctaattctcaacgtaacttatcagatggaaaaacggctggcgatcttagttttttgttaatgtcggaacaacctggattcaaactgggacaacttgataacgagagagactttcaggagatggattcagtcaagccgttatcagattccctgggatatctttcagataaattactgaagtatgcagaggaatatcctggtttaaccagggctgtttctgatgcagctattggaattaaagcaatggctgcggctgcggcggtatttggtgcgataaaatggatgtcaggacgggggggggctgggggcaagccagcaggctcaaatccccttgaaattctcgcggaaggtgcttctggcaacaatgccgtacctgtttatgtaactaatgctcaggaaatcggcggcgataaagaaggcttccttgacaaatttttggggggaagtagtgatttgccaggccagttaggaaaatgggcttcatatgcaaatgtggcaaatattatttatgagtctgcccaggataaattcgattctgctgacgaggaagctaaatcaaaagggatcactactggcgagctttttagacaaaagtttcaggaaaaagagaataacaagaaacctcttttcgatgttgatctcttttcaatggtcaaatcctggtggagttcacctgccactatagggcaaaacacacctgcagcaacaggcgtgccgtcttatctgttgcctcagcagcaacaaaaatcacaacccattaacctcaccacaaagctgatactggacggtcgtgaaatagcatcagctgttaatgaatacaacggcgaacaatccgttcgcggctcaacaggaggcccgcagtga

SEQ ID NO: 440734 - DNA, 1332 bp, Serratia marcescens
gtgagctgggaagattcattacaggatgcctcattcaggggcgtccgcttcgatgtggttaatacccgtgacagcgccagccgcgacattgcgacctatgagtatccctatgtggacggcggcgatgttgatgaccttggccgcaagcctcgtaacctgcgaatgacggtccttttctggggtgacgattacgaagtgcgactgcaggcgtttctggccgcgctggatacacgcggtagcacggagttaatccacccggttttcggctccatgacgggcatgcagtgcattgagtatcaggcatcgcatgaagcggagaacgttgattactgcgttgtcgaagtggtctttatccagggtggacttaatctgcctttctttggcagcgacttcccgctgtcgaaggccgatatcattttcaaccaggcgcaatctgctctggagaaagcccagacggccatcgacaatattctctcgcctctgcgtacagcgaaaaagtggatgaagaaagcgaaatcgctggcaaccacgacgctgaatatggttaccgtacttaagggggaactgacgggatttgtcagtaccacctcggattttgttaattacccgaaagcgttcatgaatgacctgcagagtgcgctgagcctgacgtcgtttcagtccaaatcaagtgtcagtaataatccaggaagctattcacagtcttcagacgtttccggtacagcgggcatcgtgatggccgactggaagaatggccgtaacaatctgcaggaggtggccgcattacctcagcaaatcgtgaccgggcaaaagactgttgccgtcaccgttccggcgggatcatcaacgtctgatatcactgagctggtaacggcggtaaaaatccaggttgcaatccagctggcgcttgatgcttccgacatactcagtgacagcagcatcagcgatattctgtcgcctgtcgatattgagcagatcaccaacgacaccaggacggccattcagacggcaatcgaccagacgcgggacacctttgctgccgatacgcaaaacgtgagcgccggtgaaacaccgggtggcgtgacatggcaacccgtggttgaaagcctcaaggatattgccctgactgttcaggagttgggcgcagccgttattaccagcagaccgccactgacgacgcgagtgatattgtccgacaccaacctgcatttgctggcccacttgtggtacgaggactacacccgcgccgccgagctgctgcgccttaatccgacattacgtaatcctaacaacatcaaagccggtgacattctgaatgcctactcaagataa

SEQ ID NO: 440735 - DNA, 1218 bp, Serratia marcescens
atgcctactcaagataaagattcgcagaatacggtgagcctggttattgatggcaaaatccacagtgcatggagccgctatcagattgactccgattttctgatcccctccgatgcctggagcgtaacgcttgggctgcctgacggtatttttccggcggccattaaacgaggtgtgccggtactggtcagggtgggtaatgatgtggtgatgtccggtcgggtggatgtggttcagcgccgcgtatcccgtcagcaggtctctttatcgctttccggtcgcgatggcgctgccgtgcttgttgactgcgcttcaccagttttcacctcccgtcagctcagtcttgaagaagtgatcgcccaggtagtcaggccgctgggggtgacaaacatccgcattgaggctgagacttccctgcgtaatgacaaggtcagcgttgaacccggagaacgtgcgtgggatacgcttgagcgtgcagctgctgcacgcgggttatggccatggtttgagccagatggcacgctggttattggtgggccggactacacaaaagacccggtggccacgctgattcttaatcgtgacggtcggggaaataatgtcctcgatctcagtgaccggtcatccattaccggggcgttctctgaactgacaatgctggcacagggacacggccaggggaaaaaatccgggaagctcgatgttattgacgttgatggccagaacgctgacgcagaagacgacgatgatgccgatgatatttatgacagcaccggctctgcagagaatggctttcatggcttacgtagtaccgttcgcgacagtaccgtacctttctatcgtccgcagattatggttgccggtgatgctgataaccaggcgcaggttgattatcgcgcaagaaaggccatggctgacgcccgtctgagcgggtttgatctgacagctattgttaaaggccatcgcatggagaacggtcagttatggcaaccgggccagcgtatacgtgtcagaagcgagccacatggcattgatgacatttacttcatcatgggaagagagttttccggtggacggccagacaacaccattaccaccctgcgtctcaaagaggatggaatatggataccggatgcttatccgaaaaaacggaaatcacgtaaacgccgcgccaaagtaaataaagagctggagattatcgatgtggaacaaaattga

SEQ ID NO: 440736 - DNA, 606 bp, Serratia marcescens
atgtggaacaaaattgattctcgtattaacacggcgttaaaccgtataagacaggccttcaggggcgttttaataagggttaacagcggcggtgatattcagaccattcagggtaaaggtctggctacggagtccctgcaggatgtggagatgttccagcaatacggttttacatccaacccgcccaggggcactaaagccattatgctcccgctgaacgggcgcaccagtcatagcgtggtgattgccacggaacacgcttcatacaggctaaagagcctgaaaagtggtgagcttgccatttattcggatgaaggaagcaacattattctgaagcgcggaaaaataattgaagtaaactgcgatgaatatatcgttaatactaaaaagcacacggtgaataccgaacaacatattgttaataccaaaacgtataaaaccacagcctcagagcgggcagattttgatacaccattgctgaaaggcagtaatgaagtcgctgacggcaagtctacgctgaacaccatgcgtgagacttatgacggtcacgaccacgaccacggcggtgatgcaggcacaacgcagaaacctaatcagcaaatgtaa

SEQ ID NO: 440737 - DNA, 1068 bp, Serratia marcescens
atgccattcattaccaaaaatgccgcgcaaatacgcactgacattctgcgggatatcaaaaatctcctgcagttgtcagatgatacgctgggcccggacagcgactggtacatccgggcatcgagtgtagccagtgttgccgaggggctttatcagcatcagggatggatagtccgtcagatctttccggatactgctgattcggaattcctctatctgcacgcccgtttacgtggtttaagcaaaaaagcagccaacagcgcctccgggcctgccacgtttaccggcgaaccaggagcggtggccgctgccggtcttgtgttcaaacgcgacagtgtttcgtggacaacaaccgaagatattattgtcgggtcagatggaaaatcatcggtaaacgcagtgtcttctctggccggaaccactggtaacaccacttccgtcacatcggccacactgaccacaacacctgatgggtttgacagcacagtgacagtaggcctgatgactggcggaacagatgaggaaacggatgcagagctgcttgctcgtctgcttgaaatcatccgccgacctcctgcaggcggcaataaatatgattacaaacgctgggcgattgaggtatcaggcgtatccgccgcatatgtttaccctttgcggcgggggccgggtaccgttgatgttgtgatcacgtctgcaggtgggctgccatctcaggatgtgatcgacagggtgcaggctcacattgacgatgtccggcctgttacagcaaaaaacacgctggtgctcatacctgtcatccgtacatttgacgtcctcgtgaaggtatcactggagggcatcaccctcgcagcagccaaacaggctgtcgccggaacgctggaggacgatgactcgcgccgagagcctggagtggcttttattcgcagccaggcggggacattgatttctctaattccgggtattaccgactatgacatcgttacaccatcggcaaatattcaaccgataatcgatgccacgaaagtcgaatggctcaaattaggaaacgttgaggtagagctgctatga

SEQ ID NO: 440738 - DNA, 573 bp, Serratia marcescens
atgagctacttcacgctgttaaatcgtctgctgccacttgtttcgtacagcccgggccagcctctgcttgatgcatcattgcgatctgaatcaggtgtttttgagactctcgatgcgtctgcagggcttgttgaaggtggagttactccattttatgcacgcaaccttttgtatgactgggaacgcgtcctggaccttactcctgctgaaggtgcgacataccagcaacgccagcagcgtgtactggctaaactggctgaagtcggtggtctcagtattccgtactttactcagttggcaagcaaccttggctacatcatcacaattgatgaaccgcaacctttcagggcgggagttggccgcgccggtgatcgcctctgggttgaagacattatctgggtctggcgcgtcaatattcagaactcaggaactcaatcctatcgctttcgctcaggcagttcagctgcaggtgagcgcctgacaacgtttggtgatccgattattgaagacgtcttccgtgatctcaaaccagcccatacattttgctacttcgcatatcaggagaatgaataa

SEQ ID NO: 440739 - DNA, 729 bp, Serratia marcescens
atggccaacaaacctgaaaacgaactaaagagtgaaattggtactcgtattcgaactcagagagaggctttaaagctttcgaggagttatgttgcggataagcttggggtcgcgctatcaacgctccaagcatgggagaatgaagacagggaacctagtgctactcatatactcaagctttctgagtgcctgaatgcatctgtagcatggctagtcgcaggtgatgaagtggcagagccctccagttctttgccagtagtaacatctggttcaactgctattgatgttaagggcaacgaagtggacctagaagagtttgtctttgtacctagatacaatgtctctgcatcggctggttacggggctttaaatgacgatgaaagcccgatgtttactgtcagcttccgccgatattgggttgtgaatcatcttaaggctgaccctaggaaattatcagttatcagtgtcataggtgactcaatgatgggggtcctaaatgataaagacgtcatccttgttaaccatggggatagagatcctcatgagggcatttatgttattcgcttggatagtcaattacttgtcaaacgtgtgcagcgcttaccgggtgctcagctcaggattagcagcacaaatccagcctttgagcctttcctgattgatttggataacatcccaagtgatttcgacgtgattggtaaagtagtctggtacggaagagtaatttaa

SEQ ID NO: 440740 - DNA, 309 bp, Serratia marcescens
atgaagggaactcttctgggtcattcagcgttccattatctggtcagtattgataattattatgttgcggtatgggctgcggtttctcgggatctggtaccggaactggtgcaggaaatgttccgtggagtgacgggctgtttcgcctttaaaaactcagacaaacagactgttattgatttcatggtgtctgaggataatcgcttgatagccaatggatcgatgaatagtaccaatctcattggctcaaaatatcgcgggtatcctggaaggaagcatttttttaatctgtatgaacctcaaaaatga

SEQ ID NO: 440741 - DNA, 636 bp, Serratia marcescens
atgagtgggaaatacgcccctgtaaaaatcacggcacaggaatacgcaagcacctttggcatgcctctgaatcaggcgtatcagcagctaaaagatgccgcagaaaattttttcaatcggtacatatcgctgtctattcccgatcgtaaaggcaagaagccagaacactggaaaatacgctggctgggcgcttacggttatcaggacggcgaaggctatgtttcgctcggatttaccccggaggttacgccttatctgtgcgatctcgagtccaattttacaaagtacaagctgagtcagtcttgggctttacgttccgggcactcttggcgtttgctggagctgtttgaacaaatgcgcaaaacgaacaaagaaacagggcagaaactggaagatggctggctttccataagcatcgaggacttttggcatgcaatggaggccactgaaacttataggaaaaacttcaaagacttaagggttaaaatcatagagccagcaatcaaggaattgacggaaaaagataactggctgattgactggcacccggtgaaaaaaggccgtagggtcgcaaagctggagttttattttaagaaagacgatcagcttaaactccaactaagggaccaggtatga

SEQ ID NO: 440742 - DNA, 2616 bp, Serratia marcescens
ttgcgcaccgatctgcttgccttcgcgcgcggcgtggcgatcgcctcgaccaaggacaaattcgtcgtcgccgctctcgccgatgagatgcgccggcggcgtatcgtcattcccggcatcaccgtgatcgaacggatggccggacaggcatgcaccgaggctgaggaggcgctgtttgccgatgttgccggaaggctgacgcccgacatcatcgtcagaatggaagcgctgctcggtattggtccacgcgtccgccagagcggggtctcctggttacgtgaacctgccggaaaggctggagacgcagcgatgcggggtctgatcgatcggcttgaggccgtgcgccacgttggcctttcaagtgatgtgcttcaggccgtccccgcccatcgggtgagccgcatggcacaagagggccggcgcctgaccgcccagaacttcgagcaaatgcggcccggccgccgatatgctacgctcgcagctttccttctggagatggaaatcgcgctcacggatgccgcaatcgccatgttcgaagtcctgatcggcaaggcgtttcggcgggccgaggcagagcgcgacaaacgactgctggaaaccgccacctcggcgacatcggcgctggatttcttcgtgggcttcggtgaggcgatcgctgccaggcgagaaaccgacctttcgctcgatgaggcggtcaatgcagtcggcggctgggagcagttgatgcgggcaaccgcggctgcgaaggcagcatctcgtccccgcaaggacgatgatctgattgcctatctgccggcgcaatatatgcgtatccggcgctttgcagcaccattcctggcagccttcacgttcgagggtaatcgtcagagccgtgatttcatcaacgtggtgatgcaaatgacggccgcagggaaaagccgccgtcgctctctggacgcgcaatggatcaaagcggcgctcgatctggtcgacaagcggtggagcaaggaaatcagaacgccagatggctcggttgaccgcagaatgctggaaatctttgtcatcgttgagctgaagaaccggatcgctgccaacgagatctggatcaaaggttctcgcacatatcgcgccctcgatgagggcatgatctcccatcagacttattccatcatcaaggccgaggcccgcattcccgtcgccatcccggttgatgtcgagatctatctcgcccagaaagccgaggcgctcgatcaaaaattgcgtgaggcagcaagccggctggaggcgggtcgcggcgacacgcggatcggcgcgaagggcctgcgggtgcctgcggtcaaaactgccgagaccgaagccgcgctcgccttcgcaaggagagttgcgagcagcatgccgccgatcaggttgacggatcttgtcgccgacgtggatcgaatgaccggtttcagctcactgttcgagcatcttcagacaggccgaacgccgggcgatatgcgaattttctatgccgcgctcatcgccgaggccaccaatctcggcttctcgaagatggcattggcctgccccggcatcacacgccgccagctacagcagatggcgatctggcacttccgggaggaaaccttcaccttggcacttgcccggctggtcgaagcccagcacgcggcgccgatcgccactgttttcggttcgaacacgatatcgtcttccgacggacaacatatccatctcggcgatggcggcgaaatcgccggtggcgtcaacggccgttacggaaccaacccgatcatcaagctctacacggcgatctccggtcgatatgctcccttccataccaaaatcatcgccgccacggcgagcgaggccgtccatgttctcgacgcgcttctcgaaacggatgcgggcctcgacatcgtgcgccatcatgtcgatggtggcggcgtcagtgatctcgtcttcgccttctgccatgcgctaggctttgcatttgtcccgcgcattcccgatctcgatggccgatgcctctacggctttggccccggcaagcagtatggcattctccagaatgtcatgggcgatcgcatcgacgccgatttgatccgggcgcactgggacgagattctgcgcttgatgacctcactgcgcacccgcaccgtcagcgcttcgctcatgctcaaacggctgtcatcaacgaccaggcaaagcggtcttgcccaggcactacgtcagatgggccggatcgagcgaactctgttcacgctggactggatcaacgacgaggaactgagaaagacgacaacggcagaactgaacaaaggggaaagccgcaacagcctcgtgcgggccgtcaatctccatcgcctcggccgcttccgcgatcgcagccaggaaaatctctcgatccgggcctccgccctcaacctggttgtcaccgccatcattcactggaacacgatctataccggccgcgtggtcgatgccttgcacaccggcggtcagcatgtgcctgatcatttgctatccagcctctcgccgcttacctgggagcacgtgaacctcaccggtgactacatatgggaagacaagccggcactcgatgaaacaggcttccgacctctcccgttctcggtctga

SEQ ID NO: 440743 - DNA, 171 bp, Serratia marcescens
atgtataacaatcagttcaatgcaacaactttcattccagttgtagggctgtttactggcggttcgcagactcagtctaaaactcttgaaatagattttaaaggcgaaattgtcagcaaatggacgttctccactgacaataacaacaccaaaacgggcgttcttaactga

SEQ ID NO: 440744 - DNA, 1182 bp, Serratia marcescens
atgaaaggaatgcagaagatcaaaagggggaaaagcttctcaggtgtggttctctatgtgttaaagccaggctcacaccatagaaccgttccagaagtaattggtggcaacatgacaggtgattgctcacaagagttaatcgacgaatttaaccttacgaaagagcttcgttcagatgtggcaaaacctgtttggcacaattcacttcgattaccccagggagaatctcttaccaacgaacaatggaaacgaattgctgacgattacatgaagcgaatggggttcggtgatacacacctccgttgctatgttctgcatgatgatcaggctggtcagcacatacacattattgcaagtcgcatagatctcaatggcgggaagctctacttgggtaggaacgaaaacctcatcagcacccgcataatcagtgaactcgaattcgctcatggtctgacagtgaccaggacagcctcttcaattgcaccaaagcaaccgaagcggaagagaatctctcgcaacgaacagatgctatcagaacgaactggtgttccctgccccaagaagtcccttcaacagatcatagataaaagtttggcagattcaccggaccttttaacttttatcaggaggctggaagaagctgaagtatcctggaaggccaatattgcctctaccggcaaaatgaacggcttctctttcgaatacacaagaatagctttcaaagcttcgcaattgggtaagagctacagttgggcaaatcttagtaaccgactcaagtacaaccccgaccacttagaaattctgcgaatgggtatacagacgaaggaagctcttcctgctcctgctcctgctcctgctcctgctcctgctcctgctcctgctcctgctcctgcaaccattttaaaaaccactgagagaaaggaaagtatcagtgaaaaaattactgaactcgaactacgactcagaaaagacagacgaaacgagatcgttgagaagattctccaaaagaatgcggttaaccagcaaaagcatctcaggcttatcggctggcttccatttcttagaaggcttgcagagcttctcagaagctatggtaagagcattcttcacaagcccctccctggattctcaaatctctatgccacacgacctttacataaagaaaggaaaattcatttataa

SEQ ID NO: 440745 - DNA, 720 bp, Serratia marcescens
atggaaaataaagagaaatatatccagagaattaaaaagctgctcgcgatggcgcgtaataactccagcgtcgaagaagcagcacttgccctccgccgcgctcagcgtctgatggaaacccacaagctgactgaggctgatgctgatttgatggatatcaatgaagcttctacccagaaggccccctctcatgctgagaagatgccggaatacatggcaatactggcagagatggtcgcccgcgtttttggcgtgaagttttacaccagccatggcactgagcagtggggcaagccagcaaaacgcaccatacactattacggccccgacgaacgccctcagatagcggcatattcattcgaagtcctgggtaagcaactggcgaaagcccgccgagattacctctccacattacgcaagaacatcaaacaggccacaaaagttgcccgcgccgataccttctgctccgcctgggtcaacggtgcttatgccgttgtcagtgatttcgctgttacggaggcggagacaacgctgatggagtgttaccgcagcagtaaattaagcgaaggcatgaaaaagctggaaccgcgcaaacccggcaaagccaggggaacggataaggcggaaagcgagggatatctggctggacgcaatgcgcagctgcatcacgcggtaagcagttcagctaaaaaatgcgaactgttcggagtgacaaaatga

SEQ ID NO: 440746 - DNA, 579 bp, Serratia marcescens
atgatttttccagcggttctgcgcagcgctgcgtttcttcttgtcgcaccactcgttgccaggctgtggtatcgttgctggccagcctgtcatcgctttacggttactgaatttgaaaggcatgcgcagcagtcttcttgctttgcggtttgtcatttggcagcctcctcagagcggaacatcatgattgtcagagcgccctttgtggcaagacgaacggttgtacctggctcaatgccctgcagatcgaaggcatcgtacaactcatcaagagccttctggcgacgtgatgatttgcgatgtttatcccatgatttcaggacaacagaggtaaaccacttaccggcctggaccatgatgaatagccaacccatgaaagcgagtccggtattaagaatttcggtgatcgtcatttgccattctccgtttgggaaatgggtaagagcatggcggcgcggcaggcgttccatccatccacataatcgaacgtattaccgtcgtctggctcaatttcatcaggcacagataccagcgatgccagtgcattggcccgtgcgagctgaacatcaagcgctgtag

SEQ ID NO: 440747 - DNA, 375 bp, Serratia marcescens
atgaatataaataaacattctgagcgtaagcctgtggttttcattgccgggccaatgaccgggtatcacaactttaaccgcgatgaattctatgctgaggcacgcatccttgaagagcgcggcttcaccgttcttaacccggccattcttcctgacggcctgcagcatgagcagtacctgcaaattacgttgtccatgcttgagcaggctgatgctgttttcctcctgaacgggtgggaaaagagcaccggcgcaaccagggagtttgatcgcgcctgtgagctaggactgctgttcctttaccagaactgggaaagcgtgtcgattgcggcctatcgtaaacgcggcccatcaatggaggtgggtcatgcatag

SEQ ID NO: 440748 - DNA, 216 bp, Serratia marcescens; identical to SEQ ID NO: 160094

SEQ ID NO: 440749 - DNA, 531 bp, Serratia marcescens
atgactccggctgcctatcgtcgtgccgttctcgaagctgaaggtgacgatattgaatatctgactgatgtagagctgcgcgaagcctttatgccggagatggtgcgtaccgcgcagcgtggctggttgcgtctgtttaacaacgactacttctctgaagaattgatccaggtggatagcgaagaggtgcgggtggctttcgatattcacgatccctcttccgttatcgttcgccggatggatggtacctacgtctgtactgcgatctggaacggtaataaacgtgccgcaataccggtgagtgcaatggatgtggctgttgagaaacgccgccagcgccgcctcaaccgtattgaagacaaacgccaggaaattgaagcagagggccgctctgtattaccgggccagcgcttcgacgatctggggagttttatcccggctgaattcagccggattacggaagaagagcattatttcttcctcgaaaccgaccgcgatgaatatctgaaaaaaaccggtaatacccggtaa

SEQ ID NO: 440750 - DNA, 894 bp, Serratia marcescens
atgagcctacaaacagaactgaatgaacttatgtcccgcaagggttacagccagacacaggtagcccgcgcttttggtaaaagcccggcagtggttaatcagtacctacagggaaaatatcagggggatgtgggaagcatcgacgaactggcccgcagcttcattgcccgcgaagccgacaaggaaaaatcgcgtcgcatcacgccgcgctatatccccacagtgacctcccgcaaggggattgaggtcattcgcctggcgcaccttgatggggagatcaacgttctctatggtgctgctggcctgggtaaaaccatgattttgcgcgaatacgcgtccagacatcgtgatgcgctgctgatagaggccgaccccggttataccgcccgtgttgtgctcgaagagctttgtggactgcttggcctcagcaaacgcggcaatatgcatgaactcagcgaagcctgcattgctgccctgcgtgattctggtcgcctccttatggtcgatgaggcggagaaccttccataccgtgcgctggaaacactgcgtcgcatccatgacaaagccggtatcggtgtcgttctggcggggatgcctcgcctcattatcaacctgaaaggcaagcgcggtgaatatcagcagcttttcagccgcgtgggtctggcgctcaacatcggcgaatccctgccgcaggctgatatcagcgatatcgcgatcagtatgctgccggatgctgagaaccctgacgtatctgaggcgctattccgggcgagcaacggcaacgccagacgtcttttcaaactggtgcgcggtgtcagccgtcacagcgatatcagtggccatgcagtcagcgctggcgctgtccgcaagttcgcagaaatgctcattaactga

SEQ ID NO: 440751 - DNA, 291 bp, Serratia marcescens
atgaccagaacatcaggaaataccgacaacgcaggcgttatctctgcgttgatccgggcagaaacgctgattttatttctgtcagcacagggagttcaggtgaaaagcgtatccctgcgcaacacacaaccggtcattcgtatcgtgcgccatgcatggtgcgagcggatgaaaaaagaaggtctggcgcgatttgatattaccggcaatgaccgccacaggcgctttcgccagggcgtctatcaggatgaaagcgggtgtcgggtggtctggtctgaatcacttcattaa

SEQ ID NO: 440752 - DNA, 366 bp, Serratia marcescens
gtgcagtacgcctttatcaacgcccgcgatgcgggatcggtggcgggctttatcgccatttttgagcgcctgggcgtgggttatgtggaaatcctggagcgccagccgggcatagattgggacgtgatcagcgtccgcgtgaccgatggccaggttgccagtaatcccgatctgctgatgcaggttatccggcagtatggccgcacctgtcgccgctatcgatttgaagtgattaacaattctgtcctgcaattacgcgctggctgggctggatgtgaatacgtgacttacagcgccgccagcacggtggccagtatcaataaccaacattccgccaccgtggcgagcgcaacactgaaaggataa

SEQ ID NO: 440753 - DNA, 504 bp, Serratia marcescens; identical to SEQ ID NO: 52325

SEQ ID NO: 440754 - DNA, 207 bp, Serratia marcescens
atggcaaagattgttattgaaataaaagacaaatctcgcggttttgaagtcggttgcagggttatccctgatgacggcgacagcgatatcgtcagcaaagtggctgacaaagtgggtaaaggtctggctggtcatgtgctggcaaaggttaacgaagcagttaagaaagtagcgcgtcaatttaaggagagtaaaaatgtccactga

SEQ ID NO: 440755 - DNA, 909 bp, Serratia marcescens
atgatgtcagctctgtctacaggaaaagaatatcgcggattccgccgcggtctggatctttctgattcaatcctcgacccgacggcgctatttagcgcctacaaagaacgtgtattgaccgatgggggcacaattccagatgaggttgggtgtcttacgcgcttcaacttcctgcttaacaatagtatgttcgaccgcgccacattctgtgcagcacccgcgtttggtttgaaagttgatgtttctggtaatgtccaaaccgtttacaacctgcttggtgcagacggcgatttaatctcgagtacgcaaggaaccccaccgctacccatgacctatgacgccgcatcccgctcggttatcattcaaattacgtccagcggaggctggtatctcaaaagccgcacgagcctggtcattcagaaggggactagttacctgatcgcaggccgtatgagcgacctaaatcgagctgataataacggtattatagccgggtacaacctgaaagggttgccgatggcttacctacgcacaatgattacgaatggtcaaaaagagacggaagcatggcgttatggcacacgtgatagcgcatggcctgctggaaccggcacctcgctcattgctgcaacgaatatctatgctgactacgtgccatctgcgggcctgttcaatgtcgaggctggtatcatagaagggttcgagcaagggagattgctcgcgacctctgagcctgcagcgacgggacaactggccgatttgagaagtttcactgcgccgatgcttgttgggggaattcagcaggcgaataacatcgtcggcgcgtgttacggagcattccaagacatactctgcttgcatacagctgatgaatccgacgcgatcctcgcgtcacgtctgggaatgtaa

SEQ ID NO: 440756 - DNA, 201 bp, Serratia marcescens
atgccagaagtaaaactcctgcagcagcatacccacgcgggtaaggctgttgcagccggtgaaaccatcaccgtgaccgagtccgaagccaaatggctgaaggcgcagaaaataatcgaggctgctctgcccgtcgtgaacatcgacaatcagaacggccgtcgcaatagcaaagtggaggcagataatggggcagcttga

SEQ ID NO: 440757 - DNA, 162 bp, Serratia marcescens
atggaagagctgactaccctgggcaatcaggtcggtcaatatctggaggggttggcaaaaaatcctgatgttgatccgcgctggttatccatcgcccgcacggagctgcagcaggggttcatggcggtaaaacgcgctgtggccaaacccgctgcattttga

SEQ ID NO: 440758 - DNA, 1137 bp, Serratia marcescens
atgaccaccaaaacctcgaccgccacactcgctgtatttgcaccgggcacccataccgcgatggatgggcgcacgatgacgttcaccgtcgaggattgcctcgacatggccagcagctatgacccggacctgtccgaatccccatttgttattgggcacccgaaactgactgccccctcctacgggtgggccaaacggtttgagtttcgtgacggatttctctacgtcgaaccccatcaggttaatcctgaattcgcggaggcgttcaacgcgggcagctacaaaaaacgttcgctctccgtctaccaaccgaactcgccaggcaacccgaaacccggtcacttctatccgcgccacgtgggtttcctgggtgccgttcctccgggcgtaaaaggcttgccggatgccgagttcacagagttcgccgagggcgatgacaacgcgccactggagtttgccattccctgggaaaccgaactgctggttgatctgctgcgcggtgtgcgtgattacatcgttgaaaaagacggtgcggagcgtgccgatctgctgatgccgcagtggcgtattcgttccctggaggaactggcagccaatgcggccgcagaaaacaactcaaccatttcaccactggcgtatgccgaggagtccaatgtgtcaaaagtcgatccaggtacagcatctgatctcgctgcacgcaaagcagatctcgatgcccgagaagaaagaatcaagcagcaggaaaaggcgtcgcaagaagcggctgcggctcaacgccgtacagacattgcctcatttgcggatggcctggtcaccgcaggtcaactgctgccacgtcagaaaaacacggtagtagagctgctggtcagcctggccaatgagcctatctcttttgccgatggctcgaccaccgtcagcaaaacgccggaagagctgctgcgctcggtgctgagcgaaaaaccgaagctgctcgatttcagtgaaaagtccggcgaagaaggcgccgttctggactttgccgacgccagtgccgtggctgacgccgccaacgtctacgtcgccgagcaggccaagctggggcgcaccgtttccatcaccgatgcagtcaatcacgttaagaaaggagcgaagcaatga

SEQ ID NO: 440759 - DNA, 525 bp, Serratia marcescens
atgcagcagaataaagcagaaaaagttgtttcacaaaccgccgttacggcccatgagagtacgtcgaccaatactctggaaggaaggggagctatcgggctcaacttgagcaccatgcttacagaccggacagaaccagtacccctcgccgttaccagtcaagagcacctttttgccagcatcgaaacacggttggcacaggaagtgctcgacctcactgacgccctccaacgattcggcatcggtacgcaacgaatacacgaagaactccctgcgactgcccagtttggcaagttgataacgagctttttcagtatggtcagcttccagttcgcgtatgcgttgctcaaggacagggataagccgttgttgctcgacgacggtgcccagcagttgcaagagttgggtctgactctcaatgattttattcgagagatcgatttggatggtcgccgctttttggcggtcgcgctcattgataagaagctttcccaattcaccaatagcggaaatgctgctgactaa

SEQ ID NO: 440760 - DNA, 369 bp, Serratia marcescens
atgaacaactcgaaactgaaatatgtaaaattgtttctcatatgtattggcttgactggtatttctacttcacatgcagacgaacagtcgttacgaactgaatctcgtgagcatatgaaaaagttgctgttaagtaccctcaaggacccatactcggcagacattaaagtggtgaaagaatccccggctaccggggaagtcaagatgctatgcggcttagtgaatgcaaaaaatgggtatggaggatataacgggtttgagaagttttatatccgagataatgaagtaacctatgttgcaaaagatggggcttttgaattcattactaatttggcttgggacgtttgtgaatatgctgttcagaaataa

SEQ ID NO: 440761 - DNA, 942 bp, Serratia marcescens
atggcccgtcaaaaattgccatccaccgatctggtgccagatttgcagttgaaccctgatctagaagcaactcagaacttaatggcagccgtcagcgatcaaatgcatgacgaacgcgatctgctaaatcagttacttggccaggcccaaatggctgaagcctttggcaaattttcccaaacggtttggagttcaaagttagcatttgtaaaggaaaataaactttatcaatcacttaagggaaagaaaactccaaacggtttggagttgcagggaacttgggctgagttctgtaaccttctaggagtctctgatgagaaagctaatcaagatatagccaatctccgtgccttcggtgaagaagccctcgagtctatgtcccgcatgggtatcggctaccgcgagctgcgccagttccgccgcctgccggaagaccaaaaaagcgcgctgatcgaagtagccaaagaaggagacaaaacggcgctgctggagctggccgaggaaatgatcgccaagcacaccaaggaaaaggaagaactgaccatcgacctcgagatcagccgccagaccctggctgagaaaaaagaggaattgggcaaggtcagagaggacaagtccaagctggaagagaagctgctgcaccgcgtcaaacgtgaaacgccagaggccgaagggacgcaaattgttcaagaggtgaatgtgctggtccatgcggttaccgccgacctcgtcaacctggagaacgggtttaccacgttgaacgagcataccgaacgcacaggcattgttcacgcggggctgatgtcggggttattggatgacattgaaaaccggctgactgcgctgcgccagcagttcaacctgccggagcaccagccttttgacccgcgcccggactgggtgaggaacggtctggataacgaggagaatgaaaatgcctaa

SEQ ID NO: 440762 - DNA, 204 bp, Serratia marcescens
atgcctaacacctctatcgtcgatagcgtcgaatctctgaatcacgccctaaagcaccaggtacctgacatgttgtgcggcttcaccatcaaaacctattttggcgaaatatccgttcatggcagagatgcagtaccgttttttgaggaaatgaaacgcctcctggaagaaaaagttcagcaaattcatcagcaggaacagtga

SEQ ID NO: 440763 - DNA, 207 bp, Serratia marcescens
atgagcttgcaatgtaaaacttgcggtgaagatgtttcggacctcaattttgagcaggccactatcatggaaggtgtcgacggtacatggtgcgttgacctcatcctgacttgtccgcaatgcgggcagacctacaacgcgtttgtgcccaccagcgagctccagccattacctcacgatgattattcggaggggatatgcctatag

SEQ ID NO: 440764 - DNA, 1608 bp, Serratia marcescens
atgaccgaacaagaccaaaaacaactaggaaccaccttgtggggcattgccgactccttgcgtggagcgatgaatgcggatgatttccgcgattacatgctttccttcctgttcctgcgctatctgtctgacaactacgagacggcggcacagaaggaacttggatcggattatccgatactgaccgaggatgatcgccgcgcgccgctgtccgtgtggtacgcacaaaacccggatgacacagaagtttttgaaaagcagatgcgtcgcaaggtgcattacgtgattcagccggactacctgtggagcagcattgctgagatggcacgcacacaggacggcgagcttctgcacaccctgcaaaaaggcttcgattacattgagaacgagtccttcgccagcacgttcagcgggctgttttccgaaatcaatctgaattccgaaaagctgggcaaaggctacaccgctcaaaacgccaagctttgcacggtgatcaaagcgattgctgagggactggagaaattctcgaccgataaggacatgctgggcgatgcgtatgaatacctgatcggccagtttgcagcgggcagtggcaagaaggccggtgagttttacacgccgcagcagatttccagcatcctctcgggcattgtcacgttggacagtcaggagcccgcgaccggccaaagaaagcatctggaaagtgtgttcgacttggcctgtggctctggctcacttttgctaaacgtccgccatcgtatgggcccgcgcggcatcggcaagatcgttggtcaggaaaaaaacatcaccacctacaatctggcgcgcatgaacatgctgctgcacggggtgaaggattctgagttcgagatctaccatggcgatacgctcaccaatgaatgggatgcgttgcgggaaatgaacccggccaagcagccaagatttgatgcggtggtggccaacccgccatttagctaccgctgggagccgaccgaggcactcggggaggatatgcgtttcaagaattacggtctggctccaaagtctgctgctgacttcgccttcttgctgcacggtttccactacctgaagcaagacggcgtaatggccatcatcctgcctcatggcgtgcttttccgtggtggtgcagaggaacgcattcgcaccaaattgctgaaggatggccatattgatacggtgatcggcctgcctgccaacttgtttttctccaccggtattccggtgtgcattctcgtgctgaaaaagtgcaaaaagcccgatgacgtgctgttcatcaacgcggccaagcactttgaacctggcaagcggcaaaaccgactgcaggacgagcacatcgacaaaattcttgatacataccagcaccgccgagaagaagaccgctactcgatgcgcgtgtcgctggagcgtattgagaaggaaggctataacctaaacatctcgcgctacgtgagcacgacggaggccgagaaggaagtagacctcactgcggtgaattcgaaactggtttcactggaacagcagatcgaggcagccactaagcggcacaataacttcctaaaggaacttggattaccaccgttgccttaa

SEQ ID NO: 440765 - DNA, 1224 bp, Serratia marcescens
atgagcacacacaagaccttgaagtcgctagtggtcaggcttcgtgacgatctgaacaaccccacgaagcccaccgcgctgatcctgatctacgcctacaaccgcactggcaagacccgcctctcgatggaattcaaggacgagggcaaacgcaaaacgaggaagaatccgaccggtacgcccgacacgctctacttcaacgccttcaccgaagaccttttcgtttgggaaaacgacctggaaggcgacagcgtgcgtcgcctgcaattgaacgaaaagtcgtccttcttcaacgcaatgacagagctcgcgctggacgagacgattgccagatacctttcccgctatgccgatttcgatttcgacttcacatacaaggaggttcagcagggcaaggacacgatatccaaaccggatttcgttagcttccgaaaaggcgacgacctcaacatcaaggtatcacggggcgagcagaatatctttatctggtgcatcttcatggccatttgcgaacggatgctggatgggcatgactcctatcaggggaagaagtacctctatatcgacgacccgatctcgtcgttggacgacaacaacgcgatttcaatcgcttgcgacttggctaaattactccgtcgcgcggccacgcggcagaatgccgaagcggtgcccgccccgatcaaggtgattttctcttcccaccatgcactgttcttcaacgtcatgtgcaatgaagttggacggaagattgacgatgcgccttcggtcgatcatcggcgctatttcctataccgcccgagcagcgatggaacctacacgcttcaggcgacggaagacacacccttctttcaccatgtggcgacgctcgccgaattgcagcgcgcagcggacccgaagaagggaaagctctacacctttcacttcaacgctctgcgcagtgtcatggagaaaacggcctctttcttcgggcatccgagcatcgccttttgccttaagacgatggacaacgaggtagatcgggcgcttttcaaccgtgccctgaacctgctaagtcacggcgcttatgctattcatgaacccacggaaatgggtgaagacaataaggaacttttccgacgcatcctgcgcgaattcatctcgcggtttgactttgctttacccacaattgttcccgctagagccatagcaccggcgccagccattcaagaagaacctaaaccatga

SEQ ID NO: 440766 - DNA, 1248 bp, Serratia marcescens
atgcagccagaaaagaaaaatgacttcgagccaaaactgaggttccccgagtttcggggtacagcggaatggaaacttgtccagttaaacaagctagcaaaacgctgcacccagaagaatcggaacggcacaatagcacgagttttaacgaattcggcggaatacggtgtagttgatcagcgcgattactttgataaggatattgccactcaggggaaattggaaaattactatgttgttgagaaagacgactacgtatacaacccgagaatatctgcagcagcacctgtaggcccaatttcgaagaacaaagttgcagttggtgttatgtctcccttgtactccgtgtttaggtttgacgacaataacaatgatttctacgcctactatttcaagaccacgggctggcatcaatacatgcgtcaagcttcgagcacgggtgcccggcacgacagaatggccattacaaataatgatttcatggccatgccccttccagtatcaacgtcggaagaacaacaaaaaatcgctgactgcctttcctctcttgatgtgctcattggcttagaagtgcagaagatcggtgcacttaaatgccataaaaaaggattgatgcagcagcttttcccagtcagaggcgaaacccaaccccgcctccgtttccccgagttctatgagcagggggagtgggaagagaagcctttttctgcgattgttgacctcatctcgggaatgcatttgtcgccggataaatacagcgagataggagaagttccgtatttttctggcccatcggacttcatgaatgaatcgtctaatgcaaggaaatggacggctttgacagctaacgcagctagggatggcgacactctgattaccgttaagggtagcggtgtcggagaagtctggttttccagcttgcctgcagtagcgcttggcagacaattaatggctgttcgagcgaaggaaggtcaaatccgtcgttttgtttttcaatttctgcttacgaagaagcggcgattcgaagtcttgggggcgggcaatctaattcctggaatatcgcgacctgacattctcgatctaatggctttctttccagagcctccagaacaacagcgcatcgccgattgcctcacctacctcgacgatctgatcgctgccgaaacccgaaagctcgacacgctcaagacccacaagaagggcctgatgcagcagcttttcccccaagttggggaggctgtcgcatga

SEQ ID NO: 440767 - DNA, 2985 bp, Serratia marcescens
atgacaacaacagaaaaccaaatcgagcaggatctggtctccaagttggaagatctcaaatacacatctcgccctgacatccgcgaccgcgttgcgctagaacagaactttcgccagcactttgaggcgctcaaccgcgttcgtctaaccgacagcgaattcgcacgactgctggaatccatcatcactcctgacgtctttgctgctgccaagcacctgcgcgagcgcaacagcttcgagcgcgacgacggcacgccactctactacacactggtcaacatcaaggactggtgcaagaacaacttcgaggtggtcaaccagctgcgcatcagcaccgactacagccaccaccgttatgacgtgatcttgttgatcaacggtgtgcccgtagtacagatcgaactgaaaacactggccatcagccctcgccgggcaatgcaacagatcgtcgactacaagaacgaccccggtaacggctacacgaagaccttgctgtgcttcttacaattgttcattgtcagcaaccgttcggatacttggtatttcgccaataataacagccgtcacttcagcttcaatgccgatgaacgcttcctgccgctttatcagtttgcggcagaggacaaccgcaagatcacgcatcttgacagctttgccgacgccttcctcgtcaaatgtacgctggcgcagatgatcagccgctacatggtgctggtggccagcgagcaaaagctgctgatgatgcgcccatatcagatttatgcggtcaaggcgattgtcgagtgtattcaccagcgctgtggcaatggctatatctggcacaccacgggtagcggcaagacgctgacctcgttcaaagcatccaccctgctgaaagacaacccggacatcgacaaatgcctgtttgtggtcgaccgtaaagacctcgaccggcagacacgggaggaattcaacaaatttcaagagggttgtgttgaggagaacaccaacaccgaaacgctggtgcgccgcctgctttctgatgattatgccgacaaggtgatcgttaccactatccagaagctgggcttggcgctggatggcagcaacaagaaaaactacaaagagcgactagagccgctgcgcaaccagcgcatggtgttcatcttcgacgaatgccatcgctcgcaatttggcgagaaccacaaagcaatcaaggagttcttccccaacgcgcagctgttcggcttcaccggcacgcccatttttgaagataacgccagctatcagcaaatcgaagggcagcaggccagcttcaagaccacggcggacatcttccagcagcaactgcacgcctacaccatcacccacgctatcgaagaccgcaatgtgctgcgcttccacgtggactactacaaaccggacagcaagcccgacggcaagaaggcacccaagcccggcgagccactggccaagcgcgccatcgttgaggccattctcaccaagcacgatgccgcgaccaatgggcgcaagttcaacgcagtgttggccactgccagtatcaacgacgccatcgaatatcacatgttgttcaagactctgcaggctgagaagctggcagatggttcagactttcagtcactgaatattgtctgcgtattctcgccacccgccgaaggcaacaaagacgtgcagcagattcaagaagatctgccgcaggaaaaggcagacaacgaagaagcgcccgacgaaaagaaagccgcgctgaaagccatcattgccgactacaacgcccagtacggcagcaaccacagcattggcgagttcgacctctactaccaagacgtgcaaaagcggatcaaggatcagcaatggcccaatgctgatctgccgcacgcgcagaagatcgacatcaccatcgtggtggatatgctgctcaccggctttgactctaagtacttgaacacgctgtacgtggacaagaacctcaagttccacggcttgattcaggcgttttcacgcaccaaccgcgtgctgaacgacaccaagccctacggcaacatcctcgacttccgtcagcagcaggatgccgtcgataccgctattagcctgttctccggccaagccagcaagcctgccaaggaaatctggctggtggacaaggctccagtggtcatcgaaaaactgcagaccgccgtgcaagcattggatacgttcatgcagtcacaagggctagaaaacaagcccgaagccgtggccaacctcaagggcgacgccgcacgggcgcagttcatcaacctgttcaaagaggtgcagcgtctcaacacacagctcgttcagtacaccgatcttacgccagacaacaagaccagcatcgagaaaatcctgcccaaagatcagttgcagggatttaagggggtgtacatcgacaccgcccagcgtctgaaggaaaagcagaacaccggcggcgacaagaccgatccggcagtacagcagctcgatttcgagtttgtgctgtttgccagcagcatcatcgattacgactacatcatggcgctgattgcacgctactccagccagacgccaggcaagcagaaaatgagccgcgagcaactgattggcctgattcaggccgatgcaaagttcatcgatgagcgcgacgacatcgccgagtacatcagcacgctggaggtaggtaaggcactggacgagaaggccatccgtgctgggtttgacagtttcaaagcagagaaacacgcgagggctttggcgggcatcgcggccaagcactcgttgaattctgctgccctgcaaacatttgccgaaaccaccttgcgccgcatggtgttcgatggtgaccaattgagtgagctgttcgccccgctggaactaggctggaaggcgcgtaccaaggccgagctgaccttgatggaagacttaattccgctgctcaagaaactcgcccaagggcgggagatttcagggctgggtgcgtatgagcaataa

SEQ ID NO: 440768 - DNA, 441 bp, Serratia marcescens
gtgaatcaaccccaatgcgtcgagagcctgagccgcgcccagcgcgagcggctagcctacgtcgacttccggcttaaattcttcggtgagatcgattgcccaaacttgattgagcgcttcggcgtggatccggccggggcaacgcgcgacttggctctgtaccgggaaatcgcgccgcagaatatcaccttcgacagtagcaacaagatctaccgcatcgggcaggcgttctccccgctgttcgaccacgcacctcagctcgtgctgtctgcgcgggctctgcgtctcggagatgatgtgaacgtcgcaatgaagattgctgccgtgcgagtcgcccatagcgctgagcagcccgaggatggatatgctggtactggtctgccgggcgaactacaccaagcggccagtcgacatccgctaccactcgttgagcagcggtga

SEQ ID NO: 440769 - DNA, 720 bp, Serratia marcescens
atgacagacgatagtgctcttgatggcatttttgattcagtaaagagggaagccgagcgttttatgccgtgctacagcggtagtgatgatgatgtcagtagttacaatgaactccgtgaccggtgcgagagtaaagcaaaagaaaaaattaataaattcaaggaggaaggctgccatgtcatggaggatacttttgaaagcatacttgaagatgcttatttttctgcacaatggaaaggaaagtttggaacgtatcttgctattgcattcttcttttaccactgggggttatattgttattccgctggtcgcagacgtgagggattactatttatggtaagagccgcaggctgcggtgggatgtggcagggggctggtttacatgctaactgggtagaggctactgaattagtattacaaaataagcaagataatgggaagaaaggggggaaagcgacagccacggctttagcacccgcacgcgatgagttaaagcggttgcttaaaataaactgcccggcagaaggatggaaaactaaagctgcagcaatcggtgctatcgtaggtcagcttgaggtttttgttaacaacaataaaataaatttgaaaaccgataatctttataatgcaatattaacatggtgtaagagatatgatgatttacgagatgtattggagagctctttacaaaagaacatgaaaaataaccgcgtggattga

SEQ ID NO: 440770 - DNA, 1164 bp, Serratia marcescens
atggctatttgtaaaagaaataactgtacgctctcaattggtgaattacctgatgagcgtaaattacgcatatgcccaaaacattatcagggtaagctatctaatgcagctaaaagagcccaaaggtggggtctgacgtgccagtacccgccctgtggtattagtctgtctggtactcgcaatcaacggttttgctgtattgagcatcgtaataaagacagaaggctcatagatgacgatgccattgtcagtctggtaaaacattcttactggatcaatgtggagtctatgctgaagaataatcctctcggactggggagtatcacaagccctgatgacattgctgatctcatccggttgtaccagcgcaaagcaggctaccagaaagcttacaatactctaaatgggcaaagggttactaattcacaggggcaggttattaaacgcctgataccctggctggagctggagttatgtcacatacatcctaattccaaagggggagctaatacagcggataacatcattattgcccctgcgttgattaacaggatgatgaaggacactattcccgtgagcaaaaccccaggaacgttcagcggtataaaagcggcaggctctcccctgcctgtaaaatcgacgttattaaaggcgctcacgatgcaatatggtcaggatgagatacaggaagcgctggcctctgtcaaacatgtgacctttacggatctgagtgtaccacgcaggctgtttggtacggacatttatgcttatccaccattactgaagcttttaaaagaggagacaatgcgcctggggctctggcgtttgagggagtccattaattctattgaaagcagtcactggctgtctgctggtcctgcaaatgagttatttgctgtcgctgcctttcatgccatgttaaatggggatgcagataacttacttgaggtattttccagtctgcacgaagacgtaatggaacgggccaggaataaagaaacattaaactatgattattatcaaaacattctgaaacggtatgcatcccgttatttccaaatagacctacgcaatcaggagtcatgcattttattttacaactcatttttcacagcgccgcctttggacaaacatggggttttaatcatacctcatcacttctaa

SEQ ID NO: 440771 - DNA, 234 bp, Serratia marcescens
atgccgtatgaactgtctcaccttaatgacctgtgggatgcgctggggaaaacaacggtcggggatgaggacggtgaccttgtgaccgacgaacccttcctgcatttcccgacaggtacccctctcttccatatctggtcatggtttgaatccctgcacgacgggttcgtcgttgccgtgaaactgtacaacacatctgcgcccgacgcgtcaaccgacaggaaaagcaaatga

SEQ ID NO: 440772 - DNA, 546 bp, Serratia marcescens
atgaaagagcgcccagtgattttcaacggcgagatggttcgcgccattctcgacggccgcaagacccagacgcggcggattgctaaagctgacaactccaatcacttgcttggctgcccattcggccaggcaggcgatcggctgtgggtgcgagagacattcatggacttaaccggcaccggaattgaagccactaccggaaagtttgagggattagcatatcgcgctgacaccccggctggaagttatggcgatgaagtccgcaaagagtatgggctgaagtggacgccttcacttcacatgccgcgctgggcctcccgcatcacgctggaaatcactgccgtgcgcgttgagcgactgaacgatatcagcgaagaggacgccaaagccgaaggcgtgaaagccggtgtttgccctggtcacgaacacatgatgcatcaggtggcattcagggagttatggcaatccatctacggcgaagaaagctggaacgctaatccctgggtgtgggttatcgagtttcgtcgtgtggaggtggaaaagtga

SEQ ID NO: 440773 - DNA, 873 bp, Serratia marcescens
atgaaatttgaaaaagccatgagaaagaaagccaagctacggctggcacttaccgggccgagtggttcaggaaagacatatagcgcgcttcttgttgccaaaggaattggcggaaagattgccgtgctcgataccgagaaaggaagcgcttcgctctactctgacgttgctgattttgacgtgcttgagctggagccgccttttgcgccggagcgcttcatagaggcgattaacgcagctgagcaatccggatatgacacgttggttctcgacagtattacgcatgaatggagtggtgtgggtgggtgcctggaactggtagacacaatagccaaagcgaagtttcgcggaaactcctggtcagcatggagtgagataaacccacgccatcgcctcttccttgatgcaattctgcgctcgccaatgcacatcatcgcaactatgcgcagcaagactgaaacggctcaggtagaagagaacggtcggaaaaaggtcgcgaagcttggcatgaagtcagaacagcgagatggggtcgagtacgaattcacaaccgtcctagatataggtcatgaaacgcatcatgcgatcgccagtaaggacaggacgaagctattcagcaattccgacccagtggttctaagcgagcagacaggaaagcagcttcttagctggcttgagtcaggcgcgaacccggctgaagagtcactgaaggcattcacgcaagccgcagcgaaagccggaaatattgatgagctaaaggctttatttgaagaagcatggcgcacgctgcgcgggacagaatatcaggcaaaagccaaggaaatatatgacatccgcaaggcggaaattgagcagaatagtgaggcagcataa

SEQ ID NO: 440774 - DNA, 159 bp, Serratia marcescens
atgagctatttagtagagctgcagccaaccgaagatcaagtagcagcgggaattgaacaacttcaagaagatttggacggctacttagatgatttagatgatgatcagctatcggatattgtgacctttatttggcaggccatgttagctgcaagataa

SEQ ID NO: 440775 - DNA, 1005 bp, Serratia marcescens
atgagcaccgacaaaaagctggaagacggaaaagaaccaaaaggaagagccaggggtggcaaagctctggcttccaagagaactgcagccgaaagaaaagccgcatcagctaaagcagttgcagccaaaaaggaattggcatccctaccaattgctgagtatggatcaagcgacaccccgcttcgcattggtgatgttgaaattcaatgctacgtccttgatgatgggtctcgcgttctatcgcagcgagggatggcatctggactaggaatgtctacgactgccactgagcgactgcttaattttgtgggtggagaaaggataaagccttttataaacaatgacattttggtgctgatcgaaaacccgataaagttcaggcatcgcactggtggtggggtggcgtttggatacccagctacaattttagctgacatatgtgatgcaattttagccgcaagaaaagaagggaaactgcaaaaacagcaggagcatttggctgatagagctgaattgttagtacgtggctttgctcgtgttggcatcgttgctctgatcgatgaagcaactggatatcagcgagacagagaaaaaaatgcattagcaaaaatacttgaggaatttgtagccaaagaacttcgaccttgggtaactaccttcccagctgattattatgagggattattcaagatttatggattgcaataccctccctcgggtaacaaaagctggcgcccatcatttatgggtaatgttaccaataatgttgtatatagcaggcttgctccagagttacttccagagcttaagaaagcagcaacaaaggcagaaagaaaagccaagcttcatcagtggctaactgatgacattggtcacccaaagcttcgtgagcacctagcatcaattgtaacattgctgaagatatcaaaaacacctgagcaattttacgaacttgtcgacacggtgcacccaaagtttgaaataccaaaccaatcagaagaataa

SEQ ID NO: 440776 - DNA, 660 bp, Serratia marcescens
atgggtttgctctcaatcaatatttcttgcccccactgcctaaaagataatgccgtacttgctggttttagtgagagaaaaagaagcgaaatgccaatttatgacgttgcttttgcctgcagaagctgtgagcaagcaggaatcgcagttgttttcaccagagaacgcagtggcccttatcatctttccaagcaaaatagtgacattaatttaacggttcctgactcagctgagcgatttactctaattgctgttcatcctaagcctatatctcacacagcccctgaaaacactccccctcgcgcggcgtcttcttttgttgaggcaagagagaacattcaacgaggaagatttgaaacagccgttatgttgtgtcgtaaagttttagatattgctactagaacacttctcggcgatgaatccgataaagagtctctttctaagcgaatttcgatgctgcatggtaagggaaaaataaccgagcagatgaaagattgggctcatatcgtccgcatcgactccaacggggcggtccattctgacgaagagttttcccaagaagaggctgaagagatgatcggcttcactgaagtgttcttgatctactcattcactcttcccgaaatggtgaaagccaagcagattaaacgagagtcataa

SEQ ID NO: 440777 - DNA, 180 bp, Serratia marcescens
atgaacgccataaccatcccgggaattatgaaagtgccgaagaagttcggcacagatatctgctgcagctgcttatcggtgttggctgacgatgagtgctatatctgccagcagtgcaatgacgagatagaccgccaggctgatgaggctatcggaaacgtggaggatgatgatggctaa

SEQ ID NO: 440778 - DNA, 645 bp, Serratia marcescens
atgagcaagccagactgggaggccatagaaacggcataccgaactggctcgcaatcagtccgggaaatagccgcgcaatttggcatatcccacgcagcaatcagcaagcgggccaagaaagaatcctgggatagagatctgcaagctcgcatacaggcaaaggctgatgcgttggttaccaaaagggaggttaccaaaaaggttaccacggaaaagctggtaaccgagcgtcagatagtcgaggccaatgcagaggtcatagccaatgtccgaatggaacatcgcggtgatattcgacgggcccgcacgctgacaaattcgcttctcgaagagttggagtctgagtgttctgacgttgctgcattgagtcagcttggagagcttctgaggcgtgaagatgacaagggtatggataagctgaatgacctctaccataaaatcatcagccttcccgggcgtgtgaaagccatgaaagacctggctgacagcctgaagaatcttatcgcgctggagcgacaggcatatagcctcgacgacccggacgcggggaagcaatcgcctgttggtgataaaacagatgacgaccttactcgccgcattcaggagttgatgcatggaaaacctgacgcgggagcaaaagcttga

SEQ ID NO: 440779 - DNA, 876 bp, Serratia marcescens
atgacctctgacaaaaccctaaagcaagcgatatcaaatattactatctggcgcaaaggtgaacagcgtgcgccacataagccattattgctgctgcacgtcctttcacgctatcgtcagggtcatgagcgcctgtttagctatggttctgaaatctacgaacccctgttggatctcctggaacgttatggatcgcagcgccgtgatcagcgcccagacatgccgttctggcgtctaaagggcgatggcttctgggaactacaaaacgcggaactgtgctcaaccaatggtagccgccagccgccccgtcgtgaacttatcgaatataatgtcgcgggtggatttgatgccgataattttgcgttggtggcaaaaaatcacaggttaattgatacgctggcgcagcagctcctggaggcacatttcccggccagtattcaggaagacatcgctgacgagatgggttttgatattcgcacctctctccgtcaacgcgatccgaaattccgccagatggtgctacgtgcttacaattatcagtgcgctatctgcggctttaacatgcgccacgacaatgcgccgattgctctggaagctgcgcatatcagatggaagcagcaccatggcccttgtgaagtacccaatggcctggcattgtgcgcaatccatcataaagcgtttgatcgtggttcgattggttttgatgaaaatatgcgagtgatggtttccggcgcggtaaatggtggtggggtggtacagcggctgttctgggattttgcgggaaaagcgattgcgttgccgccggttaaagaaaattatccgggcgagcagtttgtggaatggcacaggaaagaagtgttcagaggggagcattga

SEQ ID NO: 440780 - DNA, 966 bp, Serratia marcescens
atgcccttagatttaagtaacactttagttattggcatcagtgcaactgcgcttttcgacatgagcgaatccgatcgcatgtttcgcgaaacgtatgcgaccgatcctgatagcgccattgaaaagtatcgagcctacatgctggaacacgaaaaccagcctttacaacccggaacaggctaccccttagtcaaagcgttgctgggtctgaaccggtaccgccagccggatgataaatcgccgttggttgaggttgttgtgatgtcgcgtaatagccctgatacaggtatccgcgttttgaataccatccgccatgacaaactcgatattacacgttcagcttttaccgcaggcgaaaccgttgccgattaccttgatgcctttgatgtggatctgtttttaacaactaacgttgaagatgcgcaaaaggtgattgattcccgattctgtgccgctgcaatcctgaaagatcctccttctgatgcatctgatatcccggaagggcaagtgcgcattgcttttgacggtgatgcagtccttttttcagatcaaagcgaactggtttataagactcaaggaatggccgcttttcacgcccaggaagatgcgcagcaggatatccctatggaagagggtccatatgccactctgttaaaaaaaatagccaagcttcaggaacgattgccaacccgcgttgaatattctcccgtccgaattgcactggtgacggccagaaacagcccttcggaaatgcgcgtcattaaaacgctgagaagttggggagtatatgtcgatgaggctttttttctgggcggtgtagagaaaacaaaagttctgaaggcgtttaagccacacattttctttgacgatcaggatgtgcatttgatcgcagcggcaaaggttgtaccttctggaaaagtcccttatgccagtaactccgaacttgcagaacgtgaagcatcgtga

SEQ ID NO: 440781 - DNA, 624 bp, Serratia marcescens
atggtgatcaataaggatgattatgcagatctttctaaatcaggccaattccatatagctaaaaaatttgattcattaagagacttgtacgcacaatcatcaaagtcttcaaaggcatacagtgaatccagaggatcagatcagagggcatactcaacaatcaacgttgaagatgtgctaaaatggtacaaatcttctaaaggagatagctcgagtatgtcatcagtaagtcgtgaagaaatagatgcaaagcttggccaaagcaaggcggaagctgaagctaccgcagccttagttcgcgccgagatagcctcatttcgagaattccaggctcagcaatttgcaactatgaacacctcccttggcgagataaagggaaacatttcagcctctaacggcgagatagcgggcctaaaaggacacatagacggcctaaaaacatccgtatctaccacccagtggctagtgggggcaattcttgctattttggctatcattctagccatccctcaagtgcaggtttactttaagcctacagagaaagtagaagtatcatctcaagttacgccaaccgcacaggagcaaccttcggctaatggtagagataacccatcgcagaaatag

SEQ ID NO: 440782 - DNA, 267 bp, Serratia marcescens
atgacatactttaagagaagggattggttttttgtggccttagcggtgattggtctttcgctatattttatttttgatgttgatttttatgcctacagctggccgatcaagctaggtatcataggattaataattagcctgtatattaatattgtagagatacctggggtttttggtgagcttgcaaagcaaagagaaatcaatgataaattgaatgacaaaatcaatgacctacaggatatgttcattgattccagtcgcaaatag

SEQ ID NO: 440783 - DNA, 1455 bp, Serratia marcescens
atggctacttggcaacagggaattaactcaggtggatttttggctgggattggcggccagaacgttaacgcaccacaagcaagcgatattaacaccacgctaggcctgatccgcgacaacaatgacatcgcccgctctggtgcaaacaacgttgctcttaccggcctgcgcgggctggcaggcgtcgctgatatctacaaccagcaacaacaacagcaacgccagcaggagtttcagcagcaatatgccaatgctttcaaatctggcgatcgtaatgcaatgcgcgacctggcagtgcaattccctgatcagtttgaggcagtgcgcaatggcatgggatttatcgacgatgaccagcgtaacaccatcggaaatctggccactcgcgcgcaattggcatcatcacaaggccaagcagcgttcggtaaatatctcgtagataatgcggatgatatgaagcgagttggcttaaatccggtagatgtggccgctatgcagcagcaagatccgaaaggcttctctgacttcgccggaaatctggctctattctcccttgggcatgataagtatttcgacgtgctcgataagcagcaggggcgcagactggagcaagggaggctggatgaaaccgtccgcagcaatcaggcgagcgaagccaacacgattcgtgggcagaacatcacgatgcgtggtcaggatattagcgcgcagaactcaatgcgcagcgccggcggcgcagttccagccagtgttagagagtatcagtacttcaacagcctttcacctgagcagcagcaaacatatctgcgagtcagggggcgtccaggtggtgatgctgataacacagtccaattgtcagacggccgaaccgtaaccgtgtcagggaagttgcacggccaaggtgccaatgccttctatgaaggtaaggatgataacgggaatatggttcgagtgcctgctggcgccatctcagccccgtcaacatctgccgcaagcgcacaaaactacgcgatgaaaaaagacctagatgcaatcctagatgcaaatcctaataaactaggtttcatgactggtatatctggaggaagcggaacaccatcatgggatgctgaagcaagaagtagatggaacggcggagatcagcgtcagcttttcaatgcaactaagcgcatccaagggaaaatgcagaaccagggtattgctgcggcaagggatatgggggctagcgggattaataccgttgcagaggcgaaaatgtacttccagggcatgccgcaggttgactactcaagcccggaagctatgcagcaatcaatgggtgacatcaaggaatacacggacaattacaacaagcaatatcaggtaaatgtaggcggaaagcgccaaggtaatagccaagagaaagcgcagctttcagatgacgatctgttaaacaaatatcttggaggcagatag

SEQ ID NO: 440784 - DNA, 210 bp, Serratia marcescens
atgtcgaaaacaatgctctacaaatcaggagcgatgatcacctgcggaaggttcaatcttgattacgtgattgttgatgaaggcgaggtggccagttatctggcatctgggtggaagagccatcctgatgacactgagtctgcagaacctgaacggaagaaaccaggccgcaagcctaaggcggtagatgatggcgaaaacaaagggtga

SEQ ID NO: 440785 - DNA, 1254 bp, Serratia marcescens
atggctaaccaattagcaaaagaccttgagatcatgtttgaaaactacgtggaaggctttgaagctgcctgcgtggtttcccgcaacgccaagaagttccgtcctggcgacacatcaatgcagcgcgcaggcgatgtgatttatcgtccacagcattaccacatgaacgtagaagatggccttgatctgactggcaagaccccaaccgatctcgttcagcgcctggtgccttcggtattcaaagagccgaagaacattctttacacactggatgcacgcgaaatgcgtgacccggaacataaaactgaagcagggcgtgcggctggccaacgcctggcggcgcagattgattctgacctgatcaccacggcaactcagcgcgctacaaacgttgtggccatggcaaacaacacttctggcggccaaggccgagatctgtggaacgcggccgctggcatcgatgcaatcatgacctcaatcggtgtgcctcaaggcattaaccgccgcagcttctggaacccgttcaactacaaagatctagctggcgagctgggcatgcgtgcgtatgcgcagggcgttaccctgacagcctacgagaaagcgcagatccctccagtggcaagcttcgacagctacaaaaccgatatctctggccgcgttcctgctggtacagatacggcaatcactcttgccgcagctcctgcacataaagtagtggctaaagatgccaatggcatgcctgttgataaccgccaaggcacaatcaccgtatctggcgctggcctgcaagttggcgatgctttcaccatcgctggcgttaactcggtgcatcagatcaccaaggacaccactggtcagttgcagaccttccgcgtcttggcggtgagcggcactaccatcaccatctcaccgcaaatcctgccgccaaacaacgcagatgtgccatcacgcccttatgcgaacgttgatgctaacgcagctaacggcgcagcgctgactctgctgaacaacaacgctgcacctgcgaacctgttctgggctgacggctctgtcgagctgatgtatgggaagctggcattccctaccggccagggcccgcaggtaatgactgccacgactgagcagggcgcaacgctcatcatgtcgtatgcgttcgaccacatcaaaggttcaactaccgcgcgctttacaaccttgtatggctgctcggttctggttcctgaatatgttggtttggttatcgccggtcagtaa

SEQ ID NO: 440786 - DNA, 873 bp, Serratia marcescens
atggacaatcaggcagagcaacaatcaccagaagtagaacttgaagagcattcatctgagcaaattccagatgatgcaagtcagcattcttcaagcgaagaggatgagcatcaagatactgctcaacattcaaatgaagaaggcgaagaagaagagttctatttcggcgatgaaatgctggtttcgccttccagcgaagaaggagcagatcatggccttgttaagcatctgcgagggacgatcaaagaaaaagagcgcgagctgaaagagcttcgtcgcttatctcagcaacaacctcagcagcaagttatcaatcaaccacctcaaatgccgaagctctcagatgagggtatcgactatgacgaggagatcttccagaaaaagctagatcagtggtcgaaagatagcgcgcaataccaaatccagcagcaagcaaaatcacgccaagaacagcagcagaaagagctgtatcagcagaagttagctaactaccagcagcgagccaaatcggtgaaggtggcaggttaccaagatgctgagcagttggttatggatgaggttcctgtcgagattcaaaacgcaatcctgtttgaggctgaaaagcctgagatggtggtgctggctttaggtcgcaatgcagaactccgccgtgaattggcatcagctaccaaccccatagctgtaggtcgattaatcgaacgtatcgaatcaaaggccaaaacaatgccaaaaccaaaatcaaccgcggccaccgtcccagaagtaaaaggcggaaatggcgcggtaatcaacaatctcgacaaattgaaagcaaaagctttggagactggcgattggagcccgtacttcgcagcgaagcgttctaaaaaataa

SEQ ID NO: 440787 - DNA, 2205 bp, Serratia marcescens
atggcagacgataaaaagatggatgactggcatcgtaaggcgctatgcaattttgacaatgcgtattcgtctacccaggatatgcgcgagcagatcgttgaggctcagcgctttgttcgagtgtccggggctcagtgggaaggaagcaccaacgcaggttactcattcgatgaggggcgcttcgagcattacccacgtttcgagctgaacaagatagcccgagagtgtgatcgcattattggtgagtatcgacagaaccgtatcagcgtgcgatttcggccaaaagataaccaggcatccgaggctctcgctgaaaagatgaatggcaagttccgtgccgactatgaagaaacttctggaggagaggcctgcgacaacgcgtttgatgacgcggtaactggcggcttcggatgctggcgcatgtgtgccgattacgaagatgagatggaccctagcaacgagcagcgacgtatcagtttgttgcctgtatatgaccctgccacttgcgttttctttgaccaagacagcaagcaatacgatcgctctgatgcgatgtgggccatggaaatgttctccatgacgcccaaggtattcgaagctgaatatccagagtctactgctgcaagtctaagtcgtgacgattcaggaacgcaatatgactggtcaactccagatgctatctacatcgcccgatactatgaagtccgtatcgagaaggtgaagctaagtgcctggcgaaatcctattaccggctctacagcagtttatgatgaagaccagattaaagacatcgaagacgagctgaaagatggcgagtttgagatgcttggtgagcggcaggtcaaaaaacgccgtgtttactgcgggcttatgtctggggctgaatggctggaagaaccgaagcgcatcccaggcgagcacattccgctcatacctgtctatggtcgccggtcattcgtagataatcaggagcgaattgaaggccacgcagcaaaagcaatggatgctcagcgactggaaaacctgatggtttctatgattgctgacaatgccacacaggcgggcggagatggaatcccggtagtagatgtagacatgattcctggccctcttgcaggacactgggcagagcgcaataagaagcgaccggcatacttgccaatggttagcctgaaaaacaaatcaggtgaaatcactgcgcaggcgcaagtaagtagctatacgccgccaacacagatgccaccggcactggctgggctactgcaatacaccggcacagctatccagcagatcaccggtgcatcgcagctcgaaaacatgccgagcaacgtcgccactgacaccgtagatagcatctttaaccgcatggatacgcagtcctatatctacatggacaacatggcgaaatccatgcgccgtgctggcgttgtgtggctatccatggcgcgagaggtatacggcagtgacacgccgatgcgcatcgtgaacgaggatggtactgatgacgtagcgctgatgaatggcgcagttatcgatcgccaaactggcgaagaggttgcgctcaacgatttatcgcagggcacctacgaggtgactgtagatgtcggccagtcgttctctactcgtcgtgatgccactgttaaatctttgctctccatgcttgcgcttattcctcctggcacgcctaagcacgacctcatctcctccatgattctcgacaatatggatggagagggcattgatgaactgaaagagtacaaccgcaatcagctactgctctctggtgttatcaagccgcggactcctgaagagcagcaaatgattgctcaagctcagcagcagcaagccaatcagccagacccggctatggttcaggctcagggcgtcctcatgcaagggcaggcagaactgcagaaagcgcagaacgagcaagcggcaattcaggttaaggcattccaggcacagacggatgctcaagtagctgctgccaatgtcgtcaagattcttgcaacggctgacagtcaacagaaatcagatatccgggaagccctgaagttactgagccagttccagcagcagagtggagataatgcccgcgctgatgcagatctggtgcttaaaggacaggcgcagggccactcacagcgcatggacgctgctaacgtcattcagaactcatcgcaacaacagccacaacctcagtaa

SEQ ID NO: 440788 - DNA, 936 bp, Serratia marcescens
atgggtgacgccgttgactggtttcacatcgacgaagagcccaaagatccgactatttatccccaggtgctgacgcgaaccgcaaccggcgacgcaggaaatggcgggcgcggcatcctgacctttacgccagagaacgggcgcacagaactagttatccagtttatggattcaccttcttctgcccagcactgcatgaacgttggctgggacgatgccccgcacctgagtgaccgcgtcaaagaggagttgctcgcatcattccctccgcaccagagagatatgcgtaccaagggcataccaatgctgggacatggacggatttatgatgccagcgaagacctgattacctgcgacccgttcccaatccccgaccactggtttgttatcgacggcatggacttcggctgggatcaccctcaagcgcatgtccagttagcctgggacagggatgaagataagttctatctgacccgcgcatacaaggctaagcagacatcgccagcagaggcttggttcgcaaccaagatgtgggccaatggaattcccacagcgtggccgcacgatggcctgcaaacggagaaaggatcagggctccaacagaagacgtattacgaagaggctggctttgacatgttgcctgaccgtgctacgtgggaagacggtagcaactcggtggaggctggtctgttcgagctatacgaccttatgcgttccggtcgactgaaagtgttccgtgggctgcgtgactggttcgaggaatataacttttaccaccgtgacgagaaaggtcgcattgtgaagatccgcgatgacctaatggacgccacccgctatgcatacatgatgcgccggttctccatccgttacggtgacattggcaggccgaaattcaatgactacttaaactacaacataccctgcggagttggatga

SEQ ID NO: 440789 - DNA, 1080 bp, Serratia marcescens
atgaagatagataaaaataaatttaatgaaatgatgaatcctgaaggtgtagctttgactcaaaacagcatacctgattcttgtaatagtttaccgtcaggagctatttctgacccctataattttgctgcaaatgttaaagcctttcttagaaaaaggatgcggtttgttaatgacaaattaaccggcgattgtttgtttattcttatccctaacgaaataaaaagagatgtagagcatttggggaagggagttgatagatttttttcatcaatgaatatagggataaaaggcaaagtaattctttcattagatgtgcgattatctaaggttagaatattggatgtaggttgtgattccagcacagacgaaatagaaatgcataatattttttcggcagagattgaaaaaatattaagcttaagtcctgtcaatattagttattgtcaatacgctcatgattgttccatgcttagtgctttcccagacgcaaaaaacgctgatgctgatgcagatatctatgatctaaatgctaaacaaattacttacaattgcgctgagcttgaaaagcacactgacgatttttatcaaaaagaacttaaatatcccagttccactatgatgatctgggataagcaaactgaatttaaacttatagcaaaagctgagacacgtatttccgcaagattgggagatagcttgcaaaataagttgggtaaggaaaatgtagctgctgagcctaatgtgaacagtggaaggattgacatctttattcattcgaatgcgatgggtgtagatcaaggtccatgcattattgagctaaaagtattgaggcatgaaaaaagcgataactacaaccgacgctggttatataagggagtcttacaagcaagagactatgctttagatatggatgccaaatctaaatatcttttttcatttgatgggcgtgaaaagaatagtgagtttgctgttatcccattagtcgcgggaaaatatgatgtgaaatacataaactatagaatgtacaataagacagacctggctcgtgatgaggaaattgaaaatcaagctgtttag

SEQ ID NO: 440790 - DNA, 138 bp, Serratia marcescens
atgatgaacggctctaagtttttccatgaatacttttttccaagctgcgaagccttgaatgaaatgttggcgtattcaaacgagaaaccgttcattttcccggttgaagccctgttggggattgcttttatcttctga

SEQ ID NO: 440791 - DNA, 564 bp, Serratia marcescens
atgacgttgctattctgggcgataaataacgctatctttgacaagaacacgccagagcgactcaagatcattacagatttggtcaaggcgggggcagacccactacagcctaggccggaagggagaagtagccccgctgaatttgttatgaaagcagataagggagtctggataaaatccatgttagatggggggctctctcctaatgcaaaagataaaatcaacaataagccaattatatttaaaagtattcttgcgaagaatacagagacattagaggtcatgttggattatggtgcggatataaatataagaaattcactgggtgatacgctgctcatcgatgctttagactatcactcctatgaccacgtcattcttcttttagaaaaaggtgccgatagcgatataagaggcaactcgggttggacgatgggcaatcagctgcaacggctgattaataggagtcaggacggcagtgaggcgaaagagtctcttgagcgcatcagagacgagctaattaagcgtggcgggaaatggccgcctgctcctgtcagtcaataa

SEQ ID NO: 440792 - DNA, 1122 bp, Serratia marcescens
ttggttaaaaatgtatatttcgatgagtcaggctttactggaaacaatctactttctaaagatcagccatattttagctatgcggcagtagttactgatgatatagaaagcaaagagtttgtcgaatacatcatgcagaaatattctataaatgctgatgagttgaaaggcagcactttagtaaatagcagaagattacaacccgcggtagatgaattacttaatcattttaaaggaagaatgcgtgtaatagttaaccagaaaaagtacgctctctcaggtaagttttttgaatatatttttgagcctgtactggccctcaaaagctctatgttttacagcctcaattttcatttatttatctcaaatattatgtacttttcattaactgccaaagatgaattctccgagttactacactcacggtttgaagacttttctcgaggtaaaattcacgttgatgaatttatcgaacctattggtgaatcaaagcattctgacatcatggctgaaattcatgatttcgccaagtataatatttctatcattgaagaagaatatgctggattagaaggtacaggtaccgataaatggttgttagaccttacaagtacttcacttcataatcttttgtgcgatattagtagcaagttcggaagtgtaagagctatctgtgatagttcaaaaccactaattacacatcaagatacatttaataaaatgattgggaaagaaaagatagtatatgaaaccttcaacaaaaagaagattccaataacctttaatcttgcagaaccaattgtactctctgattcaaaagtaactcatgggatacagattgcagatgtaatagcagctgcaagtgtatacgttcttaataataaaaaaaataaagaaaaatattataggaagtggctaaaactctttgaggatgaaatctactattggcaatgttgtgttgtgcctacacctgagaatttggatccgcagaattccaattctcaattaaataggtatattctacaggaaatcacagagagaagtcgtaactccatctcggtccttaatggtatcgagaaggatataactcgaatttcaagagcgttaaccatgctaagataa

SEQ ID NO: 440793 - DNA, 696 bp, Serratia marcescens
atgattgatataaaagaaaatcaaagtttggattgccttgcaataataggatctcatgctcgaggcgatgatgatgctaactcggatgtggacttgcttggtatcgtttctagcaatgatcatcaaatgattaatgcgaaaaaaataaatctatctgtatactctgagacgtatttaagaaaaatgatggtttctggtgatatatttgctttgcatatcttaaccgaaggaattcctcttattaatagtcgtctcttctatgatatatgtggctgttttaaatatagatctgattatagaaaagataggaaagtagcttatttgatggggagggtgatattgtcaaaggctaatgaaattacaaattggcacgttgctaataaaaggattacatggtgtataaggacatatttactatctctaatggctgaaagtaagaagcctatgttctcgaaagaggatatagctttttatggccatattgtccatgatactctttcttatcaagaatacttgatgttagttaatgctaagcagcaaagtggttactcccaacttatcttgagcttattaaaaagatttttagttgaaatctccagtagtaaaccgaatgagcaagaaactcaggagctacttttgaatgaaagtatattaattaatacttccgaacagataatgtttgatgaatatcattaa

SEQ ID NO: 440794 - DNA, 1323 bp, Serratia marcescens
atggaagagaaaaaatatcaaatttttgtcagttctacctttacagatttagaaattgctagaagaaaagttattgatatgattctaagtctttatcattttcctgttggaatggaaatgtttagtgccgatgatggcgaacaatggcaaacaattgagcaggctattaattttagtgactattatgtggttataattggtcatcgatacggggcattggcaagtgatggctacagctatacggaaaaagagtatgacctcgcaaaagcgaatggtgttcctattttagcatttataagaaatagagatatccctttaagagatggggaaagagagaccactcaaagtgggcaagataaattagatgcttttattaataaagccaaagcaagcaaaatgtgtgacttttggagttctcatgaagagttagtaggaaaggtttcagtggcgttacataaaatattccatagaaatcctcgtattggttggataagaagtagtggcggagtttcaaaagaaactactgaagaactagcacgattaagtcatgagaatagagttttaagagaaaaactcttcgagttggaagaaggggctaaaaaagatcatccagatctattagtaagcttaaatgactctaaagagttgtctttaagccttttccctgaatacaaagttgtaacaatgcctgggggaattagtctagaggatattcctgaagaatacatcgaatttgtcacggaaaagtctatagatgaatataactctaatatacctacacccgaagcgctggcacgatataataacttagctggcttttatcataaaataatgaacaatcgtctcgaggtagtcgccacaatctctaattcaggtagggtgagtgcttctaatgttaatgttgaaatcgatttccctgattttgtaacagtgttggataataatgatattaaaaaattcaatgaacctaaaagtattatacctacaagtccgataacagcagccagagcaagaaaaaatctctcaaggtttagggctggaaatttctcatctattgttgactcgaaagcagatgcgtctttctttcataatatatctcctttgctaaatgttccgaaagttaaaagtattaactactggctggatgtttctgatgggcgagtggatatttttgagaagaaaataatgcatacgaaaactgctaggtgcgatgagttctcaataattccaaaatgtcagggggaaggggttatcactatcaaaataatatgcgaggaatacaaagagcagacgatctttgaagtgccaattgttgtaaattag

SEQ ID NO: 440795 - DNA, 1914 bp, Serratia marcescens
atggatcctattgctgcagaaatattaaaagtaggtattagtgaaacagctacggtaatattcaagaaaatattatctaagaattggatagaggagtacaagaaaggaaaatgtataattgaacagttgacatctatagatgtgcatagtgattatgtagtgaaacacgtttctagagcaatgaaaatgagaaccatacatagctcagagaacgatgttatgctgaatgatatttatcaaccattaatgatttatcatgatgaacaagaattaaaagtaggggatggctttttattatcagacaataatataacaaacattattgggtttgcggggcaaggaaaaagcacaatcctcaggaaggtacttttagaatctattaaagtaggtgagaaaatacctttttttatggaacttaggaaaatagaaaaaaatggaatagtaaactcacttttgaaagtgttggatgaattaggtataaatgccactgaagagagcttgatagcattactcaagagtaataatgtcgttttgcttctagatgggtttgacgaaatttcatccggcatgagagaaaagatgctcgaagaaataatttttctgaataggaactataacttacaaataatcacaacgagtagagatggcacggaggtttgtacagagtcaggaattgttaactataaagttaagcgaataaaaagatctgatataatatcaatactcaaaaaattaagtctatctcgcgaggttgagcaggatactctgacgcaaatattttcaatgctaaaggaaaagaatactttagttgaaacaatgaactcccctttattagttactttgttctatatatgttacccacatttggactctattcctaataatgccattgaattttactcaaaactcttcacaacactttattttagacatgacaaaataaagaactacaaacgtgaaaggaaaagtagtattacaccttccgaagcttttaactcattctgtgccctttgctttaaatccttatatgataaccgtcaagattttacacatcattcaatattgcaatatactaaacaatcgcttagtttgtgtggtattgataactgtaaacctgaagatatggcatatgacttcatagatatcacttgtctgattcaaagggatgggtatgatagatatgttttcttacataagtcaattcaagagtatcatgctgctgagtatgtaaagtcgctatcattagataaaaaatcaattttcatttcagcgatactaaaaagtattaaatctgaatcaaaactgtcggctactgccaggtacctatatgaaattgataaagaaaatacatttaacctcctttgtaagccgttatgtgaggaagctaagatagataagtacccagacaataaagaagaattaattgaaagtatttataatgagttaacaggtggggttaaaatatctctaaataaaaaaccagaagctaacattataaagagtatagatgatgagaatgctggcttgtttggagaacacatatcttcaataggtccatttaagccaataatgaaatcattgtcaatatttactagatattatgagggggagaggacgaatccttataatgatgtgtttctcaatgaaatcttgcgtgaaagatatactaatgagatatttacagggaagtacaagatttatgaggaagagaatcctatcattaatgatgacggggaaaaacaagagccgtattacattcttatcgctgatgtcattgacagaataggaagaaaaactcatcttgttaataaaatttctgaaattactgaaaatatatatatcgatgcttataagggtaatatttcattaattgaaaggaaagaggacgcttttagggagattttaggtttctaa

SEQ ID NO: 440796 - DNA, 252 bp, Serratia marcescens
gtggggcagggtgatatcggtatgggggagatggcatggctgaacatcattgccattttgctgctgcgcaaggcggcgttcacctgtctgaagaattatgaagcgcagttggcgattggggaggatcctgcgtttcatccggaaaagctgaggatgaagcgggcgaaccattgggtggataaccgcgccgaggcgaaccgaatgcgtgaattgaaggggggcatcgatgagaatgctggactgtcgggctga

SEQ ID NO: 440797 - DNA, 741 bp, Serratia marcescens
gtgctggatgcgctggaacaggcgctgtgggcgagtcgcccttgcggtaaagatactcatcacgctgttgccgttaatcgttcaggtaagcgcctgttcgataaagcgttacccaacgatgaaaacaaactccggtcgttgatatctgacctgaaacagataggtcagatactgctggttgttgaccagcctgccaccatcggcgcgttatccgccgcagttgcccgctctgaaggcatacttgtcggatacctccccggactggcaatgagccacatcgccgacttacatgccggtgaagccaaaaccgatgcccgtgatgcgggcatcattgccgaagcagcacgtactctgcctcacgcgctacgcacactaaagctggctgacgagcaaatcgccgaactctccatgctctgtggcttcgatgatgatcttgccgcacaaacaacgcaggccagcaaccgtatccgtggcctgttgacccaaatacatccggcactggaacgcgttctgggcccacggctggatcatccggtagtactcgatcttctccagcgatatacctcaccagaaaaactcgcttcgctgggtgagaagaagctggcaacccagctctgcaaactcgcacctcgtctggaaaaacgccacaacaaggcgcttatcgctctcgcaagacggggttgcgacgtcctgttcgccatgatgtgtgacgggactttttatacccctacggcgtcataa

SEQ ID NO: 440798 - DNA, 219 bp, Serratia marcescens
atgaagagcatgggggggaccggtgcgctccgtggcaaaaaagtgcgcaccaccgtcagctgtgaggccgatgccgcacatgaccgggtcaaccgccagttcatggcggaacggccaggccaactgtgggtggcagacttcacgtacgtcagcacctgtcagggtttcgcctatggggcgctcattattgatgtgttcgtcggagttattgtgggctga

SEQ ID NO: 440799 - DNA, 822 bp, Serratia marcescens
atgacaattcgtctcctgatcgcctatgtggtagccctcggggttcccctgtcctctcacgcactactgaccgttagtgttacaagcgcgcccgcgaccccggctggttatttctctgctcgtatagcagggggttccgctgccgacagcactgtgaacccatgttggggtcggccggtgggaacgtgccgtcttggctttgttacgatcgacgagtcgtggcatcccttcggtattcctgtcgactataagacaaccgatcggggcggctggcggctggctaacggggccgaggacggggatttccgtaccctcggcgaatggtggggcgcggtgcttgacaagggccgcgaggggcgggattacctcccgctcaatcatatatcagaagggccgtgtgtgactgtggctggggtgggctcaacggggctggtactccccaactctgtcgtgggcaactgcgcgcggggcctcgtacaagccaaatcctgcgccctccttcctgctgatatctccgtggaactctcgactacaacggggcatgatataagccgcacacctgtacccggcgttcagctgcgctgcgacgacgcggccgatgtccgtatagagacgaacacgggcgaacgcatccccatgaacggagactccgcgtcggttacggtattggactggggggccggctttggaaaacccctggttttgcatgttcctaccaacggccttcgacagatcgcactgcacgtcaaaacggaaggggtgggcgctctgccgccaggggttatctctggctcgagtatagtgaacgtgacctatgaatga

SEQ ID NO: 440800 - DNA, 804 bp, Serratia marcescens
atgaaatatataataaatctaactattatctttgagccagaaagtaagttattgcttctaagaaacaataaccaactaactgtggggctatctaacccagccacccggttattaaatgagttcataaaaaacaataaaatagagttgacacgggaggacttaataaaacgagtttgggaagactatggattttcaccgtccagcgctacattgagtaatcatataagtgaactaagaaaagcattcgagacacttggcgtgagtaaaaatattcttatcactgtaccgagaataggtttcaagatggaggctgagatccaccctgagaccaaagaacctggcgaacaagatgctacagaaaagatcgggaatattctttcatcccatggtcctgcacccatactcatgagcgatgcaacctcattattaataaaaaccgactctgataagcatcccgtaagagggaagctattactgtttctcctaaccctttctttaataaccattgcaataactattacactcattgccctacctcaaaatgataagccaatgttaatcggcgttcacaatcaatgcaaaatttatatcctgaatggggataagcacggaactgagcaactcgatagcgcaaagaaaattctgaccactgagaggatagactgcacaaaaatggattttgaaatttattatatggaggctcgcccccaaaataatgtactcaaggttaattttatagctgcatgtacaaaaaatgataattcgagctataaaaattgcaataactacaaatttgttgagtaa

SEQ ID NO: 440801 - DNA, 696 bp, Serratia marcescens
ttggataacctcataccgttactgactgataagatttcccacgttgcacagaactcggaagacaactcgaagattatgaagaacacattggcattgaacatcgctatcattgacaatgataggttttatactgccgggctatttatggcgctatccatttactttaaaagtaaaaaaataaaagttgtgttcctctcagaggagtccgatatcaaaagtgcggatatcatttttcaggcaatacgcagcggggtattcgtcgcaccatatccccggaatggtaaaggcacaccgctttacttcgcgattacggataggaatgcccctcatttgcaacacttgtatcgtgatgttgaaaattccaacatattatcccggtatcaatctgctgcatcaatactgcaacacattgagaatacagactttaataaactactttcaactaagaaagagctgccagaatcggggctacctatccatgaaccacttacgccacgcgaatacgaagttttatctctcctcaaacaaggaaaaacacctgcttgcgcagccattaccataggagtcaaggaaaaaaccataagtactcataagcgagcagcaatgagaaaattaaatttcagacgtactaatgaactcttccattggatgctacagggtggcttatcccattgccggccaagaaaatcaaattaa

SEQ ID NO: 440802 - DNA, 192 bp, Serratia marcescens
atggcgacgaccctcaccccgactcacccgacattctgctttctgtttgcggccgtgcgccgttctgcgctgactgccgccccgcgtatcgtgcgcaccgtggcggattctgagcgcaacgcccgccgcgtgctggcccgtgactatgtgttgtcctttgccggtcgtctgccggttaaggcagcagcatga

SEQ ID NO: 440803 - DNA, 762 bp, Serratia marcescens
atggatgaactcttagatgctgttgccgagctagtttgtctggtttctcctgaaaagatacaagcgatcactggccgaattcgaaggactgaagcctgcaaggctctgctggtactgccaggtgcagtaggaactcccaaggcaagtaaagctattgagagactagcaattgcatggcgaaacaccatagtcagttcagatgaactagcatctatgcttcttgctgcaagccatgtttactttaaagttagctctgagcaaagtactgaacttgtatggactggtccaacaacaccttttgtatctgttcgccgtacagagcaagtgctgctacaaataatcaatgcggcaaaacagtctttatttattaccagctttgttgcctatgatgtgtcgagtattgtgaatgaattgaatatggctataaagcgtggcgttaacattacaatgttgctggaatcttcacaagagcatggtggtagtatcaatattgatataatcggtaagatgcagactcttatacctggcgcacatatttacgcctggaataataaaaacaatgaattttcagaaggtcgcgtgcatgcgaaagtaattgttgccgatggtcacacttgttttattacaagcgcaaatctaactgggtatgccatggagagaaacattgaagcaggagtacttattacaggcggagggattccagaagcccttagtgatcatctgtactctcttataaacactaatatcattagtctgatttaa

SEQ ID NO: 440804 - DNA, 2124 bp, Serratia marcescens
atgactaatctctctactgatcgtccaagctcagacccgatagaagacctgttcgggcacgcccctttcgcagaaagcctcgccagcagcatttgtcgctattcgagtaatgatggtttagtactggccctttatgggccatggggttcagggaaatctaccgtactgagctatgtgcgtcacttcctagaacaacgcacagaagaagaacagcccactatagtgacctttaatccatggtggttttccgggcaggacaacttagctcgcgcctttcttggtcaaatgcaggcggttctacctgccaaaagcgaaaaattcaagaagcttggtgatctgttaggggattttgcagaaggtgtaggtggcctaattgatttaagtggcatgaccggtggtgctggtagcaagttcggtaaattaattggaatggtcacaaagagaaaacccaaagacgttcctgccttgaagtctgagatcagcaaggtattgcaagacgctggaaagcgaattttgatagtgattgatgatatcgatcgcctcacccccgaagaaacccgtcagttatttaccgtcatcaaagcattggctgactttccaaatgttatctatttgctcgccttcgatcgagaagtcgcatcacaggccattgagcaacaaagtggtatgcctggcgagcgttatctggaaaaaataatccaagtgccatttgagctaccacccattgatcgtgtggcgctacgagcagctctgtttaagcgccttgacgatgtattaggagatacatcagatggtctcttcgaccattcctactggacaaacgtttttcatagcggccttgatccgttgttccaggttccgcgcgatatagtccggttcactaatacattatccgtaacctatccggcagtacgcaatgaggtaaatcctgttgatttcattgctcttgaagcacttcgtgtttttctgcccaacctgtacgatgtcatccgcacaaaccaagacaagttttccggccacagcagtgataaccgatataatggtaatccagaggccacggtagccttccatgagcagtgggtgcaaggattacctaaacagttacggtccagtatcagtgacctgcttgaacgcatttttccaaagattggacgaataggttatgaggccgactggttgagtcaatggcggaggaatcttcgtgcgtgtcatcccgacatcttcccaacctactttcgtatgactgttcctcctggggcaatcagacgtagcgaaatgctggcactgttaaacttggcagaaacaccacctgccttgggcgaagcgctaattcgtgctacgggtgtgaagcgtccagatggcctatcgaaagcacgggctctgcttgaaaggttgatggatcacgttgagaaagacatatccgataaacacatctcagttttcattattgtacttcttgatattggtgattcgctgatactggacagtgaccatcaaggttcatttgattttggaaacgaatcacgtattacacgtgtggtttatcaccttctcaaacgggtcgacccaacgcaacggcatgctctccttatctccgctatcgaccaaggcaaagccttcggagtacaacatttttttatcgctgcattgtccggcaactctgaaaaagagtcgatcattgattcaactacccttgatgatctaaaaaaatgctggcttcaaggcttgaaaacgaagctcagtcagagcgaaatgctggcacactcacagcttgaccgtctattgggtgcatggtatcgatggggagatgatgttgaagttaaggcatggtgtaacgatgcaacttcttcggatgatgggcttctgactttcttatccaagttttgtacacatacacgttcacagaccatgggtgattgggctgtacatcttcaacctcgtttgaatccaacctggttagaacaatatattgacactcaagcttgctatgagcgcctgataggcctgcgacaaaaaggcctcgttccagactctgcacgagaatcgctagaacagttcctaaaagagtttgaaatgctcaaggcaggtaagaatccagatggcattggtgcatttgatgattga

SEQ ID NO: 440805 - DNA, 4080 bp, Serratia marcescens
atgagtatggccagcatacacgatgattggctctcgctaatcgacatttcaggccccttccttgcagtaccagtactaaaagatgcattcccgcaagggctggaagagctagacgctgctaagcgcaaacgactgcgccaagcttacgatgagtggcgagaagcactggaacaagaagatcctcagttcagcaaattgcatttcgcgtggattgaagaggttctttcacgtggccttgagtttgatgaggatgggaaaggcgatgtactgaagggcgcagactggtgcgccgccaacttgaacacttttctccctgaccatggtgtagctctgtcaccaaatctagcaattgtcgacgagcaatgcgcgaacaagcctttgatgctcattcagacctatgcgcaagaaatcgatcttgacgcaacttttaaaatagacggatgggccgctacacccacggaacgtatggttcagctgtgccgctccaaggagtgtcgccttggtttggtgaccaatggcgaacgctggatgctggtggatgcccctgtgggcgctgtcgccagcttcgctagctggtatgctcgactctggaaccaagagcccatcacactgcaggccttcgtgcacttgctcggtatccgccgtttcttcgttgatgaatccgaacaactacccgcattgttcgatagttctctgaaatatcaggatgaagtaaccgatgcactgggtgaacaagtacgtcgcgctgtagaagtattgatccagtcccttgataaagctgatcaggatcgcaaccgtgaactactgtacaacgtaaaagaatccgaactctatgaagcggctctgacagtgatgatgcgcttggtgtttctgctctcggcagaggagcgcggcctgcttcttttgggcgatgaacgatacgaagccaactatgcactttccaccttacgtatgcagttacgcaaggtacccgaagaaatcctagaacgacgctgggacgcctggtcgcgcctgctggcggtcttccgtgctgttttctgcggggtggaacatgaaagtcttcgtctgcctgcactgggtagttcactattcgatcctgatcattttccttttctggaaggacgggctaaaggttccagttggcggacagatacagctaagccattgccgattgataaccgcacagttctgttgttgctagaggctatccagcaattccagggccgaacactctcatatcgcgcactggacgtcgaacaaatcggttacgtgtatgaaggtctgctggaacgcaccgtaaggcgcaccgatgaagtcacactggaactggatgccaccaagaaatcacagtatccatgggtcaaactggccgagctagattcagcaagcatgaacagtcctgagaagctaattgagttgctgcaagagcgctccggtagttctgtcagccgggtgcgcaaagatctggccagggacgttgatgataccttggctgatcgcctactcactacctgccaaggtgacatccagttacgtgaccgtatcaaaccttacgcccatctgctgcgcactgacccttggggttatccgctagtctaccccgctggtgccttcatcgtcacaagcggttccaaccgacgcgagactggcacccactacacaccaaaatcgcttactgaaaacatcgttactgaaacgctaacaccgatagcctacatcggcccggctgaaggcacaccgcgtaaagcgtggcaactcaaatcccccactgaactactcgaccttaaaatctgtgaccctgcgatgggttcgggtgcttttctggtacaagcttgtcgctggctggccgatcgcctcgtcgaagcctggtcgcaggctgaagcaacaggaaagatgataagtgtggacggagacgtactggaggatctggataccaaggagcggctaccacgagatactgatgcacgtatcgtaatagcccgacgcctcatcgccgagcaatgcttatatggtgtagatttgaacccgctggcagtcgagcttgccaagctttccatctggctggtaacactggcgaaagggctgcccttcggctttcttgatcacagtctgcgttgtggagacagtctgcttggtattcatcggttggaccagctcaccaaattatgcatgacacctgaacaaaagggaaaacgaagtgaccgtctgtttggcaaagacatagagagatcagtacgacaagcaatcgaacttcgccaacgtttgcgcgctatgccaatacgtgacattcacgacgtagagatcatggctagtttggatgctaagtctcgtggccatcttgaagtgcataaactaattgccgatgcgtttattatcgagatattggtctccgggggcaattcgcccacactagagaatgcgctttcctcactctccattttggcagaccaggcagtaggtggaagcattgaggctactcaatctattgcaaaccgtatttccaactcctttaccagtggtctgacacttggacatgcacggcggccattccattggcctttagaatttcccgaagtttttttaagagaacaatccggatttgatgcattcgtaggaaacccaccatttctcggtaatcgcctatggaaaagttcaatgggtgataagttgcaatggcaatgtcagatgattctaggaacaccgcccggtaaaatcgacttaagtgttgtcttccatcggcgtgttgtcgatttgcttcgagtagatggatgttatggtttgctggccgcaagcaacatcgccgaaggaagcgcggttgctattggtctgggtatgatcgttaaaaacggtcacatatatttctccagaaaaggtatgccatggcctggtacagcgtctgtagttgttgctgttattggatttttcaaaggacgatgggcaggaaaatgtgattctgaggggaatgcttgtaatcgtatcggtgcacgtttagaaccggaagctacggatacttggatacccaaagagcaacctgattctattataagttttgagggcgtaaataatagcaaggggatggcatttgtattaaccgaagaaaatccttggttctatcaactcaaaaacgaatcgaatagccttctgcgtccatacatcaccggtgacgatataacaagttatgcacttcgtagaaccgaccgttgggctctagatatcgcagacagaaatctagaagacattgaggaaaactggcccattgcattccaatttttaattcaagaagttcaaccaacccgaactcctcaagctttgaaaagctacaaaggactctatgaccgttggtggcaattctggaaccatcgagccgagctcatgcgcaagttgcgcaaacaagaatatttcattgccttcgcaaaggtgaccaagtacccgttttgcttaatgactcccactgaatggatctatacaaataaaatcctgctcattggtgcagatagagatgatctttatgccatttgtttaagctcatttttccgaagctggctctatgcattctctgtccgtagcttgggggcagacactaatacactcacgctttccattcgagaagctgtatcgactttcacgttaccaaaaacgagagtttcgaatgccggtcgtaactatgcacaacgttttcaaaacgttctcgtcgcatggagcgagcaaaataactgtggtttaaccagcgcaatgaatgccgtaaacacgccaagctacaatgatcccgtcataaacgaactacgccaaataatggttggaatagacgctgaagttgcacaggcttatggatggaatgatctcgatatttcatacgattatcaggagttcaatagtggctcagtaagagacccgtggcgctgggcactttcagaagacctaacaacagagttgatgcgacgacttactgagctaaaccggcaacgttttgaggagttttcgttgactcagaaaaatgctgctaatccagttaaacgcggacgccgctcaaaagcagacgctacggtaaacttacttgatttgtctgatggtgcgaactaa

SEQ ID NO: 440806 - DNA, 1764 bp, Serratia marcescens
atgtcacatcacatatcatcaataactataaataatttccgttcatgcagtgctattagcattgacatatcagagttcacccctattgtaggatacaataacgcgggaaaatcaaatattttatccgctattgagtggttgtttaaagataagctacttgaacctagtgattaccacaacgaaaatttagaaattcttatagaaggtaaaataaagggcattacgcaaggaattttaaacactctaagcccagaccatagaaatagaataacacctttcattgttaatggggaaataacaataagaagagttcaacctgcaggtgcgacatcaaaaaaattaataaccttctatatttatgacccaagggatagaacattcaagagaaaccctgcaggcattgataatgcaataaaaacccttttccctgatcctataagaataggagcgatggagaactcggcggaggactctgcaaaatcaaaaacaacgtctacaataggaaaaattctaatacacctatgctcttccatacaagcacaacaaactcaattagtttccacgcatatacaagcaataaatagaagaataagttcaaatggaaatagacgtataccagagcttggtatcatagacaattcaataaactcaaaaataagcgatctatttccaggaataagcttgaaacttcattttgaagcccccgatatagattcaatttttaagtcaggaacaataaaagtttatgaggccgcaaatgcaatatctcgcgactgttcttcttatggacatggaactcaacgctctatacaaatggcgctgataagacacctagctgatataaataatgcgcaggccaataattctacaacactgttactaatagatgagcctgaattatatctgcatccatcagcgatagaccatgtacgagaggcgctttctaaactgtctacaataggttatcaagtaatatttacaacgcactctgcacaaatggtaactgctgaaaatgcacaacatgctgttttaataagaaaagatatacaacaaggaacttacacaaagccaagaattaaagacgcagtaattagtgctatacaaggtgctcctgcacaagcacaacatctattttcactatcacagtcatcacaaattttattttctaacaaagttatattaacagaaggaaaaaccgagttacgattgatacctcatcttttcgagaaagtacaaaactatactctgccgagcaagcaaatttcattaattgagacaatgtctgtcgatagtatagctaagactttaagtgttttgtcagtaatgcatcttccagcaaaagcaattgttgacttagactatgcatttcgtggggcaatcctaaataattacatccagcaaaacgacgctgatattacagccttaaagttaatactattgcaaatgtcacaaaataatgaatgtgcattaaataatgatggccttcctacaagattaaatagcccagtaacccccgcaaaagcttttgaattgctagcagaaaagcaacagagcttgcctcacattatttcattacataacaaactcctggcgcacaatatttggatatggcaaaaaggagcaattgaggctcatctaggattaacatcaaaaagtgagcaggaatggtttacattcaatagaaacattaatttaaatccatggcaacaggtttgcacagatcctcaaagtgtaaatgatttaatgcaatggatcattacttaa

SEQ ID NO: 440807 - DNA, 729 bp, Serratia marcescens
atgtatgagggtgagttaccctttaagcaggataaaaccgaaataggttataaagattatctaataattaactctataaaagaacaccttgaccaggatgaaataacagtaattttatcgcaaaactcaaaggacttttgtgacggagataaaaaaaaacaaaacaacgcattaatcccagttagtaaaaatctagatgctgccaatctttatgtaacagaaagcatttctgcattgtcagatttcttatcaaatgatttgaaacttgaaaatataaaatcaccttggaaacgacaagaaattgaagatttccttaagtctacaattgataacccaatgtattcctcagaaatatatggcgatttcttgtcgttaaccgttagcgcaaaaaaaataatcgttagtataactgctctccaagcacaacagtcagatattcaggatgggtacgtagagataagcgggagtgtcaaaattcaaatggattgtagttttgaagtaaaccaattttcatactccttaattgataatagtttcattttttatgatgtagtagttgaaggtatgaagaaatttaaatatgatgaaaatgatgaaaatttttgggaaataaaatttaacaatcataactattgccgtgaatttaactttaatataactgattttgattatgtaaaaggaaaaaaaattagcgatgccttcttgaccttgtcttcggccactgaataa

SEQ ID NO: 440808 - DNA, 573 bp, Serratia marcescens
atggagtttaatcagggtgctaaagcagctatcgagaggatggttgaagcctatggggtaaagacaaaacttgccttgtgcgatgcattaggggtaacagccagtgcactatctaaccgacaagtccgcgattccttcccggctgaatacgttctgaaatgtgctttagatacaggtgcatcattgcggtggttaacttatggtcagggtgagatgtttgagcagaatgttatagtatctccatctgcattagcagttcctagcaagaaactgttagatcacaaacttcacgatagtgagacgttgctgttggacaaagcatttctccctgaaggaatccaaaaacctttaatcatctctacaaatgacgttcaatatatcactggtcaaggatataatgagattcatgatggaacttggataattgatatcgatagtaatatcagtgttagggaactagttcgtatgcctgggaataaagttagtgtatctgataaaaaacactcgtttgaatgcgatcttgttgatttagtcgttgtttccaaagtgttagctatatatagtaaactctaa

SEQ ID NO: 440809 - DNA, 150 bp, Serratia marcescens
atgccgcaaatcaacgccagtaaaatcaacggcaccgtcaccaatgagacgatgggcaccgcccagagattggccggcagcgaggtcaacgtcaggcccagaaacagcgcggcctgcatcggcaccagcagcaacgtcatgcctagctga

SEQ ID NO: 440810 - DNA, 1227 bp, Serratia marcescens
atggctggcgaacttaacaaactgagcgacaggaagttaaagggattacatggcatcccggccagtaagattgagttttatgctgatggtgccgggttgagcgctaagataacgaaagctggtggcattagctgggtgtttacttaccgactcgacgggcagaagctgcatcggctgactctggggcgctaccctgatatgagtctcaaagaggcccgttcctcgcgtgataaatgtcgtcagtggctggcctctggtaaagacccaaagcaccagttggcgctaactatccaggaaacgcttaaaccggtcacggtgcaggaagctatcgaatactggatacgtgaatatgcggaagaaaaccgtgcgaacgtcgagcgacataaagcggagctacgcaaacatatttacccttacattgggaaaatggcgcttgctgactgcgaaacccgatactggcttgactgctttgacaggatgaaaaagaaaacgccagttgctgcgggttatgtattccagatgtgcaagcaggctctgaaattctgccgcgttcgccgttacgccgtcagtaccgcccttgaggatttgagtattcccgatgttggtaaaaagcaggcgaaaaaagatcgggtactgaaagataaagaggttgggggattgtgggctgctatatcgtccggcgatgtttttctgccctactacacaaacttgctcaggatcaccactttgtttggttgccgtacccaggaggccagattgtcagagtgggccgaatgggatatggaggcttgggtgtggacagtaccaaaagcgcatagtaaaggcggtgaaaagattgtgcgtccagttccagaggcgatgcgatcatttattgaaatgctccacgatgaaacaaaatcatccggctaccttcttggggttgtgaagaatagcgaggcagttagccagtggggccgtagcgtttataaaaaactggggcattctgaaccctggacattgcatgatctacggcgaacgcttgcaacgcatatgaataatatgggtatcgctccgcacgttgttgaacagttgctgggccactcaatgccgggagttatggcgatttataaccgtagcctgtacttgccggagaagctggacgcgctgaacaagtggtatgaccgcttagaatttcttgcgaataatcatcagaatgtagttctgttacctgtatcgaatagaagttaa

SEQ ID NO: 440811 - DNA, 789 bp, Serratia marcescens
atgggaatgccattgcgtgaatattaccctgtggctcgcgcagctgagttacttggttgtaaaatagaagatttattccattgggcttctgttgggggtattaatatatacctgtcgattgagttaggcatgggatacatgcacttctgtaatgaaaatgatgagttagaagaacaatttgaagaaaaagcattagctcgtgatggattttcaactgtaagtgctatttatattttggaggacgatgctgctaaagctttcttccagaaagagccacctttcgaagggttcaagccatgcacatttaatgggttgtgggctttgcctcgttcagcgtattgttatgatgatttaatggaatttaaacccagtttttttgatttatggctgtcgtcaaatagtttgatgtttatagcttttgaagatgatagctacttaaatcctcttgaaagtgatctttatttaatgaagtctgattttttattaatttcaaaaataataaatggtgttgaaattacaaattcttttaaggaaatcccaaactactttaatgaaggtagggaacgtctaaatttagattctaacaaaagcgataattcaatttctcaagttagaaactcaagaaccgctagggacgcaataaaaataatggcaaaaaaacattatccggaaattgctgggaattataaaaagcttgcagaggtgttgagtgcggaggctaacgagattgaagggatggcggggattaggtttgatgattctacagtaggccgctggatgaaagactag

SEQ ID NO: 440812 - DNA, 654 bp, Serratia marcescens
atggtgactaatgcacgtaacctgcatgagtttcttggtagtaaggacaggtttgcagactggattaagcgccgcattgaacaatatgggtttgttgaaaatgtagactatcaggctttttcggaaagtaccgaaaaaggtcgcccacgtactgagtactgcattagttccgatatggcgaaagagctttctatggttgaacgtaccgaacgtggcaaagaagctcgtcagtactttatcgactgcgaagaacgcctgcgccgtgtagcgccaaaggaacatgaggcggcgttgctgacatggcgtaaaaatcgtgtagctgcttgtgaagatcataaaagcatggctgccgcaatgaaaggttatatcgagcgaaccggagacgggcagcatggctttgcttatagcaatgaatgctcattcctcaatggtcttgttctgggattacatccgcgaacctgggctaaacagaaggatatttcggttaagcaggtacgtgaccacatgaacgtagatcaactggcgttgctggcatatctggaaagccgtaattgtaccttgctggatttggataccctaacgacggttcgtaagacgaaactcactgaactggctcagagatggctggttaagcgagtgggaggtagcgcatga

SEQ ID NO: 440813 - DNA, 201 bp, Serratia marcescens
atggcgcatgaaatcacgttatccaaagcaagtcgccaggcggaccagctcagtgccttgctgacagcaatgagcaccgcggtcagtgagctcgaagtaactgacatgagcactttaatcacattggcgctggatttagccggcggaccagcgtgttggttattggaagaacaataccaacgggaggctaatcatgcgtaa

SEQ ID NO: 440814 - DNA, 237 bp, Serratia marcescens
atgcgtaaacaacatggcgcattcaacgctttcgctattcggcacatcgatatttcagacttacatgaaaaggcggatcaggtcgaagtactgtctcttgctgttaaaagacttctgtctctgcgagctatggaaaatatcgatatcgaaaccttgttggaacttcaacagaatctggcggctgaaattagtaatggtctacaaggttttatggaccaggaggcgaaagatgcgtga

SEQ ID NO: 440815 - DNA, 189 bp, Serratia marcescens
atgcgtgatcccattcctcttgatacagcagcattccgcgccagtttgcttggctctctgttcgaagttgtcatggaaaaagcggacagtgaaggtgtttcaaacgcattaacagaccttattagcatcgcgtggggcatgagcgaagagatccgcaagtccttagataaggaggttggcaatgtgtaa

SEQ ID NO: 440816 - DNA, 255 bp, Serratia marcescens
atgtgtaaatcaacacttcgctatgtagctgatgaccataccttggcgaaacatgaagagacattgcgtattgctgcgctgagtgcggcacaggcaaaaatcgtttcgactatgctggtttgctacccgaacgagatgacttccgacgagatttctgtcttggggcaattgtttgagtctttggcctccaacgtggatgagttcctcaaggcggagcgtgagcgctttgataataatgcggaggctcgtccatga

SEQ ID NO: 440817 - DNA, 1143 bp, Serratia marcescens
atgccgcaattcacacactttgatctcaacttgctcaaccctagctttgactctcctttagttgatgtattaactgagcttgagcttttacgccatttacgtcttgaaaccgatgtgcacccattgctttttgtacagttgaaggccgttttccacatgctcgagagtctggggtccgcccgtattgaggggaaccatacaaccttagcagattatgtggaaagtaaggtcgatggcacggagtcttccagcgaccagctcaaagagatcggtaacattgaaaatgcgatgaacttcattgatgaacaccttaaatctggtgacgatattaccgagcattttgttcgcgagctacatgcgatagccgttgtcggattggaacgggaaggggatagaactccaggagcttatcggcagcatggtgtgagcattgcgcaatcagagcatctgcccccagacttcatccatgttgctggctacatgcaagagctgacggaattcatcaatcgccaagacagaccaaagtatgacctgatgaagatagctctggcacatcaccgatttggttgggtgcacccattcggcaatggtaatggcaggactgttcgactactcacgtacgccttgctgatcaaatatggtttcaacgtccaggctggtggccgcgtgttgaatcctacggctgtgttttgcaatgacagagaacgctattactcaatgcttgcagaagcagatactggaacggaacagggcctggaaaactggtgcttgtacgttctggcgggtatatcgtccgagctgaagaaagttgaccaactgaccaaccatcagtttcttagttcaaagattctatatcctgctatcgatttttcccaaggccgaggacttatcaatgaaacagagactcaggtattaaagcgtacagtaggtatgggaaccgtcagggcaggtgacttaaaagaagctttgccggggatgaaatctgcgcagatcacttatcaaatcggtaagttggtggatcgcgggctattgcaacctgtcgagcctggcgcacgaacatatacggcaaaattctcgaattcttaccttatccgcggagtgataaatgcattgaaatatgaggggttcataccagagctataa

SEQ ID NO: 440818 - DNA, 891 bp, Serratia marcescens
ttgagcagtctagatgataccttagaaggatttatagaattcaaagttaatgaattcaaagaaaatcatttccctaattctgacgtaatagtctattatggtggaataaccgaatgggcaaaacatgtctatcagcccaaacttgaagcgattggccgagaagcaaagaaaagcggaacgaactctctagttatcattttatctacaggtggcggcgcagtagagtctgtagagaaaatggtagaaataacaaggcatttctatgatgaagtgaattttattgtccctgatgctgcaatgtctgcaggtactatctggtgtatgtcaggtgataagatatttatggattatgcatcatctcttggtccgattgacccacaggtccagtcatccgaagggaagtgggtacctgctctgggttacttggataaagtagaagaaattataaataagtctcgtgaaggggtcgttacgcaagctgagcttatgatgcttaatagcttggatctggctcaacttcgtagatatgaacaggcaagagagctttcaaaagatcttctgaaaaaatggctcgttgagtataagttcagaaattggaatgttcgagaaagatctcagcaacccgttacgctcgatgataaaattgctcgggctgaagatattgctgtagctctgagtgataataaacgctggcattctcatggacgttcaataggaattgatactttagtgaaaggtatcaatctacaaattgaggactatactgacaacgaggagttgtctgaggcgatacgtgagcttgataaaatgctcacagagttccggtttaaggtgtccaaggaaattgttgttatcacatcgtatcctgatgacaacgatggggaagagtga

SEQ ID NO: 440819 - DNA, 543 bp, Serratia marcescens
atgggatatgctcagattgaggctgtatacacgtatacatgcaagcgttacccctacaccccacaactgtttacaaggtttacgcagatggcacagaagcaaccaagcaagctgttttctttccgggttcccggcgatgtagcacaagaaattgatgcagccgtaaggcgttcgggaaaagataaatccgcatggctgctcagcgccgtgctggagacgttaggcaagcaggatggctactgttcgcctgaatcacgtcttgagatgctcataggcaaaatggaagggttactgcatggtgttgtagattcggacaacaaagcacagaacctccccctaccgatcaacgaaccggcgttaaccgcaaaggaagtcattgctcagatggtcgaagagtccaggcggcttggtatccagtccagcaataaaacgattattgccaggctaaacgaaatggggttacggcctgctcgtggtggcatgtggactaccagcacagttgatagtttgaagcgtcgattgaagtataaaagcagtcactaa

SEQ ID NO: 440820 - DNA, 168 bp, Serratia marcescens
atggcgaacaaacaagagcaggacaagatcggtctggtagggatgggttgcggacaagctcaacacgctgcttgccaggaagagattggcgtaactgatgagcaatcagaaatggtgtctgtaccttctgagcaagttgtcaacgaaagctcagagatcggccgttga

SEQ ID NO: 440821 - DNA, 987 bp, Serratia marcescens
atgcgtaaagtaagcgcggttacagataccgctgatattaatggtgagttcacagaaggcaatgtcgctcaaggtgttccaccgacgatactaaaggctgatatatttaatacatggcaacgagagttggtaaatattgtcacatcatcaggaatggatttagatccaaacgatgatgggcaaattttaaaagctataaataaacttttgtctgtggcagcagctgtaacgagtgtgaataacaagaagggcgccgttactttgagtgctggcgatgttcatgcatgggataaaacagaagcagacgcccgtttcatctttaaaacaagcgatactatgagtggttcgcttacagctaagtatgttgcgagtacacctagcgttatgccagagggggctggatctttttccggtcaactggatagtaaagccccattttatcagccaaattggcaatggccagttacctccggcggtatttatgtgccgattgttaaaggtgctgtcactcgccaagggcaaggctatcctacagccttgagcttcggctacctgcttaatggtacacccagttttgctgttccctgcattcatgcaaaaggggataacattgatgttaattggaggtttgaccccaattctggccaattttattcgccaggaaatattttggctagtggagccatacttcataccgatggaaatattaccggtaatatctgggggggctacctcagtacatggttgaataataatatttctaacgctcaaaataacgcgcaaaactgggcatatcaaaatctagtgcaaggcgtacgtctgtctggtcggacggttatacgtgattccggtgggagaattgatcttccgtcaggctgtgtttataccggtatgtcaggttcgaactataacccagatatatgggctgcgtactctgcggttcaggtcttgattaacggccagtgggccactataggaaccgtttaa

SEQ ID NO: 440822 - DNA, 345 bp, Serratia marcescens
atgctttggccgattaatttatctgttgttgaagtaagtatgcaaaatgcgccgaaaggactgtcagatagtggggagtgggtttttaatggttctgccattgttccgcgagtgtacagcactgaagaaatacagtctcaaacgggacagaaaaaggctcgactgattaatgaagcttatgcggcaatgaaaccgttggaactggcggtgaagcaagatatggccaccgatgaggaaaaggcgcgactcgatgcctgggaacgatacagcgtgctgctgagtcgcattaacccagagatgaaggtagaagatataagctggccggaagtgccggaaacaatctaa

SEQ ID NO: 440823 - DNA, 450 bp, Serratia marcescens
atggataacacgcaaccaaagaattaccgtaaggtaatgagtatattaggtatttcatcaaaaagtgacttggacatagtcgttggatacctagcatcgatgctaaaatctgaatcgcaggaatacaaatcgcaaagagaaagaatctcgaaaatcattaccagccaagacactcccagatcaacccagtttagtgatgaagaactatgcaaacttggttggttatggcatatagctaacatggttgttgatgatatcgcccagatttaccctctcctgaaagcggcagagcatagaatggccccgcggttctactccataattcatgagtatcccagaacgataaacgaagccaagagaatgttgcggagggagacaatgcacattacttattcccccttcgaagataataactggtcgcgtatgctccctcatctacgtaaagagtaa

SEQ ID NO: 440824 - DNA, 135 bp, Serratia marcescens
atgctaccgaactatgaccagatgaggaacatacattacgcctctctgttacgttcacactcccccaacgcgaagcatgtggaacatgcgtcccagcctatacatgatcattttgtgaacaaagttcaatgttag

SEQ ID NO: 440825 - DNA, 1098 bp, Serratia marcescens
gtgcaggatttgccaaatctttttggagtatttgatgttcttattgatctcccactcacatctgaaacctttaatactgtgtgcgtgaagacggatataaaattcattgtggagttgggagctgtacagcggtttaagtttgagctgaaatctttaccttcatcacgttcggtattcttatcggactgtgagcccgattttcaaatgtgggatccactttgcgctctgctcaacctttctagacctacacaggcgtttcccattggtgcgccgcgcggctccagattgttcaggggcgatcggctctgtgatttatcccatcaggatcaatccaagtcaccggagtcatgcttactggatgtttccccctgggtactaccgcctcagtatgggtggcgaccagcacaccttactggtagtaatatctattctgtaggcaagtgtctgttatgttcagatttgtcgactgaaacgccatcctttatcgggcttgttgaaacttttcccggtaatatggctttgttctctaaagaaagcctagtttgcgatgaagatggtacgcatctcactatcagcgcaatacctacgggcaacaggccgtaccgctcgggagcctttgcatcaaagcattcttttaaatatgggcggtttgaggcagaaattaaagcggctcgtggttccggactggttaccggtttctttctacatcgggattcaccaaggcaggagatagacattgaaatagcgggtgatgatcctgaacgtatgttagtaaacgtctatttcaatcctggcgatgaaggtgcaacattagattatgggtacaggggatccccatgtcgtgtagaacttggtttcgatgccaccttagattttcatcgctatactattgactggcggccagatcggatcgtctggtccgtagatggtagagttgtgcacgagcgcgtaagttgggatcccacaccagttccgcatcttgcaatgcgcttacatgcaaatctctgggctcctcgctcggaggaactcgccgggagaattgatattcaggctttgccagcaacgacaactttcaaaaatataactttgtgggaataa

SEQ ID NO: 440826 - DNA, 1212 bp, Serratia marcescens
atggcaatttcaaaagcgaaaggtcaatctaaatcaaagcgtaaaactgaagttccaggccaagcgttagggtacagtcttcaatttacgagactcacccatctattgcttcaagcgcctgaagggagtctctgcagtttggagctacttgatgacgttgctcaagagaataattcgggtgacgtcaaattaattcaaagcaaaagcgctcttacagctaatcctgctgctgatcgtgctaaatcgttatggaaaacactttctaattgggttgatcttgcttcatctccagattttgacatagaaaaaacaattttcgagctttatgtatcccgtccagttggaggagatattgtcaaaaaatttaacgaagctaaaacccgagaagatgcccaagaagcaattatccaagcccgtaaaaaattatggggtgaaccgccacattttaatttgaagggagaggttgcgagagaaatttccacatacatcgaaaacgtttttaccgcagacaagaatattttacaacacctgatttgcaactttcaactgacactcggtagtggtagtccacaagcagatcttgaagcatgtgtgagaagccaccccgtttctccttcaaaggtcagcgatattactagttacctttgtggaaaagtaaaacgtcacatcgatatgttattagaggccgagaaacctgctgtcatttcgcgtgatgatttttatatctggtacagatcatatgtccagaaaatagatcgccagatagtcctttctagccgtgctccggttccatcggaagagatttctcgcgaatatttccctggtaaattcgtccaacagttagagattatcggcctgccttatgaagatttattaggagcagtgagcgactatttaatggcttcttctgaccgaactgattgggctgctcgtggcgaaattgatgcaacctcatttgatgacttagatgttacgctacagcgaacatggaagaataaacaaaaagcctgtaggttgacacacgggggaagatcagaacaggatcaagggcagctactgtacgtagaatgtatgcagtttaatacatcaattcaggctatgtcaccaccaagccattttattcccggctgttaccatattctggctgatagcttagtcgtaggttggcatccaaactatgaggtgcagttgaagaataagaggattgcataa

SEQ ID NO: 440827 - DNA, 153 bp, Serratia marcescens
atgccgccgtggttctgcctggcgatggatctcgcgctgatctccggccaacgccgcgaggatctgacacaaatgcgctttagccatatcgttgacggacgcctgcaggttgaacaaggcaagacggggggctttgctctctctcccccttga

SEQ ID NO: 440828 - DNA, 123 bp, Serratia marcescens
atggccggcgatacatggggcgacgccgtcagctatacgctggcgctacaaacctcactgaaaatttgtgccggcagaattgccacactgaacgcctggcgggacggcttatcgaaacggtga

SEQ ID NO: 440829 - DNA, 537 bp, Serratia marcescens
atgagtgaatggttcaatgaaaatgcgccggcgattattgctgcttcagctgctattttggcggcaatagttgcagctttagccgccttcggtggtgcattaataaacaataaatccaatcaagctttgagggaaggacaatttattatagaacaatggaaagcaaatagagagctatacttaaaaaaaggagaggagattttctctttatttaactcttgggctgaacgcacgaatctcatgctccaatttgttcgtgaagatagtgcaagtttggatgtgtatttacaggaggaaaaggagttaagatcaaaagttgatgtcctgatatcactctattttggagagttgtctgaggattttgagtcaatcaaaagagatttgtatgaagcgcacttagcttatctcgagtcagggtttgatgattcgaataaggaggagttacttgtgggggttgttaggaaaatcagcgatgttcaagtaaagtctactgtttttagaaaaagattggcaaaaaagacccagaagtacttttaa

SEQ ID NO: 440830 - DNA, 564 bp, Serratia marcescens
atgaaaaacactcgtggcgaaaatgctaggccgactacgtatagaggaatcacgtaccgctctcaaactgaagctcgatgggccgttttttttgatgctttgggcgtcacctatcactacgagcctgaaaaaataaaattatcaacgggagagatatatatacccgacttctacatagatgactttaaagcatacttcgaagtaaagcctgctaatgatgagattatttcaacagaaagtagaaaagctagaatactatctttcgataaccctgatcagcgcgtgtggttagctgccggggctccttcacctaagactccaaacatactgccgttggataaatgggggcaattggttcccatatcacatatcttaaccactcccgagtggcgatatttcattcatgaggacaggcgagatgaacgggtctattggttacactcgttcgcttatgccggatatgaaattggtgggccaggtgaatcgacctttcactatagagaacctcttaatcataaaaatgttctaaaagggtacaccttagcccgttcggcatttaattag

SEQ ID NO: 440831 - DNA, 558 bp, Serratia marcescens
atgaaaaagattattttgatcagtcaatgtcagtttacgtgcctggcgttaaagactgtttttgagaataagataggctatacaattgagtatctcagctctggttatgaaattgataaagaatgtgccaatacaacaattttgattcatgtaacagatgagaactattccgagttgttggtgctaatgagaagtcggcaatttttctggttaagaaaagctatattcattacgcagaagcgcctggcgacaatcatgaattatttatcaataaaaacactgcggtttattgatgagcgcgcaagcgttcaggcatttgaacgagaagttgtcgaggggagtgggggggaggctgatgtagaaaaaggcgagctgttatcacaagctgaatataccgtgctgcggttcgcagcatcaggaatgagtttaacggcaatcgctttcagaacccgaaaaagtatcaaaacaatcagcagtcaaaagatcagtggtttgagaaaaatggggttagagaatacgcctcactcactgtttaatctgtttaatttattttactga

SEQ ID NO: 440832 - DNA, 480 bp, Serratia marcescens
atgaataaccgcactgaggcatggcaggccgcgtatcgctggctgtgccaacgccgccgccatgcgccgcccaatgcagatatctggcatctgcgctttcactgggcgcagcagggtgaacgcctttggcggcaactgcaaaacgggcgttaccgcctggaaccgatgcaggtattgcggcgtggtgcccgcagttgggtgcagtggtgtgcgccggatgcgttgatattgaagtgggccgcgctgctggcggaaccgctgttgccaaaaccggcacgttgcctgcatttgcgcgggcatggcggtagcgcggcgtcggtggcggtggcggaagtccgggcagcactggccgatggagaatacacctttgtctaccgaacggacattcgcggctattatcggcacatccgtgaacagcaagtgattaatcaactgaaatggcaggtgaccgacccggtgctgttcgatgtgaagcagtag

SEQ ID NO: 440833 - DNA, 822 bp, Serratia marcescens
atgaaatacataatagataaattcgttatttttgattcaaactcactgactcttcacctttatgataacagccaggtgaccacccgactgactaaacctgccacccgtttattgttggagttaatacaaaacaacagaaccagcatggccagagatgatttattcaaaaaggtatggctgacgcatggattcacggcttccaacgcaggattgaataattacattagcgagttacgcaaggctttctctttattgggccacgatcgcgaaatcattatcactatccctaagttaggtttcaggctagaggcagtgattgacctatttgattccaacatcgagcccagcggggcagcgaacgctgcagatgaacaggattcttctgaaaataatgatgctcctctagagacaacgccggaagatcaatctattcccgaacgttctccctcattcttgcaccagaaagtcattatcttttcagccacgattatccttggtattatagttgctgtagttatcctaaagatgacaaatcaggacaactatccttaccagaagatcgctaccctcgaccaatgtgaaatttatggactagggaagctgcagcacaatctcaataatgagttaactgtacgcataagtgggctcctaaagcacgaagaggtagattgtaagaatatccccagcgatgtcttctatctggaggaccgaatcgctacaaactccgttcgggccgatctggtatctgtttgcagcaaaaccggtagccaccattacgatacgtgcttcaatatcaaaagccagagaaacacatcaaaatga

SEQ ID NO: 440834 - DNA, 468 bp, Serratia marcescens
atgaaaaaactacttataacggtcaacaccctgctttttctattatttttttcgttcagcatgcatgcggaagaaccttttaagtgcacctcacactacaaaacgttcatacaaaaagacaaaggattcacgttgtttgatggccgcctcactctgttccttaaaaatgaacacgaaggtttttttagcctgctggggaaagtcaaaaccgatgagaacagctatctgctttccagagtcagctattttactctggcgccgttgatgataaatcacgtcaaacaggcgaatattagcaaggtgattacacatccgagcgacaccacgcctgaagccccttggctggcagacatcttgccggcattgcccggcattgattttcagatagagatatggcgcctgaaagataacttgatattggtgaaatccatcactaccggctatcttatctgcgcggcagaccggtaa

SEQ ID NO: 440835 - DNA, 264 bp, Serratia marcescens
atgttgaccgtttccacccccgccccatccactctgtcgccggtgcttcctggtggttacaccccgcgcgagcgctttattcgcctgccggaagtgctctacaccaccggtctatcccgctccaccgtgtacgagatgatgagccgcaggcagtttccggttcaggtttccctcggcggtaaaaacgtcgcctggctggcctccgaggtcgagcagtggatggatgaacgtatcgccaaccgtcaccagggggccgccgtatga

SEQ ID NO: 440836 - DNA, 1962 bp, Serratia marcescens
atgattttaactaacgttgaacttggccctttccgttcgattaacactgcccaaaactgtactattgaccctaaaataactgttctagtcgggatgaacgaagctggaaaaacagtttttcttcagggaatacacaaagcaagtgatgctttaggttcagagcgttttgaggtaatagaagattatcctagaaaagatctcactcgttataataaaacacaccaagataaaccagaagttgccatcaagctcacatttatgcctgaaaaagaggagcttgatcgagtaaatagattatacagcaccgacctcaaaccagggtttgtttattctatttcaacgaattacaataatgttagaagcataaacatatcaatcgatgaaaaaccaataattggtaaaatcctaagctcgggagaattttcatctgacaccatagtgcatttgagaaattcaaaaaccattagagagctcgttgaaattttggatggcttagacttaaacgaaagcgaacaaaaatcccatcaaaaattatcagcaagagtaaaagcatgtcactgggataatataaccagtcaggaaatttttaaacacttagactcatcactcccaaaaactttatatttcagtgattatgatattctacctggaaaactaaacattaaagatttggcgcgtagatataaacaatctgaaagtgatccagctcaactaacagccaaacataaatcgattttagcactactgaggatggcagatgtcagcattgatgaactttctgatacagatggttacgagtcccttaaagccaaaatagaaggcgtatccaacagcttaactgatcaaataatgcagttttggaaacagaatgaaaatatagaagttgttgtagatattcagagtgactctaaagatgaagcaccatttaatgatggagccaacatataccttcgcataaaaaacagcaggcatagagtgaccacgccttttgataagagaagccgtggttttatttggttctttagctttttagtgtggtttgatagcgtacagtatcagttcaatgcagaagatgaagatagaaaacttatattattgcttgatgaaccagcattagcattacatgctctagcacaatctgacttccttaactacatagaccatctttcaaaaaaccatcaggttatttatacaactcattctccattcatggttcactctgatagattaaatcaagttcgcatggtcgaagataaagataaggtagggacgataataacagaaaatctttcaggcaccgatccaagaacaatattccctcttcaggccgcactaggctgggatattgcacaaaacctatttatatcaaagagaaacctattggttgaaggtccatcagaacttatttaccttaaacacctatcagcttatctcgaagcaaatggcagaactggcttgaatgaaaacataaccattgtgccgactggcgggttagataagataataacattcattgctttacttggtgcaaacaatcttaatatagcagtacttcatgattatgatggaaaaagcaaccagaagctagatgacatgataaaaaataaaatcatacatccaaaaatgattaaaaacacctctatgtataccgaaagcaaagacaaacctagtgatatagaggatctattatcaaacaaaatctatcttgattttttcaacaaaacatttggcagtcaaattcaagaaaaaataaaactaacagatttaccttcaggttctagaattgtagaccggattaatagatatcttaaagaaaaaagcatatcactgagaccttccggtgggtttaatcattatctcgtcgcatcaacatttggtactacaccaccaaaaaatattgatgagaaaacattggataaatttgaaactcttttcaaagatatcaataacatactaagttaa

SEQ ID NO: 440837 - DNA, 213 bp, Serratia marcescens
atgtactcggatgattacggatacaaaaaagcccgcaaacctaagtgggatgcgggctttccgtacttccccggacgtatccggaacataatgtggtggagctggggggatttgaacccccgtccgaaattactacaccgtcggcactacatgcttagtccaatctttacattcgccggccagctgcggatggacacgctactgacagactag

SEQ ID NO: 440838 - DNA, 585 bp, Serratia marcescens
atgaataacctgaacgtaattattgctgatgaccatcctatcgtactgtttggcatccggaagtcacttgagcaaattgaatgggtgaatgtcgttggggagttcgaagactcaaccgcactgatcaacaatctgtccaagctggacgccaacgtgctgatcaccgatctgtcgatgccgggtgacaagtatggcgacggcatcacgctgattaaatacatcaagcgccactatccgcagttgtcgatcatcgtgctgaaacaaggcgcgccgaccgatctgccgaaggcgctggccgccctgcaaaaaggcaagaagttcacgccggaaagcgtctccaaactgctggagaagatcagcgccagcggctatggcgacaaacgcctgtcgccgaaagagagcgaagtgctgcgtctgttcgccgaaggtttcctggtgaccgaaatcgccaagaaactcaaccgcagcatcaaaaccatcagcagccagaagaaatcggcgatgatgaagctgggcgtcgaaaacgacatcgccctgctcaactacctctcgtccgtcagcatgacgccgttggacaaagactaa

SEQ ID NO: 440839 - DNA, 822 bp, Serratia marcescens
atgagtgagcaagataatagtaaggcatcgcaaggtgttcacgtcattggtgaactaatgcggcttgcaggtgatgatgatagcgtcaagagatctgctaaaaatcttggtgaatctgcgttaattgtaacaagcacggttaagaactgtttgctacctcttgccgcactaaactttggatttgaaaaggcaaggtgttatttttcagaaaaattccaaactgatatatcaaagaaaacggaaaacatctctaaagacgatataattgaaccaaaggcatctattgttggcccagcgctacaaggattagcatttagtcatgatgaggatgatttaaaagagctatatttgcaactaattgcttcgtcgatgaacaaggcaatggaaaaagaaacacatccagcctttgtcgagatcataaaacaactatctgcggatgaagttccaattttaaatttgtacattaaacatagtttgaatgctgctatagtaaatattacatcaaagtcagaaaatggtggtgttagaacactatataggaatttattaaacctttacaaaggggatgaagtacatgttgacagtaaaatatcctcatatgtagataactggattagattaggtttagtgggtgttaattatgagaaaagtcttcgtggagatgatgtttataatagttttatagaaagacctgaatttcttcaagcgcaggaagaagaggaaaattcgggaagggttgtaagcatccaaaaaggggcgctttatagaacatcttttggtgctcaatttgcaaaggctgttggtatcaacgaagaaaaataa

SEQ ID NO: 440840 - DNA, 519 bp, Serratia marcescens
atgtccgcctcattattagaattagctattcctgcatcggtatctgtcgttgttgcatgcggaactgtgatatggacagcagtatcaaacagaagcctagaaaaaacaaagttattgcaagcgaaaagagaggaagtattatctctttgtgaagagatgaatgagattatatcattgaagcatttcgattctgaaggtgaatcacatgccatatcatctaaaacagcaagcagagcaatggatgacattagatctatagcttcaattgaagttaaaacaaataaaataaaaacaattaattcaatatattttcctgaaatgaagaaagattgcgaaagcatgacaagaaatatagtttctttctacacttctgtggcatctatgaaggcaataaatagcatctttaatagtaaagagcctcgtaaaaatcatgatactctaatgatagacgaacgatataaagatgcgaaggactctataaaagaatataaaaaaaatatcatatcgctaaaaatataa

SEQ ID NO: 440841 - DNA, 684 bp, Serratia marcescens
atgagttggatgaaggatgcttcgaatcggttccgaaaagatgaactcagacggtcaatctctaatattaactggtatacatttaaaccgaagcttaaagaacaattaattcagctagcaaatatactttcagatgaagacaatgaactatctgtaattgacatggatgataatcctgacggttatgggtttgattgtttgacactttgttttagggaccgtatgactggaaatatgcgtcaggagattactaaggaatacacaagatataattatcattggcaaaaaggggctgcattatcaattacctatagtgcaacgggtgcagtccatatgattatatttccttctacttctgaagactcgctagctaaacatgactcattgattttgcatcattcatacaatgtaaaagatataacacctaaaaagttagagaaagctgtcaaaaacttacttcatttccatcgtgtaacaggtgttttgcataaggcaacgttaatagaagttttaatagtaaaaatcttgagactaaaaatgtatttcattcaatatgcagataaagagagcaaatttaaaagaattactgctctgtatatacctttgttgagcctgctagtttcactatctgctgctattgctagcatatttgcattgataataactatgaaaacttccggttga

SEQ ID NO: 440842 - DNA, 1821 bp, Serratia marcescens
atgaaactaattcgcattgatattcaaaattttagaggcatatcttctgcttcaatcaaccttgagaattttacaactttaattggttcaaataatattgggaaatcgacaatacttaaagcaattaaaattctcgttgatacgaccaaccccacttctgaagattggccattccgtacagcaagtaatgatgagatgatcatcaccggtacgttttctgatattcaagactctgaaagatcgaagcccgcaatatctaatttaattcatgatggtgaattaaaaattcgagtcaggaccaaatgggattatgataatgaatgtatgggtgttccttcttatgaagcttattataataaagaaagcatagaagatttcacgacatcaatcgttgcagcaagatctatcccatggcttttggatattattcgcgaacttgattgtaataacagcaaagcctacaaagaaatgcaaaatgatgttattggcataattaaagaaagacaccctgaaaaagtctcatctgatttgtgctggacgtcagatggtattaattttaaaaatagcttacaacaagcattaccacacgttctatacatccctgcgtgctttaaaattgaggatgatcttaaatctcaaaaaggcactccgtttggatttttattttcaaatagagtatatcctgttttacaggctgattcatcattcgaacaatatacatcctcacttgaccagctacataaaaaaatgaaaggtgaattggatggcgagcttatcgaaggacttcaggagttaatggaatcaattactgattcacttaaccaagttatggatttgaaatccaaagtaaaattgagtctcactgatatagatattaattctgcattgatgaaagcagcgacgttagttattgaagataaattagaaactcaacttgagtatcagggaagtggggttcaaagggctctggcatatgcacttttagaatctaatgcattgttcgaagtgactgagtctcaaaggtctactataattttatacgaagaaccagagttatacatccatccgcatctaatgagattattaagagataaacttagagataaatcttcagattcctcttatcaagttatcgtaagtactcactcaccttttttaattgatatcgctgaaaatccatcatccctaaaactcataaaagataataatgagggaacaaggacggtacatgaaattgatgattcaatttttcatgtaggtgaagaatatgatgaaagggaaatgcttagagcagcattagattttcacccgactgtatgtgaagcattttttgccaagcgagttgttgttgtcgaaggtgacaccgaagttgccatacttagattttcatctgagttatgcgataaattagggataagtaagaatttaattaaagatacaactatagtctccgcaggaggaaagtggacgatactagctatagcaagaattttatctaaactgagtatacctttcaaagttgtccatgacaccgaccgcaaaggaatgacagaagagcaaattgcaaatatttctgctattaatgctttccgagcaaatgacaaaattagagatatcgttggtgatgctaatgtatttcgtgtaaatgacacatttgaacatctgctatgggaccctgtgattgatggcaatgctccatctgaaggaggaaaacccttcaatgcatggaaaagggttcgctcttatattgatggttctattgctttaaacccaatctgcgagggtaaattacgatctgttcttcaatttatctacgaataa

SEQ ID NO: 440843 - DNA, 831 bp, Serratia marcescens
atgcagactgaacctgaagtattaactgactacacagcggtgatttgctccaccagcattgaacgtatcgtcactggtcgaaataccgcgctggcgcaaattgaaacgttaatccaccggcttgatgctatctcaacgctgaccaacagcatcggtggtggcatcgccaaagactgggggatgcggccggggcatcgctacgattattgctttacagaaaagccggaaaccgccatgaaagccattacccgcagtattgatcgcgatatatggagagacctcatgaataaatcgggaatgctgagcctgatggatgcacaggcttgcgctgaatggcacaacggcttggaaaaagaaaatatccccgccatcaacgaaagcaacatcctcagtacgtttgaacaactccatcagagcaaagaggaggtatttgaacgtggggcgattaacgttttcaaaaatctgagctggaattacaaatcgaactcgccttgtaagtttggtaagaaaatcattgtggagggcgtcgtaaaacacgacagatgggggtttggtctgaactggggctggcaacgtgaccggctgacagatcttgaacgcatgctgatgttgcttgatagcaaaccgatcccggacaatcgcgaagatgtcactcgccgtctcggcgatcacattcacgcgcaaaggaacagcactagctacgaggatgagatgtttacgataaggtacttccagaaagggaccgcgcatatcactttcaaacgctacgacttagttcacaaattgaatgacatagtcgcaaagcactacccgaatatgctggctaagtga

SEQ ID NO: 440844 - DNA, 330 bp, Serratia marcescens
atgaactgcgacactctccccatcggcgcgctgctcacgggtatccagtgcagtaccgcccacatcaccgacggcgataactctctgctgtatcacgcatcacaccaacaggaagagtatggccacggtgagtggctccattttaccggaacggggtacctgattaggctcaatgcctggcgacatccggtacttcatcttaaacggctaggagtgtcaaaagcctgccgtcggctggttgttacgctgatgaatcatcaccctatcgctcttctgaatctcgatgcggcaggcgatatcctgtcggggattgagacctttgactggtga

SEQ ID NO: 440845 - DNA, 570 bp, Serratia marcescens
atgactgacattgactgtctcagcggctttcacgtgcgtgtacccatggtcgacaaccagctttgccgcttcgaacttaattttaacaaaaaatttgaggtaataatgaatattgaaatcaaacctgttatagacccgtcaaatgacaaacgtgttattttgttaattgaacaattaaacgcagctcttaatcacataacaggaaatgatggttcgaagaatgccgatttagcagatttttcccaagaaagtgcactgtttctactggcgttgagaaacggagaggccgttgcatgtggcggttttcgtcctttgagttctacaacttgtgaactcaaaaggatgtttgcaatggaaaagaaatccggactaggactaagaattctgcaagagttagaatccgcggctaaaagttatggttatcagcgtatctgtctcgaaaccagaaggattaatcatgttgcggtaaacttttatttgaataacggttatcaggttattgaaaattatggggtttatgttggccgctctgaagctgtatgtttcggcaagatgttgggtttttattga

SEQ ID NO: 440846 - DNA, 447 bp, Serratia marcescens
atgcggctgtgggggaataatcccatcacgtactgcacaacatgccttgatcagcccggtgaccccggcggcggtaccaagatggccgatattggccttgatagatcccagcgcacagaaaccaatacgcccagtatgctgcatccaggcctgagtcagcgcacgaatttcaatagaatcacccaactgagtgccggtaccatgagtttctatataaccgatatcgtctacgctgacattcgcaacagccagcgcatcggcaataacgcgagcttgcccgctgacactgggagcggaatacccgactttgtcattaccgtcgttgttaacagcactgccgaggatcactccgtggatagcattaccatctcgaagcgcatcctcaaggcgcttgagagcaacaatggcaataccggcaccgtcgatcgtgccattagcatccactga

SEQ ID NO: 440847 - DNA, 1542 bp, Serratia marcescens
atgacgctggcgctttatcatcaacgggcggattaccgtgactggctggatcaggcggcacgctgtctgcatcgccatcttgacgttgacctgctgacactgctggagtcggatgcaaacacgttaatgtccacagagtatgcgcaaccggccttgtttgcgaccgggtgggcgctggcacaatggtggcgtcagcatggggttgagccggagatattactcggccacagcattggcgagtgggtcgccgcctgtgtgtcgggggtattttcccttgatgatgccatgcgtctggtgtgcctgcggggacgtctgatgcaggccgcatgccccggacgcatgatgtcggtgtcgcaaagtgccactatcctgaagactctgctaccgcctgggctggaaattgccgtcatcaaccagcataacacctgtgtggtgggcggcgatgctacgctgcttgaggagctggaaaaggttctattgcaacaggaagtcgcctgccgttatttgcagacttcacatgcattccacacggcctccatgacgcctgcggcacaagagtttcttcagtccgtggctgccacaccccgtaatgcgcccctcattccgattgtttcgaatgtcaccggccagatattgaccactgaaatggcgttgtccgcgcattattgggcggatcacatccgtgaaccggtgcagtttgcggcggggctggaatgtattgcttcgcagggagtggacgtcttgctggagtgcggaccgggcaacgcgttgtcatcactgacccgcggcgtcttgcctgacgccgtgacgatcagcagtcagccacatgcctcccgtgcagaacattcaactgccgcgctgctgcaggccgcgggggaactgtggacccaaggtgtagcgttagattatggggcactaatgaccactcctctggatcttcagcggtatagcctgccgggctacggatttaaccgtagcaattactgggcagaacctcatcctatcgctgataccaccgccatcagtcagttgttagcctctcgcggtgcgacactgagtcttgatggtaaggaatatcgcagccagcaagagattcaggccttttttagccaattaatggtaatggcaccacctgtcgattctcatacctcaacccctgtcaggaacctcacgatgaaacaacccgatgccaccagtcctgctctggagagtgatattcagacgcaagtcaccgttatctggcaggaagtactggctctgccttctatcaagcctgatgagaattttttcgatctcggtggcaactcgttatgggctttgcagattgtaagcaagattaacgccaactttggctgcgagatccatctctccgaattgctccatgccgccacgatagcagatctctccgcgcttattgaacaacgtctattcaacagtgtggatgatgcagagttgaacatgctgctcggcgagttgggtaacctttccgaaagcgaactgctggcattgttgcaggaagggcaaggggcaactgatgaatga

SEQ ID NO: 440848 - DNA, 1167 bp, Serratia marcescens
atgaatgaattcctcaaagaaaagttggcggggctgacgcctcagcaaagggagcaactgcgtcagcgtagcacgcaaagagcacagaaaccgttgcccgagaccaccggcacactagatttcagtttgttttttttctcggccagtgatgaagatggcgcggccaataaatatgacatgttgttccgctgtgccgaatttggagaccgcaacgggattaaagctatctggttgccggagcggcatttcaccgcgtttggtggtctgtatcccaacccttcagtgctggccgcggcactggccgtgcatacagaaaatctggaactgcgggcgggcagtgtcgtggtgcctctgcacaatccggtgcggattgtcgaggagtggtcggtcgttgataacctctccaatgggcgagttgctttggcactagccagcggatggcacaaaggagattttgccttacgccctgaagcctggcatgaccgtcgtgagcgggtggccagaggaatggaacaaatgcaacgtctgtggagaggggaagaggtcaccgtgccgggtgttgacggggaaaaagttaaggtccgcacctggccacgcccggtacagcccgcgctgcgctactggctgacctgcagttcaccggagggctgggttcgggccggagagcaaggttgcaacgtgctttgtatgctgggcaattctctcagcatgctggaagagaacattatgcgttatcgccaggccagagaaaaagcaggccttgagccgcaagagggaaccatcagcgtgatgttgcatacctatctggacaacgacatccaccgggctaagtcactggttcgtgagccgatgttgcgttatctggagggatatatccgccaatacgatggtctggtggatgcggatatcagccaaagtgtgaatgccaacaaagagcagttcctcgaatttgctttcgagcgttatttcgagcaggccgcgctctttggcccggtagaaaaatgccgccggctcacccacaccttgagtgccatgggagtcaatgagatcgcctgcctgattgattttggcgtcagtgtcgaagatacgctggcgagtctggcccttttgcgtgagcttgctcccactcattcctgcccggtagggcaagagcctaaggtaaactga

SEQ ID NO: 440849 - DNA, 1290 bp, Serratia marcescens
atgtctgatgtgaatccatccttgtctgccctgagcccagaattgaaaaataagctgctggctcaattatcccgacgcgctaaaactgccaatgaagtccaagaggtgctggaaaatcaacctgcgccttggctgaccctggatcagcggccattactgacgctttttgctgccggagaagagcagccggtcgacgcggtgtctattacatgcctgaacgatcgtgtggtgggtaacggttttagtttgcgggatattacccacggtatttgcggtgatttacccctgcttagcaatatccgtcagcttcctgaaggacggatcgctacgctgacgttgccgcgcacctacgggcaaatatattctcaaagtggggatatcgtccggctggttgagcaaagcctgaacattgcccattcgctgggcgcgcgcgccgtttcactcacgggtctgatcccatcggccacccgctatggtcaggatatccgccatcgccctgaccaacctctgatcactacggggcatgcgaccaccacatcggctgtggtgctgtcattgcaaaagctgctacaggttgccggtcgcaatctgaccgatgaggatctgagtttcattggactagggtctgtaggcactgcggcacttacgctgatgttgaaggtattgccccatccgcgcagcctgacgttgtgcgatctttactcccgccgtgaagctcttgatgcgctgatgcggcatctgcgtgaagatctgggctatgaaggcaaactcaagtttgttccctcggggcgagtttgcccggatgaaatttatgaggcgacgacattggttggggcaactaatgtccctgacgttgtggatgtctcgcggctgcgcccgggtacgctggtcgtggacgattcggaccctcattgcttcgatgcatccagggcgattgagcgcctggaaacgcagggcgatattctgttcaccgaaggcggagcgctgcgtgcaccagcggaaatccggcaccgcatttatgtgccaaaggcgctggagtgggcactgcaatacccggcagacgatgacaatgcccatcatatcaccggctgtattctttccagcctgctctccggtaagtttgattacccggcgaccttggggatggtagagccgcaacatgccgtgacgcactatcaggcgctggtggaaagagggtatcaggctgccaaccttcactgtggcccctggcgtgtaccggcttcggcgatcgccgcattccgccgccagtttagtgcgggggagatttaa

SEQ ID NO: 440850 - DNA, 4977 bp, Serratia marcescens
atggtatcgccggtagatcgtctcgtctgttttcatcatgtgattcaatactgggcgcaaaaacgcccggatactattgctttccattacttgccggatggggaaagtgtcactacgaccctgagctatgcacacctggaccgacaggctcgtcaggttgcgcaaatgttacgcaatcatgacctgagtaagcggccggtactgctccagttccggccaggcactgactttatcgtggcatttttcggctgtttatacgcgggagcgattgccgtctctgcgtatccaccggggagcaaccggtcgaaaacggaccgcttgcaaaaactgattgccagcagtcaggccaccacaattctgaccaatcaggaaaccctggcagaggtacagcgtgaaagtgaaggtgaagtttttaccatgctctgcctggaagaggcgttgtctgaagaaagtattgaatggcaagagacggctctgacgggggaggacattgctttcctgcaatattcctcaggttctaccggtgatccgaagggcgtgatcgtcactcatgcaaatctgatgagcaatcagcgggctatccgtcaggggatgggcaatggcgaccatacagtgtttgccagctggctacctctgtttcatgacatgggacttatcggcaatgtcatgcagccgctgtatctgggcgtaagctgctggctgatgccgccgatggcatttttgcaaaaaccactgcgctggttaaagctgatttctgaggcgggggtgacctgcactggggggccggattttgcctatgcgttgtgtgtaaataaggtgagcgaagcagagcgtgaaggtttagatctatcacgctgggcggtggcctacaacggtgcggagcctattcgcagtgaaaccgtggcacgttttcaggccgcctatgccccttatggcttgcaacctggggcgatgtatccctgctacggtctggcggaggcgacgttgttcgtttctggtgatcgggcggggacgcctctgaccacgttacttatcgacagcgaagcgctcagtgccggtctggcactggccagccaggagggtaaaggcgtcacgctggttagcagcggacatatctggggggagatgcaagtagttgtcgccgatcctcataagctcacccgctgtgcagacgggcaggttggtgaaatctggctattgggtaacagcgtcactaaagggtactggaatgcgcctgaagccaactcaacgctgtgggcatctttggcgcaagagccggacaaaagctacctgcgtaccggcgatctgggatttctccatgagggccagctgtatgtgaccggacgcttaaaagaggtgctgattgtccgtggtcgtaaccactatccgcaagatattgaacacacagtgcaatgtgcctgccctgagtttgtcagcggcagcggtgtgacgtttatggcgggtgacgaactggtggtcgtacaggaaatcaggcgcagtgccttgcgtcactttgattttgaacgggcgctggaacaaacccgtagcgctgttgccctgcagcatggcttgacgctggcgcatctggttgctgtcaaacccggcacggtagcaaaaacgtcaagcggtaaactgcgccggcgttttatgtgcagccaatggcaagcggggcaaatttcagcgatcggcacctcacaccgagcaaaatcttcaacgatccgtgattcggcgcttatcacgttgctggaggccaaagggctcagcgtccggccacaacatacgctgagcgagctggggattgattcgctacaacgacttgaattgcacgcctttctggaacaggacctgaacaggtcaattccgctggaattattactcgacgatctgactctggacactatcgatcagcagcttcagacgcaaccagtttccgtgctggcggaccaatccccggaagttcacacagagcaagtttcggagatcacaccctggcagcaggcgatctggttgcatcagcaggctaatcccgataccgcattctacaatctggcgacgttagtcgatcttcctgacggcgttacatcacaacaggtgcaacgttcgctggatacactgaccattgcccatccacagctctctgcaacgctgaatcacaacgagtggagcattggcaccggtgtgatgctggaatatgtggatgtctctggttggacaccggcgcagcgcacggcatggctgatggatttccgctcacgtcccttcgatttggctgcgacagctccgtggcgttgtgcgctgctgtcctctgatggactgggcagccaactggcactggcggctcatcatctggttatcgaccacatggctgcacagacgttgttagcggatttggctcgggtggtcgccggagagcattgcgtgacgggagataccccgttgccagtcatgctgggtgcctctcacgccagtgctgcctctgatcaaaaagccgatgccagttggctggcgtcgctgatcatggcgccggagcaaatagaattcaatctgcctataccgtcgcaaccggcggcgatggccagcgtacgccacattttgcctgcgtctgagatccaggcgctgaaacaccatacgaggctgacgagaacgacgctgcatgttttactggccagcgggtttgccgcattacttgcacgctacagtggtgaaacgcatatcacgctgggtgtgccggtttcagtccgtacaccccggcaggcgcaatgggtgggtaatgcggtcaacatactgccattgccgttgcagttagatgaagagacgaccctgaatacgttgctagaacaggtcacggcaaaaactcatttgctgctgcgtcatcgttttctgccttacctttcgctgcttgagcaggtgcgtgagcatcagccacgtcgtaacagcctttatcatgctgtattcgcatgccaaaacgaaatgccgcattccccgcgtttcatccccgcagcggcagcgcaaagtacattttcactgctggttttcccctcaccgcaacagattgtactagagctggagtttgagccaacccgctgtgatatcgccacggcacaacggctgttgggacatttacaacagtggctgagcgaggctttacgtcagcctgacactgcaattaaccggttggggtatctgccggtccatgagcaggcggcactaggtctgctctggcggcctgcagtgcctgatttacgccgggatgatgtgataacccgtttctgccaacaggcagggaaacatcctgcgaagatcgctgttgaagaccggaacggcaattgttcttatcgggatttactgacactggctgaaggttactcggcactgctgcataagcagaatgttcagccgggcgaacgtattggcctggccatggcgcgcgatcgccacctgcctgcagccatgctggcgattcatgccgcaggagccagctacgtgcccatggatttcagctacccggcggaacgtctggcgatgatgatggaagacagccagtgtcgtatcgtgatgacgcgtgaatgtgcacgattcccagagcatcgggtcattactccggaagatttaatgccggaagtcacagggcgcctagctgcggcacagtctgactctgtcgcttatgttttgtacacttccggctctaccggcagaccgaaaggggtccaggtaacacatgccaatatcgccgcgcttctggactgggcacagggttgcctgagtgatcaggagcgggagcgtgtactggcatcgacatctgtctgttttgacctgtcggtatttgaaatttttgtgccactgtgtctgggcacctgttgcgtcatggttgaacgcatcctcgatctggccgtacatccggtggatgtttcgctggtgaacaccgtcccctctgctgttgaagccctgcttcaggctgatgctttccctgagcgcgcgcgggtggcgctggtggccggtgaacctttccgccagtccctggttgatcgcctcctgagatgcgtaccgctcccaaggctactggatctatacgggccgactgaagacaccgtttattccacctgcgcgcagagatatctcggcggcgaagaaacaattgggaccccgcttccaggtacccgggcttatgtgctggacgaattcctgcagcctgttgcgcaaaacatgccgggagagctgtggctggctggcgagaagctgtcgcaaggttacctgcaacagcctgagctgaatgctgccgcctttatgttgcctgcggcgttgagtcatcttgaaacccgcgcctaccgtaccggtgatcgcgtccgcctccttcctgacgggcgtttggtttatctgggacgcctggatcaccagataaagttgcacggctatcgtatcgaaattggcgagattgaacgctgcttgctgcgtgcaccgggcctgcgtgaagtcgtcgtcaatgtgattgataatcctgcaggacaaaagcagttatccgcatggtacatccccgcagggcgtgacccgggcgctgtggcattgcgctgccaccttttgcaggtactgccagaatggatggtgccttcggcctggctggcgatggatacattcccacagacaccgaacggcaaaattgatcgtcgcgccttgccgcagcctgtggcgggagattctccatcgcagcctttgttgcgtgaggatgaacatcaactggcggatttgtggcatcaggttttggggcagcgccctctgaaccgggaggcgcatttcgtcagtctgggggggaattccctgctcgctgtgcaactccgtcagcggttaagtcacttctttgatgtcgagattccagtggctttgctgctcaatcaccgagtgctgggggaacaggcggatgccttgaatgcctatctgcaacagaacgcatctcgcgatgatcttgaggaaatttcattatga

SEQ ID NO: 440851 - DNA, 6306 bp, Serratia marcescens
atgaaccagataattgcgctctatgagcagttaacggcgatgggcgtagccctggaacaggccgggggaaaattacgtatccgggcgccgaaaggggtaataaatgaagaacttaaaaaccgcttacagttgcacaagtctgggttactacaactgttgaccggcgaaggtgatggtatacctgccagtgaaggacagacccggctttggttgtggcaacaacaacaggccggtgatgcctatcatctggctctgggcttgcaactctcggggccactggatccggcattgctttgccggagtttgaatgaagaaattgcgtctcacccagcactatgtacccggctggtagaaaccgatcagggcttataccagcgccttgcaaatggacctgcggagattattttacgacaggctcctgccggtacgccgcaggagtggctgaatgcgctggccgctccggcttttgatttagcacaagaggcaccgcttcgcgcgcaattactgcagcggagcgaaaattgtcatatgttgctgatggtttttcatcatacggcgcttgatggctggagcctgggaatagtgctcagcagattggctcaacgctatcagggacaggcaccggcgggagagaacctgcctttatatcgtcgtgtcgccgatactcatgaggctgatacctggtgggacgcctacctgcaagatgcacccgaacctatcttgttcccgtcagccggacgtgagccatcgcagactgaccatctggtatttcccgtcgacgacgcgctgtggaagcgtctttcagatttatccggccagagcggtattagcctgcaccattggctgaatgcggtcttccatctgctgctaagtaaactgtatggaaaaaacgacactattttgcaaaccccttatgccaaccgcaatgacatgcaggactcctcgcgcgtagggtttctggtcaatacgctgttcagtcgtgcgcgtatgaaacctgaacaaacattacattcgctggtgcaggcgctggcggagcagacgcaggaaagcatgcttcacagtcacgcctcatatcgggagctaatgttccggcacccgaatgccgtaagcaatattatgttcagccttgaaagtgatcttactgacgggtttgcattgcccggcattgatatcagcctgattcgttatcagccccggcaacccaagtttgacctgatgcttaccgtcattccgggtaaaaagccgcagtgcctgttcgaattccgtaagggggcattaacgtctcaggaagtgagcagaatgggcgaggcctatctgcgccttttgcaacaaatggcagaggcgccttacgcgccgcttcaggcaacacgtctctggacggataccggattaccggtgctgccgcaagcgccggatagcatactggcgcgcattgaacggcaggtcaaacggacgccacagggcatcgccgtcgcacaaggagatgaatactggtcttatgcgcgactgtgggcaagagtcgggcgaatagtggaatggctgcgtgcggagggagtttgccctggctccaacgtaggcatttgcctgcctgccggaccgcagtcgttggcggcgaccttaggtgtcctggccgccgggtgtgcctatgtgccattggataatcaacaacctcaagcgcgtttacaaggcatgattgcggatgccggactggtccgggtgattgatccacacactctccctgcgggagagtgtgctgaggattgggtgccgtgctctccttcaccgcttgaccctgcctggctgatatttacctccggttcaacgggaacgcctaaagcagcgattgtgcatcacggaggggtgtcgcgcctgttggactggtatctgcaagagcttacgcaagaagagccgatgcacgcactgttgatcagcaatacgtctttcgatttaacgcaaaaaaatctgtttgcgccactcatgtgtggcgggcaggtccttttccctgtgatggagcagtttgatccccaggccattctggctgctctgacgcaattccgtgccaccgtcattaactgtacgccgacagcgtttatctctctactgcaagaatctagagaacgggactatgtcgcactagactccctgcggtatgtggtgctcggaggggaaccgatcctgctggcacctcttcgccagtggcaacaacaacgaccgacaccatgccatttcattaacagttacgggccgacagagtgtgccgatgtggtggcctggcaccggctgaagcgtcctttggacgcacgggataatcccgtccccatcgggcggcctgttccgggggctgttctttctgtggtcgatcttcacgggcagcccctgccgccgggtaccacaggtgaactgatgatcgacggggacggcgtcgggctggggtatcaccaacggcccgatatcacagctcgacagtttttacccgcgggatgcggcgtcaaccatcggcgttatttaaccggcgaccgcgctcaattacgcgaagacggcaatctttattatctcggccgcagcgatcgccagataaagcttaatggctatcgtattgaaattgaagaaatcgaagccgcattactggccacaggttgggtggataaaacagccgtttccttacgtgaagatacccgcggtcatgccattctggtcgctttttattgcagtacccaacccgatttaactgagcggaacttgcgcgatgcactcagtcagcggctggcgcactatcagatgccggcacgttacgtgctgctggatgatatgccgctgacgcgcagtggaaaaattgaccgtaacgcgttaccacagactctgccgccgggccaatatgtttcgtcggagggtatgttacatccggggctggagaaggaggtagcggagatctggcaatcattgctgggctgtctggttgaggatcgtgatgccgatttttttgcgcttggcgggcattcactactggcgatggaaatggtgcgcgaagtccgtcgtcgtcttaagcgacctgcgcgtaccggtctgttgctgcacaagcctcgtcttgccgattttgccgatgcgctggcccggttacccgtggatcaacctttaccggcaactgtgtacacccgtgatccccatgcgcagcatcctcttaccgcgatgcagcaaaggttgtggttcctttggcgtctcggcggggcgggcagcgattattccatgtgtgccgcctggcaactggagggcatgctggacagctcccggttgcagaatgcactggccgcagtggtcgcgcggcatgaaatccttggcagtcggttgattgaggatcaacagggaccccgttacgctgtctcgctacaggatggtccggtagcactggaagagtatgacattaccgaaggggatttcccggcgttccgtcagcagtttcatgcggaacctgttgatcttgcacaggatcgttttatccgttttgcgctggtgcatacggcacaaaaacgtcactacctgttggttaatctgcatcatattgccgctgacgggttgtcattgccggtgctgatggaggatttacaggctgcatggcagaacgttcttcctgccgaacctgcgccacagttttccgggttaatccgcctacgtgagatgaattatccggagttacgcgagcactggaaaagctggttgaccgatgcgccgcaaacgtcactgtttccggcggatggcgcagaggggcaatatccggggcgtgaggcaggggtccaaaaactagaactgtcgccacaacagtggcagcacgtcaggcaacaggcacgccaatggaacgtcacgccgtttattgtgatgttaagcagctggttcattttgttgcagcgatacagtcgtcaggatgatctgattctgggcgtaccggttgcactgcgtgatgatcctgagagtgagcgggtcatcggtccattgcttaataacatcccgttgcgggtgcagtgtgatagcgccctgtcaacagaagagatagttcgtcgggtggcgtcatcctttgatcaggccatgagcgcagccgaactgccttttgaagagattgtggatgccgtcaatccgttacgaaatgcacaacagtcacctttatttcagattcaggtggtggaagatccggctaacctgagcaggctggaacttgaggggataaaagtcactgcctgtcctgcgttgtcgcagcaggcaaaatatgatcttaacgttcatttccaaccgcaggatgaggccttcagcggttatctcgcttatcgcacggctttgtatggcaaagacacgatggcccggttggcacaggcctggcaacggctgctcatcgccatgttggcaacacctcaggaagctacgggcaaactgagtcttctatccgcagaggattttgcgggccagcaggaaaggttgtgtcacaccgacctctcgctcgataccacgggcacattgcatgggctattcgagcaacaggtgcagcgcacgccgcaggcgacggcggtcatagggcctgacggcagcctcagctacacgcaacttgatgagtgggccaaccggctggcacatggccttatcgccgcaggggtgtcctccggtgactgtgtttccgtgtgtctgccacgcagtgccgcccgaattgcggtgctatatggcgtacttaaagcgggcggtatgtatctgcctgtcgatccgcagtggcccgcagaacgacaatctttggtacgcgatcaggcacgacctacgctgcatattgacgagcattgccttgcattacttgcggaagggcagcctgacacggcggtcaaccggagggttgatgcacagatgtgctgttatctgatgtacacctcaggctccactggtgtaccaaaaggtgtgcctatccggcacggaggcgtggcgcacgacttactgttcctgatccgccgtctggcgctggggactggcgaccgtgtgctgcaactcacgtctttcagttttgatcccgctgtgcgcgatctgttcgccactctagcctgtggtgcaaccgctattttgcctgatgatgccacggcaacgcatccggcacgcattctgaccctgatggccgaacatcgcgtcagtcatgtgctgtcgatggtccctacgttactgcgtgcattgctggcagaaaaccaggcccttggcgcactgcgggtacttatgcttaacggcgaacggctgcgcggtgacgatctcactcattcccggcgtgtttttggtcaacagcttactcttatcaatcagtacgggcctaccgaagccaccatgaccagcgccacacatgtcgcgacccttggcgatgaacaggccctgaccgtgccactgggtattgccaaccccaatacgcaattgctggtgatggatgagcaagggatggttttgccagagggggccgtgggtgaaatttgcattgccggaccaggtttgtcagaagggtatttcggacagaactcctcggaaacgtttgtctggcgcaccttacccgatggcgaacgccgccgattctatcgcagtggggaccttggacgctggaacaatgacggtgtactgaccttccttgggcgactggatttccaggtcaaattgcgcggtaaccgtatcgaactgggtgaaattgatgcctgtctggggcaactgccggaaatacgtcactgcgcagttaatgtgattggtgatgaacgaaaccctgtgctggcggcctggattgcggaaagttcaccgggcgcggtaaagctcgataccctgaaacagacgctgatgacaaaactgcctgcctacatggtgccttcaagcttcacgcttttgccagaactgcctttaacggccagcggcaaggtggatcgccgtcgtttaccccagcaaatcccccagcaatcacggggaaaagttactccgctcacctctgacgaacgggttatcgctgaagtctggcaacagttgcttgaattaaacgcgctgcccgattgtgacaccaattttttcgagatgggtgccaattcattgatgatggtacaggccagcgagcggatcactcgagcgttaggccgccctctggcggtcgttgatctgtttgctaaccctaacatcagggcgctgagtcgatcccttgaacaaaaggtaaccgggccacaggtgctctccgatatcaatacgcatgccagcaaacgccgcgccgcgctggcacaagttcgcgaacgccgtacacccgttcagacacaaaggaataactcatga

SEQ ID NO: 440852 - DNA, 426 bp, Serratia marcescens
atgagcaacactcacccggatcgcctgacacgtggtatgcaaactattgaatctttggcattgccgatgggtaacccgcacgggcttctgcacgggatgcgtctgcatgcccctaagtttaaacaacatttcttgcaggaactgggcgatcattttgtaacagaacaggctgtcgatgagaaaacccgcgttctgttgtcgttagtactggcctgcgcggcaggtacgcctgctgcattgctggagttttgtaccggtgcggcattaagacagggttggcagcgggaacaagttttgaacgcggttgaacttacggcgttatttaacggctggccggcggcgattgaagcgactcagaccgtaatagcgaccttcggcaaacttgatactgtcactcaggagactcaaaaaaatgacgcatgctga

SEQ ID NO: 440853 - DNA, 849 bp, Serratia marcescens
atgacgcatgctgaggcacatggccgcttctttccgttggatgaacacggatacattgtcaatgacacctcacacagttattttccggctgaatttggtcaacggttggtcggggcgttccagcatgcttttccgtccgggctgcgggccgtttatctgcgaggttcagtggcacgcggcacgtttgtaccgcatctgtctgatctggacgcctttgccgtcctcgatgatgcgtgcccgacagagccgttagccatagaggctgccttagctgctgaattacgcacattactcccaggggtgacggagctggaatttaccacctgccatgaatacgaagtgttgggcaattatctgggggtatggccattttttattaaaacccaatcactgctgctttacggggtggattatgcctctttgctggcgccttatcgacccggcgttgccatcatgggggaggcgttgtggctacctcagcgggtcgctgaatatcagcggcgtctgatccagcctgaatggcaggcaaagccgcagtttctgtgcgaatggatgatgaaggcagtggtccgcgccgcgttcgagctgactatggaacaacagcattgctacacacgggatctagcactttgctgtcaggtattttgcatgcagtacccacatcaggccggtctgtgccgtcaggcaatggcatgggccatttcgccggatgaggatcttgccggtcagcagcggttgcttggcgaattctgcccctggatagaaaaacaatcgaaacgtttgatggttgagtatcgccttgatcccactgattaccatctagcccctgccggggagggcgctccatga

SEQ ID NO: 440854 - DNA, 1236 bp, Serratia marcescens
atgagcaatcttactgaaacactgcgtaataaaagtctgcaaaccatctggtcagcggttttgatcagtacactgggtaattttttactgatgctttcactgtcggtttatgtatggcggatcaccggcagtaattttctggcatcggcagtttttgccgtgcagtggggcgctattatattttccgcgccgctggtcagtcgccttttgcaacgtattcctgctgccagactggctgcgggaagtgagtggttggggggcgtggtgtcactggcaataggcctgagttatcagcatttgtggctaatatttgtacttctcgctttgcgcgggctggtggaaagcctcagtaaagcggcgcgtgtggtcgcgcttaaaagtagtgttcccgcgcctttattggggcgtgctgcatcgctgttcggtaccgggacttttatcggtattgccgtcggctctttgcttggggctgcattagtggaaaaagtctcgttggaatgggtagcattcattgacagtctgactttcgtggtctcaggcagtctgtatttcctgttatggcttcgtaaccgaggaatggaaagcgctgcgccagccagcagtggcagcgcattacgcccggcattcgatgcactgcgtcaacaaccccaactgcgccggcaatttgtctgggtgatcctgaccacggcacttttgcaggggtttcataatgtcgcgcggaccctgttgcccatcaatctgctggggctgggggaagagggggtcatgttgctgcaggcgatagccagtgccagtttctttttcggtgcgttagtggtggctttgctgatgcagggtgaaaaccaaagctggcgtaatcaaccgtggcttattgcgttactgagcattgtgctgatgcagttctcgctgttgacgcctgtggtctggttgagtttgaccagctacgcactctatctgtttgtcttcgagatagccttcaccttctgtcagaaaaatatgattgttcaatgccctcagtcggcgatggcggcggtgtcatccagtgcgttatcgatttccacgctcggtatggtgctggctattattgtgggtggggcgctttctgaccgggttgggctggtcgcgacgggctgggtattctgcgcgctgtttgctgcagttttgttgtgggtcgaattgccttactggctggggaaaaaccaacgttcaacgctggaggagcaggcaaatgattaa

SEQ ID NO: 440855 - DNA, 540 bp, Serratia marcescens
atgattaactggttgcgcagcgatttgagcgaaaagctggtgtggtggatgaaacccggcgctgacaatacgccgttgtctgacctgctgaccatcctgcaacgcggaacgctgacgggtgaacttcctccctacattttaggagaacgccgctgcatcgcttttactgaaattccccttattcaggctgcacggctgctgctcaatgcgcggtcggcggggttaaattttgcaccttacgggttgcagttcgatcgcaatgccatgtttgccaagggagcacggcaaaccatccatcaacctttgtttgaggcggaatgccttagtgcagatcaacgttttcgtcacgtcacgctggtaccggaaaacgggatggacttcacatggaagcgcgaatggcggctgccgatggatgagtacgtatttgacgcagaccagtgcacgctgattttgcccgaccgtcaggcattgcaatggttaagacagcatttttcatcaccaatgactggcaacgtacttcttctggaggatcttttatga

SEQ ID NO: 440856 - DNA, 1614 bp, Serratia marcescens
atgaccctggcattgtcccacggcgcatcaccacagcatagtttatggtcgctcaactccctgcaagacgcactccggttggcagcgcgtcatccggataatgggattgaaaccctgaatgctgaaggagagcgctcgttctggcgctacgcagatttttatccacaggctattgctgccagtcatgcgttggcagaagcgggaataaagccgggggaacgggttttgttgcgcctgctatgcccagcagattttgtactttctctctggggatgtttgttgctcggtgctgttgcggtaccgattgccgccggacaaccctggccggagaatgagcaagcgttaacacaagcactggcagccctgaagttaattcgccctgctgcaatgattggtgcgggtcgagatctggcgcatttccggttgctccagaaaaacatgccacaggcacagatgcctgttattgacgttgcgatgttacgcgcacggcctgccagtcgtgaactgacccggacggtagcacgaggtgacgatttagccgtcattttccctacatcaggctctaccgggcaacccaagctggtgactcaaagtgtccgtgcattgctcgcgatggcagcaggaagcgcacagatgaataattttacggaacaggatgtcttcctgaactggatgcctatggaacacgttggttcagtggcatttttgggtattttgcctacctgttgcgcggcgcaacaaatccatctggccaccgcctgggtagaagccgatctggggcgttttcctcgccaggtcgcacagaaccgggcaacagtcggttgggtacctaatcatgtcttcagccaactggcacaatgccaggctgcaactgattgggacttcagcagcctgcgttttctggttaatgccggggaaagtatcagtgaccagatggttcattgtgtcaggcaattcgcaggttatgggttaacggctgctgcattgcggcccgcattcggcatgtcagaaacttgctcggggctgacctggtcagacggcgatggccagcggatcagaggttatgtcgattcaggtatgcctatccccggagcaagtttgcgtgtcacgggtgcgaagggagagttactccgggaaggtgaggtgggcgatttgcaggtccgtggcccttccgtgactcggggatactttaacggtgaggccgaaagctgcttcctgcccgagggctggtttgtgacaggcgaccgcgcatttctgcagcaagggcgattgtatatcaccgatcgtgagggcgatggtattgagggtatcgcgatgcccggttatcagcttgaagccgagctggaacggttgccaggcgtccgtgctggctacaccgctgtctgtatggcagccggagtcatcggtattttttacgtcgtccagacgggggccgatgcccagacggtagccagccggatagcgcagcgtgcaggcgaaattatcgacgctgtgccgtaccgtttgttccggtgtgaaagccagaacataccacggacatccatcggcaaaattcaacgtaaggtattgcgccgtcgtctggcagggatgattgaacaggaagccgttgaatga

SEQ ID NO: 440857 - DNA, 705 bp, Serratia marcescens
atgaaatgtcatgcattcggttatgccggcagcagcgataacgctttcatctcgcttaatgccggatggccacgggcattatcgctgcaacagtacgtctatcccgggcgaggaagtcgtgtatcggccgattttgctgcctcgctggagttattagcacgccaggcggcacaagagatcgctgcagagcagccggtggtactgctaggttacagtcttggggcgctggtggcttatgaaacggcacgggtccttcgtagccagaataagcaggtggcagcgctggtggtctgcgcgatgaatgcaccacattgccaacagccgtcccgacaggtgcatcagatggatttgcctgaactgactcgttatctggcagacctcggtggtacaccgccggaaattctgcgctcaacagaactgatggcttggtttgctccggcaatacaggccgattatcgtttactcgacggctatctgccgccttcggaaggcgctctggactgcccgatcgtggcactttatggtgaagacgatccgctgacgacgctgacggggattaaggaatggcgtcgttgcacccgtgcctctttcgaatgcgccagccttcctggcggacacttcttcctgcagaatcagcctgaaaccatgacttctttgttattcaatctgttaccttccctcacgctgaaggaaatatctgtatga

SEQ ID NO: 440858 - DNA, 1698 bp, Serratia marcescens
atgaacgcagatctttgtttcgaattttgtgcgatgaacagccgcgtcggtgacattgccggcaacagtcagcgtattcagcaagcctggcagcaggcgcgggcacgtcatgctgacttgctgtttttaccagagatggcgctgtccggctatccggctgaagatctggtgttgcggcgcgcctttatgcagcagatcgagcaggaagttactgctctggtggcactgtcggtcagcgcggatacggcattaatgctgacgacaccgtggtatgaccagggaaaactgatcaatagcgcgttgctgattgataaggggaggattgtacagattatcgccaaatgcgaactgcctaactacggcgtttttgatgaagcgcgctggtttcagccggggcagtcaccttgtccggtgacgttccgggggcaacaactgggggtgatgatctgtgaagatgcctggttgccacgtctagcccggcaactggaacgtgccggagcgacggtgcttatttctctcaatgctagcccgtggacacaaaacaaacgagcccagcgcctgcaagtgttgcgccagcgggtcagtgaaacccgtcttccgctaatttatctgaatctgctgggaggacaggatgaactggtattcgacgggggtggtgccgtattgaatgcgcaggggagtgtggtcatgcattggcccgcctggcaggaacagtcattcaccgtttatctcgacagacaaagtggtcaaccgcgtctgatgcagcctgtgccagagcccgatgaggatccgcttgcggatttgtaccatgcattgctgttaggcttacgtgattacgccgtgaaaaatggttttggcagcgtattgctggggctttctggcggtattgattcagcactagtggcggtactggccgctgatgccttgggtgtcgggcaggttcgtgcagtgatgttaccttcacgttatagcagtcacggaagtatggcggatgcgcgggaactggcgcaacgctgcggtatcatgctttattcactgccgatagcagaaccgcatgccgcattagaacagacgctttcctggttcctgggggatgaacccttacaagacctcacggagcaaaatcttcaggctcgcatccgtggtacgctcctgatggcgttatctaatcagtggggctctctgctgctctctacggggaataagtccgaagttgccgtggggtattgcacgctgtatggcgatatgtgcgggggctttaatcccatcaaggatgtctacaaaacgctggtctatgccctctgccagtggcgtaaccaatatcagcctcagcagggatacctgcgggcgacggatgtgatcccacaaacgattctgaccaaagcgcccagcgcggaattgaagccgggtcagcaggacagcgacagcctgccgccttacgaaaccctggatgccttgctacggcttttgatcgaagaaaacctttcctgcgacgaacttaaggctaagggtttttcgtctgaggatatccatcgggtcgcgaggttgttggagagagctgaatacaaacggcgccaggctgcgccgggaattaaaatcagtgagctagcactttcaagagagcggcgctatcccatcactaacggcttcgttttgtcggcgaatcacactgcaagcgaggttttaaacgcatcatga

SEQ ID NO: 440859 - DNA, 630 bp, Serratia marcescens
atgattgtgtcgaacatgttgttaacttttgttctcactaatttggcgttaaacgtaacgcctggtccggcggtgatccaggttacgagccatgcgtttactcagggctggcagcgggcgcaactgtcagtgttgggcattttgtgtggtaacgcgctgtattgtctgctttctgccgtggggttgggggcattgttgatggcgtggccgcatgtttatcagatcctgcgctatgctggggcactgtatctggtctggctggcgttaaaacgtttgtggcaatcctccagaggttctgccctgaaaattgcacacaaagaggtgtattccttatcttccctattccgtgaaagttttctgttgcagctttctaaccctaaatcgctcctgtttttctgcgcgctgttgccggtattcattggcgtctctgacggacagggcgggatagctatcctgctgctcgggctgttggctatcgcgttggaatatcctgtgttgctcggctacacgctggtcagttcgactctggcaaaacggataaatcagggaaatgaccgcggacgcagagtgatcgatgtgatttgcgcgtttctattgctgtcttcagcatcactggtgctttttgcctga

SEQ ID NO: 440860 - DNA, 2307 bp, Serratia marcescens
atgtcaaagggttatcgtcgtacaggtaagattgttttggggttggtcacaggcatttttatattgctgatgctgtccgctatggctggctggctggcattgcatcagagtctgcccatgttggacggcacgttgaaggtatccggactgactggtgaagtgaaggtcatgcgggatcgacgtggtgtgccggatattgttgcagcagatagccagtcggcctattttgctctcggttttttacatggacaggagcggtttttccaaatggatttgctgcgtcgcagcgccgcaggcgagctggcagcactggtaggtaaaggcggtctcaagatggaccggcagcgacggatatttcaactacgtgagcgggttcggcgtgaattatcggtgcttcctgaagctcagaggcagcgcttagcgtcctatactgacggagtgaataccggcttacatgctctgaaaagccgcccattcgagtactggctattgcgcacgtcacctgaatcctggcgtgatgaagacagcttgctggtcattgctgccatgtatttcgaccttcagggtactcaacctggcagggaatatgcacgtggatggatcgccagaaacaatccttcacaggccgattttcttctgcctacaggtagtcgctgggatacgccgctttccggtaatgtccctgtatcaccggaaatcccccgtactgcaccggtttggtggggcaaaccaagcggtactggtgaggtgaaaaccggggaggatatgaaaggaagcaacggctggctgattgcccgggatggcaaagcttttgtggcgaatgacatgcatcttgggctagcgttacccgggatctggtatcaagcgcagatccaatacgtgcagcaaaatgaaaagataaagctggccgggatcacgcttcccggtgtgccgttcttactcagtggaagtaacggtaatattgcttggggttttactaacagttatgtggataccttcgattgggtcattgtggataaaagtgtaaaaatacgctcgcaacaggtcgcactggcggtgaatcatggtctggcggaaacattcacggttcgcactagcgactgggggccggtggtatcaacacccctcggcgatatggcgatgcgatgggcaattgaattacctggagcacttaaccttaacctgatggcgatcggtgaagagaaaagtgttgatgctgccctagagacgggaaaacgcgcggggatcccggtgcaaaatctcctggtggccgacagccatggcaatattggctggaccctggctggcgcactacccgaccggttttctcccgggcagcaaaacacatttccgcttcaggctacgccgcagagtcagtggcgtgcagagtctcttaaccccgaccgccacccactgcgtgttaatcctgcagaagctgatattgttaccgcgaataatcgcctgctgtttgataccacaggagatgaactcggcgacggtggagcggacatgggggttcgttcttttgctatttcgcagaagctgaaatcgaaaatctctgtcaacgtccagagcatgcatgagttgcaactggacaatcaagcgctgttgctgcagtcatggcgtgactggttgctacatagtctcggccagcgtcaggaaggagaaaccactgaccgcacacggatgcgcaccctgctggcctcatgggatggcaatgccagcgccggttcggccgcttatgcactcgtcgcccgctggcgtgatgatctctactcaacgcttttcggtgagctggacagccagctggcaagccaatggccgcaggctatttaccggcgtgccaaccctcgctgggatgaaaccttattctcactgatgaatgcgggaaaatgggtgccagaagggaatagcagttgggaagactttacgcgccattcgctggatattgcctggcaggcgatggcagcaggccatacgacctggggcgatgtcaatcgtagtgattatgagcatccgctggcgaagtcactgccgttagtggggcgttacttgcgttcacccgccgtgccgttatcaggggataacaatgttatccatgtgaatcgcccgtcatttggggcctctgagcgaatggttgtttcccctggagatgagcaacaggccacgctgagcttaccgtcagggcaaagtggtaatccacttagtccttggtggttaaataatttttctaattggacacaagaagatgctcagccgatgttgccgggtgaagctaaatatcaattaattattgaaggtaattaa

SEQ ID NO: 440861 - DNA, 1614 bp, Serratia marcescens
atgagaattctttcctataatccaggccatgatggtgctgtagcattgcttgaaaatggtcgattaataatgtctgttgaggcagaaaaagattctaatcatcgctattctcctctgagtatttcagatgtattagatgctataggggaaatagacgatatccctgatgtcatttgtgcaggtggatggtggcctcgagatcatgatgagtatttgaagggctcgaaagttaacgttggttatcggggtatatcaaatgcagatatcatggtctcagaaagactattcttaaaaaagaaagttaaatatttttcatcctctcacgagcgagcacacatactttgtgcgtttggcatgtcagatttgccaaaaggaacatcttgttatgccttggtatgggaagggggaattggagcattctacgaattagatgcggatctgaatataactctcattggcaatgttcaaaatcaacccgggaaccgctatggtatagtttatggattagccgatccaagtttttccaaagatagtgcctaccctcgtttctctgatgccgggaagcttatggcgttagcatctttttcaaagagaagtattgcgtccccggaagaacaagagctcatcgattttctgttggatggtcctgcaagaaaacttagcgactacgcgaacattgaaaaagccccgcactataatgttggtttggacgataaagaatttcgtaattttaccggtatatatagtaatgcactttttaatgttttttaccagtttgcaaaagaaaatctgaagaaaagacagccgcttattattgcaggcggatgtggattgaattgtgactggaatactaagtggaaggagacgaatcttttttctgaagtcttcatccctcctgttgctaacgattccggagttgctataggtactgcgattgatgctcagttctatttttcaggtaatcctaagattgaatggggtgtttacagcgggttagattttagagtggacaatacattctgctcggaaaagtatgatgtctataatgtcgacaacgttcaggttgctgatatgctggccaacgatcttattctgggttggattaatggaaaatatgagattggtccgcgcgcacttggcaacaggtccatccttgctgctccttttcaggaaagtacgagggttcgtttaaacgaaataaaacagcgtgagcaatttcgtcccattgcccctgtttgtcttctggaggacgctgaaaagtggttcggatgtaataatgaaagtccatatatgctatttacgcatagggcaaggacagaagtccttgctgcagtcacgcatgttaatggcactgcgcgtattcagaccgttacatcagcaacaaataaaaacctgcatgaattactctcagcttttaaaaatcagactggctatggtgtcttgtgcaatacgtctctaaacttcaatggcaaaggatttataaacaatatcaatgatctggctgcatatgtgcatgagcaccacttggatgggtttgtggtggagggacatgcatatcttttaattgattcttcacgatatcaggcatataaaaaaagctcagcccttttatga

SEQ ID NO: 440862 - DNA, 888 bp, Serratia marcescens
  misc_feature (838)..(847): n is a, c, g, or t
atgcatgctattaaaaaatcgacttacaagggtaggatgaattcatatcgaactggttttgaagaagatgacgacttgcgctcttcattcatccgtgatcttacactgcagcaactggaacatcctgcttcgttagggactgataaaccggagttgtcgccacttattccaaagaaactgattcgctactggcatgaccagtacaacgtacctgaagacgttatggtctgtctcagaagctgggatcggcttcgtgatgatggttttgaatgtagtctgtttaacgatgaatcagcaatggcatatattgccgaacgattcggcactgaagagtgtaaagccttctccctttgccaccacccggcaatgcgctgcgactatctgcgtatgtgcgttttacttgctgagggaggattatacgttgatgctgatgatgtgttacttggcgacaattggaaatatcttttccatgatggatcactcaaagtacaaccattatgttacgatattcagtcctcttcgatggtaccaacagtggatatctggagaacagatttgccgacgactgagcgtattttttacattaataatgatcccattgtggccccgcctggacaccctgttctacggagagcgcttattcgggcaaccgaaacgctgctaagtgatgttcactttcccgaaattcaatcaacgaccgggccaggtaattttactgctgcactggcagcgcatgcgtataaattgataagggaaggggaggcgttcgattttgaatttttacgtgactgggaaatcattgcagaaacgcgttgggagttgtcctaccgtaatgacnnnnnnnnnngtaatgacgaacgtaactggcgtaatattggctcagcttga

SEQ ID NO: 440863 - DNA, 606 bp, Serratia marcescens
  misc_feature (579)..(588): n is a, c, g, or t
atgaaaattaagcatgagatctcagcaactacaatcctatcaataatgatgttcatttcagtttatgccttcaaaattggcgaagccatgttttttggctatccctcatattatatttatttagatacaaatgaagttataaacaccttacttaaactatcttttatcatactattaattataacactatctctatttatacgtatcagcacaaaattctttattttatttattgctatagcggttaccacaaaacttataagaatagctatattaagccaccaccaacctttaaatagcatggctataataaatattggaactagttacattatttttatatgtttattatatttaattccaaacacaattaaaaaagaaactgaaagttattcattaaatactaaaccctgcttgttggcagttctagccttccttggtttttcctattgcttcggacttaattatcataattttttccctggtaacatttggcaaactgatgatgaaaaagttgtagttggtcgataccaagacaagtttatcttgagacaatgcaataacggaaaggctttattnnnnnnnnnntttattttatatagatga

SEQ ID NO: 440864 - DNA, 1242 bp, Serratia marcescens
atgaaaagaacaatattttactcttggcaatccgatttaccgtcaaagtcaaataggaatataattgaggatgctttaaaaagatctttatcgtcgttaaaaagggataaaaatgaaacccttgaaccggtgcttgatcgagatactgccggaacccccggctcaccatcaattagcgatacgatttttaaaaaaatatcgacttcagatgtttttatagcagacatctcgattattaacgcttctgaacgtagcaaaaaaacttcaaacccaaatgtattaattgagttagggttcgctgtttctcaattaggatgggatagaataatccttatacaaaatgcattttttggtgggccagaagaactaccatttgatttacgcgggcgcagagttgtcacttatagttatggtccacaagacgaagccaagtctgagatcagaggtgtattacaaggcagacttgaacatgctttaaaatatgcactgaaagactcaagcattggttcgctacaaagtggtttaggtgctcctgtatggtggggcgaatggattaattacaaccatggaagaaactatggaggtcatttattcataagagaaacatcctcatctggatttttatttgatctttcagtttacagaggttctcactcaggaaaaatcacatcacaagctattttcgtctcaagagacatggcatatgcaaaaatacaaaactacaatggtgaatttggtgagatcagtttcagacgcagcatagttgatggaaaaaaatttctgacgatagaagaaactgctagttgttcaagccatagaggtatgggtgcaacatttagcggtcaatatcaatggtccaacgataatctttttgaactaggttttcttaacgaacttgacttacaaagaatatacaatgttttgggggcctattactttgattttaaagttagaatggaagatatttgtgaaggcgaaaatttagataattttgagtctaaagttttttcgggtggagttagaggaatgcatgcttatatggatggaataattatgctctctccagaaggaagggtatgggtggcatatttagatgataatgatattaaatacttcaccaacgatgtgaattggaaaacaaaaacacccaagactattgataattggcgcagccgattccaacaagttgaaataaaatacatatctgatgcaagtactttaccacataatccctttgagtaa

SEQ ID NO: 440865 - DNA, 687 bp, Serratia marcescens
atgaaacttctgagggaggttcgcaaatcttattcgcaaaaaagaaaaatcaaagaagcaacgaataaggcaatttattattatgatgaatcgcgcaatgggacaattaaattatgggcgaagttatataatgatggtcctgttggaagacgagtctatgatgcaattactagctatgtacatggactttcaaatcgttgtggatattgtcaagacagaatatttcataatagcaattctaatgttgatcatattttaccaagctcaatatacccgcaattcacatttgtagaagaaaatctagttcgagtatgtatgacatgtaatatgattaaagcagcaaacgatttttattcgttgcccctacctgctgggaacggatatcgacaacacacaagaacatgggcatgttatcatccacgtcatcacattttttctcaacatgttgagcgactggtggttcagactaatcacctgcattttcgtgcttatataggtaaaactacacaaggaaggaaaatttgcagtatgctgttacagcaagtcagcgagtttgaggtgaaagcgacagtaaatccagtcgtcgctcaggccgcacaaaaacttagccaattcatacagtcaaaaggtagtgtgccatcagattccatcaatgatttactacaagcgttggtgaaaaatacttaa

SEQ ID NO: 440866 - DNA, 1104 bp, Serratia marcescens
atggaattcgctgaaaataataagttcacttatattattggtaacaatggttcaggaaaaagtcgagcattagaagagaatgcggagcggctctcagaaagtcgagatgtagtagtgattgcttctggtgtatcggataaattcaaatttagatctcaaattaagaaaacggccaatgggtcatatcgttacttggggaatagaaccgtcggaaacggtactcacaatggcaccttagcagcaaatgctgtgatactttatcttgcaatactagacacagatttgtgtccggcattaatgaattttcttgaagaaatagggtttgaaggaaagtttggtattagttatagaaaaacaaagttttctaagactcaaccgtttaacacacaagagttaacaagtgattttgcaacagtaaataaagagatacttgttgctaaagagcgtccttttgaggctgttttttacaaaaatggtactccataccccttttctgacttgagttctggtgagcaatacataattaacaccgctttaaaaatagttacatcaattaatcagggtgtatgctactttattgatgagcctgaagttagcttgcacgttgaatggcaagttaagtggcctgaaatttttcatccattactatctttaaaagatgacgttaactgttatattgctactcactcgccggtaataatttcaagcgcattgcaagctggagctgattgttataatttgtccgctggggaactgattagaataatggatgatgagttcaatgttgagcgtattctatataaaaatttcaatacaatccctcctgataataaatatatattcgaagagtttgctactattgttacaaaaaccattgaaatcctaaccagtgagaatattaacagggcaagatataatagagccgagacatcaactcttgcatccgttgagaattttaaaaaaaagcttaagcttgcatctcatacagaaaaggacagcgaagatattaagcgaacaatcgaggactttgagatggctatcagggatttgattgcgatgtctaaaccggctaaccttcagggagaggagatagagactgaatga

SEQ ID NO: 440867 - DNA, 519 bp, Serratia marcescens
atggcgactatcgcccggtggctggccagtgccgttaataaccctgccgccactatcgacaaactggagtcggcgcgcaaatgtgcctatgtcgtcggttactcgctgattatcctgcccgaccaggaaaagtggagtggtgacgaggcgggtatcaaggccatcaccggcggcgatgcggtcgtcatcgatccgaaataccgcgacgcctacgcggtctacatccctgcagttatactggcggtgaataacaacccgatgcagttcagcgagcgcagcggcggcatctcgcgccgccgggtgatcctgacgttcccagaggctatcgcctctgaagagcgtgacccgctgctgctagcgaagatcaccgaaaagctggcggtcatcgtgcgtcacctgatgcaacgctttgccaacccgaacgaggcccgcgcactgctccaggcgcagcagatttcggcagaagccctggaaatcaaacggcatgccgatccgcttattgattttgtggttacctga

SEQ ID NO: 440868 - DNA, 180 bp, Serratia marcescens
atgatcggtaatgccaacatcaccccgccgaatccgtgccgctacctgtaccgcgcctacctgtcgtttatggccgcaagaggctatcagcacgtgatgagcctgacagcgttcggccaggcggtgccgcagacgctgaaaaagtatgagcatacgctgctgaaacgccgcaccaagtag

SEQ ID NO: 440869 - DNA, 1347 bp, Serratia marcescens
atggctaagttgaataaatataagccgtatgaatcatatactgatactagtgctgtttggtataagcaaaaaccagctcattgggaatgtgaacgattcaagtatcattttatagaaaagaagaaaaaaaactcaacttgccttcctgcaggagccatcagttttggtgaggtaatcttcaagaatgaggataacttatctcaagatacaaagagttcataccaagaggtgtgtgcaggagagtttcttatcaatccgctaaatttaaactttgatttgaagagtttaaggacagcgctttcaaccatcgatgttgtcgttagtactggttatatagtacttcaggactgcggattcctacatcctcgtttcgctcgttggttactacagcaatttgacgtttcgcatatgaaaacgcttggtgctggtgttcgtcaaacaatcaattatgcagatattggtaactcactattttgtcggcctacatttgaagagcaaaaaattatagctgcatttctcgattacgaaacccaaaaaatcgataagttaattgagaaacaacagcaactgattgaactgctgaaagaaaaacgtcaggcagtgattagccatgctgtcaccaaagggctaaaccctgatgtgccgatgaaagattctggtgttgagtggttgggggaagttccggaagattggcaattaaagcaactacgtcatttgtgtagctcgaagggaggtggtacgccttcgaaaaataatccaaaattttggattggtgatataccttgggtttctccgaaagacatgaaagctcaatatatttatgatgctgaagatcatgtcagtgaagaggctgttaagttatcttcaacaaagaagatacctattgactcagttttgattgttgttcgcggtatgatattagctcattccgtaccagtgtcaataaacaaagaaatagttacgataaatcaagatatgaaagcgcttataccaaatgaaaatattacttctgagtacttttatcttgttttgactggttttaaacgttttttattagaattaactgataattcagcacatggcactaagtgcttgagaacagatcttttagaaaaattatggattccattaccatcaataaaacagcaagaggaaattattagaaatgttaatgagctagtagctaaactcgatagcctcgttcttcgacaagaagaagccaagaagttactccaagaacgccgcaccgccctaatctccgccgctgtcaccggtaaaatcgacgtacgtgactgggttgcatctgatatgcaagacgctgaggagccacaggagaccaccgcatga

SEQ ID NO: 440870 - DNA, 516 bp, Serratia marcescens
atgtcagccgtatccaccatctgcatatatgctgctggatacattgagaaaagctccatgtccggctcaatacgcatccgctcagtctgcaccatcgagatggattccacacctcccgcaacggcaatgctcatgccatcaacaatgatttgcttggcagccgtggcgacagccataagacccgaagcgcactggcgatccaatgacatacctgaaactgacgtaggtaaccccgcgcgcaatgcagcaaggcggccaatgttcagcccttgcacaccttgctgcaatgctgcacctagtaccacatcatccacttcactaccgacaatccctgctcgctcgacagcgtgtttaattgcatgcccagccagtgttgcggatggggtggcgttgaaagcaccgcgatatgctttgccaatcggagttcgggcggtagaaataataacggcatcacgcatagtagattctcactggttattttcggattgtgaacggaaagcggcgatgagttcttga

SEQ ID NO: 440871 - DNA, 798 bp, Serratia marcescens
atgaaaccgtttttgcttttttttatgctgattttttcacttcaggctaaaggtagctgggagttagacgtaaaatactcaccaccggctaaacagtatttagttaaagttataagatgggatgtggacgactccagcagaaaccctgtacgtttctgttatagtcctatgacgggcgatgatagtaagtgccgtattttcatatactataactctcccctcaatgtgggctggtttaatgaatcattttacttgggtcgcgaggcatcagatttaagaacgatgggggagttagccgatcttttcgccaggaaaggctatttaaaccgcgaggtaaactctagaacttcgtctgccttagaaaagaactgctttgcattggcatatcagcagcaattcgtggagaccattgtaccaatggatggaggggctctggattgcacgatggcggaaattatccccacatactgcagcattgaggagccctatattgagttggatcacggtccggtaacgagcgacgaggtgaatggccataccgtcagcagttcctttagagcagcttgtaataaagatttcaaattattgattgtcgcacaggatggaaaaggcgatcttcagctgggcggtgggatcaccagtcacttgaaagtaaacggtgacgatctcggtattgggcatgaggcagtggtcggcccggcaggaaaaacgtttacattaagctcaacgctgagcggctctcccagcggtgtcggtgaatttcaaggttcgaaagtgataatactaagtatcccatga

SEQ ID NO: 440872 - DNA, 807 bp, Serratia marcescens
gtgtcaattataaagcatattattggtatcgttgccggattaattgtctcatatggctacgccagcccttatcctattgtgagttctatttccagcactattgtggataatggcgcctcaagatatatgaagtatgagtacacagagtcagtcatcgagatcggtagtgcgggggatgttgttgtacctgataaatggttcgtaggtattgcgcataaacactatgagtctaagtcaagcaatcctattgcaagaattgaagggtttggcaatgtgtcaggtaatggtgtgcgaacaatcagtgatcttgctatggaagtttatagagggaagcaaaataatgccattcttcacagcggttatctggggggcgatattcctgaatgtttggggtatgtggctgccgcgagtcgtgttttaacaccctggagcggtactctctatcctgcgggcatgtgcctgatagtgcctcctccccagcaatggtgcaacattataacaccaaaagtggaaattgatcatggcactctttctattaaagaagctgagagctccatagcggaaggaaaggtttcaattcaatgcagtacgggaacaaaagtaagggtgcgattcattaatgatgagccttatatcaatctctcacctgcagggcttgcgtatataagcgttaatggtcatgcgattggtggcgtgtttaatctgttggctggtgctaacgtgcttaatttaacaagtaaattatttggcttgaataatgccggaagttattttggcagcgccattatggtgatagaacccgcctga

SEQ ID NO: 440873 - DNA, 531 bp, Serratia marcescens
atgggcagtacacaacagggaatgggcaaaaaggtgaaccgcttatttaacacaacatgcatgctttttttgaccggtgcattctgcctgtttgcggctggagtgacgcaagccgccaccatggtatcggtcaaagtgaccgtgctggcgccgctgccttgcgtgatcaacggtaatcagccgatcgaggtgaatttcggtgatgaggtgatgacgacgcgcgtcgatggcgaaaattatcgcacgctcgtcgactattcggtgacctgcgacaaaccggaaaagaacggcatgcggctgttgattgccggcaccggagcggtattcgatggcaagctgctccagaccaatgtcggtagcctgggcattgcgtttttaaacaacgatgcacgtatcgaattgaacagttggcagaatttcacctttcccgtcttgccgaagctggaggcggtgcccgtgaaacaggcgaacgcgacgctaccgacgggcgagtttacggcctccgccacgttgcgtgtcgattatcaatga

SEQ ID NO: 440874 - DNA, 300 bp, Serratia marcescens
atgaccacgaatgaagtgcgtcaggctgtatttgctctggtcaaaaaacatgatggttggtcgttcattccattctttaagaaagaatggaccctcaaaacagatatagacagcgatttacatttcgaacgtgaagaagcagaggctctaatggaggacttctttcatcaattcaatgtagaaagagggagcttcagtatcgatacctattacccagatagagatgagctatctcaggttcccgattttactctagagatgctgattaactccgccaaggcggggcggtggttgtactaa

SEQ ID NO: 440875 - DNA, 1959 bp, Serratia marcescens
gtggccgccgctcaatgcaaaagcggcaacgcttacctgaacgccaagggttggccggaggcagaaaccctgaccctgcacggtcagccgctgcgcgtcggcggcatcaccttccagcccggcgacctgctgctgccgctgtacaatgccgggggagaagtggttaacgtgcagctgattaacgccgccggtgacaagcgcatgctggcaagcgggcaggtgaaagccgcctgccacattctgaacggcccggacaacgcggttatctggctcaccgaaggctacgccaccggccttaccgtgcaccgcctgaccggtgagacggtgtgcgtggcactcagcgccaacaacctggcggcggtggcggagcagctgcgcagccattacccggatgcacggttgctgctggcggccgataatgaccgcagcggcaccggacagacccgcgccgccgaggtggccacactcaccggcggcactccggcactgccgcccacggaaggcgactggaacgacgtttactgtcagcagggcgctgaggccacacgtacgcaactccaggcgctcagccagccgccgcagccgagcccgttcgacacgctgagcgatgctgacctcaaagccatgagcgccagcgagaaagccgagctgttggccgagcactacggcaacaccctggcggtgccgccggtgggggaagaactctgccgctatacgcgcggtgcctggcaggtgctgccacaccggcaactgagccgggagattgccgcgctgttccagaaggtgcgcgcgccgttctctgccgccggtatcaacagcattttggacaccctcaagctgatggtgccgcagatgggcgacccggctcgccggttgattggctttcgtaacggggtgtttgataccgtcagcggccagttcagcgcccaccgccaggagcactggctgcgcaccgtcaacagcgtggactacacgccgccgcgtgccggggagaacctggccgaccatgcgccgcacttctggcagtggctgacgcgggcagccgggggcaatcacgacaagcaggagcgcatcctcgcggcgctctttatggtgctggccaaccgctacgactggcagttgttccttgaagtgaccggcccgggtggcagcggcaagagcgtcatggccgccatcgcccggttgctcgccggggcggacaacaccacctccgccaccatcgacaacctggagtcggcgcgcgagcgggccagcgtggtcggcttctcgctgattattctgcccgaccaggagaagtggagcggtgacggcgccggtatcaaggccatcaccggtggcgatgcggtcgccatcgacccgaaataccgcgacgcctacgcggcgcacattccggcggtgattttggcggtgaacaacaacccgatgcagttcagcgaccgcagcggcggcatctcgcgccgccgcgttattttgccgttcccggaagctatcgcccccgaagagcgcgacccgttgctattggcgaagatcaccgaagagctggccgtgattgtgcgtcacctgatgcagcgctttgccaacccgaatgacgcccgcgcactgctccaggcgcagcaaagttcggcggaagccctggaaatcaaacggcatgccgatccgcttgtcgatttttgcggttatttattggcagagagtacagctaacgggctacatatgggtaatgccaacattatccctgccaacccgcggaagtatctatatcacgcttacttgtcgttcatggaggcacgcggccatcaaaaaccaatgagcttaaccgcttttggtcgagcgataccgcaaaccctacttgagtatgagatcacattgctgaagcggaaaaccaatcttgggatacagaccaatctggtactgaatgatgagtgtgaagcggactggttgcctaagtgtgaagcgtag

SEQ ID NO: 440876 - DNA, 1980 bp, Serratia marcescens
  misc_feature (307)..(353): n is a, c, g, or t
atggcaatcgatgggttggattcaagctacccttccgtacgcgatatctgctttgattttctcattcagcaaactccgaccttaagtccagatatacagaaccagttgccatcgtggactcacaaagttaacaacaacagccatacagttcttcagtgggaaaatggacagccctggtacccgatgaacagtgagctcatcattagtactagatggttccatgaatatgacaagcaacacgttgaaactcttctagatgaaattgcgtcaggtttggatgtcatactcacttccaaagacgcttatnnnnnnnnnnnnnnnnnnnnnnnnnnnnnnnnnnnnnnnnnnnnnnncgcttatgacattgttcatcacttggagacgtcacgggagagactcgatcataaactcatggctaaattgctgagtgtaaatgagcggtttattcgtgcactggctgcaaaactatggatgcgcattaaccgagaaaatgattatgatattcttgatcgaatattcaatgaaacacacccggctgttgcagaatctgtcttccagtcggctatgaagggatggcatctgtattcagcagaaaggcaacattacgttctgaatgcacttgaacgcatcgcatctcaaccagttctggcaaatgctatcatacaattgctagttatatttgaacgagagcatgctacaggagatacccccccctggcaggtctttgctcggttacttcctatcgcactttcctctctgacagcgactgtggatttaagttttgcacgcctcgcgcatgttgtcgaagaagctcagcaaaaacttacacctgatgaaatgatggacgtgctgacaagctgggttacattacttgaaaaacagaagttttacagggatagctttgctttaaatgccactaatgcactgctaggtattgaaatatcagagtcgctgctatcgcgaagactttctttgattgaacgcttgttagcactatgcagtaccaatgacaggatgagaataatacaagaccttgtttacgcctggaaaaaattgacgtctgcagaacgagcagcagtcggtgcagtgttaaccaaggaaggtccggacaatcggtggatattggcggccattctcataatgtcaaataccccccgtgagcttgtaaaaaacattttacccagtcatgaaggtaacgcactttcggtcgaggaaataatatctcttgaacctgcattatttgaggccattgcattggtcgcaacccattctatcccatgcgacttatattatattaactcagagatccagcatgcattgataaagatgattatcatggatgagttaagtccttatgcgcctatggcgtttgattatgttctgacgttctttgaggataaggaggaattgctttgtgaagttatcaacgtagctgatgaatcgcgattgcagaaaatttttgactacctattttacttttataagaattacaatcccgaatatcttccgctcgtatgggaaacgttgttcagtcgagcgactgaagatgtaatcagcgataactggctaccgttgttcggtaaatatgccaatcgtatctttaaagattttcgagttgaagaaatggaaaaattcatcccgcaacgctatattcatatttttttaaagaaaattcccgacactttttattacatgtactcccacgattttctgaaaagtgaattttgtgaagataaaggtaatgaaattatagtaagtgaagagatgatgtctgtgttttatacaaacatcaatgaccgaatggtcaaatcccctccagtacaccataacacctatgatcacattataaacacattaaggaagatgcatggttcggaggaaatcattcaggcgtgggaagatgcaaggagcagcttgtttaagtatacatccaatgagtctcctttcctccctcctgctttaaatgactggcagaactag

SEQ ID NO: 440877 - DNA, 873 bp, Serratia marcescens
atgagtgaaatgtttagcagtatagttaacggaatgaaagatagaacatctggcctttatggatacttggcgacttcattttttttatttaactgggacactatatatatactaacctttggcaaagaaactgcagaaaaaaaagttgatatcgctttgcagtcattccattggggctgggatggagcattacctttatttgtaggctcaatattatgtgtagcgaccccatttttagcatcgtcaatcagagaaatacaaatgtttgcaacagaatggagtgagcgacagaatttcagaagcaggcattacgcaggcgatttggaaataaaaaggaagcatgacattgaggggaaaaataaagaggccagcaatctgagtgctaaaattgaaaatctcaacaaatcaatcactgacaaacagagattagtcgactctattgttaagagacatgatgatttaacagctgaagattacaatattgtatcggcacttgaggcgcatactgcagagcttaaaagaatagagatagagctagcaaaaaacaaacaagaatatatcagttataatgaacttaagaaggtttatgataagtttgttaatgaacaaaaaacaaaagaacaagactatgagtctaaaattgacaacatactagggattattaaaggattaataaatactgggtatattcctgagtatacggaaaatcaaatcaatagcatattagaagagattggatacagtatgccaacaatgaatccactcagagaaaaccctagagtaataaaagtcgacagaactagcgaagaagcatctaagatagttagcagagatcctctcgcaatacagtttccaaatagaaatttaatttag

SEQ ID NO: 440878 - DNA, 150 bp, Serratia marcescens
atgctgatccctatcgctatcgccgcaaccgtattcaccggcgttgtatgggtttgcctgctggcctggattacttaccgctggtgcaaattctgccgcgcctttaatcgcacggcatccattccacctgaattacgtaattacgattaa

SEQ ID NO: 440879 - DNA, 351 bp, Serratia marcescens
atgaaggcgtcagctcaaagaaaggtaaacgaagttaatcagccgcgaacccaagtttacggcgcccgtctgccaggacgttctaccgctgaaaatcgcgctacagaaatggcgctggaatacatcacgaaaaacggcatcaagccgcgcatgacactgaaagagttcgccgagttcttcagtatgcctctggaacaggtacagagtgatgcccgccgcaactatctcccactgatgccgcgcaccactcccggccgccgtgaactgattcaggtcaacatggttgcctattacgcccacagtctcgcagccagcggcgactacatggcaaaagcggcggctttccaatga

SEQ ID NO: 440880 - DNA, 450 bp, Serratia marcescens
atgttcgccacaatttatggaatgaatgaactgagcaagaaacatctggggactcaagaaaacattctgtgttcgctgcgtttcttttacgtctattactttaagaagcacaaacgaacatttgactacggtttctatcggtctggctacaatatctcctgttttatcagggagcttgatggcttctttacttacctgctcgggaagcagcacctgagtgacgagaccgacataatctctaccgggtttttacattctgcactctccagaaccaacaagtccacctatggtaaccacgtcagaaacgttggccgattccttaagtatctcaactatagatatatgaatctggcataccaggatatgtcacctgttgaagctcaccagattaaccaggcgaaccacagagatctcgctgacagaattaaggtcttcaccccgtgtccgtag

SEQ ID NO: 440881 - DNA, 1092 bp, Serratia marcescens
atgccggaattcttcagcatcctgacccatgccggcgccgccaagctggcgctggccgcgcaaaccggtcagcctatggcgatcagcacaatggccgtgggcgatggcgccggcgccacaccaacgccatcaccagaacagaccgggcttatcggcgagcaataccgcgccgcgctcaacgcgctgactatcgtgagcgaatcggccaacgtgatcagcgcagaaatgataattccgccggagttcggcggcttctggatcagggaggtcgggctttatgcagatgatggcgtgctggttgctgtaggcagcttgccggacacctacaaatcgcatcttgccgaaggctcggggcgcaattcagtgatccgtgttgagctggcagtcagcagcacaaaggatgtgcagctactgatcgaccccacgatcatcatcgcaaccgtggattacgtcgacacgaagtttcgcgaagccaagaaccgggcggacgacgcttactcgctggcggaaagcaaagcggcatttgatgacatttacccgccggggatcagtatcttctttgcgacgaacctgaaccctaatgaaaaatggccgggcactacctggcactataccggcgagaataaaacgatccgcatcggcaaggccgatggctcggatgtgatgaccgccggcggttcggacacggtaacattgagcgttgaaaatatgccggcgcacaaccacggcgtcagcggccaagtgggcgagtttgaccacggaatcaaaagtacgtcggagtttgaccacggtacgaaatggacgtcagaaggcggcgagcatgcgcaccaggggggtatggccgcccccggcccggcatgggatggcgattacgtcgtcggttcggacaatgacagccaccgcacccggaactggacaagtcaggacggcaagcacagtcacaccgtcgatattggcaatcacaatcacaccgtcgacattggtaagcacggccacagcatcgaactgacgtctgccgaggtcggcggcggcaaggaattcagcattgtagaaagccacatcaagctgatgtgctggtatcgcgccgcgtaa

SEQ ID NO: 440882 - DNA, 612 bp, Serratia marcescens
atgaatagcctgctgccgccaggctcatctgcacttgagcgccgagcggcggaatcatgcgctgcagttagcgatctgaatgtgcctctacgcgacctgtggaatccggataaatgcccgattgtgtttctaccgtacctggcctgggctttttcggtcgatcggtgggatgaaaaatggacagcagcagagaagcgaaagatcgttaaagacgcattttacatccaccgccgcaaggggacggtcgcggcaattaagcgggtgatcgaaaacatggggtacaccatgacgatcgcggaatggtgggaggttgctgaccctgcaggcacatttcgtttaacgattgatgttctcgacgttgggatcaccgaagaaattgtgaacgagttggagcgcttgatcggtgatgcaaaaccagtcagccgacatatagcgggattgaatatcaagacagtaacacgcggaaaaatttatagcgctgtagccagttattgcggggaaatcctgacggtatatccggcagggaaaacgcccgatatccccctttactatgacggcaaaattaaacacagcggccattatgtctacaccgggaacgcaagcgatgagtaa

SEQ ID NO: 440883 - DNA, 783 bp, Serratia marcescens
atgttacttcgacatgctcaggcctatcgtgaggctgggactggggctagtataaaaaaactccctcgtattaagcagcaacggtatacacttcatcaaagtttacagagcaaagaaaaaataaatgttataaagcaaacgttatctgtcaaaggccatccagataaaaatacatatttattcacaccagttataaaagacaagtctggttttgttccgatatttagtcgaagacttccggcattaaatactgatcagtataattataacgaaacacaaaaaataaaagaagaatgtttaggtgagtttgatgcgaataaatctatgctttttctttctgtgttcgtgggtgcccccgagctagaaatacctacaggtgaatattatgcaaatatacatagcgtagttatcggtgggttcagaatcttatttgtatggtgttacatgatgttaccatcccacccttcaggttttttagtccataaaataacccaaaaaaatccagacggaactgtcggcggtcaggtttccgggctgaatatggagactgcagtggctgtagcattatacgatttctattcctccattgaagaactaggaaaaacgttgcatgtaacaaataatctccccataaacttcgctgaaaagtctatagagttgacgggttttgttaaaaatccattggatgaaggtatagagattaagacaattaaaaatgttatgcaggtgtctcaagaacatcgacgtctctatgagacatatacatctattcggattaattaa

SEQ ID NO: 440884 - DNA, 330 bp, Serratia marcescens
atgcattggataacgtcgatcatttgcttgctcattgccggccgtctgctggctttccagcgcaaaggggcaacacataaaccgtgggccagcggtgtcgcatacgtcgtgatcatgatttgcgccgccgtgccaattttttccgcgtttggccgttttccgcaatcgtgggcgctaactgcccttttcagtttcatgatcctgatggcagtcacccgttcccgcgggaacatcatggcgatcatcccgtcaccgcccgcggcaaaagagcgggtgccagccaagcaaaaagccagggggaaaaatggcccgcatcatcaccactcctaa

SEQ ID NO: 440885 - DNA, 624 bp, Serratia marcescens
atgcacaagacatttttgagctatcatcatgctaatgagcaagatttaaaagaccatttaattgaaaaatatggtggtgactcatttattgataagtctgttagtgatggtgatataaacacgcaagtaagcgaagattatatcatgagaaaaatcagagaagactatcttgccgatacgactgtaacagttgtattgattggtgcagaaacagcacaaaggccgtttgttaactcagaaatacaagcatcattgtggggtgataacccagcaggtttaatcggagttgttagagatgagatttatgatcttgtcttcagtcaatcaacatgtaaggatttaacttgtggttgtggaatttcacttagatcgatttctccaggatatgatctttaccttcctgacttaataaaacgaaaccacagattttcaaaaaccgtccctcattataatgatagtgatgtttattgttccgtggttaaattttcaaactttgaggctaattgcgaatattatatcaatcaagcctatgataagagggcaacaatggaacccgcggctaaaagaaacgatagctcaacgccggcaatccgggccacatcatctccctttaatttcttataa

SEQ ID NO: 440886 - DNA, 729 bp, Serratia marcescens
atgttgaaacaactttgcatctggggatcattatttatcctgatgatattgttaatgggaagttttagattacccaccctagaaaccttaccatttacaaataacttcatgaataactcgggagttattaaaacattcctatcggttttaatattatttttagttgcttatatactgatggttggagttattttaaaaaaatattcattaaagatagagcagttgaattttggtgggattaatgttctttttaataattccgatattttatttagacagtcaattaaaaattacctagatgccaaaagaacattattcaaaatttcggctgagctcgattcttttgatgaaacattaagttcatattatgaaatacataatttcatcagaacggaaatgaaagtccttaatttgaaaagaagaaaagacagacatctgtatgagttaagcaatgaagcactgaaagaattaaatgatttcctcaccaaataccaaaacaattatcggagatggcataaatacgtttcagaaaaagatgctgtacttacaaaggaaaaagatagttatggtaatagggtgtcacttccctatcacttgaccccaatcggaaaattacaaacacactattatcactatagcaaaatgttaaatggtttcatcggggtgaataaatttttcaatgaaaaattcgtccgtgaatttaagattaacacaagcaaatggagttaa

SEQ ID NO: 440887 - DNA, 162 bp, Serratia marcescens
atgggctcgctggatcccctgagattgctcaagtttgaagaagtgggagttaacctggcgctttaccaggccaggttggctgttcaggtgttcaaaggcggcggcgagatcggcattaatgcgatcccgctttttctgttcttccgcactgacgaatggtga

SEQ ID NO: 440888 - DNA, 1047 bp, Serratia marcescens
atgaaaacttcgggcatgattgtttatccaaccggaacggcgttgattgacaaccgcattctcacaaaagatgccattaacgtgatcaccgtttccggtgggaaagatagcctggcccaatggctgctcgctttggatgcaggagccaaaaacacgcgagtattcgctgacacaggccacgaacacccagaaacaatgaaatatctggattacctggaaaacaagctgggagagatccagcgtgtcaaggcggacttcactgagcgaatggctggaaagcgacaatttattgccgagcgctggccggtaactctggttactgaatgcggatttactgataagcaggccgcagagatcataagggttgcactcgatacccttcatccgaccggaattccattccttgatttatgcatgtggaaaggtcggttcccttcgacaaaagcaaggttttgcaccttcgaactgaaacatacccctgtaaaagagcaagttgttaccccgctacttgatcggtatgacgaggtaatttcatggcaaggtgtacgcgctgaagaatccccaagtcgcgccaacctcccagagtgggaagaagatgccgacaacacacctgggttgaatatttaccgcgcgatcctggattggaagcacgccgatgtgtttgccatcgccaagtatcatggcatcaagcctaaccctctttatcaacaagggtgcggtcgcgttggctgcatgccatgtatcaacgtaaataaggcggaattaggagagatatttaagcgctggccagaggaaattgctcgtgtttcgcgctgggaaaaactggtagctaagtgttcccggaatgggaattctattttttttccttccacacaggacccaaacaagtcagagcgccgcataaagtgcattaccgttgaatcgcatggtatagaaacttatcgagattgggcgctaaccactcgcggtggtcgccaatttgatttactgactaccggcaacgatcacagcggttgcagcagcgtttatgcgggtgtctgtgaatga

SEQ ID NO: 440889 - DNA, 219 bp, Serratia marcescens
atgctgatcggttttctctgctggcttgttggcgcatgcgccgctttctgcctgctttgcttcggcattaaaagcgggcacatctacagcgtccctacggccgccggcgccatcattctgtcagtcatttggccaatcaccgccgcgctggttctcggcggattcgtctacgggctggcaattctcgtttatagccacatcaccgggagggattcatga

SEQ ID NO: 440890 - DNA, 213 bp, Serratia marcescens
atgatgccaatttcaattgctcccctgcttaagcagcaaagccaatctcgccactttggccacggttggatccaactgcagaacggccggcgttggtgcccggcgcaagaccagaaagaactgctggctcaactgaccaccgccccgcgggagtcaatcggcagtaaggcggcaaaatggcttttactgaaactacgcgtactgtgccgctga

SEQ ID NO: 440891 - DNA, 858 bp, Serratia marcescens
atggtaaagaataagagtcttgagggtgcggttgcgagcgaggtccttgacagaatcctttcgtcatatggctttaagatgcaaaaagagcttagcgacaagcttggcattgcaaaaagcaacgttggaagttggctgcagcgcggccaagttcccgggaatgttattgttcaatgcgctcttgataccggtgcggatgttgaatggttagtaactggcgagtttgcaaattcgaattttgaggttggaaaatcaacaatctcaggaagggttctttatgaacagattcaagcgtctggtgggaaggcggtgcttcgccgaatgttagatgcttatgggttccgtacacagaaagagcttggcgattttctgaacatatccactgcaacgattagtacatgggttaggcgtgagtattttcctggtgatgcggttgttgcatgtgcgttagatactggagtttctcttttatggctggcgactggacaaggtaatcctggcaatccagatgcggtttcctacaaaccttccttcaccacgctggagcgtttgcttatagcatccggtgatctgattggcgccggtgaatggatctgcgatccgtcatttgttcctgtagggactttgaagttgtgttttgttgagcgcgcaggtgaagcatggctaatcgacttcggaataaacacactcggtaatggtatttggttgctgagcattgatggagttcatgacatttattccgtatcacgcatacctggcaacaaaataaaagtatcctcgatcagatcatcttttgaatgttcagtagatgatgttgagtgtgttggtgaagtcaaaaaaactatagttaattcttaa

SEQ ID NO: 440892 - DNA, 1404 bp, Serratia marcescens
atggcattcagcgatgtcaaaaaactgagtagagaacggttcaatgcctatgtagattggacaagattgccgaacacagaaataatgagccaggaattagagtggtattttggccccagagagtatctattaggtgttttattgcttgataaaaccgatgaggactttggtggtgtagttttagctagagatgcatgtggacgatatcgttgtatagatgcatttgctaatgttgatatgttgaatactgcaagggcaaaactaaaacgcctcatgcaaaaacacatcaaggcaaatgttaaaagtttcccccagggggatgaaacttacaaaccgatggacctcttcacacatattgtagcggaagataaacttcatccacatttttctttattcggtaaatatgcaaactggtcatcagcaactgaaattatcaaagagatgatgaatcactttgaagatgttgacggaaattttgtagagcaattccagacgacagcatttgatgctcgattatgggaattatacctctttgcatatttaagagaggaaaattttttgcttgatcgtaaatataatgcaccagattatgttgttaaaaagtatggcaagacgatttgcatcgaagctgtaactgttaacccaactggtaatgaagtaaaccaagcgttggaacggaattttgagcctaaaaatgctaaggatttagctgaaaaacttgaaaattacatgccaattaaatttgggagttctctttactcaaagttgaaaaagaaaacaagatattgggatttagaacatgtaaaagggaaacctctggtttttgctatagcagattttcatgaagctagctcgatggtttggtcgcacagtgctctttggcagtatctttacggaatgcgttatgagcatgtaacatctgaagatgggagctatcatatagcgcctaaacaaatcatatctcataagattggtcccaaagagataccttcgggtttctttttcctcgaggatgctgagaatgtatcggctgtactcagctccaatagtggaacaatatccaagtttaaccgaatgggtaaattagctggctttggcagaagtgatgtcaagttattcagaaacggctattgccatgaccatgatccactagctgccgttccagcattttttagtttcgaagttaaagcgggaaagataaatgaatcgtgggctgaggggctgaatatgtatcataatcctaacgctttacaccctgttgatccgagtttgttcccttcgatagctcatcatttttatgagaatggggtaataaaaagcatcattccagattttcatccatactcttcgatcacaatgaatatactaattaaaagtgaggatgatgttagaattgatgaataa

SEQ ID NO: 440893 - DNA, 384 bp, Serratia marcescens
atgagcaaaacacacttgactgaacagaagttttccgacttcgccctgcacccgttagtccttgaagcccttgagaaaaaagggtttcacaattgcacgcccatccaggcgttagcattgccgctcacgctctccgggcgtgacgttgcaggtcaggcgcaaaccggtaccggaaagacgctggcgtttttggcgtctacttttcactatttgctgactcacccggcgaaacaggatcgccagaccaatcagccgcgcgccttgatcatggcgcctacgcgtgaactggcggtgcaaatccactccgacgcagaagcgctctcccagagcaccggcctgaaactggcctggcctacggcggcgacggctacgacaaacagctga

SEQ ID NO: 440894 - DNA, 1083 bp, Serratia marcescens
atgagtactgaaattctatttgttttcctgttttctttggcttttctctttgttgcccgcaaggcggcaaaacgtattggtctggtagataaacccaattatcgcaaacgccatcaggggctgattccactggtcggcggtatttccgtttatgccggattgtgcttcgcgttttggatttccgaacaacctatcgcgcacgccaagctttatctgacctgcgccggcattctggtgtttgtgggcgcgctcgacgatcgtttcgacatcagcgttaaaatccgcgccctggtgcaggcgttggtcggcatcgccatgatggtgttcgccggcctgtatctgcgcagcttcggccatgtactgggcgactgggagatgttgctggggccgttcggctatctggtgacgctgttcgcagtatgggcggcgatcaacgccttcaacatggtcgacggcattgatggcctgctgggtgggctgtcgtgcgtctccttcggcgcgctgggtctgttgctgtacctgagcggccaccatgagatggcgttctggtgctttgcgatgatcgccaccatcgttccctatattttgctcaacctcggcattctcggccgccgttataaggtgttcatgggggatgccggcagtaccctgatcggctttaccgccatttggctgctgctgcaaagctcgcagggcaaggcacactcgattaatccggtgaccgcactgtggatcatcgctattccgctgatggacatgatagcaatcatgtatcgtcgtttacgcaaggggatgagccccttctctcccgatcgtcaacatattcaccacctgatcatgcgagccggctttacgccgcggcaggcttttgtgttgattaccctggcggccgcattgctggcggcggttggcgtgatcggcgaacgcctgacttttatcccagagtgggttatgttggcattattcttgcttgctttcttcctgtacggttactgcatcaagcgcgcctggcgggttgcgcggtacattaagcgtatcaagcgtcgcctgcggcgttcgagcgataacaagcaagtatcttaa

SEQ ID NO: 440895 - DNA, 348 bp, Serratia marcescens
atggcatttgaagataagaagaaaaaggcaatagccctgatggaagataaaaagatgtggcggagcaattatgcaccgccgatcttacgcctgttttggaggatggggggtaaaatgccaccgccaccgtttgcccccttctggctgaatacgctgttcttcgccgtttggtttggcccgctatggggcattcttatgtggtttggtagctggaagaatgaaggtgtcactgtaccaatcgcggcgttaaacgccctctttaccggtttgttgtttggtttattcatggcgttaatccactcttggcgcaagcgggccaataaactaccagattggaaaagtctctag

SEQ ID NO: 440896 - DNA, 1674 bp, Serratia marcescens
atgaccgcattaagtgtttctcacacctcacgtgcagcgaccggccactggccggtgttgcttcccgcgctgggcattcacattactgcagggggccgggcgcagccttgcccggtctgtggcggcaaagaccgcttccgttttgataacctgcaggggcgcggcacatggttttgtaaccagtgcggtggcggcgatggcctgagtctggtcgaaaaagcgctggacgtgaccaccaaagaggccgccgcgaaggtggcaggggtattgggcgagccgtcggccagcaccttggcgaagcacaaccccgagcaggaacagcaggaaaaagcgcaggcacagtatcatgcagcgcaacaggccaaaaaactgctcgccagcgcccggaaacaggccgggaatgcctacctgaccgccaaggtctggccgggcactgacgccctgacattacagggggcgtcactgcgcgtgggcggtatcgcttaccagtccggcgacctgctggtccccctgaccgacagcaccggggacgtggtcaacgtccagttaattaataccgcaggcgtcaagcgcacgctggccggggggcaggcaaaacacgcctgccatttcatgccggggcagaataatgccgttatctggctgaccgagggctacgccaccggtctgaccgtgcatcaactgaccggggaaagcgtctgcgtcgcccttagcgccaatctcctgcccgccatggcgcagcagttgcgcgctcactatccagatgcgctgttgttgctggcggccgacaatgacgagaacggcaccgggcaggcccgcgctgccgaagccgcgcaactgagtggcggtaaaccggcgttaccgtcagaaacaggcgactggaacgacgtataccagcaacagggcaagctggccgcacttgcacaattgactgcctttagccagcccaagcaacccagtccgtttgatacgctcagcgatgccgacctgaaagccatgagcgccagtgaaaaggccgaactgctggcggagcactaccagcacctgctggccgtgccacaggtcggtgaagacctgtgccgctatgaaaacggtgcatggcaggtgttgccgtaccgggtgcttagccgggaaattgccgccctgtttcagaaaatccgcgcgccgttctcggcggcaggtatcaacagcattctggacacactccggctgatcgtgccgcaaatgggcacgccggcacgacacctgattggctttcgtaacggggtgtttgataccaccaccgggcaattcagtgcacaccagaaaacgcactggttgcgcaccgtcaacagcgtggattacacgccgcccaaggccggggaaaatctggctgaccacgccccgcacttctggcgctggctgacccgcgctgccggacagcagcccgacaagcaggcgcgtattcttgccgcgctgtttatggtgctggcgaaccgctatgactggcaactgttccttgaggtcaccggtcccggcggcagcggcaaaagcgtgatggccgcgatagccagtctgctggcagggaaagacaacaccacaggttttgacgacctgcccgagctggtcggtgagtaccgcaatgacagacgcgaaagcggccttctgagctgcgtccgggtgctgaccggttga

SEQ ID NO: 440897 - DNA, 1629 bp, Serratia marcescens
atgaaaacttacaaacaaagcgttaaacaaaaatccagattagatatatggaaaacagctattgatagattgacaactcaatccgaaaaatcaaagatattagaatctaattacttgaagaatcttatagagttttgttggaaagacacactgagttctgcattttgttataatgagagtgatttattacgcaatggttataattgggtacagaaaatcagtgatagctacaaacataaaaaagagaatgaactaaaaattgctttcttttgcgggccagagccagaaaacgatctggacatacttttatctctaggcgttaaaatagaaaacatctgggcttttgaaattgataatgactcttatgctacagcgttaaacaaagctaaagagtcctatccaaaattaaaaatattcccaggctctataggtgattttttcaaaactacccatcatacctttgatattatttatcttgacttcatcagttcattgttaactaaaccagctcccccgattggagtcataaactctgtttttgacaatcaagcgctatcagacttaggagtattaattgtaaattcttgcgagcctgatgccaatgaggataacgccagatttctcgcaagttacttcatgaatcacgaaatgatcgagtcatctgtccttgaagccaccaatgatgatgatgatgatttttcatattttactgaatcaccaacatcacatggatacgatctaaagtctttaggaaaaatcatcaaccgtaatatgcctggtgcatactcagctttttcaacaagttatgttatgcattatgcatcaatgataagtcccacacttcgtttcttacaaaataactccttgcggaaacaattattcaatgaaaaaaaggctgaagttactgctacttttgcagagattgaatccacagattttttcaaaagattgatatcaagggatgatgaggacgatgaatcatctttttctcctatatccggaaacaggttcatggacaatgaaagctatccgttctggaattttattgattcattaaatggttcaggtaaatgtgtttcatcatatttcaaaaacttctttaaccaaagcaaagaaggcgtttcaatattaaacgcagcacaatttcgagaatcattccactcaatgctgactggagctgacaaattattatctcaacgaatgctcaacgcaatacccaaaattatgaaagcaattcctgatgctcgaggtggtttattctgtgatattcctttaccacatctttggttagaggtggctcttaatcaattaggggcaccgtaccattcaaatgtaaagatgcataaaagatggaaatacaaagcaaaagttcgcacgatgcatacagacttatttgtttttgatagatgtaggggtttttacgagtcaatgcctatgatcgatcaatacgaaacaattcttacaaatattgaagagcaaattttcgctaggtgctgcattgatattattggtaaacattgtcgttggccaattccaaaactctattatggctcgaacctaatttgtataaatgattctgattggtctaatttcgccgagcttagaaaaagagaaattataaaagaataa

SEQ ID NO: 440898 - DNA, 357 bp, Serratia marcescens
atggatggtgttccggggctgagttttatgggcatagagcctgatgatacctacgtttacacctttaaggttaagcagaacgggacttactggtaccacagccattccggtctgcaggaacaggagggggtatacggtgccattatcatcgatgccagggagccagaaccgtttgcttacgatcgtgagcatgtggtcatgttgtctgactggaccgatgaaaatcctcacagcctgctgaaaaaattaaaaaaacagtcggattactacaatttcaataaaccaaccgttggctcttttttccgcgaataccagggggctgtcagccaccattgccgatcggaaaatgtgggctga

SEQ ID NO: 440899 - DNA, 1401 bp, Serratia marcescens; identical to SEQ ID NO: 382968

SEQ ID NO: 440900 - DNA, 699 bp, Serratia marcescens
  misc_feature (535)..(544): n is a, c, g, or t
atgaaggagatccttgccttaaagcaggatgacataatttatcgtaatgaacttagacatgtcatggtccatgctcacaaacgtaacactcctcttgaaaacatgagtgatggctataaggctctgttttatgttgctattgacattatgcgccatatgctaaaacgttgggaaaatttagaatatgcatcaggcatcgttattattgatgaaattgaaacgcatcttcatccccgatggaaaatgcagatagtgggtgcctttcgacgagcaatgcctggtgttcagttcatatttacaacccatgatcctctttgtttgcgagggatgtttgatggtgaagttcatgtactaaagcgtgatgaaatatactcaattactgaggaggaagatttacctggattccaggggttgagaacggagcaattattgacatctgagtattttggccttctctcgactgatgatccagatcttgagcggagactagaagatattaacaggaaagaaggaagtaatcaggcggaatatattnnnnnnnnnntaactgtacttggtacgactcttagtcaacgagtagtccatgaagcattggcgcgatatttaatttcagtaaaacgaaagatgcctgaagccaaagatgtgaaagaggatgcgatcagagcaatccttaacgttcttgagcaaaaaggctattga

SEQ ID NO: 440901 - DNA, 909 bp, Serratia marcescens
atgattaaaatcgatcgctcagttcaaccggtgccagtctcattaaccacggcaggtaatgttgttgataatgaacgtattgctgcacgaagatattacgcagtcgtaccagcccccagtaaaacatataaatttaagcgatataaagaagaagatatcgtcgaagccttggaacatctttttcacggtaaatgtgcctattgcgagagtaaatacataggtacccagaaaatggatgttgagcattatcgtccgaaagggaaggtgaacgaaagtcagggacatccgggttactggtggctagcgttggagtgggagaatttattgccatcctgcattgactgtaatcgccgtcgagggcaaaaatcctatactttgcaagacgatggcacatttgtctttatcgatgatacagaaaatgcaggtaaagaatgcgcatttcctgtctccggagtctatcgagcgcaggggagacaagatgatcttagacttgaaatacctttacttataaatccctgtgaacatgaccctagagatcatcttcgctggcatattaacaatttgaagctccccctactgctcgcgaattcggtgcagaacctgcctgatgagaggggagtaaaaagtattgaaattatgggattaaatcgttttggacttgtgactaagcgtgctgaagtactacaacctgttgtagtacaaattaatagtattttcgagttaatagatattacggcaacgttaccacccggcgaggctcgagatagatatcttgcgaagatcgggcgggatattgatgcattgcagacctgctatgaacctagccgggaatatgctggaatgattaaatcttacattgattcacatatggatactctaaaagaagaacttgctagattagtggcatga

SEQ ID NO: 440902 - DNA, 1218 bp, Serratia marcescens; identical to SEQ ID NO: 195812

SEQ ID NO: 440903 - DNA, 720 bp, Serratia marcescens
atgagaaaatttaaaagtaagattgcattttgtataaagagaactggttttttagctgtcctggctatatctattgatgcaaatgcggctgggttcgattgttcaaaagcgtctacctctatagagaagatgatttgcaatgatagaattctaagtgatcttgattctgcaatgtccaatttgtatagcagtaaaaaggacgacaaattaaaagagattcagttagattggattaaaaataaaagaaaccttgcatattcatctgatgaattgcgtgcattatatgcagagcatattcagtttttatctacatatgtagataaaactaacaattatgattctgaaaataaatcagaaggtgtatcaaagcctatggagtctcgtaagtcaatagccaaagaaaagattggttcagatagtttacagttatcagactttgaaaatgaatttatatctatcgacggcatggaatactctactggataccgagagatgaataaatcgaattatgtaattctatgtgctgacgctatgatgatagacgtaatgaattcatggaggaggagttctgcaaagaaaaatcaaagccgtgagttcagcagactacgaaaaaacatctataatgggttatggaatgcgactgtagataatattgaaagtaaggtaaatactcagaatatgaggatggtttgtgatttattgattgccgctaatagataa

SEQ ID NO: 440904 - DNA, 252 bp, Serratia marcescens
atgaatacgatgtttttgttgatggcggaatacgaaaggtccagtattccactatcggaaattgctgagcgttatctcggactgcgtccgtcaactgctgaacagaaggccgcagagggtaagctgcctatagcgacatttcgcgtagggaacacccaaaaatcaccgcgaatggtacacgttgctgacttggccgaactgattgatcaacgaagaaaagaagccaaagaagagttggaacgctgcaagtaa

SEQ ID NO: 440905 - DNA, 1149 bp, Serratia marcescens
atggctgccctgaaggttgaagaggcccgagcccagttcaacgtcacggatgcagatcgttacccccagctgaatgcctcatccgggataacatacagcggtggtctgaaaggtgacaagccgaccacacaggagtacgacgcgagactggagctcagctatgagctcgattttttcggcaaacttaagaacatgagtgatgctgaccgccagaactactttgccagcgaagaagcccgtcgggccgtacacatcctgctggtctccaacgtttcacagagctatttcagccagcaactggcgtacgaacaactccgtattgcgcgggaaacgctgaaaaattatgaacagtcctatgctttcgttgagcaacagctcgtgaccgggagtacgaacgttctggcacttgaacaggcgagaggacaaatcgaaagtacccgcgccgaaatagccaaacgagaaggcgatctggctcaggcaaacaatgccctgcaactggtgctgggaacgtaccgcgcacttccgtcagaaaaagggatgaaaggcggggagatcgcaccagtaaaattgccaccaaatctatcttcacaaattttgctgcagcgaccggatattatggaagcggaatatcagctgaaagcggctgatgccaatattggcgcagcgcgagcggcctttttcccctccattaccctgaccagtggtctttccgcaagcagtacggagctgtcaagcctgtttacgtcaggaagtggaatgtggaattttatccctaaaattgaaattcctatttttaatgctggcaggaataaagccaatctgaagctggctgaaattcgccagcaacaatcggtggttaattacgaacaaaaaattcagtcagcctttaaggatgtttccgacacgcttgcgctgcgcgacagccttagccagcaacttgagtcacagcagcgttatcttgattcacttcagataactctccagcgtgccagaggattatatgcaagtggtgctgtcagttacatcgaagtgctggatgcagaacgttccctcttcgctacgcagcaaaccattctcgatcttacctattcccgacaggttaacgaaattaatctgtttaccgcgctgggtggcggttgggtagagtaa

SEQ ID NO: 440906 - DNA, 822 bp, Serratia marcescens
  misc_feature (44)..(53): n is a, c, g, or t
atggccgtttgtttgtcggccaggttttttcggactttgtgctnnnnnnnnnnctttgtgctcgttattgatttggctacgcatgctatcgttaaaagaatagtgttacctggggggggtgacggacaattagcagtgtcacaaaacgaaaaagaaatctatttcgcaagcaatcgagtcaaccagttctatatcattgacagtgccacatacgttgtaaagacagtagcatatcccgaaggtggccgaggctgcatgtcgctgctacgacatccgacgctgccattaatttacattggcattcaacgcggcggacgcatccacgggctgagttatccacatgctaactgctatttagctatctacgacctaagtcgtcaaacatatacggcggacgtccagctcgccgagataagcaatggtcgcgcagatgattcaacccctgcatgtctaacatatgacgatctctacaatcgcatctatgtcggcatgttccagtccaagcgtggcatctgtgtaatagagccagaatcaggggagctaattcaagaaattcgctttgcctcaaatgataataataattttttcgcatgggcagacccgttatcgcaaacggtgagtggagacttgctgttatcggtcaatcgaaacaatcatgagcttgtagcgttagatcgtgcttcacttcaaataaaaaaaattctatttgttggtgaagcgcttaacggcccgagagccgttttggtgtggggagatcatgccgttgtcagctacccaggtcgaaatggattacttttcattccacttggaactctgaaataa

SEQ ID NO: 440907 - DNA, 294 bp, Serratia marcescens
  misc_feature (274)..(283): n is a, c, g, or t
atgagtaaatacattgcgtatattgagtcaccgcttcaggcttttaatctcattgagtatcttgatgcgaagaacattgtgctcgatctgctgattgtcaataagcgttcggccaattctgcgttgaatcacgggcagattgtttatctgttgaacatgattaagcatcgctccctggaaaccattgatgttgaagggaaactgggtaatgcttttgatattaaacggcaattgaagagtgtaacatcggtggtgagtgcgaaggaaactgtcnnnnnnnnnntgtcactttga

SEQ ID NO: 440908 - DNA, 195 bp, Serratia marcescens
atgctcttcagaacctttcacctgaatctcatacacaatcttcgtgccgtcaatgtctgcagaaatttccgcatcctcccccccttcgccttcaacaatgagagttgcattctcaaatttataaaaatccagcgcaaattttatacaaacaaaatcctgaaaatcgtattttgcaggcccgatggtagcaattga

SEQ ID NO: 440909 - DNA, 2148 bp, Serratia marcescens
atgagtgatcaaatagacaatcaggtagaaagtttcgaacaacttcgtactgttataccctccgccaccggtgatcgcattcttctgaaatcctggttgccagggcttcgctttggcggcggtgagtttgttgccactattggggatggcgtcgacgataacggttttatcgccgctggccaaggattctattggacgcgtgtcaatcaaacactggatgtggagaacttcggcgccaaaccaggagactggcagttcgacaacacggtggcgtttcaatccgccattaatgccgctaagaaaaatggcggcggtgaagttctgtgtatgggtaatgtataccgattcgctttctattcgtacagtgccaaatatactttaccgttcgatgatggaacagcggcgcctgccattattgcgatgggcaaagataaggatatctgtcctgaaccccaggaaaccatgaacgctgttctggagatcccgagcagggttcaactgcgtggctctaaacaagtcaacactattcttgattttggctggtcgcgtgacgtacacggcgttgggttagaccagcgtattggcatcttattccgtccagacggttacccaaccacaactcgcatgacagggttcgtccgcgccgtaggtgttgccgacctcaccattcaaaatgccttcatcggcattctgtccgacggcgtcattttcgaccagtcacacttcggtgatatgatctaccgtaattgcggcatccccgttttgcttcagggcgcagatagctgcttcttcggtatccaaaccatggataactgcatggcggcgttcattgtcggcggtatgtggctacagcgtaacaacgttcaatacggcggccaatgggtgccaccttataccaccatggacatctggtctctggggtggtgtgactactgtgtgtggaaatacatcaccgtcggtaacggaagtaataacaagttcggcgataagcacttcgagcttgataagttctttgatgactatttctataagtctaaaaactcggttaagacctcagaaggagggcgtctgaccaacatggatcagtacggcgccgatacggataacccgcatgagaaataccgcggcatctgtcatcgcgcgtggatcaactactctcgttataaccgtggcaacctgagtgtcatcatcgagaacgccaaaacgtactggacatcccgtgtaccattccaggcgccgactaaaaccggtacggactattatggtcaaatccacaatgcttacatcgagcaagctggtcacatcaacaacagcgccgataactctgatgccaacgactggtatcactccaaagtcgatccgtacaaccaggactacgataagctcccgtattttgtcgtagaaggctcaatgggctgttcccgtggcgctaacatcaacactcgttacgcactgactgcccgtagcggtgaagtgaacaacgcgaaacagatcaaccagatctgggttcaagacttcgatgaagtctacaagcagcagcctaaggaaaacgataactgtattcgttacaccatcgtttacgacggtaacgcgaagaaaggccagatcgtcgagcgtatgtgggtcgaccggttggaaacgcagccactggcgtgggtccacggtgaggatatggatcagacccataccttccgctatcgggttctggttactaccttgcaaatgcgcaacggtaatacaaccgaaggccaaatcgcaacgccatgttccattatccatactgctgggcgaaataaggtattcctgaaagtaacaatccccgctaacgcagcgtcgttgacgggagatctcaactggatgtggatgcctaagtatctggaaggtcaaaactacggctccgatcagccgatcttgagtgttattagcgcaaacgtaatgggtaccaagacctaccctgtaaccgggggcggcggcggtacggtttcgatacctaaagaaatcaagtcggccacttaccgtaatggcgcgctcttcattcacgattctcagaatccgacagacgcaaaccggatgaaaatctctgatttccagccgggaagtgtcttggagattgccgttgaagttaatggtaactggttcatgtattaa

SEQ ID NO: 440910 - DNA, 906 bp, Serratia marcescens
atgtattcagatcccgatagtgaccctaaagcatgggaagaatactttaaaagtattgttcgtatgcattataagccagaaaattattgtgacttgccagatacccatggtggtgattttggtattgagtgcttcactttatctggacatgtattccaatgttaccgaccagatgagtctagcgatgtaagtaagttattgagagcacagcagagaaaaatatctactgatattaaaaaattcactaaagataatgtggatgattttaaaaaattatttggtgatttaaaaataagccggtggatattagcaacaccgcataataaatcatcaaaactgacacagtattgcacggtaaaaactctgaaagttagaaaattaggtgtttcatatattgatgatgactttcagattttaataaaaactgagcaagattatccgcaggaagcatttattttacggaaaaacaaattccagcttaatttggattttaatgctgtatctgatgagaatgctaaaaaattcattgatgggaatattgattttcttgaaaagttaaaccttaaaatcccaaaaataaacgataatgagcagcagcatgaagtttataagaagttccttgttcagaagtatcttgattataaaaatttactggatagcttagagcaggattgggttgaaatttatcaaattgtatataaatgcattaaggttagagaggataatcttgttgggctatttatgctttcaagtgatgctcaaccatctcagattattaaagatgaaatagagaacctgaagaatgaaatttcagaagagatcccaacgtttaagcagtctgatttaaataagattacttggggtgttatatctgattggctaatacgatgcccgctgagtttttaa

SEQ ID NO: 440911 - DNA, 912 bp, Serratia marcescens
atgaaaatttcacttgtagttcccgtattcaacgaggaagaagcaattcctctattctaccaatctgtgcgtcagtttaaaccttttcagcatatagatgtagagatcgttttcgtcaacgatggtagctcagatagaacggaagaaatactgtcttccttatctaatgatgatcaaaatgttaaatcgataaatttttccaggaatttcgggaaagaacctgcattatttgctggtttggaagccgctaccggtgatgctattatcccaattgacgttgaccttcaagatccaattgatgttatcccactattattgaataagtggcaagatggtgcagacgtggtgttggctaaacgtatggataggcaatgcgatggccgaatgaagagaaaaacagcagaatggttttatcgagtacacaataaaataagtaaaccggccatagaagagaatgtaggtgattttaggctgatgaccagggaagtggtagaaagcattaaattacttccagagagaaacctatttatgaaaggtatccttagctgggttggcggaaatgttgaaattgttgaatactctcgagccgagcgagtcgcaggaaccagcaaatttaatggctggaagctttggaatttggcaatagagggaattacaagtttttccaccttccctcttcgtgtttgggcttacattggattttttgttgctgcaatttccttcatgtatggcgcatggatgatcatagataaggttatttggggaaacccggtagctggctacccttcaattattgtttccattcttttccttggcggtgtacagcttataggaatcggagtgcttggggaatatattggtagaatatacattgaaaccaaacgtcgcccacgctatataataaagaagtga

SEQ ID NO: 440912 - DNA, 198 bp, Serratia marcescens
atggcagacaagcacttaacccaatcaccggcaggtgagtttgttatgtttgccagcgatgatggcgaagtgcgcgttgaatgtcgttttgagcaagaaacgttggggcagccccaggcggccatcgtgaatctttatcaggtgaccccaggcgattacacagtacatcaaagcgatctacgaagaagcggaacttga

SEQ ID NO: 440913 - DNA, 1500 bp, Serratia marcescens
gtgttaagtcatgccggagttaattaccaacaaaaggaatatcgattgtttaatatgataatggaaagtcataatactgactgggtaatggttgagggcgaccgggggagttcaaatttcccactatctcgttttcttgaatccacaccttcagatatttcgcagaaaatagttcctgttacagacgactcacttaaaatattggaggaaacatatgtattatttatcagcgaacttcacagtagacaaatagaagaatcggaagaatattttgattgcattgatatcaaaatcggaaaaatacatcgattgagcctttccaataaaatggtgcattacgagtttacattacttcaagattacggcgaaagatatgtgagtagtgaaagtaagcttagtgaggctttagatgtcgatgttaacaacttcggacttaccagaactcattggtccattaagaataaaaaccttcgtgaagttttagataaagtaaatgaatctcttgcgctaccaatagatattcctctcgccctagtgattacaaacaccaagttaggtgcgattgggagtaccagaaagaataaagaaagcatagaaaatctccaagattatattaagttaattctggaatttgaatccagtgatgaagaagaaacattttatcgtggacattcagatcacgaataccggctcgagccttctattttgaggaaggataagaagacaggcgaatacacgcattattttaacgaaagaaatttaaacagtgaaatgctaaccgttcaacccggcgagttttcatcagataaatatatgttggataagttagtgaggatgcagcatttcggacttcctaccagactgctagatttgacttacaaccccctagtcgctctgtattttgcatgctcttcaataaagaaagataaagagggaaaggaaatagatggtgaggtcatcattctaaaaactaataaatcaaaggttaaattttttgattctgacacggtcagctgcattacgaacttatcaaatctgagtaaagaacagaagaatgagttgaccaaggctattgatatatcgaaagataagattaaagctcactacattggccgagaaaaaaccgacacctatcgtgaggacgttatagacaaatttaatgaggtaggagtctgtggtcatcttcttcattgtattaaagatgagaagccttactttaaagatataataaacccattagatttagaaaggatattatttgtacgcggtaaaatttcgaatacgcgcattgcatcccagtcgggtgcatttttacttttcggaatggatgctgcattacaggaatctggggacagtgaggtttccgtgaggaggatatctgtaaccaacaaaaaacacattatggaacaactgagcatccttaatatccacgccagcacaatttacccgagtcttgaaaaatctgccgaagagatcaaaaacaagtactatatgaaataa

SEQ ID NO: 440914 - DNA, 642 bp, Serratia marcescens
atgaacaaaccaacaaccaatgaaatttatgactttcttaatgaagtatctggattagtggttcatttctcggggtgtccaaaaggtatagggcgtgaaaaaaatctttattaccccgatgatttaaataaaataatcaagggtgaagtgcatggtggaatatcatgttcattaattataccaggagatgttttctctttttgctcggatgaaaccaaagctatcggggctattggtgtcatcgttggctttgatgaggacgggttagtagcagtatcgtctaaagattgtggaagttatacagatgatgattacatccgacatactgataaaaaagatataaggatggaagatcttagaagttctttgactgaacgtcaaacttacaacgaatggatcatccaacaaaataaaatactcggtatatttgtatttaatactacagacatccctgttaccggatatgagaaaattgaagggagtgatgaatgtgaaaatgtaatcatgtatccaaaatttgatgacatcaaagttacattcttaagtttgaagatatttacatttttaaatgggaatattgtacagctggaccgcgacactggagagtttattaagataactcaggaaaaaatttatcgttaa

SEQ ID NO: 440915 - DNA, 453 bp, Serratia marcescens
atgactgaccgagtgatattgcagcgtgagttttctgaccttatgaacgggctgcacggaagcatcttaaaatatgctactgaccgagccgaacaccatcagtgtgaggtttatctgtgcgtgaacaacaaatcacactgcgatcaaatactagaacgcatctttgaaaaaagagttgttaataaacttaagttaaatcaggttatctccgttaacggacggaaattgagcttatattcgcccctgaccctgaataagagctatctgccggaatcggtgtatttattgatgttccccagtcctgaactgctgaagtctgttgaatatcaggcgagcctcaactccgttcatgaaattatcgtgtttaccgaatcagacgggcatacggaagctacggataactggatgtcggaacatgaggtgcgcatgctgggaaccggaaaaacagcctaa

SEQ ID NO: 440916 - DNA, 1272 bp, Serratia marcescens
atgatttttaactcatcgaaatataacagtcattggctggataaaaaattatcagatttaggttctttccgtcgaggaaagtctcgtcatcgtccacgtaacgaccctaaactttttaaaaatggtatttaccctctcgttcaaacaggagaggttaagcaggcaagcctgtatctcaatagccatcattcttgttacaacgagtttgggttgtcccagagtgaaatctggcccaaaaatactttatgcataacaattgcagctaatattgctgaaactgcattgcttagctatcccatgtgctttccagatagtgttgttggattcaatgcttatcaagaggaatcatctgagattttcatgcattatgtatttacttatattcgaagggccattcaaaattcagcaagcggcagtattcaggataatatcaatattgattatcttacaggacttaaatttaaagttccgttaaaagcatatcaagataaaatagtctcggttctttctgttttagactataagatcgaccttaacaatcgcatcaacgctgaactggaagcgatggcgaaaacgctgtacaactattggtttgtacagtttgatttccctgatgccaacggaaaaccgtataaaacttccggcggaaagatggagtataacaccacgctgaaaagggaaattccggcgggttggcgtgcttccaatatcctatcactggctaacctgttaggtggtggaacacctacaaaaacaaaacctgagtactggaatggttctattcccttttttacaccaacagattcagataagaatatttacagcctaaatacacaggattcgattactgatcttggtttaaaaaacagtagtacgcggctctttgaaaaaaacacaattttcatcacagccagaggatcggttggtcgtctcgcccttaatgctgtacctatggctatgaaccaatcatgttatgcactgaaggcaaaacaaggtgtaagtttttcatttttgtatttccttactaaagagttaattcatcacctcgaagtgaaggcaactggttcagtatttaactcaattatctcaaacgacatagaatatacctacctggcattacctgaagataatgacttaatagataagtatgcaaaaaaaactgagttagcatttgcaaaaattgaattgctgaccaaagaaaaccaacacctcatcgcgctccgagactggctcctccccctacttatgaatggacaggtcacggtcaaataa

SEQ ID NO: 440917 - DNA, 1752 bp, Serratia marcescens
  misc_feature (1351)..(1360): n is a, c, g, or t
atgaaaatatctttctttggtgtaaataattttagagctatttctggtggcatcgaaaataacaagataatttttaaagatactaataccttgttcatttatggcgctaacaatgctgggaaatcaactttcctaaaagcgtatatgtttttttatggtaatgaaaagcctaacattgatgatttctttaaacgtgatgataaaaattctattgaatttgagttggaagttcagctcgatgtcctagacaaggaaagaatagagagtaaagcaccaaagcaaaaggaaagttataagaaatacttgaaggatgatcaaataagaataaagaaagtgtggagtaagattggtggtaaaatagaagataaaaactatacatttaattacgctagtgatgcgtatgaagatgttgggtatgcgacaatcggtctccatactgtttttcaatcatgtttgccgaaacctgtttttattaaagccatgcctacggaggaagaggcgaaaaaaattctaaatgagattttaaaaatgatggccgagagtactctcaagtcatcagaccttgcggagctgaaagctgctcaggataaaataaagcaattgcaagacaagatgtatgacccagacttgattgaaacctatcaaacttctgtgaatggatatttcaataaaatatttggtgacacctcgattttatttaaagaccagaaggatagagttatttggactgaaaacaaactgggaagggattttgaaattgagtttatgaagataaatggggaaggaaagtttgatggggacataccttccaactacaacagtgtaggtcatggaacgatcaggactgcaatatttaccttgctattaatgagagatgtggcagagagattcgaaaggaaacatgggaggaaagactatatggttttatttgaagagccagaattattcctttaccctcgcatggtaaaagagttacgtgagttaatatatcaggtgagtgttgaggatctcccatatcaggtgctttgtgcatcccattcatcgtcaatgatagatctttctaaaccgaagtcatcaataatacgattgattaataatgtcaagggaactaaaacttatcagataaatgatcaatttttgaaagatgctaaagggattgacacaaatgaacaattaaggcaagaaatgtatgaagtcctaaggttcaacccttacatatgtgaggcattctatgcagacgaggttcttctaattgaaggtccaacggaagagataatttccagggcttacttccaagaattcccatcaagcaaaacgatattcatattaaattgtggtacagttaataacnnnnnnnnnnacattccgttttatcaaaaaatattctctagacttaatataaaatatcatgttatttgtgacacagacaaggcaaatatcatgggctttgatgactatggcaatccattttttgacactgggatacaaaagtccatttctgaccaatataagttagataaagagagaaaggacgggaatttaggtttatttagggtgcacgatattacctttgagcctgcacatcaaaaatcagttattccagagtgtttgcgatttagtgacggtaaagacagaagtaaaccatttaatgccaatttatattggaagaatgtactaaaaccaaatattgaccatcctgaaattgataaagtgcctatcatcagatatctaagagagattattgagcattaa

SEQ ID NO: 440918 - DNA, 570 bp, Serratia marcescens
gtgcagagccaggaggcagaaagccagtggcgcaccctgtttcgcaaactacgcggggaaatgacgccggaactgcaagcgcagcaccacagccggatttccaagcgggagctggcgaaggagttcgacggcctgattgaagagatggagctggacaaaatagagtttcatcttgattgcggaggatcggccccgaaggtggtgtccgcgcataaaaatgccctcacaaccttcgctgaccatgcaatgggccaagccgtggatgcactgagcaaggcgcttatcagccctgatgttatcaaggcttgcgcactggcttcacgggcttacggcgtctatgcggacaatccgatgagaatgattgagcaacaggtactgggaacgctacaaggccgtattcacgttgccatggcagagcaaaatatcgatcacccagtgctgaatgagattggcctgacgataccggaagaaaccggcgtattgcggaagcgacaaagatgcccgatgcaaggggtagcagaattggcgcaaaaacgtcaatgcttgcagcagaaaggggcccaatcatga

SEQ ID NO: 440919 - DNA, 426 bp, Serratia marcescens
atgcctgaactggccggttttatcctgtttatccgaaacacgatgggcgttagcgctgacgtgttacccgacgatgatccgagcgttaaccttgcctggtcaatgtcaatggactgggtgaacgggcagctcgcttgtattagccccgttctgtattcgcaggccgtatataacctcgcggcgtcatttctcatcaactttggccccgaggcggttttcggtgagctcagaaaaacgctgggaaccaataatttcactgccggggtgatcagcgcctcagcggatgaatcgaccagtcagacccgggtcgtcagtgatgcctttagaaatctttcactcgcggatctgcaacagcttaaagatccgtatggtcgctggtatctggctatcgcgcagcagtacggggatttgtgggggctgtcatga

SEQ ID NO: 440920 - DNA, 1431 bp, Serratia marcescens
atggacaccaacgatctttgcatgggtagcaacgctggcgtcctcagccagatccttgagggtgacagtattgagccaggtgcccaggccggttatgagctgtgcaaactgatttacctgtttcacccgctgggcgggaagatggtcgaccgcccgattaagctggctatggctgagccgcgagttgtccgcatgacgcgtggcccggataagcggttgagcgaagcgttcgagcgagagtggaaagccctcaaggcggaccgtctcattgccaacgtggcgcgccagtcgcgtatttatggcgttggcgctgtcgtgatgctgattgatggtgaacctaccaacgaagcggccgaatacgacagcctgtataagaaggcgctcacttttaacgttctggacccgatgaatacggcgggatccatcgtgttggatcaggacccgaacagcgcggttttccagaaagtcggcagcgtcacggcagcagggaagccttatcaccaaagccgctgctgcgtgatgatgaacgaagacccgatttatctggcttacacgccgtcgtccttcggcttcgcaggccgcagcgtttaccaacgggcattgtacccgctgaaatcctttatccagtcgatgcgcgctgacgacatggtgacggtaaaagccgggttgctggtggcgtttatcaaacaggccagttccattgttaacgccgcgatgcagaaaatgtccggcatcaagcgctggatgctgaaacgcggtggcaatggcgatgtgcttcaggtcggcgagagcgacaaaatcgaatcgctcgacatgcagaacttggaaaagccgctggatacagcccgcaagcatattcttgagaatatcgccgctgccgctgatatgccggcgcttttgcttaacaacgagacgttttccaacggatttggtgaggggaaggaggacaccaagtacgtcgcccagtacatcgatgatgtgcgtaaggatctacagccgctttacgatttctttgtgcggatcgtccagtaccgcgcctggtcgccggaatttttcgaggcgctgaaaaacgatattccagaatacaaaaatgttacctggcaatcggcattcagctcgtgggtgggaaatttcgattatgtctggccgtcctcactgaaagagccggaaagcgaaaaggtcaaagtcgatgaaacgcgcttcaaggcgatcaccgagatgctgaccgtgcttctgccgcaactttccagcgatccagaaaaccgggcgacgctgatcaagtgggcctgcgaaaacgccaacatgaacgagcatttatttgctgatcgcctggagctggattacgaactgcttgaacagaatccacctaaggtgacagcgccaccagacggagaaaaccccgatgagcccctttctcagagagctgcgtga

SEQ ID NO: 440921 - DNA, 870 bp, Serratia marcescens
atgttatcaaatacggatttattgtctcaatcggctgatgttttaaaatgcaatagttcgattgctaaggattatgtgttcccgatagctagttcatttatctctgcttttcttggggtcgccgcagctaaactaacatttagacatcaagaaaaagtaagggcagagataaataaagtaagttcattaaataagctaataataaaaatgggtgaggcaagggctgccctccttgctataaagcataattacaatgacttaactcagacaaattttgttttaagagcaatggaaataccacctattctattgggtgattacaaaatagagaataacacaagtgaactttcttttttaattgataagaacccagactataaagcatctgagtatgacaagacgtgggttaatattcaacgcgtaggtatgatggtaaataattaccatcaagtctataacatgattagtaaaagaaatgagttgtgtattgatgttcatgagaaaatagctgaatttcaaaaaaaacataaaacccctgaaaatactggtttgagtatttccgatctaattaagatagtcggacatggaaatatggttgctttttgtgatttgacgcaatcatttgtttcttttttagatgatgtgttatttgaaatcaacgatttcatgtttaagtttccagagcaagctaatggtaagattgattctaagttaatcaaaggctattgcatggttataaaatacaaagaagatggcctaatttgtaaaagaacagtcgatctggattactcatctgcagcacagctaatggggttaagtgtaggtgcagtgaaggaaaagtatgattttgggtttaaaagaactacatga

SEQ ID NO: 440922 - DNA, 495 bp, Serratia marcescens
atgaactcacaattgagaaataaaatcgtcgctgccataaccggtggcggcggggcgattgcgatcgccactgcaatgctcggcggccacgatgggttagaggggcggcggtatgtggcctatcacgatgtcgtcggcgttctgacggtctgcgatggacataccggtgtcgatattatcctcggcaagcgatacagcgacgcagaatgtgattcgctgttgaaatctgacctgcagaaagtcgcacggattgtcgatcccgcgatcaaggtgaaaaccacggaaacccagcgcgccgctatttactcgttctcgtacaacgtcggcccgtatgcgttcatcggctccacgatgctgaaaaaattgaatgccggcgacccggccggtgcgtgcggtgaactgaagcgttggaagtatgccggcggcaaagagtggaaagggctgatcacccggcgtgaagtcgaaaacaccgtctgcacctgggcccaatcatga

SEQ ID NO: 440923 - DNA, 1032 bp, Serratia marcescens
atgaccctgaaagagctggcagaagccactgggttatcttcccgtatagttattgagtatgaaaaagattattgcctttatgcaccaacagaagctaccgttgcggcttatgttagtgtacttaagtaccctgaatcgttcttttttggtgaagatgttgaaagtataaatcctgacacggtttcattccgttctttgcgaaagaccaaagcagcagagcaacacgctgcaataggtgttggtggtcttggagttatggtaagcaggtactttgatgaaagctttaaattacctgctgtcgatattcctgacatgaggggaagtgagtcagaaaccgcagctgaatctctaagagaatcatggggcttagggaagaaaagtataggaaatatgattcaccttcttgaaaaacatggggttaaagttttctttcttgctgaagatacggctgatatcgatgccttttctttctggaaagatggtattccttatgtgttcctaaatactcaaaagactggtgaacgaagccggtttgatgctgctcatgagttaggccatttggtattgcataggcatggaatccctcaggggcaagatattgaaaaagaggcagacgcgtttgcatccgcgttcttaatgccaaaagagaatatacttgcggctaaattagcatttcctactttagataaaataattcaattaaaagctaattggcgagtttctgctatggcattaattgtgaggatgagaaatgtaggggctttaaccgactggcaatataacagcttgatgagagatgcatcttctaaaggttatagaactggagagccagggggtattgaaagggaacgatctctaattattgaaaaaataatgggcagcctcaactctgatggtatttctatggtttcaatagcaaatactttaaacatcccattagatgaaatatccaacttgctatttggtatgtcagtagtccaaggtgcagatgtaaaatcagtaaaaagcagagcagatttgaagcttgtctag

SEQ ID NO: 440924 - DNA, 678 bp, Serratia marcescens
atgatgagtgatgcaaagtgcaagatcgccgtgcaggaggattctgtggttcgcctagcgcagttaggtattgacgagcaggatattcataatgcaattacaagtgctctttacgagcgtcgtagaaccagcaagttgcacccagtcattgatggaggattccgtttttggagtcagttagttgctgcactgcgcggtgagctaattgcgaaagatttaggctggtcctcttcccggcaaaatcgcatggagttagttcataactcaaagttagggatcaatttggtcatcacagccggcgataaagatactggtaaacctgatgggtggccgaaaaccaagaatgcgaaaggcgaagctacaatgagtatcgtcaatagtaactctgaaacacttgatctattcccgattgagccatctcttttttcaactgatggactccaacctgcagcagatacaactcagaattatatcgttctttattattacgatagtggtaacaaagaggtccgctgtgaggtttctttgccgataggtatggcagttgtaaacgggtttgcgaaagtaaattcgtgggctgagcgaattgttttagctccaattccgtttgatggtggtgaaatcatccttgatgaagatttcatcgaagaaatagatatcgacgttgtaagaatatga

SEQ ID NO: 440925 - DNA, 1089 bp, Serratia marcescens
atgcatacgctcgctgtcggcgcgcggtttcttcctgccgttcgcatcccagcacagccagccgatcgccaacattttcagcgacggcaccatgatactggcgatgaaaatcaccatcgccaccggataagagccgtccccccacagcaggatcacccccgccatgatggtggagttcatcttgttgcccagcgcctcggtcaccatgatcggcatcaggttggccggaatatacagcatgacagaggtcaccagcagcgccagcgtccactgcaggctgtgacgacgccgcacgtagcccttggtgtgacagcgcggacagcgcacctgatcggccggcaggatcgccgtgcagcacgcgcaggagcgcacgccctggcgcatgccggtgcgccccaccgtcagcgggcgatgcagtcgcggcgccggttcgatatcctgccacagccagcgccgatccacgcactggaaggcgcgcacctgcagcaggcagaacaggcagtaaggcacgaagctactgccgatgccgatatcgccgtaggccatcagcttgacgaagctgaccagcaccccggcaaggaaaatttccaccatgcaccaggtcttgaactggaacagcacccgagccatccactctttgagccccagcggcaagcgcactctggcgcacagcaggataatcgccaccatgcaaaacgccgggatcagctgcacgaacaccataaacaaggtggccatgctggcgtagtcttccgccaccatcacttccgggatttggatcagccggatttcgttgccgaggccggcgacgcgcatgttgataaacgggaaaatgttggccagcaccagcatgaacaaggcgctgagcgcgtaaccgatcggccgcttgcgcggctcgtcccagcgggcgctgagcgtggttttgcagcgcgggcataccgctttgctgccataggccagcggcggcagcgccaccagcatgtcgcactgcggacacagcatcaggttatcctgctgcgccgccgagggtgcggaatgactatgctgctgatgattgttgtgggaacacaccatattcctcctaaataa

SEQ ID NO: 440926 - DNA, 1287 bp, Serratia marcescens
gtgtctataatcgagtggggatataaaaccccgagggaaatacattattgtgatgagaatggattttccttgttcagtgaaagtgcaggaaggcttttccggtcctacggtgttgactttacagtgtacataaagtcaccgttaataaagaaaaaatatgaagagcatgtgttatctctaggtgatatggattcagggataaaacagttaaaagaaatagttattgatatatgtcggaagcattttgtaaataaagagttcttacaaaaatcaaaaattgttgatgagtggaaggcccaagatatatatccttataaatcagatgctcaaccaggaaccgttgaagaggtagagcagaaagtatttgatatattagctgttaatgtcgaaagttacttgtctacttttagtaaatctaataataatgttaagaggtttacctttaaacttctttcacaagcgctgaaggacaaccctcactcagtaaggaaaatattatctgaagttcttgttctaagcactaaagatcaagactcactagctgaattattggataaagctacattttcaaatatcattagagcatcacaggttgtatcagacaggttgaatttccttacggggttagagcagcttttgtttgatgattcaaccaagaaaaaacttcttgagagagatcagttacataaacttgttgagaatgaagcttggatttttagagaagactttaacttatctagaagcgaaaacacccttaatgaggtgttgaaatatcatgcttcattattaggtaaggatgaagactgttctctaccagttctaagagaagatggaacaactggtcgaatagatttattgcttagtaaagcgagacagcctcgtgagggggagttggagcatttggttgttgagttaaaaagacctactaagaaaatagatttgtcagtcacgaatcaagtagaaagttacgctcatgctgttagcaatgatggtaggtttgataagcgtaacaccaagtgggttttcatcgctgtatctaatgaaattgactcattggtaaaagataaaatctctcaggatgaccggccttatgggatgctttactctaaaggtaatttatcaatttggatatatacatggggggagctgatcagccaggcccgctcaagactgatgttctttagtagattattagatatcgatgttaatcgtgaaactgcaactaactatttgcagtcaacttatgaaaaattcatacctaaagggaatgaaaaagaagacgtttaa

SEQ ID NO: 440927 - DNA, 177 bp, Serratia marcescens
atggcagtagttaacaaaagacccatccttgtagatcagctcattcttgatgggttaaagcgtctacgggaagaggagagcaagcgatcaacggttggcgctgctcccagcattcaggagctggcgcggcacattttgcgccagggcatcagcaaacatgcggcggagaaggagtaa

SEQ ID NO: 440928 - DNA, 831 bp, Serratia marcescens
atgcgtaaagtaagcgcggtaactgataccgctgatgttaatggtgagttcacagagggcaatgtcgctcaaggcatcccacctacaatcctggttgcagatatttttaatacctggcagcgggaaatggtcaatcttgttgaaagtgctggtattgatttggatccacatgatgacggacagattttaaaggcaatacagcaaatagttggggctggacgatacctcgggcggaaagtgtttacttccaatggtagttatatcccctctgctttggctaaaagtatccgaattacgatggtaggtggcggcggcggtgcaggtggttgtcaggcttctgcgaacaatgaaacgtattttggtgctggtggtggcgcaggtgcgacgattatttctacatttaccttaacgggggcttcaaattacccagtggttattggttcaggaggtcttgggggtctatccgcgagcaatggctcgaatgggggatccactacattttcaaatgtactttctgctccaggtggtgaaggtgggggaaagtcaggtgtttcaaatactaatggcggtgccggtggcgtggcgactacaggtgacattcggctgagtggcggatatggcggtgatggtcaatctggactaattgcagttaatggacaaggaggcgcgtcgtatttcggtggtggtgggcgcgcaggcgctggcgggggcgttaatggtgcggcgccgggttccggtggtggtggtgcatatgatagtggttattctggtattgcaatgaaaggtggaaatggtgcatccggcttagtaattattgaggagtattcatga

SEQ ID NO: 440929 - DNA, 369 bp, Serratia marcescens
atgatcgaagagttgctcgggccagagcgccgccggcgccgttctccacaggaaaagattgccatcgttcaagagacgcttcagcctggcatgacggtatcccatgtcgcacggcttcatggggtgaatgcaaaccagatcttcgcctggcgaaagcagtaccaggaaggtagcctgaccgcgatcatggctggcgaagatgtcgttcccgcctcagaacttgcagcagcggttaaacaaatcaaagagctacaacgcctgctgggtaaaaagaccatggagaacgagctgctgaaggaagccgtcgagtatggccgccaaaaaaagtggatagcgcacgcgcccttattgcccggggatggcgactga

SEQ ID NO: 440930 - DNA, 813 bp, Serratia marcescens
atgaacaagatctaccactacaccgacctgaacggactccaaggcattgttgaaaatcattgcctgcgggcaaccaacctgcattttctcaacgacgaagaggaaatgcatcatggtatcagtgctttcgaaaatgcactcaaccatctaaatgaagaattgagtgaggaaagcattaaaatccttcgtaacacacttgataggcacaagttaagtcaggtggagcataattacaatatctcattctgccaaaagtcggatctgcttagccagtggcgcggctatgccgctacgcaaggagtatgtctggagttcgatagtgatgaattagaaagcgctctcgattaccaggattatcaagtattatcacgtggtgtattttatactagtcgagattccactctggaagcaaaggcggaaatactcacttttctaaaggaagagaatgttattaaaaaaagcaaaggggatcggctttttgaatatgagaaggcatctcaactggtaaatatgttgacgccgtttttcaagcacgatagttttaaggaagaaagcgagtaccgtattatcatacagcctaaaataaattccgcgccagttaaattccgtgtaaaccagcacggtcttattccatatcttgaagtgaaagccaaaaaggacaacgcttttaacggactgttaccgctaaaaaatgtaaagatcggcccctgcaaaaacagggcatttatgatgcagggtttaaagttcctgcttaaccaaaatgggtatatcaaaactaatatttcctttactgatgtaccttttcgggcttaa

SEQ ID NO: 440931 - DNA, 147 bp, Serratia marcescens
ttggagcgggcgttccaccggctggcggaaggcggcaaggtgctgatgccgctcgatgactacggcttcagcgcccggttcggttggctgaacgatcgtttcggcctctcctggcagctcaatgtgccggcgggggatctgccctga

SEQ ID NO: 440932 - DNA, 516 bp, Serratia marcescens
atggcgcacgaatttaacctggccagcggtttcagcttttggggtaatgcggcgatgtttctcctctgtgcgggaattccgccattgagtgatgcggcgtctaccgtgacggtcagcgtcacggtgcagatgccgccgccttgcgtgatcaatggcaatcgcactatagaagtggacttcggcgagctcctgacggtcagcgtgaatggcagcaattataagaaaagagtggattatacgctggaatgttcgggccgtcagtccaatgccatgcagatgaagattcagggcaacgcgacctcctttgatgccacggcgctgcagactaacatcagcgactttggcgtggcgttacgcgccaatgggcagccgcttaatatcaatagttggctgaaattcacctattcggataatcaaacgccgttgttagaggcggtgccggttaaaaaagcgggcaaaacgctgcccggtggcgcttttattgccgacgccaccctgctggtggcttatcagtga

SEQ ID NO: 440933 - DNA, 807 bp, Serratia marcescens
atgctaagatttttttgttttcttcttgccgttgtcccattttgggcaagttcgtataacattactggcagtgcggtgaggaatgatactacttttccaatagtttactgggagtatgataatgattattatattgcgaacgatcttaacccgtgttatcgggtcagtaactgttatatcgtctatggcgagctattttctgaaaacagattttcgacctataatcgttatccaaccaataagtcggcaactaattaccctgagttgcaggattttatgtcaaacatgagtctaagattctcagggacaaagtataatgcgatcacggccactgtgcccgatggaataaaatacccctgcgttaatttgggttatcagatagggtcttcttccccttcacctataaacccgatgagctgtaccacagggccgggaggaagcacgccgccaccggttacctgcacgataaactcgcaggatattactttgcagcatccggcgattatggcaaatgaattaaatggtaatcgcaaagaggtgaatgtcaacgtgtcgtgtaacagaaacagcagtatcaatctgcgtatgacagggttaagcggtaatggacgtctctctctggctgctaatggcagtttatattctgagttgacaataaataacgtttctgcccagagtggggtcaccgtaactaatgtgggaaccggcggtaaaaatatcactatagcatcggcgttggtaagtagtggtgaggtggcttctggtaagtattcagcctctgccgtattattgctcacaatcccgtaa

SEQ ID NO: 440934 - DNA, 516 bp, Serratia marcescens
atgcatgcagtacaacaacgtctgctttggttaggaagatgttatggcgtattgacattaaccttagcgggaggggcacttatttctgtagggcaggcggcaacggcgccgatatatatatccggcacgatcaccagcaagcctcaatgcgttattaacggcaaccaaacgatacgcgtggatttcggtgacgatctgatcaccacaaaagtagacggcggcaactatattcgcccggtcgattatacactggaatgtcggaataacagtaaaaatgccatgaaaatgaaagtggtggggacgacagctgcgttcaacagcagtgcgattcaaagtagtaagaccaacctggctattgcgctgcgggctaatggcaatccgttgactatcggcagttggctgaactttacctatcccaataagccgctattgcaggcggtgccggtcaaaggcagcggggcgctgaccgccggcgctttcagcgctgcggcgacgttaatggtggattatcaatga

SEQ ID NO: 440935 - DNA, 837 bp, Serratia marcescens
atgagattcctgatgcggttgcttcctgtttttatttttttgggttggtctgggtattcttatagttatgatgtggaaataaattggcagccttccagtgatggacgagggatgcagatgactgtgatatcggtaaattctcgcttaactcctaatagtaaggtgaattgcggattatttgcatcgtgttttgtacatgtgggggggggaagcctaagcgttggtgctaccttctatcatgatttccccaaaatgtcttaccgtggccagcacgaagttaaaaaaattgttgatgcatggggggggacttctcctagcgtatatatcaacaactggggggagatggtcgataaaattggtggcgctccctgctttgccttcgatatacgtgggtcaaccggtggcgggtcgtttggtgatacctgtggaggaacggccactcccccccctgtcacccctaagccacctgagccgcagatctcctgctacctgagcggcaatatttatctgcagcatggttcgctggctgatagtgaagttgcctctaacaaggctaatacgaccgctcgcgtgtattgcacaggcgcggccaaagtaaaagtgcgcgcgttatccagtattggcagcgacagttatatggttaatttgcgttctgacggcagtttacaatctctgctaaccgtgaatggtgttgtcggtaatggcaatggtgtgttgctggatgttcctggcttgtcaggaaaagacgtggtgttttcttcaatgttaatcacatcgggaacgccagcgcccggcgatttttccggctcggcggtggctgtagtggatatcctctga

SEQ ID NO: 440936 - DNA, 1542 bp, Serratia marcescens
atgtcgccccgcttccggccctgggttatctcgctgtttatcctgttggcctggggcagcggctggctgatgctgtggacgctcggtttctacctgacccacaacggcaatcaggcggcgctgtttctgcctcacggcgtctatctcgcgctgctgatcctgctggcgcgccgctattggcccgccctgataataccgccggtgctgctgctgttctggctgcacggcgaacgcctgctgagcggctacagcctgctggccgcgccgttcatcaccctgctcccggccgcgctcgcacagcgattctggcgccgttttccgctctactggcaacggctgacgctgctgctggccgcagtgaccgccgcctcgctgctcaataccgccctgcttgcgcctttcgcacacagcccggcgatgctgctcggcctggcgtcatttaccggtagtgtcttgctgaccccgttcgtctacctgatttttgaatttctgcgccagcagcaccgctaccatctgctggggctggacaccagcaacccgccgctgcgcgcgtccttaatcatctggtgcagcctgtttttcgttatcggcatcggcacccagatggtgctgtcgccggaaatcgaacgcctgctgctgatcgtggtgtttttgccgaacgtggtgatggcgtggaagttcggctggcagggcggcgtgctgtccggcctgctcggcagcatgatgatcaccctcgcgcggcaggtcggcgtggggttcggcaatctggtcgagctggaaatctttctggcgacgcaggcgctgcttggcatcggtctgggcatcgccatcagccgtcagcagcacctggcgcaaaacctgcaccactatcgccgacggctggaagaagagctggcggcgcggcgggcgttgaccgaaaaactgatccacaccgaagaagacacgcgaaagaacctggcgcgcgagctgcacgatgaaatcggccagaacatcaccgcgattcaaattcagtcgcagctggtcaagcgggcgcgcgatccggcgcaaacccaggccgccgcgaaccagatagccgatctcgcccggcgcatacatcactccacgcgccagctgctgcgccagctgcgcccgcccgcgctggacgagctggcgttcaaagacgcgcttcaccacctgctgaatgaattcgccttcagcgaacggggcatccgttgccgtttcgactaccggctcatcgacacgcccgccggcgagacggtgcgcttcaccctctaccggctgctgcaagagctgctcaacaacgtgtgcaaacacgccgaagccagcgaagtcgccatcgttttgtatcaacagggggcacttttgcacctcgaggtgcgggacaacggcatcggcatccgggcggacaaggcgcccggcctcggcattcagggaatgcgcgaacgggtcagcgcgctcggcggcgaactgacgctggacacgcagcgcggcacgcgggtaattgttaacctgcccacaaatttgcaacaaaccgccgactaa

SEQ ID NO: 440937 - DNA, 462 bp, Serratia marcescens
atgagctgcatattttgcgatatggtggcaggcaagattccatgccataaaatctgggaagacaaagagcacatggcttttctctctatctatcccaacactgatggctttactgtggtgattcctaaggctcactatcccagctatgcttttgagctaacagatgaagtgctgcatgctttgatactcgctaccaaacaggtggcgcaattgcttgatagagcatttgacgacgttgggcgttgtggcatggtgtttgaagggttcggtgtcgatcatgttcattcaaaattgattccgatgcatggcaccgcctcattaaccacttggaaaccaattgaagcaacatcggaaaagttttttgaatgttatgaggggtatctctcatctcatgatgcaatgcgcgccgatgataactatttggccgcattggctgaaaagatcagaaacacagcctcttag

SEQ ID NO: 440938 - DNA, 210 bp, Serratia marcescens
atggttatagcgaatcgggccaccactcagaatcacttctttcaaccggataagatctacatctttatctcttactattataagattagagcaaaacaatttttcatcgcgcccatccaggatttctgcatagagcatgtgacatcattatgtattggcagagtagccaatcagcactacgccaacacttcaaactttctggatacatag

SEQ ID NO: 440939 - DNA, 723 bp, Serratia marcescens
atgaaagatgatgattacaaaaaagccttccatccaagtggctcacaagaaaacgaacacaaacagtgtaaattaaataaagaaaacaagctttacaacgcctttgagaaagcccatgacattagaaaattcgaaatagagctttattggaaaagaacagcttatttttggacattaattgcagccatctttgctgggtactttcttctcctagccacggaggaaagtaagataccccacaaagaactatatttaatggcgatatcatcgattgggttggtattttcttacgcatggttcctagcagccaagggcagcaagttttggcaagaaaactgggaatgtcatctagacatgctagaagatgacattaccggccctctatataaaacagttttaaaaagagaaaataaagatgatgaaataacatcacccggagcattttccgtttcaaagataaaccaatggattgcaatgttcgtaatcattatttggtcaattttcacttcactacctttaattacaaggttagcccattatttaaaactattagcaagcacaacatcaaaaaaagagtgcgtcattacaataaccgagctaattattctaattctcacagccatcttcatatatgcaatgagcaaatacacaaaaacagagttttgggcaaaaaactcaccttcaaaaatagaagcaattgaaagaaaaaccacattaaattaa

SEQ ID NO: 440940 - DNA, 1080 bp, Serratia marcescens
atgattacatcaaccaaaagaaataattttaaaattgtaataaccctgaatcaaacccaaagtaccgagtcaaaatccagttcacatcagctgagttataagttttcacaaaaacatacagacacacttatcatttcaaaaaacgtattaaccatacacgggtctcgttctaaaaaaccaaacttcgacgaaatactcaccaataacaatagtgaagtattttatcaaataataaaatcacttacttatgcctttataacctatggtgaaataattcccataaacaaaattgaatgtttcgataaggatggaagttgctcaaagctgcttaaaaaaaggcagctaaacaaccttaacccaacaaaaaaaacctcattactctcgaagatttcagcatctaaaattgaattaattttcagtggaaaggctgcaagcacgaaatacttttacgctgcaagttatttaataagatcattctgcaccgataatgaatatgactcatttgaaaagttatggaaggcctacaacgcaatatacagaactgaaagccaaggaagtgcggagtatcaatgcttgaatgacatggaaagcttaatgttaaacaacccacaagactttccgttatcaacactatcagtttcaaattactccgcgacagacctactagaaaaaacgcaatggtataagatgctagagacaaagtttggaaataaaaaagcaaactcagaacagaattttgctaattttttggttgcaaaagccgactcaagactagcagagatcgctcaaaaaaccataaacttcaagaatggtttttggaccaacacgacactgtataatcaaacgcaacttgcaataaacaataaagtcgcattaggggagaatcttgaacacatagatgtagtagcaacactaaccaaacattacatgtatttcctaagaaataaatcattacatggcgatcaattagatcatgcatttagaatagtaccaaacaacaaggaagagttgacagtgaaattttgctcgtcaatcctagcgccattaattgtcgatcttattaatcggcacactcattaa

SEQ ID NO: 440941 - DNA, 1143 bp, Serratia marcescens
ttgaaagaattcgcaccgttagaggaaactattactgataatgtttcccttgagttggctgcattagaatccataagaaaaaataccgatagagtcaaagatcttgaggcgtttttacaaaaaattagtgatgagaaaagctatattcaatatcagatttcagcagctaaaaaaagaatctccaatcttcatgatgacaaaagaaaatatgaagatcttaagaaaatagctgactctgatgcattcagtgatagtaatatttttgttaatgagtgtcctacttgtggtgcgaattatgcagacaatcttcttgatttatcgattaaagataatttgatgacttatgaagatagtctgatttttattaaggagcagctaaaggcttttgagtttgtactctcagatagtggtgagcagcttaaacttaaacaggtagagcaatctgccatagagctcgaaatggcagagctgagaagtgatatacttcgattgaaaaatcacaaaaacccaagtatagcaattcaagaggactatttaagaagaaaaataaacttggagaatggtattgcagatatagaaagtgcaatgagtgagatttatcaaataaggcttgatttggattccttgtttaaaaaatatgtcaagctaactgctgctcgtaggaatttacctgtaagtatattatcaggtaaggatgttgagaaaataaaattcttgaactcaaaccttaagcgtagacttgaaaaatatacgttctctagttttagtcctgagcaaattgagatttcagaggaaaattatcaaccaaccagagaagggtttgatattggttttgaggtttctgcaagtgatggtattaggatgatttggggttacttaataagtctttttgcgacaggtaaaaagtactctacaaatcatcctatggtaatcatttttgatgagccaaggcaacaagagacgaataagctaagtttctctgagttgcttaaagatgcagctaaaacctcattaaatggagggcaaattatttttgctacttccgaagaggaaagtgtattagaggctgctcttgctggagaagaatatactatgaagtcatttaaaaaagaggaaggaaaacttatcagaaagttcgcatga

SEQ ID NO: 440942 - DNA, 1311 bp, Serratia marcescens
atgaaaataacaaaatcgttagaagcactatttgaattccttaaacaaaaagaaaatgaaggtgctagttttactaaggaagatgttttattagaaactggctggaaaaatgctacatttaaaacctatttagggaaagggcagttatcagattttataagtgagattgatactgatgtatatgaagcatcgaattgtcaaaacataactaccgttgaatttgccaagttactttcgcagagcaagcatcgaagaggtcttggccataactgccaatcgaagttagccaaagcattattatctaaatcaagagataatatgttattggctttagagttatataatagaccatcaatagaaaatagaatggatgcgttcgtgatgtgtttctgtaccgcatgggaacaattacttaaagctattctgatagaaaaagatggtgaggatagtatttttaaaaaaggaaataaaaaaggatttaaagaaacgatttctctcagagattgtttggataaaaatttctcagctcagtctaaaatcagaaaaaacattgagcagataacatattttagagatcaggctgttcaccttctcatgccagaaatacaggggataacatcaaggatattccagtctggtgtgttgaactatacatcttgttttgaaaagttcacagaggtttcgttcttaaacaacaaccatacaggaatgatatcattagttggtgatttcaaatcaccaccaatttccgttttgaagtcaacatatggaaatattgcagatgatatccttgaacttgcgactactttacaggctgatgttgatgataataatgatatagagtttgctgtaccactaaatgttaaacttgtattcgcaacatctgacgaagatgggaggacgattacacttgctaaagcagatgaaggtatcgaaggcttaaaaaaagctcttattatcgaaaagccagtagatcgagcgagaacccacccatacttgcaaagtggaattattgaagagattaataaggttttatttgaaagatttgattatgcagttattgataaacaccttgttaatacggataagaaaacgggtttgaaatcaataaatagaaactgttttgatgctgttgtatgtaagaatgggtggaagtcaagcaacaataagtatcatcataagaatgaaaatccagaacttcactattactctcatgagttagtggatgagtttattaagaaagtgatgatgaatgaaaaatatttggctaacgcaaagaaaacttataatgccaataaaaggaaaaaataa

SEQ ID NO: 440943 - DNA, 261 bp, Serratia marcescens
atgccaattacagatcaagagcgaattgagcacatggagaagtttggcttgaacgatttggataccatgcatacagcagactatcgacaactccttaaggaagaagcattcttttgggacgatccgcatggttttatcatgcatactctttccggtgaaagaattgtcaccaatacggagcagctagatgcgttgattgaacatcttgacacgtatcgtcggttgttgcctgaaacgccggagtggatgagcgagaagtga

SEQ ID NO: 440944 - DNA, 1263 bp, Serratia marcescens
atgcatagactgacaagagatttcaaaatatttcaggttatcacctttttaattatgactacaaatagaggtgcttttttcctcctaacgtggttttctttgcctcaaggtgcattattcgtttctatcatcgtagggatctactggtggctgtatacgctatctatgcctttcgttggtgccgtagttgatgttgggtcgaaattcaaactgtccttaattggagctggggtaacgtttttagccatagctaatatcttttatgcttcccacaacccttccaactcgaacatcgtcgttagtacaatacttttatccgctggtgcaatggtattcactgcatcttctattggattttctgcactactagtacccaataaaatgctattggcaaaagcattcaaggttcgcggacttactttatcattcacaacttttattggccctggtcttggtggggtactattggcaactataggttataatgggatgtcgctaatgtttatttcattatcattacttgccttaatactatatgtgttattgccgattgatcgtaaagatcccgagtcgtttacattttcattttcgtcatggtatatggatactaaggctggttttaatgcggtaagaaagatcccgacagaatattgcattgctctttttatgatgttgctaaatttatttataacgccttttttgagtatcgcgctgcccttgttggtggttgagcaatatagatttaactcaaccgagctgggtgttattttggcgctctttggtgttggtgttgtattgggtagttttattatcacgatttgtaatgtaaaacctgagcgcaacttcaagctttgtttgcttagtatattgacattagggataagctttgttttaagtgctgaaaatccattttacatcgagatatattttttgcttttcattgctggagttagtgttgccctctttaacgccattgtaacatcttctagggccacagccattccagatgagtatcgctctcgtattgagacatttgttttatttttggcgcaaatcagtattcccgtcggttcctctctgtgcggggtattgatcgcatggcttggtgtaaatattacgataataatatttggtgtttgtattttgtttgcatcactactattaaattttgtaccaaagtttcgagggttactaacacagaagatcgatgacagtcattgcattccttactatcaaaaagagtttcctgaggcattccgataa

SEQ ID NO: 440945 - DNA, 873 bp, Serratia marcescens
atggtgttggccaaccgctacgactggcagctattcctcgaagtgaccggccccggcggcagcggcaagagcgtaatggcggccatcgcccggctgctggccggtgccgataacaccacctccgccaccattgataatctggagtcggcgcgcgagcgggccagcgtggtcggctactcgctgattatcctgcctgaccaggaaaagtggagcggtgacggagcgggtatcaaggccatcaccggcggcgatgcggtcgccatcgacccgaaatatcgtgacgcctacgcggcgcacattcctgcggtgattttggcagtcaacaacaaccccatgcagttcagcgaccgcagcggtggcatctcgcgccgccgcgttattctgccgttcccggaggctatcgcccccgaagagcgcgatccgttgctgctggcgaagatcaccgaagagttggccgtgattgtgcgtcacctgatgcagcgcttcgccaacccgaatgatgcgcgtgcactgctccaggcgcagcaaagttcggcggaagccctggaaatcaaacggcatgccgatccgctggtcgatttttgtggttacctgacggtgctcggcaccccggaagggatgatgatcggcaatgccaacatcaccccaccgaatccgcgccgctacctgtatcacgcctacctgtcgtttatggcggcacggggctatcagcacgtgatgaacctgacggcgttcggccaggcggtgccgcagacgctgaaagagtacgaacacacgttgctgaaacgccgcaccaagcagggaatacagaccaacctgatattgagtgacgagtgcgaagcggactggttgccgaagtgcggtgcggcgtga

SEQ ID NO: 440946 - DNA, 504 bp, Serratia marcescens
atggttggcggcgggttcggttccttctggcgcaatgacggcaaccggctttatctgctgctgacaaacgaaaatgaccaatacggcacattcaacgccctgcgtccgttctctgtggatgtcagaaccggcgccgccgcttttgagtcgggtattcatatcggcggtaaatggcctgcgatcaccacatccagcgggacaacgtggcatccggacggcaacgttcagggcagttgctggggcggctacctcagcaactggcttaatcaaaatatctcggctgcgcagaacaatgcgcagaactgggcctatcagaatttggttcagggtgtgcgcatggccgggcgcacggttattgcggataccggcgggcgcatcgatttaccgtcgggctgtgtttatacgggtatgtccggctcaaactacaacccctcaatctggggcgcttattcagcggttcaggtgctgattaacggcacatgggcaacaattggaacggtgtaa

SEQ ID NO: 440947 - DNA, 294 bp, Serratia marcescens
atgacaggcggctttcacctgcccgcctgccagcatgcgcttatcaccgtgggcgttaatcagctgcacgttaaccacctcgcccccggcattgtgcagcggcagcagcaggtcgccgggctggaaggtgataccgccaacgcgcagcggctggccgtgcagggtcagggtttctgcctccggccagcctttggcgctcaggtaggcgttgccggtctgggactgcgcggcagccaccagtgcctgtgcctgtcgcgcggccttgcgctgagcctcggccttgtctttcgttga

SEQ ID NO: 440948 - DNA, 192 bp, Serratia marcescens
atggctacgaccctcaccccgactcaccctacattctgctttttgtttgcggccgtacgccgttctgcgctgaccgcttcaccgcgtatcgtgcgcaccgtggcggattctgagcacaacgctcgccgcctgctggcccgtgattacgtgttgtcctttgccggtcgtctgccggttaaggcggtggcatga

SEQ ID NO: 440949 - DNA, 531 bp, Serratia marcescens
atggacaataagctgagcgaactgagcaagccggtggcacagatttactacgatgagcatgattcgtcagtaatgcgtatcggttggtttcgtagcaatgagcccaaaaacccggaacccctctactcgcaagagtacgtctccgccctgctggcagagctggaagccaaggatgagcgaattggcgagctggaggtcattgccaccgagtacgccggtaaatttcagaaggcgcaggatgcgaacaagcatctgattatcatgagcaacgatgacaagaagcgcatcgccgagctggaagccaaaaatgcccagctaaaaaaagaactgcataacgagggcgctgcaaatgcccacgcttacgaacgcattcgtgaactggaaaagcggctggctacgccggtgcggttgaaaaaggtcgattccagcaacgtgccttttgccggtgacggatttaatgctgcagttgattattgtgcggctggcgtacgtgccgccgggttttcggtcaccgtagagggggatgagtag

SEQ ID NO: 440950 - DNA, 144 bp, Serratia marcescens
atggctaagagcgacgaacaacgcaaggcagacgcgcgcgaccgcaagcgcgcccagcgtcaacgcgaaagagaagcggcgagcagcgccgctgtaagcggcgagcagcgccgctgtaagcgggcggcgccggattacgtttga

SEQ ID NO: 440951 - DNA, 183 bp, Serratia marcescens
atgaaagagcaagattttgatttatctaaaattaaagaaatcgagcagactgatagtaagtcaaaagctaatacacttttaaatgatggatgggtactgttgaaagttactgaaagtcagtttcatgacacctatggtgcattaaaagcagatgtcattttcactttaggcaatactcgataa

SEQ ID NO: 440952 - DNA, 2241 bp, Serratia marcescens
atgaccgtatcaacagaggtaagccgcgaggaatacaccggcaacggggtgacgacagattttgactatcgcttccgtgtgttttctgcggatgagcttgttgttactgtcgctgacacaacagagaacatccgcacgctggtgatgaacaccgactatacggtaactggcgccggcagtcgcaacggcggtaaggtaaagcttgtcagtgcgctggccagcaactggcggatcagcatcgagcgagagcttcctgtcacccaagaagctgacgttcgcaaccagggcaacttcttccctgaagtgcatgaggatgcatgggataagctgaccatgctgatccagcaggcacttagtaaatttggattggcgctcaggaagcctaactggctggcaaaatattacgacgcgaaagggaatcgcattgcaaacatggccgatcctattggccagcaggatgctgccacaaagggttatgttgatgcggttggcgatgggtattttaagcgcacgctacgggttcctgaaaattacgttcgtgttattcctgcaatcggcagccgcaggcgccagctcctggcgtttgatgacttcggaaaccctattaccgtgctgcctgaatccggttcagcatcagacgttctgattgtgctggctggtgcagatggcgctgaccgcattggtatgggacagagcacggtgcgtgacgttatcggctacgttacccctgaaatgtttggcgtacctgatgatggtgactggactccacagattaccgccgccgtggcgacaatgcgcgaagtccatttgatggccggaaaagagtatcgctgcgacggtacgatctacatgccttcgaacaacatgcagcgcctgaaattcgttttcaacggcgcaactattttcgcaaatcacatgcagccggtattccgatcgccggcgccgctcgagtcgccagcaatttcgtattaccacattgtcgggccgggaaaaattcgcagcattggcagcgtggacaccgtatatgagcaggggaaaaacttcgttggattccccgccggcgatcacagcagcatttacaacattgagatgacggatatctcatgcgacggcgcccagttctgggggtacgcggggcacggtggagatctgttctttgacaacgtccgcgataaccctgtggcgacgtatggcctgtacaaccaaatcgggcgagtgaacattggccactctggcggtgacacattgctgatgaaggggaactataacagcgtcgaatggtgccatgctaaaaaggcgggtttgcctgggagcaacccagagcctggatacatctgcggtgggtgcgtcatattcggtgcgccggttgacggtgacccactcggcagcaataaccgggtcggatactacaaggcagatcagtggtcttcgttgggcgtcggcttctctggggataactgcagtgttggtgagatcgagctgggcgagagtatttttgaagacgatagcccgctggtgcagggaaacaagccgtatgtcgccatatacaacggcaatgggaatcacattggtcgaatcacatcaaaaaaatccgcctacggtgttctgtttatccgtggcgagcgccacacgttagattatgcagagctgaacaactgtcacaaagagcagtttagtttaaacattaataccgttggctcaacagttggcgattttgttgtgaacaactcacttaacatcggcatgtatatcgagcctggtgccggctgctctatcaacagaattattttcaataacgcggatatccctcttgggaatacagcttgccagatccggaacgcgaatgcgtcaattggcgaaatccgtataaatggttcaggctctagctcaggatcgggggtttttgttgaacagcgcgcaaaaagcgctattcgatttataacctgtaacaacatcaacggaatggctgtttgggttcgccctggcggctgtgctccgtcttctgctcatttatcaaatctgtccactgcgacccggccagtcatgcagatttcttcaaaccagtctgcatgctccaactactacatattgaataactcgtcggttgggcagccgactgtttacgctgaaccatcttcaggcggtgcagtttcaacgtgggtgggttgtgagggggcgataccgctggcacagggcggggcaacgttaaacgctgcaacgacctctaaccgtttttattaa

SEQ ID NO: 440953 - DNA, 1221 bp, Serratia marcescens
ttgaagccgaagagcgacatcgacgccgtcctcgcccgcacccgcagctactttgcgcaagcacatggcgacgtgcgcgccgagcccaagcgtttctcgctcggtgcgaccgagtcagggactgccatttatcgcgtcagcggtccggatgaggaggtattgttgggggccgcgtccaaaatcgaagcagcgctgcgcaagctgcccggcaccatcaacgtcaagaacgattgggatacgcgcgttggccgcatcgacgtacgggtcgaccaggaccgcgcgcgtcgggcgggcgtgacgactgaagacatcgctggcgggctggatgtccgctacagcggcagatcgatctcggttattcgcgacggtgacacctccgtcccgatcgtcctgcgcagtatcgtaagcgagcgtcgcagcacggcagacgtaggcgcgacgctcatctatcccaccaacggcggtccagcggtgacgctggctcaggtcgcagacgtatcgctcgcgagcgagccctcggtcatccaacggcgcaatctcatccgcacgatcaccgtgcaaggacagaacacctcttacaccgcccaggagatcatcaaccgcctggcgcctagcgtcgctgccctggacctgcccgcgggctactcggttgaacttggcggcgagatcgaggaagccgccgaatcgaacgccgcgctgtcgacctacatgcccctcgcatttctggcgatgctgatgctgttcgtatggcagttcaattctttccgcaagctcggtgtgatcctcgcgacgatccctttcacgcttatcggcgtggtattggctctgaagctgaccggcacacctttcagcttcatggcgaccttcggcgtactggccctgttcgggatcattgtcaacaacgccgtgctcttgctggaacgcatcgaccaggggctagcggaaggcctgccacgccatgaagccttggttggggccgcgatacaacggcttcgtccaatcgtgatgaccaaggtcacctgcatttcgggactggtgccactcatgctcttctccggaccattatggaaagggatggcgatcgcgatgatcggtgggctggcactcggaacgctggtgacgttgggcttgattccgctgctttacgaagtcctgtttggaatcaagcgaattgggccgtggaacctgagtgtcgccaccgcgcatggagatcgctcatga

SEQ ID NO: 440954 - DNA, 855 bp, Serratia marcescens
atggtgcagaatgcgcgaggtgtgcgcatacagcaccttgtcgcccttcactttctcgaaggacggcagcagcacataggtcttctcccacggcttcggcttggcggcgcgcacggtgacaggcttggcttccggctctttcggcttggcgccgtcggcgcacggcagatcgtcgccgtacgggttcgggataggttcgatgcggcccggcttgtcgaggcgggtggaatccacgccgctccagcccggcagcgcttctttgcgcattacggcggtattgcgaatatcgtggatgtcgccaatcttctcaccggcggccaggcgatgcgccacttccaccagcgggcgttcaccgttgccgtagatcagcatgtcggccttggaatccaccagcaccgagcggcgcacggtatccgaccagtaatcgtagtgggcgatgcggcgcaggctggcttcgatgccgcccagcacgatcggcacgtctttgtaggcttctttacagcgctggctgtagaccagggtggcgcgatccgggcgcttgccgccgacgttgccggcggtgtaggcatcgtcgtggcgcagtttgcgatcggcggtatagcggttgatcatcgagtccatgttgccggcggtgatgccgaagaacaggttcggtttccccaaccgcatgaagtcttctttgttgctccagtccggctgcgcgatgatgccgacgcggaagccctgcgcttccagcatgcggccgatgatcgccatgccgaagctcgggtgatcgacataggcgtcgccgctgatgatgatcacatcgcagctgtcccagcccagttgatccatctctgctcgcgacatcggtaa

SEQ ID NO: 440955 - DNA, 255 bp, Serratia marcescens
atgaccttcagtagtgtgctacaggcggatgcatatgccagattcaacaagctgtatcgcgatgggcggataacggaaaccgcttgctgggctcccgcccgccgtgagatctactatgtgcacgcccgcaccccggcagcctcgactgatgaagccctggaacggatcggcgagttgtatacaatcgatgcggaaagagagtatcggcactacaacgtcttaccgaacgtcagcaaaaggctaaaccactactga

SEQ ID NO: 440956 - DNA, 603 bp, Serratia marcescens
atgtcaaattacacaacaccaatcaaaagaaaatatctgaatgaaagtgaagtcgtagctatccttagtgctttaagtaaaggaagaaattctgaaagaaacacctgcatcgcttatctttgcttcattcatggattccgagttagtgaagtttgtaatctgcgcttatctgacgtaaatttgatagataagaatatttttgtgcgcaggctaaaaaacggatttacaactacacatccgctattagatgaagaggttaaaatattggataggtggctgaatataagggaaaaacttgcttcctcagccagtgattggctgttcttgtcccgagggaagaacaggatttcaagacagcagttacatagcattatatctcgcgcaggaagagacgctgggttaatgataagtatccaccctcacatgctccgccactcatgtggattcgccttggctaatattggcattgacacacgattgattcaggattacctcggacataaaaatattcgtcatactgtttggtatacagcaagtaatcctgatagatttcatggtatctggaaggtaagtcagaggaaatatataacagcgctttattaa

SEQ ID NO: 440957 - DNA, 672 bp, Serratia marcescens
atgtaccgtgtaagacactacatcaaagttgaacgcttgtccatttgttgttatagtggaatcatcttaagcgagaaggatgtaacaatgacctatcttaaacatgaagaacgccatgctgctattttagatgccgccgcaaaagtcattttgtctgaaggcctttttgctgccacagtacgacgaattgcaaaggaagctggtgcagccattggtcagattcatcaccatttcgactctataaaatcattacgagcacaagcatttttacatttaactcgaaaatcacaaaattcatttgagatcagtaataaaaattgtacggcaatcgagcggatacatcatgtattagggtaccctataaacgatgagggagtgcgtgagactgaacgttggaatgaggtaatgttagagtcatctcgtgataatactatgagagaggcctattatatagctattgcagagtggcatgaagctacatcccgcataatcactgatggtcgtgccagtaatgaattccggccaggaggaaattccgcagacgatattgcctggcggttgataggattggtatgtgggcttgatggtttattgccatttgagaactctacgttgacagagatggaggtcattcgtcatttgaataatgcaattgcgttagagcttctctga

SEQ ID NO: 440958 - DNA, 1485 bp, Serratia marcescens
atgtataaaaaatggtcaacgctatatatcattatctttatgtatcttcccatatcgattgacgcaacagtgttacatgtggccattcctagtttggcaacagagctgaatgctacaggagagcaactattatggattatagatatatactccctcgtcatggcaggtcttataatcccaatgggtattctctgtgatcatgtgggcttcaaacgcctcttactattaggtggatgggtgtttgcgttagcctcgctaatctctgctctctcatgctctgtcggaacattattagtatcgaggattattctggctttaggcgcagcaatgatattgccggccacacttgcggcattgcgatacacgttcagcgatgaaaatgagcggaatgttgctctaggtatttggagctctgttggaaccataggaatgatagtaggaccacttctaggcggctggctgatggaacacttttactggggggcagtatttataattaatgtaccactgctgtttgtggtgttattgtttgcggtctttatacttccctcgcaacccataatcccacagaaatcttggcatataaaacccacactgatacttatttcttcaatcttaacgatgatttatactcttaaaaatcttctaagcgcagagccaaattatcataagttattcctttcagcattattcagtggagggatgttgtactggtttatacaactgcagaaacatgctttatttcccatgtttgatgtcaaaatgctgattaaaaaggaaataatagccggtagtgtcatcgcattaacgacaatgatagtattagtcggatttgagcttttgataacgcaagaacttcaattttccttaggaatgtcccctttggatgctgggcttttcttattaccgctaatgatttcctgcggagtatcaggccccataataggaaagctagctgcttattttgaactacgctcaattgctactacaggatttattcttagtggggttagtctttttatgttagctatgacagacattagccaacaatattatctggtatgtcttgagatgataattctgggttttagcatggaggcctcaatgctggcgtctaccgcagcaataatgggagcggtgtcgaaggagcaatccggttctgccggtgcgctagagggaatggcatatgagttgggcagcggattgggtgtaacattttttggttcgatgcttttatctctctattctgcgtcattgatagtgcctgagggcataccatatgagctggctaagcaggctagactttctataggtgaaacggtacagacgttgaagtacataagccaccaggagggggaggcattaatggttgcagcaagaaatgcatttagttttgctcacgtaaatgtattggcgttttctggcgcgatattgattttgctatcagtatttgtaggctggttaatgccaagaagaatcaaataa

SEQ ID NO: 440959 - DNA, 384 bp, Serratia marcescens
atgaagaaaaatgtcaaatatgaattccatcactttggaatccctgtaacctatgatattaaagaaggcaactatagtgaaagtgcaggaatgtacacacttgataatcccgggaaattccgagttcaatggcatcatttcaccgatgactcgccattacacatacttataagaactctcccgcacgttgcctttaaggtcgacaacttggaggaggcaatccagggagagatagttattcttgggccatacgagcctatagatgattattttgtggcgatgattgacgactctggtgttcccatagagctcatacaaacaacgttatcagacgaggaattgtggcgaagggcgagagagaaaatggggatactctatcagtaa

SEQ ID NO: 440960 - DNA, 729 bp, Serratia marcescens
atgattgataacggaagtctgccgacagttgcatgccatgtattttcatcctggaatataacgcttgtcgatgcctgttcttttggtcgtcttgggttggaagcggcgctgctgaagtctgcctcccccttcccgctgaaagtcaggggtcttggttcattagtgggcccaatatcggttatgtctccgttcaagcatgcagacaaggaacatcgcacaagagaagaacgctgcctggttgtgcgtttgcctgaaccaccacaagaagcgatgctgatgctcttatcgctgggagatgtcccactggacatctattcccacgtgttggtgatgtcctcggtcaatcccgctatcatcaggcgttttttgctgggcgtgggggtcaacaggcatgttcgcatcctggatgaccggttacctatttccgcattatgtgaggccatcattccttcagtcgagcagggctcaacatcgtcggtcacctggtttggcgagatgtttcatgtacgactgcagaccctgtttacccccggggaacggagggcattgtggtatgtcctgaagggcgtgtcgatgtatcagcaggtattgcgcagccaggtaagcaataaaacactttataaccagcggcatactgcattgataaagctcagggttcggggggttaatgacctgatacgccagtttctgttccgccggaaattcttgcagaatggtaactatgcatga

SEQ ID NO: 440961 - DNA, 528 bp, Serratia marcescens
gtgatgaataattatcgtggaatactaataaaaagcgctgctctcagcatgttactcagtaccagcactatggctgcggacgtgaccattaacgtgacagggaaagtcgtggcatcaccctgtacggtcgataatagcggtgtttataacatcgaccttggccagaatatttctgcggccacgttaaatccggcaaattcatattcttcctggaaaaatttcaatgtcacgctgagcaattgccctgctggtacgacgaaagtgacggcaacgtttgccggtaccgctgacagcaataatacggccatgtatgccaataccacggggacagggttcgcacagaatgttgccgttcaattgcagaacagcactgccggaaccaataccgggaatggcgcaaccatgacggtgaatgttgccagtagttcggccatatttcctctgcaggcccgggcttacagcacgccggggggcacaacgcccggtaacatcgccgccgccgtgttgatgaatatgacatataactga

SEQ ID NO: 440962 - DNA, 498 bp, Serratia marcescens
atgaaaattgctgaaatgataccaactgctaatgcatcgtttaatccggtgcctgtctacatttcggccacagtaaacgtattagcctgttcggtcagcacccccagtgttaatgtcgtcctgcctaccgttaataccagcagttttaccggcacaggcaatacgcagggcgatacaccattcaccatcgggctacaatgtgatgccaatgcacgcatcaacgccaccctgaacttcacgcaggacggcgataccaccaaccaaagcgtcgcggccgttactggtaaagggagtgccggcattgcctccggcgtaggcattcagctgctgtatggaaatacccccttaaagaacaacgtcctgacgttcctaaaaacgtccagcggcggccaggagcttcctgccggcgcgtttactgctcgctatttccagactaaaagcacggtacaggccggtacggccaataccactgcgaccatgacattaacttatcagtag

SEQ ID NO: 440963 - DNA, 2589 bp, Serratia marcescens
atgaaaaacaataagcgcaggcatacttgtcagtcagtatgcggcaagggcctctttgccatcgcccagttggcgttgttaaccggtttcctgtcccaggcgcacgccagggattactttaacccggccttactggagttgggggcgccggacagcgttgctgcggacctctccgtgtttgaagataaaggcgggcaggtgccgggcacgtaccgcgttgatatttacctgaacaacgcaaagatggacacccgcaacgtggagttccgcctggtcaagggaaagacaggcagtgaaacgctgcagccctgcattgccgtggccgacctggcggcatggggggtgttggtgaagcagtttcctgacataacgacgcctggcagtagctgcgccaatattgacgccgttcctcaagcttccagcagctttcgcttcagtcagcaacagctgttgctgagtttcccccagtcggccgtcagtaatgccgtacgtggctgggttgacccgaaacagtgggatgaaggcattaccgcactgatgcttaactacagcgtcagtggttccaataattacgccagggagggcaatcaaagtgacagcaacaatcagtacgccaacctgcggccagggctgaacatcggcccctggcgcctgcgcaactataccacctggagtcgcaccagcagcggcaatgccggcacaccggcgaccagcaagtggaatacggtgtacacctacgcccagcgaaatatcgtcagcctccagagtcagcttatgctcggcgacagtaccacatcgtcggatgtgttcgacagcatcccctttcgtggcgtaagcctggcctcggacgacgacatgttgccagagagcctgaagggatatgcgcccgtggtccgcggaattgcccgtaccaatgcccaggtcaccattcgtcaaaacggctatgtcatctaccagacttacgtctctccgggcagctttgaaatcaccgacatgtactcgactggcggctcgggcgacctgtttgtcaccataaaagaagctgacggcagcgaacagcacctggttgtaccttacgcctccttgcctgtgttgcagcgcgaggggcgattgaaatacagcgccacatcagggacctatcgttcatacgactcgagcgttgacaagacgccactcatgcaggctaccgccatttatggccttcctctcgggtttaccgtgtatgggggggggcaggtagccgagcactaccaatccctgtcgctggggcaggggaaaaacctgggggatttgggggccgtttccgtggatgtcacacaggcgtgggccaatcgcaaggatgagtcacgcgagcgggggcagtcatggcgagtacgctacagcaagaacttcgttgagacgggcaccaacttcgccatcgcaggataccgctatgccacgaacggttactggaatatgcaggaggtactggatacctggacccatggtgacagttatggcctgcaagagcgccgcagaaatcgtgcggagttgacggtcaaccagaatctgtgggaaggatggggcaacctggcgctgacggccatccgtgaagattactggaacacagaccgtagcatggagtcatacggcgccagctacaacaactcctggaacggcatcagctatggcgtgagctataccgacaaccgcaactccgtggccacctctggcggtacttatggcagcggaaaagtgtatgaccgtgaccaattgctggctgtgaacgtcagcgtaccgctggaccggttgtttggtcgccatacgacctatgtcaactacatgatgaacagcagcaagaaggggaacaccaccaacagtgtcaatgtcggcggcacgttgctggagcagaacaacctgacctggaacgtccaggaaggatatggctcccggggggcggggaataccgctggcgcgaacgccgactggcgggcgacctatggccaggtgaacggcggatacagccgtgaccagtacagccagcgcctgaactacggcctgcaaggcagtatcgttgctcacgagaacggcgtgaccttcggtcagcaactaggagagacggctgctctggtagcggccccgggtgccggcgacgtggcggtgcaaagccagactggtgtgaggacggattatcgaggttacgccatcgtgccgtatgtcagcccgtaccgcaagaacgacatcacgctggatacgcagacactgggggatgataccgagctggcactgacgacgcagacggtgataccaacccgcggggcactggtcagggccagttaccatgccagtgtgggggctcgtgttctgatgacgctgacaaaaccggatggtcgcccggttccattcggtgcgacggtggcggacctgcaggcaaaagatgaccagggcttcatcgtgggcgataaggggcaggtgtacctgacggggttagccaatgaagggcagctgaaggtgcagtggggcaatacggcggagaagcagtgtagcgtgagttacgttctgccagaaaatgcaagcggtattgtgaatatcaatggcctgtgtcgctga

SEQ ID NO: 440964 - DNA, 684 bp, Serratia marcescens
atgaataactggtctaaagccctgccctttatgttgttgctgaatgcttcaccaacgctggccgcagaaaacggtggcgtgaccgtcggtggcacccgtcttatctacgacggcagtaagaaagaagccgctttaagtgtcactaattccgacagtaacccgtatctcatccagtcatggatagaagcaaagactgaagggggtgaaaaagccccgttcattattacaccgccactttttcgtctcgaaggcaaccagcagaacgtgctgcgtatcgttcgcaccggaggcaacctgccggaggaccgtgaatccctgtactggatgaacatcaaatccatccctgctaccaccaaaaaggaaggcgtcaatacgctgcaaattgcggtcaatacccgcatcaagctgatttatcgcccgcaaggggtaagtggaacacccgaaacggtcactgacaagctggcctggagtcagtcgggtaacaaactcaccgtcaccaatcccacgcctttcatcatgaatttccagcaggtgaaagtgggcgggcgcgaaatcccggacgttacctatgtcatgccaatgggccaggcctccttcgttgtgcctgcaggcacctccggaaaggtgtcctggcggcttatcagcgattacggcggcatcggtgacgaacacaccggcaagtag

SEQ ID NO: 440965 - DNA, 540 bp, Serratia marcescens
atgaaaaaaaatcttcttgtcgcaagcattatctctgccggcatcttctctttgtctgcaagcaatgcgctggcggccgatggtcagattaactttatcggcaccatcactgatacgacctgcaccgttgtcaacacgccagagaatcctctgacggttactctgggcaccgtcagtcgcacctctctggatggtggggctggcaagactgcagctccaacagctttcaaaattaacctgaccaactgcccggcaagtttgaacggccacactgccaacgtgaaatttgacggtgtctcagctaacagtgacaacagcgctctgaagttaacccaggacactggtgtggcgaccggtgtagggattcagattacggataataccggcgcagtcgttccgctctataccccgtcttcagcctacaacctggtgaccggcgataactctctcgatttcgtcgcgcgctatctgtccattgccagtgccgtcacctctggcccggccaactcaaccagccagttcaccatcgtttacaactga

SEQ ID NO: 440966 - DNA, 612 bp, Serratia marcescens
atggccaaccgaaagtatttaacccagtcggaggtcgagcgcctcttattgatggcaaaagaaaataagaaaaatgccgaacgagactactgcctgatatacatgagttttattcatggcttccgcgtcagcgagatttgtcgattgcgtatctcagacatggacctcgaggaggggtgcttgtttattcggcgcctgaagaatggtttcagcagcagccatccgttactggtcaatgagataaaggcgatacgggcctggcttcaggtgcgcaggcgctttgccggtgcagaaagtgactggctctttctgtcttgtcggggtaaaccgctcacgcggcagcgggtatatcagttaattaatcagctgggcgaacgggcaagaatagccgtagcctcgcacccccatatgctgcggcatgcgtgtgggtttgccctggcggacagaggggtcgatacacggctgatacaagactacctgggacatcgaaacatcaggcataccgtgcgctataccgccagtaatgctgagcgctttgaaggtgtgtggcgtgcgagaaacaaacaaaaagaaagacatttaggaccaaactgtcaagtaatagcctattaa

SEQ ID NO: 440967 - DNA, 594 bp, Serratia marcescens
atggtaaatcagccaatgactgcccaagctcgagtacagtactataaaacggcccagacgattggtactggcacggtgaatgccaagcagattgggtcgtttattctgttaaacaatcagcaaagctggcatcttccagagtcagcgattagcaccactgcgtttaatgtcaccacggtcgcctgttcagtcagtaccccaaacgtcaatgtcacgctgccaaccgttaatgctggcagctttaccggcatcggcaataccctgggggatacgccatttaccatagggttacaatgtgacgcgaatgcacgaataaatgccaccctgaacttcacgcaggacggcgataccaccaaccaaagcgtcgcggccgttaccggtaaagggagtgccggcattgcctccggcgtggggattcagttgctgtacggcagcacccccttaaacaacaatgtcctgacgttccttaaaacgtccagcggcggccaggagctcccggccggcgcgtttaccgctcgctatttccagactaaaagcacggtacaggccggtacggccaataccaccgcgaccatgacattaagttatcagtag

SEQ ID NO: 440968 - DNA, 402 bp, Serratia marcescens
atggacgaaacctacatcaaagtaagaaggcagtggaaatacctatatcgcaccattgacagcacggggcagaccatagactttcttgaccgccaaacgggacgccgctgcactgcgtttctttcgcaaggccatccgtcaccccgggaacctgacgtggtgacgatcgatgaaagcggcgccaatactgccgtcctggaaacgctcaatgccaacaaaccggctgaagaaagcataaccatcaggcaaagcaagtatctgaacaacttagttgagcaagatcatcataatatcaaacaccggatacaacagatgcagggattcaaatcgtttcgccgtgcacagacgctgctgacctggatcgaattactcggcactgttgcaaagttcgtgacgagataa

SEQ ID NO: 440969 - DNA, 798 bp, Serratia marcescens
atgactacagctattcgagccattggctataaaacgccaaacacatccctgcgccctatgtttattcctgtgaacacaattcctggtgcaatggcacatctctgccgtgattttgataaagattactctggcaataatcactcagttcagcttatcggcacaccgcaaaaaaccaagttcggctatatctgtgataaatacaacgggttgctcacaacggtaccagatggcatcgatcgcacgctgattgttgtgtatcgccagcctgtcaatgttacgccgcagtcatatatctacccattcggcaatttaagccaacagggcacagcggatgccgtagggattggcatcaggtctgtacaggtgccaacgggcaacaacgtggtctctggtctaattggtggtaacgcgaagaatggagcttactgggcatacgcagaagcgaacaaacaagacccactgtcggcgctgaactggcaattccaggcgttgatcgtcaacggctcgggcaattcagccgcactttatatcccttggcagctgaatgaactggtgccggctgcactggcttcgggggcaaatctggcaaatcggagcatcaaagaaaacggtaacccttcattctaccgcgtaggcgcatggcgcgataattcaacgccaggtgttaccgctgctcagtcgaaagttgaggtggccgaggttctcgtcttccctggcgttctctcaatgactgagatcgatgtgcagtatggttactcgaagcagctcatggcagcgcagggacagacgctgctgtaa

SEQ ID NO: 440970 - DNA, 2112 bp, Serratia marcescens
atgtcatctgaaggattgccagttgatggcatcgtcggcacagacattgttttgggtgctcgcagcactcagcaggccaccgacgaagcgaaaagcagcttgtcagcagatagcgccgctcagtctgccgatgcggcgtttaagtttagtcgccaagccaaagacgccgtatcagaggctgatgccgcagctgaccgcgcggaaatcgcagctgaaaccgtccagaacatcgcagacgctaacacctactacatcacccccgcagatccagatggcacgattgcaggtcttgccgggacgcctgtgggaaagtttttccgtgtcgctcagggggctgggaacggattcaagtattatctaaatgataatggtgtagccaaagaagtgtctgaaaccgtcggcgcggaagctgtaaacgcggcgttagaggcagcaaatgaagccgggaaccttgctaaattaacagacacgcgaacgacatcagtttctgtgggttttgccaacgatttagacggtcgagccatcatgaacgcctttactgatggagaggggcgcatcaatatttacgacaacgaggatggcgatgtcgggatcggtgacctgaaattccaaaaactcccacccaacgcagattatgatattgcatatttagacgaaaattatataccgctgtttggtgtgtcaacgctgggcggatttcgttacggtaatttcgaagttttggaaattccggggccgcctggcctactattcttggatgaggactttaaaccagttgcgtgtttgcctggttttgagaacgatcaagacattcctgttataggccaagcagtcaaggaggcgccgcccgagttcctgtggcccgactatgtcggcacaaaagccggcggtcagtcgcttggttcaggcgtgacgaaggccattcatgcgaaagtgtactcaacaactcagccattcgcgaacaggacgtttagtgacgggctttattctgacacaactggaacagacactatttcaccgcttgttgagaagataattggtgttgagggtgaaaatttatggcagtcagagggatgcctcagcacgctgtcgaatgacatgattacccgtttgtgcaatgaacggggaaccacatacgataagctgggtattacgtttctgaccagttcctcgtctgcgccagggtttaatattgccaagcttcaaaaagggacagatgcgtatcagaagggcataaaccacatcattaacggcatgcgcctggctctgagcgaaaataaaacctatgcgtttttgttccgtccgtggtggcagggtgaaacagacatattgcttcagactccgcgtgaggaatttacaaaattaactcgtcaatgcatcactgacgagaacgctgatgcgcagcaaatcaccgggcagcaggtggcgccgatcacgctgtgtcatcagttggcgtctcataatgcctatgcacgaaaatatccgttcatggctcttgccctgagagacctagctaacgaggggctaatgcatattgcattccccgggtatatttctcgttattcggacggtgttcattatctgcccacaagctatatgatgggcggtaagtatatggaaagacttgcaagccgtattgttaaagatttgcaggctggtcgggaagtgaagaaacactggttacgacctgtgtctgaattgcgtcaaaaaaacgtatcaataactcggtatgagtgcccgacatatccgatccgtttcaaaacggattttgtcatgccgaccgataattttgggtttgacgtgcgaaataaattcacctacgaactctacgacattattacgtctgttgagactgttggcattgaccgcgtcagaatcgtttgctcgcgcgacctgacagactcggacattatcacttatggttggggacgtttcgaccccgcagaccctgaaaatccgcagcacccacagcgcagcggccgcatcaatggcccacgtggaaacctgtgtgatagcgatggggaactaaataattccggctacaccgaccaggacggattttttatcccgatggataactattgcgaaattttctcaacggagtctctgtaa

SEQ ID NO: 440971 - DNA, 888 bp, Serratia marcescens
atgtcggaacgatacatatcagctaaaataattgataatttatataaagagttcctgggtcgtaatgcagatcctgatggccttagataccacatgaaacactttaaagaattaggtgttgcaagaggaactcaacactctgttagcatattgatgaattcagatgaatttcaatccaacttcaatagccgcaagagaatatcattcccatgcggtaaaaaacttataaacggcaaatatattgaacatgtaatatctcttggcaatcattgcctgccagctacgataaccaaaaaatacggcattaaaaattattcaacaccatttgattggattttctcaagtccggaaatggttatcgattgtctggaggataattttgctacactaatgaacagaagctatcacaaatcaatcacaaacaacagaaaaaacaaagattttgaacccggaacctctcatacattgtatgaagaaaaatatggcttatcagaaatatttgcacacagagacattacaaatgatgatgatttctcatacttcattagagccataaatagattcaactcaattttagatggcgatagtggaaaagtattcctcatgacaagccggccaaatcaaaatttagaattaaactttgaaaagctatcagaactattaacaagaagaaccaataactttgccctatacgcattccagttgaaaaaaccagttggaattgaaatgtccgccagcgtcaatctaataagaaaagtggatgatagctatctctttgaattttcttcgtccgtagatgaggggcttactggtaggtttgacaatcatttagatgaaagtgtaattatatccaagatatccgaatacaatataaacctacgagcttga

SEQ ID NO: 440972 - DNA, 597 bp, Serratia marcescens
atggctaagaatgagtttttacctttcggcacagcggcgaacgccaacgttttacccaacgctgattatcaggcgttgccagctcgctcggcggggtttaatgccggggtggcaaagtcagaagagttgaactctgtctggcgtcaggcgtcggttatgtcttctgcgttaggtcaatttatggctgacaatacaggcaatgatgtgctggataatggtgatgttcctgcgcttgtttctcaactcagtggggctatttctctattttctgccagtactggattgcttgctaatgatggatatattgccatacctgtaaatatctctggagttaaaagagagctaataattcaatgggggtttgttgaggggagtggtagcgtatcggttacttcgaaataccctattaaattcccaaatgatttattacagagcgtcgccactcttcgagacatgtcgggtggcaacgttgagggggtgtcggtatatgctaactggattcccgacaatgaaaccagaagaaccagcattaaagttggtgtggctggaacaagcatcggaacttggggtgttaaataccttgccgtaggatggtga

SEQ ID NO: 440973 - DNA, 582 bp, Serratia marcescens
atggactattcactatccgagttatcggaggttttctcctgcgacccaataaaaggcgaactatattggcttccgcgagacagaagatatttcaacaatgatttctcgcatcgaatgtggaacctgaacttccccggaaagattgcaggtggcaaggatggggccgggtatctagtcgcgacagctggcgaaatgaaggtcagagttcatcgggctatttggacttttgcacatggctcgataccggaagagttgtatatcgaccatattaatcacatacgacacgacaacagaattgaaaatcttcggctggtcacccaccctcaaaaccagcggaatcaatccatgcactccaggaacatcagcggagtaaatggcgttcgttgggataaaaggtcaaaaaaatgggtggcctcaataaatacccgggaaaacaatattcacctcggggcatttgatagtctcgaggacgcggccgaggaaagaagaaaggctgacgagaggttttgtttccatgctaaccatggcagggataaataccttgatgtcgattacattgacccgtggttgcgcgttaaataa

SEQ ID NO: 440974 - DNA, 225 bp, Serratia marcescens
atgaaatttcacgaattgcacgaagagacaaaggaacgggcgcgtgatgcgctgtgtgcggtttttgccaggggttctgtaaattccggctcagcaaaattggcgggcgaaaccgtagctgcagcgtttattgctatggagcaatacgaaagcgagccagtcgatcagccgacgctcattggttgtgacggcaaactgagcatctccattacaaccaaaccataa

SEQ ID NO: 440975 - DNA, 678 bp, Serratia marcescens
atgaatgattattgcatgaacaaagcttataagcgaatgagcacgcgcggacggccttttgacctcagcggtgagcgtttcggcatgctttccgttgttgattacgcaggcaagaaggggcgtgaaaatctgtggcgctgcttgtgcgattgcgggcaacaacaaaccgcaccggcttcacgcttgatttccgggaaagtcagatcttgtggttgccttgtgtctatcacaaatactaagcacggattgtcacattcccccgagtatgactgctggaagaatattaaatcccgctgctacaacgagaataacggcgaatataaaaattacggtgcccgtggaattgtaatgtgcgagcggtggatcgtctcgtttgaaaatttcatagctgacatggggacacgcccgtcaccgaaccactctatcgatcgcatcgatgttgatggcaactactgcaaagaaaattgccgatgggcaactctaaaacagcaaaatgacaataagcgtcagagcgtaatcattactgcctttggcgagacattaagcctcacttcaatggctaaaaagcacggggttagtcctacaacactggcgtaccgtctgcgctttgtcagccctgagacggctctcataatgccaaaatataagcgaggtgcctatgctcagcataacgcctaa

SEQ ID NO: 440976 - DNA, 207 bp, Serratia marcescens
atgaaacagatttcccttaaagattttgcaggtgaggtggggcaagaaaaagccgcgcaatcactcggagtcagacaaagcgccataagcaaagctctacgcgccggaagagatatttttgtaattatccacccagatggtcgctttgaagctaaggagctcaaaaccttcccaagtcagcagaaggctgagtcccgtgcaatttaa

SEQ ID NO: 440977 - DNA, 711 bp, Serratia marcescens
atgaaaaagaagtctcttacggatgagcaaatcgccgatgctggcaggctaaaatccctatacaacagcaaaaagaaagaactaaacctttcacagcaatcacttgccgagaccttaggtgtgagtcaaagtgctgtagcaatgttgttaaatggagtaaacgcgttaaaccatacgaatgctgcaagccttgcaaaaatgtttggcgttcgcatcgaagacatcagcccaaagatcgctgaagaaatcgctgatatggctagcgctcttggaacccttgacgtcgaatatgcagggaaggtgaaagaaggactaatccccgtagtcggggaggcggtattaggaatggatggcgcagtggatatgatcgagtttagagccggatggttaaaaatctacagcggcgatagagatgcttatgccttaaaggttaaaggggatagcatgtggcctcgcatccagtcaggggaatttgtagttattgagccaaacacatcggttcacccaggtgacgaggtctttgttagaacaaaagatgggcataacatgataaaaatattcaataaaacaagagatggggattaccaactatccagcgtaaacaatgaccacaggccaatcactctagcccctgctgacatagacaaactacactttgtatcagcgatcgttaaagcgactcgctatactgacattgatgaaacaaactag

SEQ ID NO: 440978 - DNA, 315 bp, Serratia marcescens
atgagcattgaaaagatttaccaattagatgcgctgtcagattttcaggggaaagtagtacctaatatcaattacgacagtgtttcagatgatgccaatacaaaactaattggcatttttgatgccatgacctttattggcaacagcatcatggaagaagccggaaagaaaaatatcgacacagccgctattgaaaaccttggtagcatcatgtccattctttcagaggttggtatttttataaaccaaatctcatgtactgcaaattatcatcgcggaattaaggacggctctggcgcagacgccaatcaataa

SEQ ID NO: 440979 - DNA, 369 bp, Serratia marcescens
atgtccgcatgggttaacaaaattgaaaaggatcgtagccgtatcgccctcgcctacctggatttttgccagcgccattacggcggtcaatgggccgatgtcgttatcacaaaacgcaaaggagtccgggttgaccttacccaggaatgcattgaagcgctgatgaaggagtttatcgaaaacatgctccgcgctgaattcggtatcgccgctgggcaacagcacattgccaaatcttacgacgccatgctgaccgagcgatatgccctcagcgccctgggcgcaacgtcaatgcaggacatgatggttgacgcagtggcctacaagctgaacaacccgggcagccagctactgcaggtggtggcgtga

SEQ ID NO: 440980 - DNA, 183 bp, Serratia marcescens
atggcaaccccggccgagaagagaacgccagagcatttagccctagcgaacgacatggcaaagattcacatccttgccgaagcggctttggcgctgaccgctaatagcgatgagcgtcaagttcaggcggaaatcatcggtgtcatcagcgacatcacagagaaatgggtaggtcgaccatga

SEQ ID NO: 440981 - DNA, 282 bp, Serratia marcescens
atgggaaaccaaaataacgtcaacgtatttggcactcattcagtccacttcgaaccgagagccaagcatcgtcgtagccaatctcgggtttatagccctgaagagttcctagcgatgcccatggtgcaggattttatcaaaaacaaccctgaccagttcttcgtccacgaagaaaccggcgagaccctattcgctcaaaaactcgctgagctctacgccagcgtaaacaacggcaagaaattgaagaaagtccttcgtcgctcatttggagataaagcatga

SEQ ID NO: 440982 - DNA, 819 bp, Serratia marcescens
atgaaaaaccaaatcaccgttactggcaacgccctgtctatgacccataaggagattgctgacctcgttggatcgcgaccagacaacgtcaaagtctcaatcgaacgtctggcagaaaagggggttatccgactccctgcgttgcaggaaatcgaggaaatcaacaacttaggattacccgtactccgtgagtactacgtattcaaaggagagcttggcaagcgagacagcatcgtggtggtcgcacaacttagcccggagtttacggcgcagttagtagatcactggcaggaactggaaaaagaagtctcgagcttacgaattggtgcgccggctccgcaggccatttcagcttcagatcacattctgtcggtcgcccgcgtcgtagcagaggctaccgcgtccgcgacgatgaaagccgtgatggagctttccggcacgcaggtgtttgctgcgcaggctctgccaccagcatcacctgaaccagcggcgcatgtatcaacagtcgccgatgaaccaatggcctcgaagcctgccccggaattctcaccagtcatcgatctgatgtgggcctttggcatctccgacgcagcatgccggcgcctggcaagttatgccaacctgccgaccaagctgaccaatggcgagcgcggccacctgctgatccactattcctctttcgctgatgcagcattcaccctgatcgacgaatccacaccgccgacgggtaagcgcaaacgctggcagcacccagacttcggcggtttcacgctgaaggtcaccgaagccaacaaagccgccgtggaggccaagcaatga

SEQ ID NO: 440983 - DNA, 1290 bp, Serratia marcescens
atgactactctgcgcaaacttcctctggcactggctgtcgccgccggtgttctctctacccaggcgctggccgtggattttcacggttacgcccgttccggcatcggctggaccggcagcggcggtgagcaacagtgcttcaaggccaccggtgccgcgagcaaataccgtctcggcaacgaatgcgaaacctacgccgaactgaaactggggcaggaagtgtggaaagaaggcgacaaaagcttctatttcgacaccaacctggcctattcggtctcgcaacgttccgactgggaagacgtgaccccgggcttccgcgaagtcaacgtgcagggtaaaaacctgatcgactggctgccgggctccacgctgtgggccggtaagcgcttctatcagcgtcatgacgttcacatgatcgacttctactactgggatatctccggcccgggcgccggtctggaaaacatcgatctgggcttcggcaagctgtccgccgccgtgacccgcaactccgaatccggcggctcttacggctacctggataacgaatggaaacagcgcccgaccgtcaacgacaccttcgacctgcgtctggccggcctggagctgaacccgggcggcaccctggagctgggcgtggactacggccgcgccaatgcgcaggataactatcgcctggccgacggcgccagcaaagacggctggatgttcaccgccgaacacacgcagagcatcctgaacggttacaacaagttcgtgctgcagtacgccaccgactcgatgacctcgcagaacaacggccgcaacgaaggcgccaccatcgataacaacggcaagatgatccgcgtgctggatcacggcgccatcgacttcaacgatcaatgggcgctgatgtacgtcgccatgttccaggacatcgaccgcgacaacaacaacggcaccacctggtacaccgtgggcgtgcgcccgatgtacaagtggacgccgatcatgagcaccctgctggaagccggctatgacaacgtcaaatcccagcgcaccggcgatcgcaacggccagtataaagtgaccctggcgcagcagtggcaggcgggcaacagcatctggtcgcgtccggccatccgtctgttcgccacctacgccaagtgggatgagaagtggggctacgccaccggtgacgacaccgggtataacaccggcaccgcttacaacgacaccagcatgcataccttcagccgcggcaaggatgacgaagtcaccttcggcgcccagatggaaatttggtggtaa

SEQ ID NO: 440984 - DNA, 1341 bp, Serratia marcescens; identical to SEQ ID NO: 84378

SEQ ID NO: 440985 - DNA, 732 bp, Serratia marcescens; identical to SEQ ID NO: 431899

SEQ ID NO: 440986 - DNA, 285 bp, Serratia marcescens; identical to SEQ ID NO: 431957

SEQ ID NO: 440987 - DNA, 567 bp, Serratia marcescens
atgtgtaaatgcttactaagttcgtatgcaatattaatattgtcatttcttattgagcctctgattaatcctaaaatctcttgctctaaaaaattaaatttatctgtgctattgaatactgaaaccacttcactggcagttgataagtattcaaaaaaaacttcattagagtacggtcccttcgcctttgcagaaaggtatctctctctcgcaggctccagttgcatttcggactcaagatgtaagagtgttgagaaaacaacatctaagacgtcacaatctaacgtttttttcctcagaagattttgcatttcttgtttttgcaaccctttttcaccacgaaggagtgctatttttatctttaatgtgtttaatattgatttaacatcgctatctagcctgtcaatattcgtgatggaatcaatctttttctctgcatcggatatttttctgtgcaaaatatcgtgcataaaatcagcaatgaatcctttgatgtcttttggctctatactgttggtaatgttgacgattttattatttccaacattgtctccagaacctatgtga

SEQ ID NO: 440988 - DNA, 147 bp, Serratia marcescens
atggatcagactcatttaagctatttgaattaccgtctaatgaagataacttactaccatattttgagaaaatttttcgacgctactcaaataataaagcgtcacaaaaccctgttctacaaaatccaaacatcccactatgcatga

SEQ ID NO: 440989 - DNA, 861 bp, Serratia marcescens
atgcaagacattggaaaaattaacatgatttatgctaaagcatttcgccggcctttttttacttctctggcaaagggtgaagatgtttctcatgttttttcattgtttaaagattatatttctgatgataaatcttacaccgtaagggaaatattcgactctctctttgagatgcttcgtaaaaattatagaaacgagtatgtttataagtctgctataataaataaaattatttttgggcgtcatagccccaaaacaagttcgtcgtcgatagaacttcatgtaagtaattcaattgttgatgttgctgtatttaatggacattcaactgcatatgaaataaaaacagagtttgattcaccaaaacgcttggccactcaaacaattgattatttggacgtgtttgaaaaaacatacatagttactcatccagattttgctgataaatatggttcgctaaacctacctaatgtaggcgtactagtattaagtaaaaaagattcatttagtgtaattaaggaggctgaaacaaaccttgaaaatataaagttagataaggtttttagtgtattacgaagagatgaatatgtaagtatcattgaggattacatctcaaaaaaaatcagcatgccaaatgggattatacatgatttttgtaaggatgttttcctatcaatgccattgacagtagcaaatggatatttcattagtgcaatgaaaaaaagagctactgataaagattttattgattatctctatagtcttcctgcttcattacgagctttgggatacgcaacaccactttctaaaaaacagaaagattatcttattaatctaatggattcaaaaattgaaatttaa

SEQ ID NO: 440990 - DNA, 945 bp, Serratia marcescens
atgtatagtccatatctttatgcaagaggtacggagttattatcactgagagagttgtctacctcaaatgtaaatgtgtcaggtttacttcctgtattagaacccgtaaattcaaattcatcagatctgattagatgtttgaatatttggaataacgatgttgttgtaatacttaatccttaccaaaatgatttttcaggcggacataatgttaatcagtttaatgcggatttggcgggattaatttcatccaaaaataatattatcgtaggtattgttgtaagatcgggcttcagtgttcaatccataaatggtttgatttctagcttccaggggaaacgagttgcattgatttatgataaccctgcacttgtagaccaagatgttcaacaattaggtgccaatgctagagttacatatcatattattctggataatagtttaccccaacatcagtatgtatatattcctgtaaataaaatgatattgataaatgacggattccggaagttagctagaaatgctgattataatgggcctgaatttttcactaatcaacatcagtatgtaggaagaaattttcttgggtatggtgattatacgatcactggtaaaactcttgacttagggggggggcaaccgtctgctgttgcatcgcatctcatatttaaagagatgagtaataactctatttggatacgacattttgtatcaagtaatactcagcgaggtggggcggttgttgcgactatgttccttgatgtggcagatcaaattgctaattttgtacccaacaatttgagacaatttgggcgtaacattggtttgaataactactatctttgcagccaatcaagacactcgccaggcttagctaaaaataaacaataccaaataacacatcatattagctttatgttagatattctgggtggggtaatatag

SEQ ID NO: 440991 - DNA, 168 bp, Serratia marcescens
atggcgatcatgcaggtttcggcgccggtggccaaccacgccggcattctgctggcagatggcctgttgctgcaccatatgtacggcatgcttagccagcgggtgccttacggcggttattggaaggagcgaacggtgaaggtgttgcgccacaaagccctgatgtga

SEQ ID NO: 440992 - DNA, 1287 bp, Serratia marcescens
atggaatgccgtgaacacccatggtttaagaagcgtggttatcttcatttcgatgagcccatttcagttgagcatgctttagatatcgtaactaatcctcacgccgttgcaactcattctttcttacctttcattacctttacttcaactacctataaagtacagaaagataaaggaacaaatgctataaataaaacattaaaagaaaggccaatagcgtactcctctcatgtcgatagccatatatattcttattatgctgcaatccttgacgagaagtatgagaaagagttatatacgcatggcatttcaaaaagtgttttggccttcaggaaattaaataaaagtaacattgagtttgcgcatgaagcctttcaggaaataaagaaaaggggggagtgtagcgcagttgctttagatttatcaaaatttttcgatactttagatcactcatttttgaaaaatgcgtggtgtaggttgcttgccactgacaggttgccaaaagatcattatgctgtttttaaagcaatcacaaagttctctaaagtcgacaaaaatgaagtatatgatctaattggcatccccaaaaataatgctagtaatacgaagaaaactagaaagaaaatctgctctttcgacgattttagaaataaagttagaaaagagaatctgattgcgtctaataaggctggttttggaatcccacaaggctccccaattagcgctcttttgtcaaatatttatatgcttaattttgacattgaaatgaataattatgtttcatcactaggtggtgtgtattttagatattgtgatgatatgctttttattgtaccttcacacgaaaaaaataatgttgcaggcgaagccgaaaaaaaactgttcaagttaaaggtttcacttaacaccaaaaaaacagaaattagagagtttatagctatcccatctaagattaagtgtgataaacctctgcaatatctggggttcatgtttgacggtgaaaatatttttctgagatcatcctctctttcacgttactctgataggatgaaacgtggtgtacgtcttgcgaaagcaactatgagacgtaagaatagaatcaggaaacttaaaggactgcctaaaaaggaactattcaaagaaaaaatatatgcgcgctatgcacacgttggaaaaagaaactttttaacctacggatatagagcttctcgcataatgcattcaaattcgataagaaaacaactgaagcctctatgggaaagattacaaaaagaaatacacaaatag

SEQ ID NO: 440993 - DNA, 699 bp, Serratia marcescens
atggcagcagtgcatttccttcagataattgaatcaacaaaagatgcggaaatcagatcaaagttaataaatttctttttcttcaaactaatctctttcgcaaaagagtgtaattcaatagaggttattcttcctgaaggtcatgagttttctaatcaagttattgcaaataaattaacaaagttcatattaaaataccctgagtcaggaactacaccacaaattgtcatatcgtttcttcttgagaaaatccatgaagagagcgcaataacagtttgtggtggtaatgaaagtgtatttggtacaaatacaacatcaaaaaaaccagccgatatttggttagaaaaagacagtaatgtcatatctttatatgaagtaacagtaaaaaaaatagacattaaaaggattgatgactgcttacaatctataaataaacttggtctggttgctaatacaattcattttatttgtcgcatccccgaggacacttcaactttggttggttttcaagatgggagtttagttcataaggggaaaacctttaacttcattgacatacgcagttttatacaatcctccttaagtcttattactaataatcaagctgatgaggtagttaaaaatttacataccttcatcaagaaggtacaacgacccactgtgacaaaaaatggttggaatgaattttttggagactaa

SEQ ID NO: 440994 - DNA, 948 bp, Serratia marcescens
atgtcttatacgcataaagatgaagctttgcgggacgaactagaagtccatctggccatgcttaagcgtgaaggcgtcattgatgtttggcacgatcgtcggattaatgcaggtgatgatctgaatgcttctattgatgcacagctagatcatgcggacatagtattactgttagttagtcccgacttcttagcttcgaagtattgttatgacattgaagtccaaagagcgatcgcgcgtcatcagtcaggggaggcgagggttatcccagtcatacttcgccattgtgattggcagtctccggcagtgccgtttaatcaattattggctgttccgcgtgatgggttgcctgtgactaagtggccggatcgtgatgaggcatttctcgatatagttcgccaaattcgtagcgccttgccgaaagaacctcgtcaggcattttcccaactttcaggtactactattaccgagaatatccaacgtgttgacgtaccgagatcgagtaatctcaggttggctaaaacgtttactgatgtggataaagatcgctttcttgatgaggcatttgcgtttattagccgattctttgaactctcgctgtctgagcttcagcagcgtaacccaggtatagattctcgttttatccctattgatggcaatgcttttggctgcgtgatttatcagcagggcagagccgtggctcgttgtggcatccgaagaaacgtggctcgcggctttggcgcagggatttcgttctcccatgacgagagtgcccctagcaacacattgaatgagaatttgacggctgaaaccgatgagcaatcaatgtacttgcgtccgatgggcatgcaaatgtttcgtgggggcgcgagagactcaaagctgagttttgaaggtgctgcagagcattattgggctttactcattgagcctctacaacgccgttag

SEQ ID NO: 440995 - DNA, 822 bp, Serratia marcescens
atgaatttttccgattgcaagagcgacaatttaactaaaaagtgtcaggtcagggctttcaaagtcaatactgacaacacagaggttttatttgatcagataaaaaaatgtgataaattcaagaagaatagcgtcataaaaataagtaatgataaacacctaaaactgaaagagttttcaacaaaaaatggttttcactacctacatttttctctttacaacccaaaggagcaggtatcaataactccagcaagagtagctgataaagatttattggaagtcgaaaaccttgacaatcttcatgcttttttgatggtaaaagacaatagaattgcctctttaatgcaaatatccaccaattggtgtgaaacaaaaatagcaacgatatttgaacgctacgggataaaaataacaccgtcggccatattaaaaaagaatgtaatagaaaaaattaaaaaagatggttttagatccctacatgtaaatattagtgtggatgagtcggatttcgcgaaaactcctagcttccttaaatcattagtacagaaagaacctgcaattaagaagaaaggtatttcaggacatctcactattgatgctagaggaaactctgatatagcaaattctgtggaaactaatacagcgatttgggttggagagctagatagtgatttttacttcgaaaccaaaaaaggtgaaaccataaaaggtgatgatctaaaagttgttaaaacgtactttaccattccttatggttctaaatccatatcagcaaaatatgcaaaagaaatactggaagattttgtaaaaaaagagctataa

SEQ ID NO: 440996 - DNA, 1107 bp, Serratia marcescens
atgaatactaatattttttcacctaatactattttattgcaaagatataaaattattaattatcatgctgcaggtgggatgcaggaagtatacaagtgctatgatatgaaacttgataggttagtagcgttaaaaaccccgaaagtaggtgtgaaagatcgccgatttaaaaggggggccgaaatgggggccagaataaatcataataatatagctgcaactttcgattattatgaagatgagagcattacatttcttgttgaagaattcgttgatgggattgatttaagcgataagctttcgagctattttttttacttagatccctctttagcaactcatgttatacatcacttagccaaagctttgtatgaggcacataagtctgggatatgtcatagagatcttaaacctagcaatataatggtttcaaatgaccctggattgacatatataaagttaactgattttggtatagcaaaacttgccgaaagtgaaattgcacatgaaatggaattgtttgatgaagatgagtcaacccttacctcttcaaatacacttttaggtgcagttccatatatggctccagagtgctgggatgactggaaaggtgctggaaaagaaatggacgtctggtcattaggatgtattttatatgaattattatcaggctcacctccttttggtaaagggcgtggtgcaatatctaatgttataaaatatcagcatggtaaattcaatattgatatccctacacaatttggtaagcataaagacttggagctgcttgagaactccctatgggaattagtaaataaatgtttggtttgcgatccaaacaatagaatcactataaatactgttcttgaataccttgacgctttaccttattcgagtactatcagaagagaaggtaaaatacaaaaagtcggtgtgccatataaagcaactggttatattgacgacgaagacggtcagagtagctggttttttcacttatcagaattccatggtgaacagaaagctgcagctggtcaaaaagttagctttagtatttatccaggaaatccatctcctcgatgctctcccattctattaataaaataa

SEQ ID NO: 440997 - DNA, 1071 bp, Serratia marcescens
atgcttccaagtagatacacagtaatcacctcatcagttaaagcgggggggtttggagttgtaaccccggtaaaagatgagtatcttgatagagtagtaatgtataaagccgcaaagaatagcactgataacggccagctacttaacgaaatcagattattatctaaagctaggtcgcaccacatagtggaaatatatgatgtaatcgaaaattcaaaaaatgaagtagaaggactcgtaatagaatatcttacaggtaaaagttacgagaagtttcatgaccccaaagagttccaattagaagagtataaaaaaatattataccaattggctacagctttatctgacctacataaaatatcaattattcatcgagacttaaaactagagaactttaaacaatcaagcacagggattgttaagttatttgattttggattatcagttgatagttctgattaccgcacgactaacaatagagcaactttagtttatgctgcccctgagttttttgtaactggcgctaaaatagaattcccactagatatctatgcattaggagtttgtgcttggacgttggcgatgccatataaatcattgccgagagttttatttgaatgtccaccacaaaaaaccaatagagtccaatcaatacaaaccattattccggatctagatctagcccttgtcaaattaattgactcatgcttagaaatagatccgagcagacgccctaccgcagaccaattaaaacaaactttctacaagtatttaataaaaaacaaacacgtaggaacaattgtccaagacgcgtcgaacgtttactttttatcacactcaaaacctcaagcaacgataaaaataaaaaatcttggagcgcttgaggtgcaatatgatggattagaatttacagttataagtgtatcaggtagcgtgtatataaataatataactgctcaagtaggccaacatctacatgatgcatgtgttctaacatttgggccccccacctctggctggaatagggttttctttactttctattgttcacgacctgaggttgttttatga

SEQ ID NO: 440998 - DNA, 1131 bp, Serratia marcescens
atggaaacaaaaagcaatacatttgaattatcacttgaaaaccctatcgagcggcaactatttgaatcatttagcaatttatctattaattctgcaactacttctaatattgaaaactatcctatagcaattggaactcatccgggaaatgttcgacagaggaatgaggataggatagctttagctcacatatcgtcgcgaaatggtagcagttatacattggcaatagtatgtgatggagtcggtggctcatcctatggtgatatagccgcaagcttggcaataacatttttcatcactgagctacaggaattaagtgaaaaaaaagacttaaaggaattaatggatttaattcttcgaaagatagatgaccgagttagatacatattaaaaggtgaaggtgcaactactattagtgccattttggctaatggtgatgatcttatagcaattaacattggcgacagcaggatttttagttgggacattaagaataataaagttttccaagtgagcgaagatgacactttagaaaatgagtttagaaaaaacaatataaaagatatagcggcattaaaaattcataatatcaacaatacgttatcgcaagcaataggagagagagatagaacttcggagcaactcgaagttaattcttatttttctaataattttgaaaatggcattatacttgctacagatggtgcatggaaagataccggaaacagttttttatccattataaaacaagcacctagctgtcttgacgcagtgcgacgagtgctcgctacagccacatggtgtggcggtagagacaatataactatgttagcaattgaagatgccaaaattcttcaaagaatatctattgacgaagctagcaattctagcgaattcaattggctaaccatctggactaaaaatagtaaatttaaaatcgcatatcctatatctagaatcacaacagaaaaaactaaagcaagggcaaaaaacccctcccctaagaatagagcaaggagtaagtcgtcattgaaaaataaagcccaggacattgatgaaaagaggaattttgaaattataattgagcaaggggggggagagaaccaaaataaaaatagtggcgataactga

SEQ ID NO: 440999 - DNA, 1095 bp, Serratia marcescens
atggttctaaaagccatatctttattcagtggtgcaggtggaatggatgtcggtgtcgcagatgctggatttgaaatcgttgccgccaatgagttagatccgcatgcttgtaaaacgtatcgagaaaaccacccaagttgtgagcttttcgagggggatatcgaccaatacattgacagtttaggaaaatacaaaggggtagatttagtcattggaggtccgccttgccaaggcttttctgttgctggaaaaatggatccgaaagatccacgctcaaaactagtatttacatactgtgaggttattgagattgttaaacccagggcatttatcatggaaaatgttaaatctttagggagtttaagtaaatttcaatcaattcgcgaagagatctttcgtagaatggaggggcttggctatacagtatcaatgcttatattaaatgctaaagattttggtgtaccgcaatccagggagcgtgttttttttatagggcttaaagataataaaaaatgtattgattatcctgatttctctagatatagagaacaagctgtttctttgagggatgctatatctcatttaggaagggctggctcagaaaataataataacgtaacaaaagctaaaattactttagcggaaaatcctgttttaagaaaatcaccttatgctggtatgctttttaatgggcaaggaagaccattaaatccagatgcatggtcaagtactcttcccgctagtatggggggtaatagaacaccgataattgatgaagaacatctttacgataataaaccaagttgggttgaggattatcacaaagagctgttaaaaggtaatgttaagagcgagtacaaaaatgctccatctcgtttgaggcggctgactgtcgatgaagctataattctacagactttccctaaagactataagtttgttggtccacaatctaaagtttttagccagatcggaaatgctgttccatgtaaattagcaaaggttgtggcaagtgttgtgaaggaagctattaacggtgaacgtcaacattctgaaaaaaacatgcaacttcctttactaaatactattgaatag

SEQ ID NO: 441000 - DNA, 813 bp, Serratia marcescens
atgctgtatgccgtaattgcagagatggacaaatccaaatggaatgataagcccggtatggagtatcacttccctaagcgttacgcaaaaattctcatacccggaactcgcgtggtctactacaaaggccagattaaggacaggagttaccggccgctgcggctttctgataaaccacattattttgcgatagctaccattggcagtgtctattcggaccccaatgcaaaacgtggcgatttatatgctgtggtgactgactttcagcctttcaccgaggctgtgttggcaaagaagggtgaaaactactttgagtctatcccctctaatcgcgcatccaactactggtacgacggtgtacgccccatcactgaagaaatatttaaagcgatagtagagcatgcagagcttagtgtagtagtaatgccggaagagaaggtggtggaagaggagggggattacaacgacagttttgagtccgaaggaacctatcttgaaggtgcaaaaatcagctacttcacgaccaagtacgaacgtaagccactgttaaagaaccaagcagtgaaattacatggcactacatgttgtgtctgcggcttcaacttcaaggcattttatggcgagtatgcagagggatttatccacatccatcatttgttgccggtctcggagcttggcggtgagaaacccgtcaatccagctacagatctggtgccggtctgcgctaattgccacagcatcatccatcgtaaaaaagatagaaccctctctattgatgaactcaaagaaatgatccagcagcagaaggggtga

SEQ ID NO: 441001 - DNA, 168 bp, Serratia marcescens
atggcgatcatgcaggtttcggcgccggtggccaaccacgccggcattctgctggcagatggcctgttgctgcaccatatgtacggcatgcttagccagtgggtgccttacggtgggtattggaaagagcgaacggtgaaggtgttgcggcacaacgcgctgatgtga

SEQ ID NO: 441002 - DNA, 168 bp, Serratia marcescens; identical to SEQ ID NO: 440991

SEQ ID NO: 441003 - DNA, 213 bp, Serratia marcescens
atgtcttttatcggtattgctctaagaactgtccggtttcatggtccgatgattcagttgtttggccgggagtttaaataccgggccatgactgttaccaaagccattgatgcaatgaagaacttgttacctggtttcgaacgctacatgctggaggcgcacaaacgcggcctgacattttctattttcgtcggtaaacgcaatgtcggatag

SEQ ID NO: 441004 - DNA, 372 bp, Serratia marcescens
atgcctttggcgggccgacagttcgtgctggggcataccgactgttgggggctggtcatgagctatttccgccaggagcacggcataacgctccaggattaccgggttgattatccgtggtgggagtggggtgaaaaccgctatctggataactggcatgcctgcggttttcgcgagttcgatggcccgccacgctcaggcgacatggcgataatgcaggtttcggcgccggtggccaaccacgccggcattctgctggcagatggcctgttgctgcaccatatgtacggcatgcttagccagtgggtgccttacggtgggtattggaaagagcgaacggtgaaggtgttgcggcacaacgcgctgatgtga

SEQ ID NO: 441005 - DNA, 375 bp, Serratia marcescens
atggacgataacaacatagacggattactctgcttgaaagccgcgtcagagcgctacgaaacgcattggctttcgggttcggcaatatccgggatacggcagccgcagcggatttctcgccgccgccgcgcgaaacgaatggttgaaagcggagtgaatgcggtcgggggaaacgcccccgccgccttattgattccggaacttgtcgaggaattgctgggtgcgctgatgctgcggattggcgaacaacgctttggccgggccctgttcgacgatgcggccgtgatccataaagataacccgatcggccacgtcgcgagcgaagctcatctcatgggtgacgatcaccatggtgcgtttctcttccgccagtga

SEQ ID NO: 441006 - DNA, 1794 bp, Serratia marcescens
atgatgagtaaaatgctaatgggatcaacatcaattggtattataatttcaatttcaagtacctcggttacgattaggctttcacgaaaagttaactcagggctattagtgcttgaaggtagagctcataaggttggccaggttggaagttttgtcaggatcccccaaggttacaatgatttgtatggtgtggttagttcaagtaatgagaattctaccattgattatgatgaaaatgtatcttcggataacagaactattattgttgagttaattggtgaaagttcatgtggtttctttgaccgaggtattagtcaatatccttcggttggtgatgatgttcatatggttttggactcggacttaaaagtcatatatggttctaaaagcgagaaatttgttacagttggaaagctagccagttcagaaagcattgatgttaatttagatatagataagcttgtgacaagacattctgctgtagttggttcaactgggtctggtaagtcgacaagcatatgtggtttgttacggtcaatttgccaactaaatggtgaggataataattcagcaaggatattgctggttgatatgcatggtgagtattcatcagcacttaaggatatttcaaaagtattctcggtcgaaccatcagaaggtgaaaacaagttaaatattcctttttgggcacttccaactgaaactcttatagatttcctatgcggaaatattaatgatacaagtaaaagttcaatgattgagtttatcactgaaaataagaaggaagctcttaaggtaaatggagtgaagtatatggccgatagtaaggttacttcttttactcctcttccatacaatttgaataagctttggtataaatttgttttcgatgatactgccacatacttagaaaaaaattttcttaatccatcctacgaagatgatattgtaggtgacgcgaggactcttacctctccaaaattcaaacctccaggaactgcaagtaatccgccattcaaaaaaggcaatcatattctaacgaaacaattaaatcttatgaaggcaaggttgcttgatagccagtattctttttttctaacccctgatggctacactccagatgaaagtggaaaagttgataaagacttagatcagttattaaatgaatggttaaatcatgacaagccaatctcgattctagatttgtcaggaatgccctctaatcagctggatatgcttctaggttctattataagtattatttttgaggcctcgttatggggacggaatttgagttctggcctgaagaaaaatcctgttctttttgttttagaagaggctcaccgatatctttcaagcaaagatgatggctttacaaaagggttagtacagcgagttgctaaagaagggcggaaatttggggttggtttgatgatagtgagtcaaagaccatctgaagttgacgatacgatactatctcaatgtgggactctttttgctttaaggttaacaaacgcaagtgatcgttctaaggtaaaggctgccatgtctgatgggttaagttcccttattgattcactgcctatactaagaactggagaggcgatcataattggcgaggctgcaaaattaccttcacgatgtaaattcaaactacctcctgatggatattatccagatagccaagatcctgatgtcagtaaatcatggtcacaaaccaggaatttaggaaaaaattattcaaagttaatagaggcatggcgtttaaacaaaccaatgaaagaggggaaataa

SEQ ID NO: 441007 - DNA, 1191 bp, Serratia marcescens
atgagtgcttcagttcataaccctgatacatacatgtttgactttcgtcagttggtgactaatggtagaaaaaaaatcggaattctcataggagcgggagctccagtgagtattaatgttgggggaaaagatgcgcaatacgagccattaatacctaacatagacggtttgacaaaacatgtaaaagaatctctttctaaagatttgctttgtatatttgaagcgttagaggagtttccaggtaaaaacaatctagaaaaaatattatctgatgtaagaactcttggtgatataattggagagtatagtgttcatggtggtgatgctgaaacatacaaaaagctagagttagatatctgctctaaaattaaagacgttgtcagtaaatcacttcctgaacaccaaaatccatacagtgaattaatctcatggataaatggtattaatagaactcacggtgtggaaatatttacaactaattatgatttactttgtgaagatgctttggaaagatctcaaacgccgttctttgatgggttcactggttctagatactctttttttgacccagcaagcatttcaacaaatgatttgccgcctagatgggtccggctatggaaactacatggctcgattggatggacgatgcgtccaaatggacaaataactagagttcctgaatgtgaaatttccaatatggtttatccttcacacataaaatactctcaaacccaatcagcccctttctcttctttatttgaaaggcttaaaggttttataatggaaccagatactttgttaatcacgaccggtttctcatttgctgatgctcatatttcatcgaaaataagcgaatgcctttctgcaaatcctacaagtgcagtaatagctttccaatataaaaaaattgaagaggaaatttatgctacagatttggcaaaaagaacacctaatcttagcgtttattgcagggatggtgcaataatcaacactatttctgcaaaatggaaaactggggagctgcccagtaagaattgggaatatgttagaaaagaatatttgaatgatgagaaagagtttatattaggagactttaaggctctcgcaagattcttggcaattgctggtggagaagtatcatctttgccgatgatatttcaaagggattctgaggatgtaaatgatgagtaa

SEQ ID NO: 441008 - DNA, 1695 bp, Serratia marcescens
atgacgaatactctcgatcctcgtttcgattccacccggactatttgtgctcccaggggcaatcaattgacctgcaaaaattggctgaccgaggcggcctatcgcatgattcaaaataatctggatcccgacgtcgccgaaaacccgcaagggttggttgtgtatggcggtatcggtcgcgctgcgcgcaattggcaatgttacgatcagattttggcctcacttaaagcgctcaatgaagacgaaactctgttggttcaatccggaaaaccggttggtgtattccgcacccataccgatgctccccgagtgttaatcgccaattctaatttggttccacagtgggccaattgggaacatttcagcgagcttgatcgcaagggattgttcatgtacgggcagatgactgccggtagttggatctacatcggcagtcagggcattgtgcagggtacgtttgaaacatttgccgaagcaggccgccagcactatggcggggatctgaccggacgctggatcctcaccgccgggctgggggggatgggcggggcgcagccgttagcggcgacattggccggcgcggtttcgttgaatatagagtgtcagcagagtagcctggattttcgtttgcgtacgcgctatctcgataaacaggcaaaagatctggatgaagctatcgccttgatcaaggagcacacggcggccggacaggcggtttctataggcctgctgggcaatgccgcagaggtgttgcctgaactggttaaacgcgcgcatgcaggcggtatccgacccgatctggttaccgatcagacgtctgcgcacgacctgatccacggttatttgccggtgggatggagcgtggcgcagtggaaagcagcgcaacgcgatccggggcagcatgccaggttggctgacgccgcagctgctagctgcgccattcatgtgcaggcaatgcttgatttcgttgacatgggtgtgccggctgttgattacggtaacaatattcgccaggtcgcacgcgatatgggcgtggaaaatgctttcgattttcctggcttcgtgccggcttatattcgccccctgttttgcgagggcaaagggccgtttcgctgggtggcgttatctggcgatccggaagatatctacaaaacggacgccaaggttaaagcgctgtttcctgaaaaccagcatatccatcgttggctggatatggcgcgtgagcgcattgctttccagggattgccggcgcgtatctgttggttggggttgggcgagcgtcatctggcaggcctggctttcaacgagatggtgcgtagaggggagcttagcgcaccggttgttatcggccgagatcatctggatactggctctgtcgccagccccaatcgtgaaaccgaaagcatgaaggatggaaccgatgccgtttccgattggccgttgctgaatgcattgctcaatactgcgggcggcgctacctgggtgagtttgcatcatggtggcggtgtggggatgggatattcgcagcattcgggaatggtgatcgtgtgcgatggcagtgaggaggctgaccggcggcttgctcgggtgttggtcaacgactgcggttccggcgtgatgcgccatgccgatgctggctatgagcaagccgttgctgccgcgaaaaggtttggattgaaactgccgatgctttga

SEQ ID NO: 441009 - DNA, 423 bp, Serratia marcescens
gtgaggttgggcaaggtgacggcttttatcgtacatggtgccggagatttggatgaagtcagttgcctgggagaaacccaggtcctgtgtgtaagtgatggctgtataggtcggttttccgtgcagccggatgattttgaggtccctgcctgtgaattacgggcgctgcgaggggggtctgcggagcgtaacgcgaaaatctgcctggcagtgcttaacggcgagcgggggacctatcgcaacgcgactatagtgagcgccgcgacggcgctggtgttggccggcaagacgcgctcctttggcgaggcggcgaaactcgtgcggcaagtattggataacgggcgggcgtatcaggttcttaaacgattcaaggagacgatgaatgagaacgagagtgaaagtctgcggcatcacgcaccttga

SEQ ID NO: 441010 - DNA, 531 bp, Serratia marcescens
atgaaagagcgcccagtgatgccagcactcgacggaaaaagcattctcgacatgtgttgcggctcccgcatgttctggttcgacaaagaagacgggcgcgctgtattcatcgacaagcgcagcgaaagccacaccctgtgcgacggtagaaagctggttatctctccagacctgatcgccgacttcaccgcactgccgtttgcagacggaagtttccctatcgtcgtgtttgacccgccgcacctggagcgcgtcggccccaacggctggcagggcaagaagtacgggaagctcgaccgtgaaacatggcgcgatgaactgcgtgccgggtttgccgaggctttccgcgtgcttcggccacacggcgtgctgatcttcaaatggaacgaaacccagataccagttagccagattatcgccctcacagacgagaagccggctatctggcagcgcaccggaaaaagcgacaaaacgcactggatcatcttcgtcaagtcgggttacagcgctagggaggtggatcatggttga

SEQ ID NO: 441011 - DNA, 645 bp, Serratia marcescens
atgcggataccctcgccgtgtctgcgttgtcgggcgggtcggctgcgacaaacgtccctgttagtctcgcctcaaccggccttccctggccggttgcccctgacaacgccgtcttgctcggcagccggtgatgcgcgcccaaggtcaacacctgagctggcagctaccgggaaatctgtcgcttatgaggttgtggtagagaagttggagatgagcgcggtgttgggcgcccttgaagacgccgaacgtaggcatagcgcattaggcgaaaagccggcctcaatgcggtatggcggagagaggacaaatctgcctggagcagatttgaacgctgcttgcagcggccccgaaggggcgaggcccagggatgggctgagtaacgttggcaaagccaaccgtctgatagggcaaaggcgcgggttgcaagggaccgcgcctacggtcccttgctcggtcgaggcgcatgagtttcatggtgcatctcacatttatcgaccgaaatacgtcaccaataccttcagaaaaaagctaactgacaagcattacggcgctggccgccccttttcgttaccagcggtagttcaccgaagcgatgacgctgcggccgctgccgtagaagcaggcgtactcgccgctgcaggatga

SEQ ID NO: 441012 - DNA, 1947 bp, Serratia marcescens
atggccgatatcgtccctaacgttgtcgtctcgatgccttcgcaattgttcacgctggctcgctcattcaaagctgcagctaacggcagaatttacatcggcaagattgataccgatccaactatcccagataaccagattcaggtttatatccaaaatgaagatgggacggtcgttccggtatcacaaccaatcatgatcaacgcaggcggctatcctgtttacggcggccagatttccaagtttgtcaccgttgaaggccatagtatggccatctacgattcatatggtacgcagcagttttatttttctaacgtcttgaagtatgacccagaccagctaaaagcgcagttagctggccctgacggcgtcctgcttgtgggcaatgcaacggacaagcgggatttagccggtgatgatgcaactaagaagattgttgatcacgtgcatgtctttaacgatgtcacggtgtcattcagacagttcctgaccgttaaggacggtagcgttgatgcatctgctgccatcactgcagccctgaactcagggtttaaggttgaggttccaggcgattatgtgcttagagttgatagcccaagcattgtggcaaacgtagcatgccaattctttggggctccaggcacgcgacctacgatactgattaatcacgttgccacaggccaaacacaattcaagttcatgctgaataacagctattttgcgaactttaatatcaggtatccgcttcaaaaaacaacgttggcaactggagagtcgccgatcgcatatggagaattattcggcggaaacggattctacaacacgtttgaaaacatggatatcggtaactgttactatggatttaaattcggagattcttcgttttcgtcatctagaattaccattcgtaacatcactggctctccgattcttcgcggtatgtcattggatcgcgttcttgatatcccgcgagtatcagatattcactttaactacaacaacctcgaagctccatatacttatgatctaacaatgaagcagtggatacatgaccatttggatggtttccatatcggtcgatgtgatttcggtagctttaaccgcctattcgtatttggcgcgttgaatgggatatttttaagaacagaaagatttactggatctgccaacgccgttagctttactgattgttacgttgacatcaccgttcacccgttgaggttccagaactggcaaacatcaatcaccatgatcggtggcaagtttaccggtaatgccgaatctaccggcggccttgtcgaaaaagagccaagcacaaacttaatgactaactcaccagcggcaggtaacaacccgctgggtattgttaagctaatcggcggagagtacagcaactactcatcagatgtgtttcagggatctgcaaaaattgaggcatttggcacgcagctatatcaatacggcaaagataacggccagcgagcggctttcaatatcacgaccggcttcagccaagacatcactgcgattggatgtatcattaacggcgctggaggcactcagaatagagcgtttaactcaagtggtggcaatggagttctacgcataggtgacggcactgttctatcaaacaatgcgcttggttcatttgactggcgatctggccctgtcattccgtcaagttcggcagttcttggcaacccaggtcataacggggtgtcattcgtatcaaacatccccaaagagtacatggctgagagcattccaacatctggctctttctatcttcccggtgactatgtgacgaaaacaaatcctgtgaagacgggttttgttggacagcctaactacgtaattcaaggttggcgtcgcctaactgctggcagcggtcatgtcttaaacactgactgggtagaagacaggacatacttcaacggggtttcgtaa

SEQ ID NO: 441013 - DNA, 210 bp, Serratia marcescens
atgtcgaaaacaatgctctacaagccgggcacgatgatcacctgcggaagattcaatcttgattacgtgattgttgatgaagatgaggtggccagtcatctggcatctgggtggaaggtccatcctgatgaaactgaatcttcagaacccgaaaggaagaaaccaggacgcaagcctaaggtggtaggtgatggcgaaaacaaagggtga

SEQ ID NO: 441014 - DNA, 201 bp, Serratia marcescens
atgaagatcaaccaacttcattcatacgctcttatcaagccggaaatggtaggcgagatggtgtgcgtaaggatagggtttataaaacgaatcatgtatcggcttgcctatctatgtgaatgctatatccctgtggcgctaattttcaccacatggatcacgctcgtttatttcggtgccgaatatctaaacaaacactga

SEQ ID NO: 441015 - DNA, 627 bp, Serratia marcescens
atggctaaaggcatcaagccgccgaagccgaagaaatgccccatctgctccactgaataccttcccagaagttcccttcaaaaagtctgccacaactacaaatgcgccattgccttcaacaagaagcgcgatgaagagattgctttgcgcgaaaaacgcaagcaggagcgtctacagcgcgatgagctacggcagagaagggaaaggctaaagacaaaatcagaatggaacagagaggcacaggcagcggtaaatcgctttgtattttggcgcgactatgggaaaccatgcatcgcatgtggcaggccgcttaattatggcgtaaggggcggcgcagtagatgccagtcactatcgatccaggggcgcagcgccacatcttcgcttcaacatattcaacaatcacgccgggtgcgtccattgcaaccgagacctatcaggaaacctgatcccctaccgaataaacctcatcgagaagattggcgcattccgcgttggacgaatcgaacacgacaacacaccacggaaattcgatatcgcttacctgcagcgagtgaagtcaatcttcacgcgccgggcgaagcattacgaaaaactccgcaagcgacatctggaggcggcagcatga

SEQ ID NO: 441016 - DNA, 351 bp, Serratia marcescens
atgactgattacagcaagatgagtgattatgaaattaactggagagtagcagaggggaaagggttaagcgtcgatcacaatgcctcagtaatcctccctcaaacctattgcgggcatgatgaaaatggatgcaaatatgaatggcgcatgcgcgactactgcaacaacccggctgacgcatggccgattattgtcgaaaataaaatatctattatctccatgtactccggcggtgatagctggcaggttgacgcaggtgaagacgaggaatttgctttatatcagcagtcaaatccactccaagcggccatgattgtcttcctcatgatgaagggtgccgaaaaatgctaa

SEQ ID NO: 441017 - DNA, 198 bp, Serratia marcescens
atgagcaaaaagcagcaaatagacaagaaattcacagaagccctatctgaacttaatggcattggggagtgcccggtgaattattgcctgagctatgtgcgcggctttatgtgcgctaacggaaaagtcgagtacctccatgagtgggaagatgcgttgatgcgtatttcactatcactggatgagcaattgcactaa

SEQ ID NO: 441018 - DNA, 255 bp, Serratia marcescens
atggataagctacgcgaagagtttgaacagtggtggcaacaagaagactacgataagcaactgatcaacattcaccacgttatggcgaaccgtattaagaaggggatgtttacagcatggcaggccagccgagcaagcatcgtggttgatctgcctcactgcggcgagtatgacgaaccattttcagctgcaaatgcaattatggattgcgccaataccatccgctctatcggcctatcaatcaaaggggagtag

SEQ ID NO: 441019 - DNA, 234 bp, Serratia marcescens
atggagataaacagatacgaacgcgagcaaataaaaaaccagatagatgggtacatgattagccatcagtgtttcgagcgtgcaaaagctgagctgatttctaatctggagaagcacttagagcgggttaaatcatttgataagagtgatttcttaaaaaaaaaacaaataacacccaccgcaccttacgggacgaaccgaacacagccgcctagcggctttttttacgcctaa

SEQ ID NO: 441020 - DNA, 165 bp, Serratia marcescens
atgagtaaagacaaactagagagcttcgaagaagtagcaaagcctttgattaagtggcttgctgaaaacgttcacccgcatcatacagcaatagtaacaagcactcatgcagagttacttgaagggaaaatggccttcccaaccgaagagttcattaaggactga

SEQ ID NO: 441021 - DNA, 237 bp, Serratia marcescens
atgagcacagaaaaagattgcttactgacagttcatccaacaacagaggcgaactggtgcaacgaaaatgtgcgcacagaggggcttctgttgcgcgattacttcgctgcaaaagcgatgcagggaatgttatccaatcctgggatgtgggatttactcaatgaaaggcatgcacagtatgtggcaaaagatgcatacattatggctgacgccatgctgagagctcgcaacaactga

SEQ ID NO: 441022 - DNA, 366 bp, Serratia marcescens
atgaccgaagtattgacctatgaagcactgaaggctgagcgcgatgcgctggctgtggagaatgcggcaatgcgcggcgttatcgatgccgccataggggtagcgaataattcgtctggcattgcaggctggcacctgaacggtgaaatcgccgattgggacgaaatattgccagagctgaatatcgaaaccccagccactgatgcagcacttgcagctatcgaagcgcggggagttgagaagtttgctgacttcctcggcgaactatatcaatgcgaaaaagctaacactgctaagggaaaggcgtacaagcatgtcgttttcttggcttgccgattcgtcaacgagctgcgggaggcaaaatga

SEQ ID NO: 441023 - DNA, 276 bp, Serratia marcescens
atgagcaagcttacaaagattttcgttaccaaatacgcgctaacagtcgggccgaaggtagtgatggctgaaatcaaatatgaaggtgattcagcgttttggtgggtaggtggttatcaccatagcgcacacggaaaagacttctggctcaccgaggaagaggcgctggccgactgcgagcgacgtcgcaaagctaagctggcatcaatcgacaagcaagccaagaagctccagacgatggcattcactatcaaggagctggcagatggacaataa

SEQ ID NO: 441024 - DNA, 516 bp, Serratia marcescens
atggacaataagctgagcgaactgagcaagccggtgggctactacagattatcggaagatggggttagctattacctgtccagccctacagaaaaactcgatgaggaggttgttccactctactcgcaagagtacgtctccgccctgctggcagagctggaagcggcggataagcgcatccttgaactggattacctccggctatctgcctgtgaggtgttcacagaaatcggcaacgagcttggctgcaaccccgacaacgagtcgatcatgattgctatcgatgacctgaagaaagataacacgtccctgagagaccagcgcgcgggattggtaaaagcagcgagcgaactgggatccaagctggctacgccggtgcggttgcctgacatgcgccaatcatcttccggagacagatatcaatggtctgatggtgcacataactaccgcctggatgttatctcaatgcttcttggtgctgggttcactgtagccgtagagggggatgagcagtga

SEQ ID NO: 441025 - DNA, 300 bp, Serratia marcescens
atggtcggcgcagataccaaagtgcatggtggcaatctggtttccgtagcctggcgggatgcggtcaatgagcatcttaatttgactctggatattctacctccgacaaacaccactgtgctgttgtttgatgccaatggcgagggctggctactcggatggcggtcgatgtggcgcgggatgggcggaaaagaaacaggggattggcagtggtcattccaaatcgaaggcctgagccatgaggatgtgaatattactcactggttagcgataccagatgaacctcggggggatgcatga

SEQ ID NO: 441026 - DNA, 183 bp, Serratia marcescens
atgaaactaacgcctaatctgcggacgtttgtctgctctgcgttaatggcgctcctcggcggcaccctggggctcggcatctacaacgtcgagtggttcaggttcgcaatggccgcagccggatccatcggcctgatgattgtgctgacttacttcgctatggggaaaactaaatggcactaa

SEQ ID NO: 441027 - DNA, 582 bp, Serratia marcescens
atggcactaacgactgagaagttgaatagcagcgatgaacaaatctgcgacggagactctgccgaaactatcgagaaaaacccaaaatcgtgggctgcgtggaaacgcgaagctgaacggctgcaggcaattgtcgatgaggtggctaaccggggggcgcagccggtggcatggcattacccgggttcggatggcgaatcccgtcagcttggttacgatgatgatcttgacagcgagcaaaagcgaaattgcatcccgctatacaccgcccctccaccgccagcagtgcctgagaaaatgatcgcggtggtaaaggatgaggccgaatacgctaacgggtggaacacctgccgcgccgcaatgctggcagcagcgccgtctatcagagcatctgatttcgttaatggatattgcgagcgtgccgggataacgatcgatgagttttatgagtcacaagttccaatgccagattcaacatccccgagtggatggtcggcggtgtcaaacaagcccataacgatcaaggcgcacattgaactatacgccactccacagcctgccgcgccggagagtgggaattga

SEQ ID NO: 441028 - DNA, 210 bp, Serratia marcescens
atggctgacatcatcgacaacgcacaagagcaagaagaactgattatcctcgccgccttatccaaccggcctaaaccgtcaatggtgtttactggccgctgttattggtgcggtgagaccatcagcaaaggtaatttctgcgaccttgattgccgtgacgactaccagaaaagattaaatatagcagggggttataatgcgcatatttaa

SEQ ID NO: 441029 - DNA, 552 bp, Serratia marcescens
atgcgcatatttaacatcaatgaaataaaaaaaatacttcactatgatgctatttctggtttatttacttggaaagttgatagaaacaacagaacaagaaagggaatggcgtcaggtagcaaaaacaaggatggttacatagaaataagcactatgggtaaagttcatatagctcatagacttgcatggggaatgtaccacggcgtaagaccaaggaatgaaatcgatcacataaatggagtaagagacgacaataggataataaatttaagagaggcaaccagatcagaaaacaatagaaataaagtagtcaataagtcaagtacaagtggaataaagggggttacataccacaagcagcaccgaaagtggtcatcgcgtatattcgttaatgggaaaaataaaaatataggctacttcaatactaaggaagaggctgctgatgcatatagaaaagaagcgattaaattgcatggagatttttataaagatagctgcgctgaagactacgagcgcaagataaaagcagataggcagcgaggtgtcgcatga

SEQ ID NO: 441030 - DNA, 1770 bp, Serratia marcescens
atggaacagcaatggtttgaacttaaagatgcaagacgtaaagactggaataaatcagtatggatagttctgagggccatcaaaaatattgaagaagttgggaggtatggtttcctcggatataaagctgatttctttggggcgggaacagttgcattttctttagagcaattagataaggtcaaaaatcttggttggtcagatataggcattggccaacaacatgccggttatgttgatgatagtgaatatattccagccgaagttttcagagacacttggcgagaagtcgatggagtaaaccttgttttggagcaaaggtctgaagggggatatccaagacgatggtttttgaatccagatattattctgaccttaggattatttcaggatgggaatgtttgggtttgtccaaaggaagggtatgatgaagtagctagaattgagtatgaagataatgagccagtttctcttgagattaaaagtaagtatttgaaagattatttatgtgctcgtggcatgtttctgtatgtgactagctattatagccgggattgcatacttgagaatgtagaacatcttaaatgggaagaaaaagagctaaaatgtaaggatgatgaattttccgaatgggaagtaagaattactcctattcatgagggaggcgagacctatggaagcaagatggctgttttccatatgtccagaactgacatagatgaagatgacgaacttcctgatatatctcagtttcctacagatgaaaatacaaaaagtagtcattgggagagaggatttgaggggcgtaaattatatagagttatgggggagctatggcgtaattttgttgttaatccttctttagcgagcccaattgttcgaggtgatgaagtagattcaagctcttattttattattgatcttgaagggaataaaatatccggaaaagaactcatcgattcaggtaagtggctttggtttaaaccggatgtaatgaacattttaagcagcagaagaggtggagggttaaggttttattctcgaactacaggttctgtatcttgctatgagggatataatactcattttggggttaatgatttaggtttagttaatgtctatgctaaagacattggccttcttccaacatggcagcagcagatatgggctggattcaattgttcaccagagggtggcatatcaaaagaacttcatgcctctcaagttcttgcagagccagctgatactaaagcccctgagaaatacctgcctatttcattagattatataaataaatcaacattagaattatttgggttttgtctatttagagatcatgagtcgattcctgatatagttaaaaatattcatagatttagatcagtcacacaggaaacattctatggtttggcaaaggatttagctcgggtaattgttgataacttagatgcagcttctatgcaaaagatcataagcccgggaaagggggagcgttggggatctattaaatctttggagaagcttttaagttcaaaatatgatagtgactttgttagaaagataatggctccactagtgggagtctatgaattgaggcatgccgatgctcatctacctggttctcaaattgaagaggcattttcattaattgatattgatcgcaattccccatttgtgatccagggagagcaaatgctccactatgttgtaaaaagccttttcacgatttttgagcttttcagaaaatggcacaatcagccgagcgattga

SEQ ID NO: 441031 - DNA, 846 bp, Serratia marcescens; identical to SEQ ID NO: 170758

SEQ ID NO: 441032 - DNA, 279 bp, Serratia marcescens
  misc_feature (243)..(252): n is a, c, g, or t
atggcgattttcggctatgggcgagtctctaccgctcagcaagatacggagaaccagaggttagagcttgagcaatctggctggacgtttgattactggttttcggatatcgttagcgggaaaagtcctgctatgcagcgcaaagcattctcagagttgctgggcaagatcagggacgatgaaacgctggttgtagcaaaattagaccgtttggggcgtgatgctattgatgtgctcaagacnnnnnnnnnngctcaagacagtccgaatgctatctga

SEQ ID NO: 441033 - DNA, 390 bp, Serratia marcescens
gtgtaccgcggcggctacgtgctgaaagactgcgcgggcacgccggacgttatcctgattgccaccggctccgaagtgggtatcacggtggaggcggcggacaaactgaccgcggcgggccgcaaggtgcgcgtggtgtcgatgccgtcgaccgacgcgttcgataagcaggatgcggcgtaccgcgagtcggtgctgccggcagcggtaacggcgcgcgtggcggtggaagcgggtatcgcggactactggtacaagtacgtgggcctgaacggcgctatcgtgggcatgaccaccttcggtgagtcggcgccggcggagcagctgttcgccgagttcggcttcaccgtggacaacgtggtggccaaggcgcaggcgctgctgaagtaa

SEQ ID NO: 441034 - DNA, 375 bp, Serratia marcescens
atgcctggcaaactgacgtctgtagtggtgatcctgctggcgctggcggccgttgtcggcgctggcgcctggttggcatctcgacactaccagccaacgattgaccggctcaacgaggcgctgacgcaatgccgcgataccggcaagcaacaggcatctacgatcgccagccagaacgctggcattgaggcgctgcagcgtaaacaggaagagatggaagccaaggccaaggcagcgcaggaaaaagcccgcagggaggcgcagggagactatgagagagcaaacgaggttatggcagagagaacaaccggcgaagcgtgcgcggtggcgtctgctgcgtttgacacagagctgcgccgggagcgtgcccaatga

SEQ ID NO: 441035 - DNA, 342 bp, Serratia marcescens
atgatgcgatttttatacattttcactccgaccggtggcgagtatctggctgacgttgagtcatctatcgcgctgtcactgaacatctatgagacgttcagacactatgacgtcattcctgtaaatcccaatcttgacacgtcaacttacaaggcgcggatcggcgccgacgcaccgccgatctatcaaacaccgggtgattggcttccgctatgcggcgcctctattttcgttggccaggtcggtaatgacgtatctggtcgcgaagttagagttgatggcgtcatagcttttaagtctctcgaagaactcgaaaaagccctggttgccggcgaattttaa

SEQ ID NO: 441036 - DNA, 2196 bp, Serratia marcescens
atgaccgtatcaacagagataagccgagaggaatacaccggcaacggggtgacgacagattttgactatcgcttccgtgtgttttctgcggatgagcttgttgttactgtcgctgacacaacagagaacatccgcacgctggtgatgaacaccgactatacggtaactggcgccggcagtcgcaacggtgggaaggtaaagcttgtcagcgcgctggccagcaactggcggatcagcatcgagcgagagctgcctgtcacccaggaaaccgacgttcgtaaccagggtaacttcttccctgaagtgcatgaggacgcatgggacaaattgaccatgcttatccagcaggcgtttagtaactttggcttggcgctcaggaagccaagctggctagctaaatattacgatgccaaaggaaacaggatcgctaatcttgccgaccctgtagggcagcaagatgctgcaaccaaaggctatgtcgacggagttgcttccagtaacttgagccgtgctctccgcgtccctgagcctatcccgcaattaccgccggcgtccagccgacggaataccttcccggctttcgatgatactggcgcgccaactgtgatggttccgaccagcggatcggccgctgatgtactgttgcagcttgcaggcagcgataagaacctggctcctgttgaccatgtgcatatcaagaatggcccgatcgtagattttcgccgtttcctgaccgtcaaagacggtagcgttaacgccacgcaggcggttatcgacgcgcttaactctgggcttaatgtgcaggtttccggcgattacattctgcgcgtcgagagtgcggggattgttgcggccatgacaagcagattttttggcgcgcctggtactcgtccaacaatcctcatcgatcacactgacgtagcccagtcgcagtttaccttcaatggcgggttcaactattttgcaaactttgctttcagatacccaaaccaaaaacggtccctggccaccggggaatcaccagttgcatatctcccgcttcttacaggcaacggattttcttccgagttcatcaatcttgatttggggaacacttatcggggcctgcaatttggtgactccagttattcggcttctcgcattaccatccgagacattattggcgcgccgatcaggcgtggcgttacgctggatcgcgtgctggatattcctaagtgcgacaactggcatttcaactacaactacctcgatgcggcaaacaatgccggctattcatatgacctgaccctgcggcagtggatacacgattttgcagacgcattccatcttgggcgctgcgattttggcgcgttcagtagaattttcgcgttcggttattttaacgggatatttcttcgaactgaacgctacacaggatcggctaacagtgtgcgttttaccgactgcgatatggatatctgcgtgcatcctcttaggttccagaactggcaaaaccaggtgaccgtaacgaacgggaaattcaccggaaatgctaaatccacaggtggacttatcgagaaagaaccgagcgttaacctgttccagggaacgagtgagggcggggttattgttctcgactcaacagagatgaacaactactcgagcgatgcgattcaaactgctgcacatgttaaatgcatcggttcgcagttttacggatacggttttgacaatggccagcgcgcggcaattgcgacaactaccggcacaaacccgagtatgacgatcctgggaacgagggttgatggcgcgtctggtacgcaaacgcgcggcttctacggaacgacatcgacaggcacgctgaccatgggcgacagcacgaccatatcagggacaacgcttgacagttttcgatgggcgaatggccaggtaaatacctcgaacagcacatcgcttggcggaatgcctgggcgaaataacgtctcgtttatcagcaatgttccgaaaagattcccggttgaaaccatgccgacgagcggaacgttttaccgtcccggcgatatcgccgtactgactatccccgtcaaaacaaactttgccggacagcctaattacgtaatcactggatggacccgcttaacaacagcatccaccaatagccatgtactcaacactgattgggtagaaaacagaacttactttaatggggtttcatga

SEQ ID NO: 441037 - DNA, 600 bp, Serratia marcescens
atggattatccagaaatggatgattatgattctaaagagttttctatcaaaagaaaggtgtacaacggccgggttgtcattgatgagatatggctagaccatgatctgactatgacgctaatgaccggatacagcatcccactgcgccacaaggttgctaagcggtggcgccaactggaaaccggcgaggcgctgccggccaaaagcaacagcggtctgcctgaataccggcgcgcccgcacgctgaagatgaccgttgaagcggtcacgaacctgtttgacctgatgcctaacttggcgccagaagcaaaacaggctgcggccgcaagtctcattaatccggtcgccggttttgatgcgatcccattaccgaaactccaggagcactattacagcgcgggtgaagtaggtgagatcctcggagtgagtgcgaacaaggtaggacgcctggctaatgcacatggactgaagaaagaagagtacggaatgttcgtgatggacaagtctaaacactcggtgaagcaggtggaggcgttccgctataacgctgccggcgtcgacgtactccgctcgatagtttctgtgggtgcgggggcttag

SEQ ID NO: 441038 - DNA, 456 bp, Serratia marcescens
atggcactaacgactgagaagttgaatagcagcgatgaacaaatctgcgacggagactctgccgaaactatcgagaaaaacccaaaatcgtgggctgcgtggaaacgcgaagctgaacggctgcaggccattgtcgatgaggtggctaaccgggaggcgcagccggtgctgtacgccagcgaagaaaccttagcatacgcaaaggaaggcgaaaaaagcctggttacttggtctgagccgatgggtgatgcggtgattccactgttcaccatcccgaaagcgcaaacttctggggtggtaaacctaccaacggagttcatcagcgacgagggggttatggtgcgcctggagcaggttatggctgcgcttgccttggtcggcgtgaaatacgagcgcagaggtgacgcctgccgcgccgcaatgctggcagcagcgccggagggtgggaatggctaa

SEQ ID NO: 441039 - DNA, 399 bp, Serratia marcescens
atggacaataagctgagcgaactgaacaaaccaagggcgttcgttgttaccggcgggaaaatgtatcaagaccgcgcattcacggataaatcaacggctgaacgatccaaagccgatcggcatgatggagctgtcgttgagccgctctactcgcaagagtacgtctccgccctcattcagcgagctgaacgcctcgactcgatactaaccgaatcagtgcaggcactgaaagcggtggagcagcgcaatgcagagctggaagcaaagctggctacgccggtgcggttgcctgacgatctggaacccaataccgaaccatgcgtgatttgcggcgtggtatcgagccacccagagggatggcactactgccaccctaagtgcggagagggggatgcatga

SEQ ID NO: 441040 - DNA, 276 bp, Serratia marcescens
atgagcaagctgacaaagattttcgttaccaaatacgcgctaacagtcgggccacaggtagtgatggctgaaatcaaatatgaaggtgattctgcgttttggtgggtaggtggttatcaccatagcgcacacggaaaagacttctggcttaccgaggaagaggcgctggccgactgcgagcgacgtcgcaaagataagctggcatcgatcgacaagcaagccaaaaagctccaggcgatgacattcactatcaaggaactggcagatggacaataa

SEQ ID NO: 441041 - DNA, 516 bp, Serratia marcescens
atgccagcaaatgaactgaagccgtgcagcaaccattactcacatggacatacggcggggagaaaatactcccctacatatcactcgtggcaagcaatgatgggccggtgtcgttaccaaggtagagataacgctgaccgttatacaaaaaaaggaatttcagtatgtgagcgctggaataagtttgaaaacttccttgccgatatgggagaacgtccagcaggtaagacattagacaggattgacggagaaaaagattacagccctgaaaattgtcgatgggcaacgcccactgagcaagccagaaatacaagacgcaatgtcttaaccattgagacagcaatcgaggtggcagtccttcgactagatggcatccactgcaaggagatttctgccatgtatggcatttctgagagccttcctcgtgaaattgtagcggggaggtgttggaaagacgctttgcagatggcgcatgaaatcaggaaccggcgcgccgaggagtcccagcatggctaa

SEQ ID NO: 441042 - DNA, 276 bp, Serratia marcescens
atgatattcaagtttacgcctaccgatagcaacatgctggatgccatatcgagcgactactaccccgactggaatggcgatttcagcgtgccaacctggcggataaagaatctcgttaaggctgcatatccatgccaccacatcgtgaccaaagagatccgtgaacacctgaaagggatggtgttgcgcgggttgattaagtcacgaaatgaccacggcaacagcatcatctggacgctgcaagtgatcggggaggtgcgtgatgccagcaaatga

SEQ ID NO: 441043 - DNA, 687 bp, Serratia marcescens
atgaaagagcgccctatcatttttaacgctgaaatggttcgcgccattctcgacggccgcaagacgcagacgcggcgggttatcaatccgcaaccaacactaagagagcggacagggtttaactggaggggtgccgcatacggcattggctcaacataccgcgacacggtaagaaattttgccaactgctttaaggtctgcacattcggccaggtaggcgatcggctgtgggtgcgggagacgtggggcgttgtcagccacgactttgacgagagcgagcggattattgattgggtgccagatcgaccagcaacagccattcatgaaatgcctttcggcaatggttactactccggtcacgccatctatgccgcagacggtgaatttacctggggtgatgacgacggacacggcgagcggacttgctggaaaccgtcaattcacatgcccagagctgcatgccgcatcctgctggaaatcaccgctgtgcgcgttgaacgactgaaagatatcagtgaaagcgatgcgcgagcagaaggagtgatgccgatgccaggagcagcagggttactggttggtgggaaattggcgtttgctgagctatgggcgtctatatacggctatgaaaactggcgttctaatccttgggtgtgggttatcgagttccgtcgtgtggaggcaaaatga

SEQ ID NO: 441044 - DNA, 243 bp, Serratia marcescens
atgagcgcattaagtaagtaccacaaagagctgaatgcagagggtgttggtaagtgttccgttcccatgtggagcggcggcggcccagcaggtttctgcgacgagccagcttatggcatgccgttgccgcgtgaatatgtagagaaccgatttactggtcagcgccgctaccttaccccaggatacgacggttatgttcctgcccttgcctgcccgtgtcacggaggcccgaaaaaaccatga

SEQ ID NO: 441045 - DNA, 273 bp, Serratia marcescens
atggaaatcttcgaccttgaaaacgtttacgacgagcagattagcccgctgatgcagcaaatcattgccatctgccgagaaaataacatgccaatgatcgcctcctttgcattcgaaaactgtgaagagagaaagcttggttgctgtaccaccatcctgaacagcttcgatgaccgcggggttgatgagttcgatcaggcgctgcgcatcattcgcaacgaaccgaaggtgtccgcgttcgctatcagggtcacatccggggaggccaaatga

SEQ ID NO: 441046 - DNA, 420 bp, Serratia marcescens
atgaaaaatatcgttgaaaatcaagatataaaaactgataagccgttgccaatgagttatgaagcccttaaggctgagcgcgatgcgcagcagaaacgggccgaagcgttggctgttgagaatgtggcaatgcgcagcgttatcgatgctgcgataggggtagcgaataattcttctggcattgcaggctggcacctgaacggtgaaatcgccgattgggacgaaatattgccagagctgaatatcgaaaccccggccactgacgcagcacttgcagctatcgaagcgcggggagtggagaagtttgccaaacgatgtcgtgacctgtcgatgcaggaaaatagggatgtgtatgtgcattggaaattgtcaggtgatcgtgcattgaaattcgccgacgagctgcgggaggccaaataa

SEQ ID NO: 441047 - DNA, 177 bp, Serratia marcescens
atgttgtccgtattgcagttcccgcccgataccgtctctacacgggacagcgtgagattcacgcttcaacagaaacaaacgacatcagaaaagcgcgagcgattgccgcaggtctattggttgtctggcagcgatgtctgggtgagtatcaaaaattggatagagaaaagttggtaa

SEQ ID NO: 441048 - DNA, 1176 bp, Serratia marcescens
atgcaaacaaacccagagaagtgtattttttgtgatattccctttgataaaggtagcctagagcatgtattccctagtgcgttaggtggaagaattaccacaacacatgcgacatgcaaaagttgcaacaatttattttctgaagcgagttcagatgcggttgagatcgctctggctgataacttcatttatatcaggaatgctttgaatgtttggtctggaagaggaaacccaccaccaacgataaaggaagcaggtcagtttgatgatggcatcaagtatgatctcgcaccaaacttgacacctattgtgtctaagtcaagaataccctcaaaagatgaaactgatagcaatacagcctttgatttcgttgctcaagatgtaggtgatgctaataggattgtaggaattcttaagaagcgtggccttaatataggggatattaatgcaaagtatgttacaactaaggctcctgttataagagctagcattaagtttgaaggaaataagatttttcgtgctatagcgaaaattgctgtagtctcctatgttgttttgtatggcaattctcgagcaagaaccgatatctatcagagccttagggaatccatacgaagtggagaacctgacattacaaaatattgcggatgggactatgcaaatgattttcctgtcattacaaatttacacccacacgaaaaaaccccagacgccattcaatgtggttttgaacacactgtatttataactaatgtaaatcaccaattggttgcttatataaaactttttggtgcatttaatttctctattattttaggtaatcattcgagtatatcacctaaatgcttgtgcttaaatcctacaacaggaaaatcttcaaggtttaacgttttatttaacccgccattaagttacatacctaaaaatattgactcattcaaaattgaacatgaatccgttaggaaaaatgttcagttagcaatgaattctatagtagagcactgtcaaagtttatcgaccgaagagtatattagaagcctcagccaagagttaatgatttctgttcaaactgcatccgttgactctgacatatctgaaataatcagatcattttcagagaagcttgctcatatagaaaatggattggcgtgggaagaagaaattaatattgaataa

SEQ ID NO: 441049 - DNA, 471 bp, Serratia marcescens
atgctttgtttgaccggcgcattttgcctcttggcggcgggcgtggcgcaggccgctaccacagtgtcggtcaaggtgaccgtgttggcgccgctgccctgtaagctcaacgacgatcaaccgatcgaggtgaacttcggcgatgaggtgatgacgacgcgtattgatggcgaaaactaccttacgccggtcaactataaattgacctgcgacaagccggaaaaaaacgacatgcggctgctgctcgccggaacgggggcggggtttgatgacaaagtgctgcaaaccagcgtcgacggcttgggcattgcattcttaaacaacgggtcgcgcatcgcgctgaacagttggcaaaaattcacgctttccgatatgccgacgctggcggcggtgcccgtaaagcaagcgaacgcggcgctgccgacgggagaatttacggcgtctgccacgttgcgcgtcgattatcaatga

SEQ ID NO: 441050 - DNA, 831 bp, Serratia marcescens
atgatttatattcttccagcattggggtggaaaatgaaaccgttctttattttttgcatgctgtttatttcactccaggttaaagctagctgggagttagatgtgaaatactttccggaagttaatcaagttagagttaacgttattcggtgggatgtggatgattcaagcagtaaccttttatatcgctgttgggaccctatcgcggcttctgatgccggctgtcgacttttcatagcatatgacaacgaagatcgcgctgggaccacgctcggtgcaccatttaatatgggcaaagaggtatcagacttaagaacgatgggggaagtagccgctgtttttgcccgaaaagggtatttgaatcaggtgaggatcggtggcggtcaactgatgggaagaagaaactgtttttcattggcttggaagtatcgcaccggattcatcgggcccctgccgaatggagccgtagattgtgcgttgccggaaattacccctacctactgcagtatcagggagccctatattgaattggatcacggctcggtaacaagtgacggggtgaatggccataccgtcagtcgctcttttagtgcggcctgtaataatgattttaaagtattgattgttgcgcagggtggaaaaggcgatctgccgttgggcggagggatcatcagccacctgaaagtcaatggcgacgatctcggcaccgggcatgcggaagtggtcggtccggcagggaaaacttttacgttaagctcaacgctgagtggctctcccagcggcgtcggtgaatttcaaggttcgaaagtgattatgttagctctcccgtga

SEQ ID NO: 441051 - DNA, 441 bp, Serratia marcescens
atggagctctatacatcgccggaaggcaccattattccgataccgacagtgtgtgagatcaacggcggtaatgccatcaatgtcgattttggcatggtgccggaagatcgcatcgggacgtcggtcgaacaagaggtaaatccgcagacggtaaacttatccgtttcctgcaacaccgcgttgacgctaggggcgagggtacgtctggtgtcagattttgccagcttctccaataaattgatccgcagcaacggcagtaatctgggggttgctatgcggcacaatggacatttgatcgccccctttgagacgttccctttttggctgcaagacggcaaggcgaatgaacaggtgacattatcgctggtgcgtaatgccgccgcaccgtcgctggccggtgatttcatcgcgagtgcaacgctggtgatcgagacgcagtaa

SEQ ID NO: 441052 - DNA, 828 bp, Serratia marcescens
atgcgtctgacttcccgttttggccgttataacgccatccgtaaagaccgcccattaaccaatgacgaattaatgaacgtagtgccgagcgtgttttctgaagataaacacgattcgcgcagtgatcgctatacctacatccccaccattacgctgctggataaattacgtgaggaaggttttcagccgttttatgcctgccagacacgcgttcgggatgaaagcaaacgcggccataccaaacacatgctgcggctgcgccgggaaaatatgattgtctccggcaataaggaagtgcccgaaatcgtattgttgaacagccacgacgggagcagcagttaccaaatgatccccggcatgttccgctatgtctgcgccaacggcatggtatttggtcaatcgttcggtgatgtcagagtgccgcataaaggcgacgtagtcgggcaggtgattgagggcgcctatgaagtgcttggcatatttgaccgcgtcgataatgacctcgataccatgaaatgcatttcactgaccgagcgcgaccaggaattatttgcgcgggcggcgttaagttatcgctacgagtatgaagataaatccccgatcacgccgtcgcaagttttgcgtccgcgtcggcgtgaagattacggcaatgatttatggacgacattccagcgcgtgcaggaaaacatgattaaaggcggattacccggtaaaagcgtgaccgggaaaaatacccggactcgggcggtcaacggtatcgatggcgatattaaattgaaccgtgcgttatggctgattgcggatgaattcaaaagccgaatgaagtaa

SEQ ID NO: 441053 - DNA, 342 bp, Serratia marcescens
atgcgtaaatatgcatatttggcgttcgctgttttcgttgtggctttcggatacttctctggaacatacaaattattgcttgatgatgccaaatgggctgcgcccatcgcattcacccaacatgatgaaggggttcacgcagtgccggcgtccagccaaatgatgcaggtggcgcagaccgtttccgactctgaaacgcagtcacttttgcaggagcaactggacgtcatgcgtgagcagctggcagagaccaaagtcatgcagagcaggctgcaggtgatgtcctctgcctgtgaagcatcgacatcagtaaaacccgcgggaggcgataaacatgagtaa

SEQ ID NO: 441054 - DNA, 276 bp, Serratia marcescens
atgacagcgacactgcgtttgcgctgggcgcttcggcgccatccggccttagtgctgagtgcggcgatggtggttatcggcctgatggcggcgcgggatatgggcgccgccgagttcacagcggccttgcgcgcgatgacggtggcagggctcctggcggccgcgctgctggcgctgcggtatcaatgggcgggcaaggggcatcaggcagtgaacctgctgcgcctggctctggggctgtgggtaatagccggcgttgccggtctgctttcgtag

SEQ ID NO: 441055 - DNA, 414 bp, Serratia marcescens
atgcatcacacaaaatcgacggtggcagagcggccaccgctgtccgcgcgctttatcgcaaccgagtggtttcgcggcgtggggtatgcgctggtgacgctatttggcgggggggggctttatctgggtgggaggctggccatcatgggcgccgatgagcttatccgggggcaggagttcgactcggtcgacacgttgatgcaggccgtgttcaccgtcgctttggcggtcgcgggcgtgatggggattgccgctgtgggggcgaaagcccttgattacccagggctggcggccctgttcggtggtgcgtgccgatggctcttcgtgttgggcgtcgtcacggggctgtttctggccatccatttcctctttttcagccctcaccactgtaactgtttaggagggccgcgatga

SEQ ID NO: 441056 - DNA, 831 bp, Serratia marcescens
atgaagatcaagacgactgcacaggctgtcgtggtcagcgtcgctgcagcgctgtattcgcagttgccggcatacgcttcgccaggcgcggtaacctttaccccggagcagcaagcggcgattggccagattgccgcggactacctgcgtgaccatcccgatctgctggtcgagatgagcgagaagctgcagcagcgtgaaaacgctgccgaacagcgccaggcgctggatgcggtgctggcaaacaaacacatgctgcttaacggcgatgcagcgccgaccgtgcgccctgacggcgacgtcaccctgatccagtttttcgactatcagtgcatctggtgttcgcgcatggcgccggtggtggaagcggtgatggacaaggacgccgcgttgcgtgtggccttccgggaatatccgatttttggtgaacgctggccgctttcccgcgacgccgctatccgaggagtgagcatctggcggcaacagggggctgacgcctatgcccgctatcaccatgcgctattcaagacgggacacgccgagggacaactgacgcaggcggatattcggcaggctacgcagctggcgggggccgatgtgcagaaggtcggcagcacggtctcaggcatcggggcggaaacagacctgaaaggcaatgcggtactggccggtgatctgggtatcagcggcacgccggcgtttatcgtgatgccaacccaacatgccaacgccgacaacacatcggtgatgtacggcgcggtggatgcgtccacgctgcaggcggccattgcaaaagcgcgcggcaagaccgcgggcaaggcggacaaatga

SEQ ID NO: 441057 - DNA, 579 bp, Serratia marcescens
atgaaacaaagtgaagttcgtgaagaagtcgcaatgattgttaaagcagtaaaggaatccgatgctgaggtgccttcattatctcaagggatgcgcccggcgatcatttatatagttacagtgcacttgatattggctgctaatattgtttgtttcttgacttctaatcaaagatttgacgttggtttttttagtgggatggcagttgcctccttaatagccaatgttatgcttgggctatttatttactcttattatacgcaatacctgtttattcctgaagcgacaagaaaacagtctaagcttctcgcactaataagagaaaaggtatctcactatgcttatttccattttggcgttttactaacagcttcagccttaggtttggagagtggcttggcggcatccctcccatttctccaagtgccgttactattctttaccggcttcgctcttctctttgatctggggcgatttaacctccccagcctggcggggctggtcgatgcagcgaaggacgagttcaaaaacaaagagttgcaagagtttctcaatggtgtaaacaaggaagaacgatga

SEQ ID NO: 441058 - DNA, 234 bp, Serratia marcescens
atggataaacaggaataccgactgtacctggccatgttgaaggcgcgcggcgacctggcgcgcaaggaaatggctgacaacgcccggcggcgcaacctgatcaaggcgcatcgtcaacgacgctctgacgacatcaggtcattgttggcctggaaaaacagggacatgtcagttgacgggctgttggccagcgatgatgagttggacgcccgcgaacgggcgttcggcaaatga

SEQ ID NO: 441059 - DNA, 1092 bp, Serratia marcescens
ttgaatagccaatttgcgaatgttgagcaccacatcaatgaatcccgtagctcccggcggggcgaagctaatgcgcttcggcgcgggcaacaaaaaattcatcgtcgctatacgcccaatctgtgctgtcgtgtgccgaaaggcatggctagcaaggtggtggcgcgcatgagcagtcacgactggcggcgtaatgatgacctgatcggtctgcgccggcagggctatatcccctatacccaacgcaataacccggactaccgtcccaaaccgatgcgcattgccgcgcggtcggagagccgtgaagcgctgacggtgctctcgatggtgctgggcgccaactgcgactacaacccggacagcgactacccgtttgagatcatgctgccgttcgaggacgtggccaaagcgatgggggtgctgcacgtatacgaaagcggccgcaaggcgtatgacgtggcgctgcatgcgctgtcggtgctcgagcagctggactacctcatcgtgtcgcgcgggcaggatactgacaccggtcagaacaagccactgcgcatctggctgacggagaaattcttcaccagtcgaggtatccatgttcacgaaattcgcctgtggctggatcagtaccgtctgtgggccatcaagaacgggctgacggaaagcctgcgcaagaaatacgaacgtcacctggtgcgcattacgcatctggggatcgacatcgaacgcaagcactcgctaaaaaaccgcctgaagcaaatcaagcgttgggtggtgagtcccgatctgcagaatctcaagaaagatgccgaaaccgttatcgaggacgaactggccaagcgccagcagaacgaacatcgcctcgacaccctgctggacgataccgccgacaatattaaacggctggccagcgccaagcgtcgccagcagaatggcttctaccaggcctgggtgcagtggacgatgggccgctcgccgctgaaggcgatggagctggagaatacgctcaaacgtgaacagcccggactgctgaacagcgatccggaggcgttctaccggctactgctggagcgcgccggcgtcatctcagcctaa

SEQ ID NO: 441060 - DNA, 1038 bp, Serratia marcescens
atgtcgcatcgggtgatggccatccttggccagctgacgccgcgactggagatctactccatcgatgaggctttctgcgatctgaccggtatcccggccgcgcagctggagtctctcggtcgccggctgcgtgaagaggtgcggcgccgcacccacctgacggtcggcgtcggtattgcgccgaccaagacgctggccaaactggccaactacgccgccaagacctggcacaagaccggcggcgtggtcgacctgagttcgccggcgcgccagcgacgcctgatggcgcacgtgccggtagaggaagtgtggggcgttggccggcgtattgcccgccggctggcaacgatggggatcagcaccgcgctgcagctggccgacatgccggcggccgcggcgcgccgacagttctctgtggtgctcgagcgcacggtgcgcgagctgaacggcatcgcctgcctgggcctggaggaatttgcggcgccgaaggagcaaatcgtctgctcccgctcgttcggcgacaagcccaccgagctggacagcgtcagtcaggcagtctgcgcacatgccgagcgcgcggcacaaaagctgcgtggcgagcggcagttctgccggcacatctcggtgttcgtggccaccagtccgttcgccgccggcgagacctattacggcaaccaggccaccacaagactggcgacgcccacccaggacagtcgtgacatcattcaggccgcccggcgggcgctcgaacagatcttcatcgccggccaccgctatcatcgctgcggcgtgatgctgggcgacttcaccagcgaacgcgtggcacagttcggcctgtttgacgacgcgccgccgcgcaaaaacggcgatcgtctgatgcagctgctcgacagcctcaatcaggacggccgggcgccggtgtggtttgccgggcagggtattcccgatcgggccgacagctggaagatgaaacggcagcggctgtcgccggcctggaccacgcggctgaacgacgtgcctgtcgtgcgcctgaaataa

SEQ ID NO: 441061 - DNA, 390 bp, Serratia marcescens
atgttttctgaacgtatttcaattttctatccgctgagttgggccgtatttcttgggttaggggcggtttcgttggtatccgattcccaagagcagacctttttgaattggcctttatggattggtctatgcgtgttgggagctttcctcattacgttgtgggtgctggttttcgaacccaatgacacctcacctggtccttatgcctctggcttggtcatttgcgttgcctggatcttgtggctcgtgatttggctattcggaatggcggtgcaagggggcgatttctggccacctatggaagcgttgctattgcttaatgcgctgactgtcggtctcgcttcgtttttcttcctgtatttcttgatcattgagggtggtgtcttgtga

SEQ ID NO: 441062 - DNA, 1086 bp, Serratia marcescens
gtgcttgatgcaaagctgtttccccaccccgaatttaccggcaaactcaccttagcctccggctctttgccttatgattttgatactgatgaaaaaagtggaattatcgctttcgaagggcacggcgtgcacgtggccgggattacggcggccagccgcgagggtaccggcatgcacggcgtggcgttcggcgccacccttgctacaggcagtattcccgataaggacaatcagatggaatacatggcccaaagcaacgtccgggtgattaataacagctggggtgatgatattcccatagagaaagatgcagccggtaacgacttatttttccccaatggcacctggaagtatcaacaactcaccccgacctcccagattgacgcgctggctcctcttaaagcgcgtatcgacgccttcagccaggtccctattcccactactatcgctgatgcagatcgggatattggcggctatgccggtatgctgcgcgctgcgcgccacggtaaactgattgttttcgcagcaggcaatgagaataattacaatgtgcctgcgagagatgccagtttgccttatctctttcccgaggtgctgaaccgctacctaatagtcaccaacctgacgcccaatgatgacctggatgacagctccacaagctgcgggcataccgccagctactgcgtttcggcgcccggcacggagatttacagtgcggtgggacgctttgtttcccgcaccggcgcctccattacggaagtggcgctgaaccggggagagctgagtgtggctccgggctacgaggagatgagtggtacctccatggccgccccccacgtcaccggtgcggccgccgtgctgatgcagcgtttcccctacatgacggcggggcaaatcagcaccgtactgaaaaccactgctaccgaccttggcgcgcctggtatcgatgcccgtttcggctgggggaaaatcaacctgagagatgccattgatggtcccggaatgctgattgccccggcagatatccctgcggaattttacgtgcccggctcgtacaccaatacccagtacccagtttgtggctaa

SEQ ID NO: 441063 - DNA, 210 bp, Serratia marcescens
atgaaaattcaattccgttcagtgctgtgtgtttcactgagttgtctgttctttcctgccgccgtgctggccactgggaacgtttaccaagagtccgggcgcattggcgcaccgtactcttggctgacccccgaatttagccaccagtggggactggggcaattaacgcacagtatgcctatgctcgggggtataatggacaaggagtga

SEQ ID NO: 441064 - DNA, 747 bp, Serratia marcescens
atgaacccattcaaaggccggcattttcagcgtgacattatcctgtgggcggtacgctggtactgtaaatacggcatcagctatcgtgaactgcaggagatgccggcagaacgcggtgtcaacgttgatcactccacgatttaccgctgggttcagcgttatgcacctgaactgcgttggtactggcgaaacccttccaggttctgttcctggcacattaatgaaacctacgtgaaggtcaatggcagatgggcttacctgtaccgtgccgttgacagcagaggacgcaccatcgatttttatctctcttcgcgccgtaacagcaaagcggcatatcggtttctgggtaaaattttaaacaacgtgaaaagctggcaaattccccgtcgcatcaacactgacaaggctccctcctatggacgcgcgctggcgttgctgaaatgcgagggtcggtgtccgcctgatgttgaacaccggcagattaagtaccgcaataatgtcattgagtgcgatcatggcaagctgaaaaggataatcagtgccacgctgggatttaaatccatgaagacggcttacgccaccatcaaaggtattgaggtaatgcgggcactgcgtaaaggacaggcggaaaatttctactttggccatcccttgggcgagatgcacctggtgagcagagatttgaaatgtaatacctcatcaccggaaagagacccatccatttttatatttgcaacagtgccgtaa

SEQ ID NO: 441065 - DNA, 714 bp, Serratia marcescens
atgtctaaaaaattcattttattttcactttctgtaatctcgatggctttatcggcatgtgatgataatagtcacttcaatataaaagagaatgagccaaaagttttttattctgatgagaaaattttctactccggtgatgttagtgagtctgggttaaaaaaagtccaggatttatcaaataactacacgacaacattagtaattaatagccgtggaggtgacatcgttcctggcatgaagttaggcgaattggtgttcgacaagaagtggaacgtacaggttcaggattattgtttttcttcatgtgcaaactacattttccctgccggaagtacaaagtacctgtccaagggaagtcaactgggatggcatggcggtgcgacccagcagtttagtgatgatattgttcctaaagagcagggcgatagaaaaagatttattcagacgctcatcgaactaattaaattagaaaataattttttcaacaaaatcacggtaaatcaactatctacagtttatgggctaacggcagataattaccttgagatgctgaaatcacataataaaaactgcaaaggatggagctattcaattgatggcttatccgcatttggcatcaataatattgtactgctagatggtgaatggcatccaagcccatcctatgaaaatagttgcatacatacctttgaaaaagtcttaataaaataa

SEQ ID NO: 441066 - DNA, 618 bp, Serratia marcescens
atgtataccggaattatacaaggcactgaaaaagttatatcagttattccaagaaatggattcaaaacgctcacactgagcaataataaagaattcttcactgatgcatttgtcggggcgagtgtgtctataaatggaatctgtctcactttaacctcggttgatgatatttacgtcacatttgacatctctgataaaaccagtttactgaccactatgaaggttatgaaagcaggggatgaggttaacgtcgagcgctcacataaaccaagtaatgaaaatggaggtcacagtctttatggccacattggaggtattgcaacagttctatgtgtggaacagagaggaggaacagccactatgaggcttgaacttccagaggagatagttcgttatttcttcgataagggatttataggaatgcatggtgcaagtctgacggtgcatagtgttgatcgaataaataatcaactcagcgttaatcttattccagaaacattacgcttgactaatctcggtcagttatcgcctggagacaatgtcaacattgaagttgaccatatgacaagagtaatggtagatgtcatatctagcactatggttaacggaggattataa

SEQ ID NO: 441067 - DNA, 363 bp, Serratia marcescens
atggcaggcaacaagtggcagatcagtgatgaactctgggataaaatggctccactcatcccggaacatacaactcaacacccgctggatacgcatcgcaaacgcgttagtaatcgcgctgcaatgaacgccattttcttcgtgctcagaacgggttgccagtggaatgccctgaatgccactggcatttgctcatcaagctcagctcaccgccgctttcaggaatggcgggaggcgggagtatttgaacacttctggcaaaacgggttgcttgtcagcgagaatctggatgccattaactggttatggttgtcgatggatggttgtatgaccaaatccccacttgtaggctcaaaaaaatag

SEQ ID NO: 441068 - DNA, 660 bp, Serratia marcescens
atggtaaatcatccggatagtgtcacttatgatgcatttgactgtaacagcggtaaaccgcacgaacccaacacccactgggatcccaatacaagtgcttgggaatgggacaatctgagtttgagttcagttcctgattcattccctgaagaggtcaaagaagcgctggaaaataatatctgtatcatttgtggaaaaaagaactgtccatatatcaaaaataacaaagattatcaggaattcattggcgccctaaaaaaaggcaattcaggagaggccagaaaaatatatatgacaaaatttgctcaacgtagggggcaaagcaaaggtgcggtgatacaaggtcttcaggcagcccgtgatgcaaggaaaaaggacggcaagtgtggaggtcgtcaatccttccagtcaagacgagtaattgccacacctgggatctggagtgagtggactgaaattacagggggtactggtagcgaacaacgtccacttgtacagaccataaattttaatacttcatctaatttagagtcatcttttgacgttgaaattaaatatccagagtctaatggtatgaaaaccattaatacaataggaccgggttcttatcaaataagagccactggaggtggaaactcatacataagagttggggtctga

SEQ ID NO: 441069 - DNA, 519 bp, Serratia marcescens
atgaatacaattacaaaaaacaactttgagataaaaatgaaaggattcttaattattttgttttttgttactggtattgttaatgccgccgacgtcatatcgaataattactcaataacatcagatagtcagtccatattatctaatggaaacattaaggctattggccatgtacatgctataagcggtgatatgactattgatgcagaagaagccatttatcaccgtgaaaaccccaacaccacttacataacagcaacaggaaatcccataaaatataaaggggtaactgaggatggcaaaccgttctcaggaagttctaagaagcttaaatatacgccagaaacaggcgaggttattttgatagatgatgcttttattgagcaggatggaaatacactatcggcaggagtaataatttacaacaccattacaaaaaaaatgatagcttcttctgcacatgggaaaagagtcaaaagtgtgatttatcctaataagctatcacagaagaaaaaatga

SEQ ID NO: 441070 - DNA, 378 bp, Serratia marcescens
atgaacctattcaaaggtcggaattttcagcttgacatcatcctgtgggcggtacgctggtactgcaaatatggtatcagctatcgtgaactgcaggagatactggctgaacgtggtgcaaatgttgaccacacaactctttaccgttgggttcagcgttatgcgcctgaaatggaaaagcgactgcgctggtactggcataacccttccgggttctgctcatggcatctcgatgaaacttatatcaaagttaatggccgctgggcttatctttatcgggccgtcgacaacaggggccgcactgtcgatttttatctctcctcccgtcgtacagcaacgcggcataccggttcctgggtaaaattttcaacaacgtga

SEQ ID NO: 441071 - DNA, 861 bp, Serratia marcescens
ttgccggccgaactgcgggccatctgtgacctcagcacgctgaagctggagtccggctcctttgtcgaagatgacctgcgccagtatttcagcgacgtgctctacagcctgaaaaccaccgacggcgctgacggttacgtgcacgtgcttatcgagcaccagtctagcccggataagcacatggcgtttcgcctcattcgctatgccgtcgccgccatgcagcgtcacctcgacgccggccacaaaacgctgccgctggtcattccggtacttttctacaccggcaaacgcagcccgtacccttactcgaccaactggctgcaggagtttgatgatccgacgctggccgggaaactgtacaccggcgattttccgctggttgatgtgaccgtcattccctacgaagagattatgggtcaccgcagcatggccgcactgaccctgctgcagaaacatattcgccagcgcgacctggccgaactgaccgacaggctgtccgccattctgctggccggctatctctcttcgccacaggtgatttcgctgatacactatattatccaggccggtgaatcggcgaatgcagaggcatttgtccgcgaactggccctgcgggttccgcaacacgaggaggaactgatgaccatcgcacaacagctagaacaaaaaggtattgagaagggtatcgaacagggtatccagaaaggtatccagttgggtcaacaacgcggtattgagaaaggtcgcaatgaaggcaaacttgaagttgcccgcaccatgctggccaacggcctcgatcgcgattcggtgatgaaaatgaccgggctgaccgctgacgacctggcccaaattcgccactaa

SEQ ID NO: 441072 - DNA, 192 bp, Serratia marcescens
atgagcgctatcgtgaccgtcaccaccgagttaacccaaagccaggcgctggcactggcgcagttcgtcaagcgcctgacctggtcagaaattcaagcttgtgctgtcgatgaagacgagacatatgagatgagggatgccgttaaccttctgcagaagtcgctggccgaagcaggttttagcccgagctga

SEQ ID NO: 441073 - DNA, 213 bp, Serratia marcescens
gtgaacactgtagagaaaattctagacagcgtagggctgaaatcccaagagctgagttcgcttggccaaacggatagcctgatagtttgccgtatttttgaagcggtgcaggagtacgcaatgtatcgcgataaaaacccagaattagggatagcgtgtgaacagatcctgtcggtgatcagaagccacctgaaccagagtgtgatcagatag

SEQ ID NO: 441074 - DNA, 537 bp, Serratia marcescens
gtgaaaattgatgaggtggaaaaatggcgtcctttcaccgatgcggaagggaacacctgggacctttcctttcttgacgcccacgaagtgatctatacgcaccgctgcgagggtaaggcggacaaggtctataaattcatcgtctcctactcgtttcactgcttttgcaaagattacccggaacagagcgaagatgagaagcgggcgctgatgtatcactcgcctaaagagtcacggccgttctgcaaaaaccgttacagcctggcgcaacgctaccttaaagacatgatactgtcgttggaccgacagcgaattatccatgccggctatggcagctatgcggtgatcgaggcattgaatgacgagggcgagcgctgctattaccacgtccccttcaaagcgttccgggaacggaagaaactccggatacacgtgaccagcgcctatgcggttgatgccaaacctgggggagggaaggtgggtttctttgttatcgccagcaagctgttggccggaaagccgttaccacacccctga

SEQ ID NO: 441075 - DNA, 615 bp, Serratia marcescens
ttgttagacaaaaccaaatccgttactacggataacaccaccgcagcactcagccatctggcgttctgcgccctggcggcgctggggttggcgcgccaggaaggtatcgccggcacgccctatgccgaaaacctgttcctgatccgctggctggccaccgcccaaaaacagaagcggttccctaaaagtgtcgccgtggatatcacctggctgctcgaacgcggccgcaaacacggcccggccggtaaactgcgccagcatctggaatacctttggcgctcctgcagcggcaatctcgccgcgcagtccgattttttccggctcacttacgcgactgaaaccctgaaagatcggggctgggacaactatgtgatggatgcgaaagagtggaagtccggcgtcgtgccgacaccgtcacagcataacgggttctatgtcgaaaaaacggcgctgaacgccgcttttgccctggacggtcgccatctgcactctgtcacatttcgggtgatcggtgacgccgaccggtttatgcatgtgatggccgagtacggactgtgtacgcgccggcagggcagcacgtcagcctgccacaccatagcgctcgaaccagcataa

SEQ ID NO: 441076 - DNA, 258 bp, Serratia marcescens
atgaaaaccgagctacccgacgatatcgacctgctgaaaggcatcttggcgcagcatcaggcgatgctgaagcagcagcaggcgcagatgaaagagcaacagacccagctccgtacctatgcggggcaggttgccggctatgagcaggagatcgaacgcctgaaagcacaactcgacaagctcaagcggatgctgttcggccagagctcggagaagttgggggtacgcgcccatttcctccaaaagtcccacctttaa

SEQ ID NO: 441077 - DNA, 669 bp, Serratia marcescens
atgctaaaaacatcaatcgttgcacttgcgttggttttctctacaataacgcatgcggaaatgcactgggtaaaaaatgataaaataaagtcggataacataaatgcggttaaaatcgtctataatggggatgtaactccagcactggtggctgagttgatttcagctcttgatgaaattaactcagactacccaaccgtaacatccattaaattattcatcagcagctttggtggcagcatggaaagtggatatttggcgtatcaggccatcaaaggttcgaaaattcccgttgaggctataaatgccggtatgacggcatcttcagcgacattagtctattgtggtgcacaggaaagatacacctttccggatgcgtccttcatgcttcacccatctgcgtcgcaaaacacaaaagccgagtggatcagaccgaatgatgtcgaacttataaggaaggatgtcgaagacggaaacaaatatttcaaaagcatctacggcagttgtactacattgggacgtcaggacattgaaaaaattctgtttagcaatgacaatgccagatacttacgccctaaagatgcggaaaagataaagttgtctcagggcagcatagaagggatcgcatcgacccccgtttcttattatattacggatgctaagaattaa

SEQ ID NO: 441078 - DNA, 2145 bp, Serratia marcescens
atgaataagattttcaaagtcatatggaacagttctactgcctgctttgttgttacttctgaattggcgagaggctttcgaaaaataaaatcatcatgtatctgttgtagcgctccggaaaactcggttattaaatataccggtgtaacgaaacttcattttatatcactagtaatcatttttattctaacgagttctatagcttctaaagaagctaatgccaacataataaatttaacgggagattgcaacaacggttcgactggaaaagtcgggtattctaacatattaacttctaactcaaatactaaagatggaacgggtacttggtccttggttggtggctgtgctgctacagcaaataacatggcaggggcaacaacgttgggtagcggagctcaaactttaggcaatcagggagtatcactcgggattaacgctcgttcaaacgctcaatcgacagctttagggtcagcttctttggcatcaggagaccaatctgtagcgttaggggcagcagccgttgcaactggaaagttcgggatagcaattggctcaaacactaatggttcgctttattatccgaatagtcttttggctccagataaaagactggaagcagcggctaaaggttctatagctattggctctaatgaaaatggaggcgccagagtagaaaatggggctgataattccgttgctttgggcgcaactagcaatgtaaaagctaaaaatgctgtagctattggcgcgggctcaattgctgacaaagacaatactgtttctattggctctgacaagaaactaaggaaacttgttaatttatctgccgcggcgctgaacgccgcgtctgtggacgcggtgaacggtagtcagctgtttgcgacgaataacacgctggccaatacgctgggtggcggggccaaactggacgacaagggcaacctggtcggccctagctatacggttgacggcaagccggtcaacaacattggcgatgcgatcagcaatattgatgggcgcaccgccgacaacagcaagggcctcagcgagctcagcaacagcgtagccgccggcaaggcgggcttggtgcagctggacgatggcggcaacgcggtgttcagtaaaaccttggggacagacaaggcctttaacgtgggcggtcgcacgatcagcggcgtgaaggccgcggcgctgaacgccgcgtctgcggacgcggtgaacggtagtcagctgtttgcgacgaataacacgctggccaatacgctgggtggcggggccaaactggacgacaagggcaacctggtcggccctagctatacggttgacggcaagccggtcaacaacattggcgatgcgatcagcaatattgatgggcgcaccgccgacaacagcaagggcctcagcgagctcagcaacagcgtagccgccggcaaggcgggcttggtgcagctggacgatggcggcaacgcggtgttcagtaaaaccttggggacagacaaggcctttaacgtgggcggtcgcacgatcagcggcgtgaaggctgcggcgctgaacgccgcgtctgcggacgcggtgaacggtagtcagctgtttgcgacgaatcaacgattagatgctacagtgaataacattaatgagaataaaatatttaaggtgtccaatgatggagagcgagtgatcattgctgaaagagcagaaaaagtgaaatcgttagacattggaggacgaaaaattgagggggttaagaacggaacaatatcggctacatccaaagatgctgttaatggttatcaactaaatgaatcgaataagaaaatagctggtaactcgagaagaataaccacggtcgagaataaggttgagcgaattgaaggaaggataggaaaggctgagaagaaaatagaaaataacagaaaacgtgccagtgcaggcatagctggagccatggcacttgcttcaataccttatgtatacagtgaagatgtatcttttggcatgggtgctgcggcgtacgatgatcaaggggcaatatctgctggattaaactttagaacaagtaactcaagtgctgtaaggataaactattcactggacacccaaaatagcatgggtatgggtgttggatttgccgttggattctaa

SEQ ID NO: 441079 - DNA, 513 bp, Serratia marcescens
atgaaagcttttaaatttgtgattttggttatttttatacttaatattatttatcttgattttttcatcctttaccatggttcttttaatgagaaagatatcgataagcacactataagtgaacatctaagccttaattcaatggaaaagttgatgttgatgtataaagataaaaataataaagcggcacgacactgggcaatgatggcttacgataatggcagtctcattggcggcgaaaatttggcgaccatgtatcgatacagaatcggaggggaacgagacatggctaaagccatagacatttatttagatgttgcaaagaaaggttctatatattcagtgcatagtttgggtgaaatatattttttaggcgacggcgtaaaagaaaataaagaaaaaggtataaaatattttcgcctcgcatgcgaaaatggcaatgaggaaagttgtttatttctaagaatgaattcgccacgtgccgttcaaagacaggaaacaggtggaagatga

SEQ ID NO: 441080 - DNA, 660 bp, Serratia marcescens
atgaaagccagagagacatgtaagtcagttacgaggagagttgcaatctctagcccttgcaatttcaccctttacgggatgacttgtgttacacacaagcatgtgacgtgcttatttaaaaatcttgactacctggcaatttattcaaactttgacagcaatgttgagtttgatgatgtatttatccatgtacgcacgaatgcaagtgcggagttgggattaatgcaaaaatttataacgttgcactcgccgccacgaatcattgtcttggtggataatgcacatatacctactctgaaattgcttcgtgctatgggtcttttttttattgtttcactgcgtgattcattgagtaatattgataagcttcttcaggactcttcgataatgcgttatatgagcccggacttgcatgctgtcatcaaggcaattcagccagctcccgtctgggctgcggaatgggacgctttcgatggcgttcaatatttaacgccaacggaaacggaaatcatcctggatttacttcggggagtatcaccctggcagatagctagaaagcggtttgtctcggtcaagaccgtcagtacacacaagcttaatgccctaaaaaaaatggaactccaggggctcaatgaattttttatcacgcttcgccgttaa

SEQ ID NO: 441081 - DNA, 255 bp, Serratia marcescens
atgtcgcatcgggtgatggccatccttggtcagctgacgccgcgactggaagtatattcaatcgatgaatgtttctgtgatctgaccggtatcccggccgcgcaactggagtcgctcggtcggcggctgcgtgaagaggtgcggcgccgcacccacctgacggtcggtgtcgggatcgcgccgaccaaaacgctggccaaactggccaactacgccgccaagacctggcacaagaccggcggcgtggtcgcctga

SEQ ID NO: 441082 - DNA, 612 bp, Serratia marcescens
atgtcgcacgtgccggtagaggaagtgtggggcgttggccggcggattgcccgccggctggcgacgatggggatcagcaccgcgctgcagctggccgacatgccggcggccgcggcgcgccgtcagttctcggtggtgctcgagcgcacggtgcgcgagctgaacggcatcgcctgcctgggccttgaggaatttgcggcgccaaaggagcaaatcgtctgctcctgctcgttcggcgacaagcccaccgagctggaaagcgtcagccaggcggtctgcgcatatgccgagcgcgcggcacaaaagctgcgtggcgaacggcagttctgccggcacatctcggtgttcgtggccaccagtccgttcgccgccggcgagacctattacggcaatcaggcgaccacgcggctggcgacgcccacccaggacagccgtgacatcattcaggccgcccgccgggcgctcgaacggatcttcatccccggccaccgttatcaccgctgcggcatgatgctgggtgatttcgccagcgaacgcgtggcacagttcagcctgtttgacgacacgccgccgcgcaataaaggcagtttagtattgtttttaactcattga

SEQ ID NO: 441083 - DNA, 528 bp, Serratia marcescens
gtgctgatcgccggaacggaaggtcgggtgcgcgggatctctttgctgctgttcttcagcctgctgttcggctgcggcgtgcgcaacgattatccggtcgagaaagatgagtttaaggtgatgatgcattacatcaacagtaactatcagcccaatgatgcggtggtggtcagcaatatgttcaactacctgagctatgtgtattacaacaagaagggccatcgcgccttgctgtataccccggccaggcccaacggcacttcgggcaagcccaatgcctatggtttcggcacctttttccacgaccgggcggcgcagacctacgtcgataacctcaacgcgttatcgaaaggtcaccgccggatctggctggtcagcggtggtgattttaatcaggacttcggtcctgtacccgtgaactggaccaataccggcaccttcaagagcggcggcttcgagtcgcgtttatttgtggtgcacaacgctgagactgcatccttagtagatacgcgatttgacgctcagtga

SEQ ID NO: 441084 - DNA, 801 bp, Serratia marcescens
gtgtgctcacatccagatgtcatatgttttctcagtaaaaaaggacctgatccgtccttttatgtgtataagcataatggccatgttgtttgtgcaacatatgccacaaataggaatatccgtgttggcacccccgattatccttttgtgtttgatgacataattattccatacaataagaatgccaagaagatttttctccccttcagaaccaaacaactctctccctatcatgacggggattttcataactgcatttattggagcggtactaaaagaaaaacatgtattgttaaaaatgatttctcaaatgctacgcataagaagagacgccacgctttaaaaaaattcatcaaagctggcggtgaagtccgatccgttgatgatttttccaatgctgaactttgcgatatttactgtgcgctcttcaaattgagatggggcaactccttgcaatgttattccaaggggggcttattggaggtgttcgaggaactgcgtcatttagtatatggatatgtattattaatgcaaggaactccttgtgcttatgaccttatttttaaagctcaatcaaagaaatggtatttctttgattgcattaatggtggatacgatcctgcatatacacatttgagtgttggtagcattcttatgtaccttaatattcaatgtgccagagatatatgtcaggctgataatgtcatgatgggattttcgcttgggatggataaccctaggtggaaatacaaacagcagtggtgtaataccttttccttagggcgctcgatattgatttaa

SEQ ID NO: 441085 - DNA, 630 bp, Serratia marcescens
atgttcgtgaccgatctgagcggaatgtcgttgcttgagatcattttatggccggccaagcagttgctgaaaattttgatctggctgctcaacggtttcaactggccttacgatcagcgcgacatgtacgggcagccgatgactatcaaatacgcacctaaaatgacgacctgttctttcgacaacgccggcttggcggtgaaactgccgacgctgggagtgtcccagataactcagggcacgcaaaatgggctgacgccttttacgctcaatttcagctgtcagagtcgacaaagcgacgggacgaccgatcgtgatatcaatatgtttttatccagcaataacctgctgtcatcggataattcagttttgattgacaagagtgctggggcggcgagaggtgtaggtattcgtctggtgaatgctaaaaaaccggatacgcccgttatgttagcgctttccaacacggtacaaggctcggcgacatcattatttcatgttggcgtcggtaatgcattggatgcgcaattttccatcggcatggcggcctattattatccttacgacaaggctaccgtgagcagcgggacgattaacacatctgccacgcttaatattgtatacaaataa

SEQ ID NO: 441086 - DNA, 408 bp, Serratia marcescens
atgaagaaacgttttcctgacaaacagatcatcagtgttctcggcgaggctgaagctgagggtatccgcccgttaactctgccgctgtttcacccggtggcacccaatttgtgctggtcaatttatttcgtcatggacgcgctggccaacggtcccaggatcaagtgcctgacctacgtggatgacttcacaaaggattgcctaactgtaaccgttgccttcaggatttcaggcgtgcaggtcacgcgtattttggacagcattgcgctgtttcgcggttacctggttacgataagaactgatcagggtccgaattcacctgccgcgcgttggagcaatgggcttttgagcatggggggagctgcgacttatccagttcagcaagacgacacagagcggatttattga

SEQ ID NO: 441087 - DNA, 552 bp, Serratia marcescens
atgcgcaacatcaaggagaactgtaagccagttatgagaaagattgccatctccagtcgttgtaattattttcttcacgggatgtcatgcattgcacatgatcgtgatgttttggcaagattattcaaaacccatgattacttagcgctttactcaatctttgacagcaatgctgagtttgatgatgtgtttttctatctgcgtacgaatatgagtcctgagttgaggttaatacataaattttcaactttacgctcgtcaccacgaatcattaccttggtggataatgcgcatgtgccaaccctgaaattgcttcgcgccatgggcgtggtttttattgtttcactgcgtgactcattgagtaatattggtaagcttctacatgaatcttcgatagttcgttatatgagtccggacttgtatgctgtcttcaaggcgattcaaccggcccgcgcttggcctgaggaatgggactcgttcgatggtattcaatattttacctctacggaaactgaaatcattctggatttacttcagggtatatcaccctag

SEQ ID NO: 441088 - DNA, 798 bp, Serratia marcescens
atgtcacaactctcttttgatgccctgttttccgtgcccgtcgatgcagtgcgcccggcggaaaagaacgtcagggctgatacggtcgaaccgtcaaaatctgccgaccctgtaccaggacggaaacggacaatcaccggcgatgatccgcgcaaggcgtttttgagtacgtttcgtgaaacggcgcgttatcaccatcgctacgaagtgttcagcgattttgtgaaactgacggcctgtgcgctggaaaatctgctgttaaagtcgccggacatcgaggcggagtatctggccaccatccagcgctatgaaaaagccgaccagcagcgcatggcgcagctgtattcgtggctgatcatcgggctggatcagggcatgggggattttctcggctcgctgtttatggagctggagctgggcagcggcaacatcggccagtttttcacaccgttccatctctccgaactgatggcgggactggtagccggtgatcggctggcggcgttggacaatgagccgtatatcacgctgtccgaaccgacctgcggcgcgggcgggatggtgatcgcgtttgccaaagtgatgctggcgcggggctataacccgcaaacgcagctgcgcgccgactgcgtggacatcgatccggtggcggcgcggatgtgttacatccagttgtcactgctgggtatcccggcgcgcgtggtgatcggcaacagcctgacactgacctatcagcgcgagatgtatacgccgttctggtatcgcgtgacgtccaagcgctggccgatgtatcgctaa

SEQ ID NO: 441089 - DNA, 327 bp, Serratia marcescens
atggtcgggcagggatgtgctgcttctgaacgacttgcctggcgaaacgatgcggcgctgggcgtccgggcgcgctgtcgtgctgcgcatggcgcctgcaatccgtttgatgccgtggcgcgattcgtgcgcgaaacccgcgcgcagggctgcacggtgtacgccgtggaacaggtcgagcctgtgcgccctgtttgcctgagcacaaccggctatcgctttgtgcaaaaaggcttcatctggctgtgtctcgataccggcgttttcgtcgacgtgtcagacgatggccgccagttgccttactacggcacgttgacccgcatttaa

SEQ ID NO: 441090 - DNA, 717 bp, Serratia marcescens
atgagtggaaccccacataacaacaaagtaacctatgacggcttcaactgtaacggcggtaagccgcccgaagccaataccagttggagccatgtaacaaatgcatgggaatggaacgacctgaaattaaatcccggctcgatatctgactggtttcctgaagaagtaaaagaagcactcgaaaataatatctgtatcatttgtggggaaaagaactgcccctatattaaaaataacagagactaccaaaatctcatcaattccctgaaaagtgggaacgtggaagaagcaaaaaaagtttatagaacaaagtttgcacaacttcggaaaatacacaaagcggaagtgatgaaaggactacaaaaggcccgcgatgcaagaaacaatggtgtttgtaccgtgccttataccggtccaattcaacataaacgcgccatcgctacgcctggtgtatggagtgagtggattgagttattaaattcctttgctaacgaaacctcccctaatgtttataccgtcagttttaatccttcgtcgaatatggagtcttcttttgatgtggagataaaatacccagaagctaatggaatgaaaaccattaacacaatggggcccggttcatatacaatcaaagccacagggatcggaaatacatacatcagggtaaaatcacactcaagccctgtgactgttacctttgaattccctgataaataa

SEQ ID NO: 441091 - DNA, 291 bp, Serratia marcescens
atgcaaccacaaaacgtcaacggcgcgacatcgaagcctacagcggcatccgcacagaccaacagtgctctgaccgtaccgcaggtgtatgacctgttttgctatgtgaaggcggtgtgcggtcgttcaaccggcaccattgaaccgccggtcgtaccggcaggtgcggaagaggtgttcgcggactttggggatttcgacaccatttcggtgtggatcgtcgggggctggccggtggctgccagcgatcagatgacgatgacccactggcgcatgaattcagggcaataa

SEQ ID NO: 441092 - DNA, 582 bp, Serratia marcescens
atgaatgttaaagcatggtcatttttaaaaagatttcagagcaagaacattgatagctttgttggcattagcgattacattcgggattttcattcgcaaaatggtttggtaggatttatagggcggttaactgaagacaaaggatttaataaattctgtgacattgcggaagagtttagcggaaaggatgaagtcaaattcattgcagcaggtcgctttaattcagataactctggaagaaagcttgagggcagagcgaaacaagccaatattaatgttctcggatttgtccctgtaacaacgtttttggagcaagtcgactttgtggttcttccgataaaatggcaagaaccatttggacgcgctgtcgtagaatgtgcaatgtcgggaaagattgtactcactaacttagttggtgggataagtgagttggaaagaatgttgcctaatatacacgaccttgataaggcaaatattaataatatcttttgcctaaaaccgagaggttttagtgagtcggaaaagtctatttttaataaacgtaggatcgcacaggcttattttaatatctatcagaagtaa

SEQ ID NO: 441093 - DNA, 381 bp, Serratia marcescens
atgccggttcgcctctatgacgccggcgtgccctgcgggtttccgtcgccggcgcaggactacctcgagcagcgcctgtcgctggacgacatctgcatccgtcacccggagagcacctacctggtgcgcgccgaggggcagtcgatgcaggacgccggtatcctcgacggcgacctgctggtcgtggagtgtttctaccgggcgcagcacggcgacatcgtcatcgccaccgtcgacggcgagttcacctgcaagcgcctgcagctgctgccccggccgatgctgttgccggccaatccggcctttgcgcccatccccctcggtgacgacatcgagaccgtgatcttcggcgtggtgcgccacgccattcacacgctgtaa

SEQ ID NO: 441094 - DNA, 372 bp, Serratia marcescens
atgaacacgcaaaacgtcaacaccgccaccagagaatcttccaaacgatgggcgggaaaataccccgacgcggaaagcatcatgatccgtcaactggcatttatggaggaattgcacggcgtttatttgtcttctgacgaactggcgcaatcgctgtatgaaatttttaacacgatgacggatcgggtggtgtttaacggcgtcgataactcgccgtccgataaaccgaaaattacgtatgccgtcgcgcaacattggattaaggcgcagcgtctggccggtgcctattttggcgagaccggcgtcgttgcctgggaacatgcgcgttatcggttgcaccttcagctggctatcaatcactcataccgttaa

SEQ ID NO: 441095 - DNA, 366 bp, Serratia marcescens
gtggcgctgctggcgtactgcgtcggcctgtcgctcgatgccgtgcagctgtggcctgcgaaggatggcaaagtcggcgatgccctgacgccgctcgagcacgcgctggacttcacgctgcgcgactggtggcaaccgaccaaggccaattacttcgggcggatcagcaaggagctgatgagcgatgcactacttgatgccgggaaggtggcacaggcagcctcggtgctcaagatgaagaagggcgacgctgcgcagctggccgaggacgagctgaccgccagctgctgggtgccggagtgcctgctgccggtggccgatgacatcaccactttacaggacgctgacaacagcgccgccgcctaa

SEQ ID NO: 441096 - DNA, 1815 bp, Serratia marcescens
atggcaggcggcgcagtgaccgagcccattgaccagataggcgccgcggttccactgcgcgctttgttgcggatcgggttgatattctccctggcgcaggaacagcgcgttccagcccgccatcagcggccgcaggttaaacgggaagcgcatctgattggccggattgctctggcgcaccgccggttgcgacatcagataagcgtacagcgcctgcatgtcgccgtcggtcattttactgaaggcggtgtaaggaaatgccggatagaggtggcggccgtcgcgggcgatgccctgacgcatcgcccgatcgaatgcggtaaacgaccagttgccgatgccggttgccacgtccggggtaatgttggtgctgtagagcgtgccgaacggcgtcgccatcgccaacccgccggcgttggtcgccccttccgacgcggtatggcaaaccgcgcagtctccggcggcggccaattgacggccgcgctccagcgtggcggccgaccaggtgccggcgccgggcgtcgccaccggcgcgatctccgcccgccacggcaaggcgctgccggcgatgcccagcaccgcgccgaacagccccgccgcgccgccgaaccaccatttgccgcgcttctttttcttgggcggcgcggcctgccgctcggcgtccggcccgttcagcgcctctcgcagcttgtccgaggtgatcggcagctcgcgaaaacgaatgccggtggcgtcgaacaccgcgttggcgatggccgccgcgctgggcaccgacgccgactccccggcgcccagcggcggatcgtaagggcgcggcatcatcaccacgtccacctccggcacctccgggaaggtcaggatcgggtaagccccccactctttggcggagaccgtcgattcctcaaaggtcacgcgctctttcaatacccggctggtcgattgcaatacgttgccgtgaatttggtggcgcacgccgtccgggttaaccatcatgcccgcgtcgtggccgaccacgatgcgcgttaccgccacttcgccgctggctttgtcgatcgccacgtcggccacccaggcggcccaggccgcgccaaagccaggaaacttgctgtggatgtaacgggcgtaggcaaagccgcgcccgcgcagcacgccgtcttccgccggggtctgcatcggttcggtatgcggcgtccagccggcgcgttctgcggtgctgcgcatcagttcactggcgcgttcatcatggatgtagcgcagccgatactccagcggatcgacgccggcggcgtgggccagctcatcgatataagactcgtgggcgaaggtgttgggcaaggcggaaacgccgcgcatccaggaggcgcgcacgatcggcgccatgtcctcgatgctgacgcgcagcgccggatactcataaggcggcaccgaggtgcggtcgcccatttcataggccacaggcagcggctcgactcggccggtcagcaacagcgccagcgtcggcgcgccgttggaaggataataggtgcgaaaatcgtaggcgaccgggtgcccggcggcgtccagcccgccgtccacctccatcagctgcgccgtgcccttcggttcccacacatgctcttgctcgcgggtcagctgcacccgcaccggccggcccaccgcgcgcgacagcagcgccgcgtcggcgcagacgtcatcggcgcaattgcggccatagcagccggccgcctccatgcgaacgatctcgatctgcgcttccgggtactccagcagccaggccagatcggcgcgcagcaggtgcgggttctggctgcctga

SEQ ID NO: 441097 - DNA, 1212 bp, Serratia marcescens
atgcgaaactcctttggttttatgttctacctcgccggcctgagcatgctgggttatctggcgaccgatatgtacctgcccgccttcggcgccatgcgggaggaactgcaaatttccgccggcgcggtcagcgccagcctgagcatctttctggccggcttcgccttcgcgcagttgctgtgggggccgctctccgaccgactgggccgcaaaccggtattattgattggcctgtcgctgttcgcgctcggctgcctgggcatgctgtgggtggaaaatgccgtgcagctctggatactgcgctttattcaggccgtcggcgtctgttccgccgccgccatctggcaagcgctggtggtcgaccgctaccgcgaaggccaggccaaccgcgtattcgccaccatcatgccgctggtggcgctgtcgccggcgttggcgccgctgcttggcgcctggctgctgaaccacgccagctggcgcgcgatcttcgccgtgctgttggccatcaccgccctgctgctgctgccgacgttgctgctcaaagatcgcgccaaaacgcaacccgccgccgatgcgccaaaaagcggcgtcagtttttggcaattattgaaatccccggtgttcagcggcaacgtcgctatgtacgccgcctgctcggccggcttctttgcctggctgaccggctcgccgttcatcctcggtgatatgggctacggcccgagcgacatcggtctgagctatgtgccgcagacgctggctttcctgttggggggctatggctgccgcgccgcgctcaagcgcatcaatggcaaaaccctgctgccgtggctgctggtagcttatgctgtcagcatggtggccctgtatctggtggcgaccctgaccaatccgacgctcaccacgctgctgatcccgttctgcgtcatggcgctggtcaacggcgccggctacccgatcatggtggcgaatgcgctgatgccattcccggaaagcagcggtaaagccgccgcgctgcaaaatacgctgcaattggggctgtgttttgtggcgagcatgctggtgtcggcgtttattgcccagccgctgttggcaacggtgacggtgatggtatctacggtagtcctggccgcgctgggttatttcctgcagcggggaaaagcggccgatgcgcagcaaaaggcacagcgggaacatgctaactcagcgtcataa

SEQ ID NO: 441098 - DNA, 357 bp, Serratia marcescens
atgccggaaatgaataatttcatacaagtcccatttcgtgttgatggttggaattcaaacgcattattgaaggagcttaacgaggcggggtttgaaacgcaaattacaaggcggcacttcagcgcgggctctaccggcggtgactttttcaaccttgcgcttgaacttgcaccttatgcttttgggttactctcttctgttttagttgcgtatgtaacaagagggaagaaggtgaaaatcagctttaaagatgggcgcgttacagagcttgaaacaaactattgcagcgtcaaggaagtgaccaaacttttagagtcgatagaatctgtgagacagattgacgtttcgaacaactga

SEQ ID NO: 441099 - DNA, 999 bp, Serratia marcescens
atgacgaaccataatcagatgagtcaaatttattctaaattcggcagggccgggtttaatctctcttacatccgcaggttgttgcctgattggtgggatgagaagcttgctgaaaccccatcagggcgccaatatgcgtacctgcatctcgcacgtatgtttagcattctccctgatagtctgaaagatggcagtgatggcgtatgtttcaattttggtggcaaccataaatacaaacatcgacaaaatgtagccgagaacgatttagatattgcgactgctgttgcctatactgcggctggcattgtcacatctaatttcaaaactccttacgatgctagtgccgtgctggatcctttggcgataagagcaaaaatccttgctaaggaatcatgggtatcgcttgatagtttggtatcgtactgccattcaattggtattcctgttgtttttctaaaatccttccctcaagcggccaagaaaatggccggactggcgctaatgagccacgggcgcccggtgatagttcttactcaaccgcagaagtatggctatatgctgttcgaccttgcgcatgagttaggccacatcgccagaggtcatctgaacgcagaaaacgggcaatgtcatgttgatgcaaaaattgaaaatgcttcgactgacaacatagagaaagaagccaacgaatttgccttcctggttatttcgggacagaagtctttgcgtatcgttcctacagctggccggttgaatggggctagtctggctcgggcggctcaaaaatatggtagtgacaatcacattgaccctactcacatcgccttaaattatggtttcgctcagaactgctggggcgctgctgttaacgcggttaaatcgctctgtgctggtaaagaatcagatcaggactttgtgagggccatgatgaaaagcgggatggatttagaaaatatccacgaagatgatcttaaggttttagaaaatctaatcggggagtga

SEQ ID NO: 441100 - DNA, 639 bp, Serratia marcescens
gtgattgttctttctgacaatgatgtcattttaaagctggcacagtgcaatctgttgccacagctgccagtagtttttaatcaaccccccgaacagatctttattaaccccgcagcccgttttcagctacttccgcaaaatcctgataaggcaatcaggaaatgtggtagccaggttgtttatgagcaactgggagcattcatcgggtctgtacaggatatccctgaagtccaagattcccagctaatcgagcttctagggagtgtgcctggaattgatgtaggcgaacagctactacttgcatcgtgcatagagaatcccgaggcaatcttcatgacaggagatcgccgctgtttgactgcaatcgttgccaatcaaccagcacttgctgttgttcatcagcgtttattggatgcagtggttacatttgagtcatcacttctattatgtgttcacggcacagatcaggcccaggtttatgctaatttggtgagcaaccctaagcctgacggtatgctgaagctggctctttccaacgctggcgctgctatgtgtgaatgtattttttcccacacacgtgagttttatgattaccttgctttcaaagaccgacttcctgaaagggaatggggaaggtaa

SEQ ID NO: 441101 - DNA, 612 bp, Serratia marcescens
atgaataacaccctactccccccgtccgccggcgcctggatgcgccacaccgaaaccgtcactgcgcggctgtcggcaatcactgtcgcgctgcgcacgctctggacgccgaccgcctgcccggtagagttgttgccgtatctcgcctgggcgctgtcggttgaccgctgggataagaactggccggcagagaagaagatagcggcgatccagcaatcctactggattcaccgtcgtaagggcacccgcgccgcggtgcggcgggtgattgagagcatgggattttcggccacctttgccgaatggttcgacgccggcgatcggccaggaacctttcggcttgaaattgacgttcgggatgtaggattaacagaaaaaacgctggctgaactaaatcgtctaatttctgatgccaaaccggttagccgacatcttgcacagctgaatatcgcagtaaaagtcagcggttttatttatgccgctactgctgtgcatgatggaaacatcataactgtttatccagataggtatctccctgaatcagacgttacttacaacggcagtattaaatacatcggtaatcacacctacagtgggaaaaactatgggtaa

SEQ ID NO: 441102 - DNA, 2307 bp, Serratia marcescens
atgggtaatttaaataatcgttcattgtggacggaaaatatctatcaaatcgaagatagcgatttggtcaagggaggagaaagcggcgtaggaaatatccaggcatcgcaattagccgccagaactacctacctaaaaaatctgtttgaaacactgatgtctatggtatccctcggcgaaagtccatactccagtgttgagaaggcacaggccgcaatcgatagtgggaagatcccccttgatgcagttttcagtgttctgtcagcagacaatgaaaaagccgtagagctatataaaaatgagaacggtatagctacgccgaccggtgacagttacgccagcctggcttttgttgaagtgctgtcttcagctcttgattttctcaatgcccgtattccgcgtcaattgggcgcaaatttggccggctaccagttcatgataactgacagtacaggtattaagggcttatttggtattgatgatgacgggggcctcgtcgcaaccgggttagatgaaccaatgcaggattatctgcgcaatatggtctcaacgtcattttctaaccgaattgcgggctatcaggttgttatttttgcacaggatatgaaaaacgccctgttcgccattgatgacgatggcggcgcatggctaccgggcatggatgagccagtacaaaattacctcacacccatccagccggccggtttcagtagccgcattgagggataccagttcgtgctgttcgcaaaggccctcagtgatgcgattcttgcgattgataatgatggcgggctgtggttgccgggaatgaatgaacctgtgcaagacgctctcagcgcgagcgggccggggctggtgcgtccgcataatggtattcccgccctctttgcagacaaaacagctgaaacgccagtatgggatcgcgcccccgtggtaagcgcaacgcccatcacccgcgacggtgtcagcttcatctttcaggaaaatgcggttctgcgcgccggattgttccccctgagatatcccgttaatcagggttaccctatccgggaattgccgttaaaaccggcagaaatacacgcattgtacggccgggggcaatcgctgcgcgtgggacaggatgccagattgtccgatttcgatcccgagtatgcggggcacctgctcatgttttccggtgcggggcaagatcggggctgtcaatggccgccagatggtccggtaacagacacgaccctgggcggatttaccgacgcgcagcccctgccgtatagacaaaactgccaggtgcctggcgctctgcatgtgctgcgccgccataaaaaacgcggcatcgctgtagacgacatgccaatccttctgacgcgtatggatgcaaaatcaggaaccggctacgagggattgaagaaaggcacgttgccgtatcttgatgggctgacgtcctgccaggctttcacaaatcgcgccatcgccgtggggaaaatccctattgtcaaatgcgttggctatacatttggtgaacacgactccgcactcgtttccgaatttgggcaattcagggccatgcaggatgagtggattaatgacactcaggccgacctgatgaaaattaccggccaggcctcgcgcattctgattgacctcgatcagataggttcggtgatggtggtgccacggccgggccagtcaacgctgcggggcgacattatcgctatcgatcagtgggaattatcgttagcgcgcttggatgtattcatgagcacccccaaatatcatttgaaccgccagtttgccagcgatttccagcacctgaacggattgggatattgcatcctgggtgagtatcagggacaggcagaggactttacattgtatgaccgcctcaccaacccacaggggcgcaagtggcgaccggtagagccggaatcaattgttgccatcaatgaaaacacctttgatgtcacactcaatagcccgctcggcggtgcgctgcgcatcaatacggatatcggcactgcacccaatctgggtatcgatctcagcctcaaatcaacagaggtaaacagtgtccagcaaaattcggatcgggtatttcgtattgtcaccaacgggccaccggccgcaggtgattatttcaggttcgggtttaatgcaatcgacaacaaagatttcaatggcatcaattggacgcatccattggtcaacatcagcgatgaatccaatatcctgagcgattacaaaaagggattcaaattaacaaactggtgcgtactgtcacgcattgcagttccagcagaaagagggtaa

SEQ ID NO: 441103 - DNA, 903 bp, Serratia marcescens
atggcatcactggcgatggatacgggtaagctgtacgacggtttacgcagttctattaatttggctggcgccctgttgaagccggccgaaatattcgacaagcataaaaaacgcgtaattgacgatggcggaattatcctcaatgaggcgtcactcatggatgaaatcaactttttggttgaaaatgatgcctggacaaatatggcgtcgtttgcagcacctgagtgggggataaaaaagaacgccgacgggaacgtgattaaaatgtacgggctgggagatacccccgattatgaggcggtagtcgcaggcacaacggtgaacccaatcacgctcgacactgcacgcgaaatccccgttctgaacattaagttgcaaaacggcgggacatatttacgcaccgcccgaatgttgccgatccagaaaacgcgaaatgcacagtacctgatggccgtgcgtgcattagatctcgatctgaatgacaacacaggcatcgccgtgtcgttcatcaattcaagttttcctgccatctatttttggtcggtaagtcgtcaagcccagaaatactcatggttttatgcctgtgataagtttaatccgccgaccggcgccggcggcgcgaatgtttcacgtgcgccattcgacggcaccatcacccgcaccgctgcgctggttgatgttgtgggtgagcgtatgcgtgggtacgaaaacggcacgttgtatcaagaggatcttaaaacgccgccgccgaatatttcgggcgtaatgggttatttgcaagtcgccggccgatatcccagcgatctcacatcatcagacggcgcgtacgggtgtattggccgcattcgagtactctcgcaggccactgaagacctggcaaaactgatttcacagcgagcgtaa

SEQ ID NO: 441104 - DNA, 1035 bp, Serratia marcescens
atgggcaagttcttcagcatcataaccaaccgcggcgcggagaaaatcgccgcggccgcagccatcggagaaaagctctcgataaccgtgatggcggtcggggacggattgggaacactaccgcaaccgcacccggagcaaacgcagttgctgaacgagcgctatcgcgctgacatcaactcactcaacatcagcaatgccgatcagcgtgttattgctgttgatatggtgatacccgcgaatattggcggatggtggatgcgcgagatcggcgtatatgacaatgatggtgatcttatcgccgttgcgaatatgccggagacgtataaaccgctgcttgatgagggatcgggccggttacagattatacgcatggagttgatggttagcagtacggcagatgttgagctaatcgttgaccccgacgtcataatagcaccagtgacttatgtcgataataagttcaatgaggcaaaaggccgtgcagacgacgcctacgcgctggcggaaaataaagccgcgttcgatgacatttacccgccggggatcagtatcttctttgcgactaacctgaaccctaacgaaaagtggcccggcaccacatggcactataccggcgagaataaaacgatccgcattggcaaggccgatggttcagacgtcggcgctgagggcggcagcgatacggtgaacattacgcgcgccaacttgccgcaatcggtgctgaatgtgtcgggaagcacaaacgaacaaggggcgcaaacgctgcaaacaacgccagcgggtaggcacaggcaccaagggggaatgtccgcgcctggtgagacgtgggacgacgattatattgtcggatccgacaatgacagccgaagaacgcgcaactacaccagcgaggctgaagaccatacccacgaggccaccgtaccgccacactctcacaccgtttgggcgcaaaccgaggcactcggccagggacaagctatcaacgtcgttgaaagccacatcaagctgatgtgctggtatcgagccgcataa

SEQ ID NO: 441105 - DNA, 2976 bp, Serratia marcescens
atggatcttagtattcgcgtcgcgttcaacgcgatcgacaagctcacccgcccggttaaagccgctagcaaagctgttagcggcctttctgactccctcaagaaaacgcaaaacgccgttaaagacctggacaagcaagccgccagctttgaccgtttaagcgcgcaagtcagcaacacagcaaagaagattaacagtgcgaaacgcgacataagcgggcttaatcaggttgtgcgcgagggagggcaactgaccgacgcccaggccgcgcacctggaaaacctgcgcggcaagctcacccgactgacgcaaacctacagccagcaaacggccaagctgcgagaggcggcccaggcggtgcgacagcatggcgtcaacctgtccgccggcagcggtgcggtgcaaagtgccatccggcggacagagcaatataaccagcagcttgagcgggagcggcgacagctggccgccgttacccaggcacaagccggctacacccgcgccaaagatgccgccggcaaactgcgcggcgccggcatggggatggttgccgtggcatcggttgctggttatgcggaagggcgcttcttatcccctgccgttggttttgaccaggatatgtcacgggtacaggcgttaacccgtattgacagcaaagatccgcgttttactcaactgcgtgaacaagcaaaaaaactcggagctgaaacagcattctccggccgggatgctgccagcggccaggcgttcctggcgatggccggttttactcctgaagctatccaagccgcattacccggcattttgaatgtcgcaattgccgggggtgctcttactggtgacatttcactcggtgaaaccgcggatatcggcgccagtatcctcaaccaattcaaattgaactctgccgatatggatagggttggtgatgtgttggccggtacttttacccgaagcagcactaacctgcgcgatctcggcgacacgatgaaatataccggctcggtcggtgccaaccttggcgttgggctggagcaggtagccgcaatggctggattgttggctaacaatggcattagggggtctgatgcgggtactgctttgcgtgccagtttatcccgcttggcatcgccgccaaaagcggctgcgaaagcgctcaacgagttaggggtgtctgttgctgactccaaaggcaaaatgcatgacgcaatgacaattctgaccgatctctataaagccacccgtaaatacggggaagttgaccgagttgggttctttaaggacattgctggggaagaagcttataactcgctcatgaccttggttaacggggctggcagcggtgatctgcaaaagttactggcagagattggcacagcacacggtaacaatgagtcgtttaaggttgctaaaacgatgtctaacaaccttggcggtgatctgtctaaccttggcagtgcgtgggaaggcctgcaaattgagatttccgacaccgttaaggggccgcttcgcgaattggtacagtggttcgatgatgttatttctcgtatttcagtttgggtgaaagaaaacccacggctggcgcaatccattctgttgactgccggcgccgtcaccgccctggtggccgcgttggggatcgccagcctggcgaccggcctgcttattgggccgctggctaagctgcgtttgggcttcacgttgctgacgggcgggcgcggtctgatgggaaccgttagcgcactgcggggcttcgttggcgccggcggcaacgccatggcgagggtcagcggttggtcgcgcgtgttgacttcgctctctggtggtgtccgtgggctgcagggctcgctggcgacgctgcgcagtatgctgatgggcgtatttatggcgccgtcggcagcgctgggttcattggtgcgtggcgtgatggggctggcgctacggctgacgggcctgtctacgctatgggggattctcaccggcgcgctttcggcgctgggtgctgtgctgtcgttcctgctgagtccgatcgggttgattggcgccgcctttgtcgcggccggcgtactgatttggaaatattgggagccgatcaaggcgttctttgtcggctttggttcaggcgtcatggcggcgctggcgccgctgcgtgaagcgtttgcacgtatcgcaccgatctttggtgtgattggtgatgcactcagcagcgtgtgggactggtttaccaagctgctgacgccgatgcagaccagcaaagacacgctggacaaatgcgccagcgccggcgagacattcgggcgggtgtttggtgctgctctgcagctgttgtttgcgccaattacatttctgatggactcagtcggttggctgcttgagaagctggggttgatccccgatggtatcgagcaagcccgcattaaagccgaaaagatgaagttggagcttaccccggaagggcagcagcggttgggtggcaaggtagggttactggctggtgatcttgcgagtattaccaaacctgcttcagtcagcactgatgcgcctaaacctcctgccctgacaggtgacacaggcacgctacgccgcctgaacgagatcgccggcaacaccaaggcgaccgcagacaataccaacgtcaccaaacgcatcgggccgggggatatcgtcttcaaaaatctgccgcgcgcgctggcactgcgtggggcgtaccaggaagcgcgggtgatgccgcaaccggtgccgcgtgtggcggccgctgccggcggcggggtgctctcggtgccgtcggcgtcacagccggccgcgatggcgcccgtgtccgcgcctggcggcggtggccccatcttccagttgttctttaacgacgtcggccagcgttcggatcaggagctcgaacggatggtgcgcagcgcggtgcgcgatgcgatggccagcacagtcaggggtaaccgcgggtcattccgcgatcgagattaa

SEQ ID NO: 441106 - DNA, 390 bp, Serratia marcescens
  misc_feature (371)..(380): n is a, c, g, or t
atgaaaagctcggcgttaattgttacattcaatcgcctggaaaaattgaaacaatgttgggcgacaacctctgcgttgccgtttgaagagattatcattgttgataatgcatcgaccgacgaaactcagccgtggctgaatagcatcgaagatagccgtttgcacgtcatacgcgctacgcaaaacgatggtggtgcaggtggtttcaggctcggtgcagagtatattgcgagcaagatagataccgactgggtgtttatgttcgatgacgatgcctatcctgatagcgcattgctgacgcgtttttgcgatttggcgcaacggttcgactatgcggcctactgtagtcgggtactggacaagcaaggggnnnnnnnnnntgcaaaatga

SEQ ID NO: 441107 - DNA, 309 bp, Serratia marcescens
gtgtggtcatgggataccacctggctgaagtcgctgacgacgggtcactggttttacctgtatctgatagaagacgtgttcagccgcaaaatcgtgggttacgaagtgcatcgggtggaaagcggcgactatgcggcagagctgctgaaacggacggtgctgagtgagcgctgctggcaggagccgctggtgctgcatgcagataaaggtgcgccaatgaagtcgcaggtgctgcaggtgaagcttgcggagctgaagataacggcgtctgtcaacgccacgatatttggccgcttctcaccattttaa

SEQ ID NO: 441108 - DNA, 489 bp, Serratia marcescens
atggagtcccggctgaagcaagcccggctcccctgggtgaaaacgctgaagcagttcgacttcagcttccagccgggcatcgaccgtaaggtggtgagagagcttgccggcctggcgttcgtagagcgaagcgaaaacgtgatcctgcagggccccccgggcgtgggtaaaacgcatctggcggtggcgctgggcgtaaaggcagccgatgcagggcatcgggtcctgttcatgccgctgaatcggcgttacgagaaggcaagcatcatcctgacctcgaacaaggggttcgctgactggggagagatgttcggcgacaacgtgctagccacggcgatcctggacaggttactgcatcactcaacgacgctgaatatcaagggggagagctaccggctaagagagaaacgaaaagctggcgtgctgagcaagaagctggcgccagaaaacaacgaggtatcgctggagaaaatcggtcaacctggttaa

SEQ ID NO: 441109 - DNA, 552 bp, Serratia marcescens
atgggaaaagttgtatatgaagatgacaacaagcttctggcggctttggcacgagcaatggttgagcgccccaaagccaacttgcatgagttagcaaaggctgtaggaattagtaaagcaaccctatatcgattctgcaagacacgcgagcttttaatagagagattgctacagagtgcaaatcatgcgattagtaaagctattcatgatgccggtttggatgatgaatcaccgcttgaagcgcttaggagactatctaatggcgttataaataatcaagagtttatgatgtttttgctgtacaactgggaccctgataggccaatgggaattgaatctccaacagattggtattcagcgttggacggtttttttctgcgagggcaacagttgggggtttttcgtattgatattgccgcggctgcgatgagtgagttttggttttccatactgattgggcttcaggatgctgagcgtcgcgggcgtgtcgcgagaatggggctatccacgcttgtggaatcggtattcttacagggtgttgctagggtataa

SEQ ID NO: 441110 - DNA, 714 bp, Serratia marcescens
atgataaatgcaatcaaaaagaccacctgcgtactcgcagtgctcgccgccacctctactgccgtcatggccgagagcattgatgtgaaagtcatcggtaccattaccccgacggcttgcaaaccaacgctgggcgggggcgggaccatcgactacggcaatattgcgcctgcgtctcttagtaataccacttttactgttctgggtgaaaagcaggttgattttagtattacctgcgacgctccagccaaggtagccattcacgccgttggctcgaaagccgatactgcaacagatgtaactaaatcaactgctggtgactacgatatatttgctggaactctctttggaacaccagcgcttggtgtggcaggcctgggggcatcagacggtaaaaatatcggagggtatggcatccgattggtacctggaacctacactgtggacggtaataatgcagataccattacgcgcagcgcaattaccggtgtttgggtcccctctgccaatctcggggcaggtagcttatttagcacaatttacaaagaattgcaaatttcttgggctccaaaaggtacgcttaccccaatggctttcactaccgtcgctggcaaactgggggtccaggcctacatcaccaaaacctccgagcttgacctctccaagcccatcaatctcgacggcttgaccagcctggaattggtctacctgtaa

SEQ ID NO: 441111 - DNA, 708 bp, Serratia marcescens
atgaatctttctgtcttttgcactgcgaccgtcgttgctctgtggctgctttctgcgggtgtccaggcctcgggcatgctgcccgagacgtcggtcgttatcgttgaggaagaagatggagaaggcgcaatcaacctgcaaaacaccgataactttcccgtcctgctgctgactagtttgcagaatatcgaacaggacaccgaaaaactgttggccgtgacgccgccggttgcccgcgtcgaacccggcaagacccagcgtgtacgctttatgctgactaccaaagctccgctaaaaacagagcgcctcaagcgcgtggtgtttgaaggggtgccgccgcaggagaaaaacaagaacgtagtacgcatgacggtgcggcagaacctgccggtcattattcgcccagccaacctgacccgcgatgaagcgccctggaaacgcctgatatggtcgctcaaggccggagtcttgagcgtcagcaattcatctccgtatgtcgtgcgtctggggcaggaggtgaccacgctgcctgacaagaggatctggttgttgccaaacgcttatgtactgcctggccagcaattgatgctgacccagcagacgaagttcggtgataccagcgccgaaacggccagtaaagtacgcatctccccggccaccacttggggttttaccgttgacagctatgaagcgccgctggcgccgtaa

SEQ ID NO: 441112 - DNA, 597 bp, Serratia marcescens
atgaacgtgttttgtggacggtggttactggccctgttgatgggcgtcacaggcgtcagtgctgccgaccccatgccccccggcctggaatcaagcccgatgccgacattgccgctggatacgcactgcagtttattggtcagcaatccagtggtcgattacgggatgatgtcgcgctggcagatggaagacatggaggcaggaaatgtgtctccgggtacgcgctcactgatggtgagcgtggtctgcccctattcccggacgatgagattacgggtcgaaggcgagggcagtgaactgggcggactgcgttacggtgagcgtggagctacccgcctgcggctgctggatgcgcagctggacggcaatgcggtggagctgcgcacaataacgcctgccgatgtcattacggagagcggggggcacatactggctttgaacacagggcagcggttggcgccggttatacagggaaggctggcggaaggcaaggcactgacggtacggctggaaatacaaccggtgctggcggaaggagatgcacgtgtcggcagccagcagcgcagtgaaacgatgtttacgttgacactagagtaa

SEQ ID NO: 441113 - DNA, 636 bp, Serratia marcescens
atgagaaaagttgccatctttagtcaatgcaattttatcctgcaaggaatgtcttgcattgcgcgtgaacgcgagtctctgagttttttattaatgacacatcatcatttaacgccgcattccgcatttacccgtcatgttgagttggacgatttgtttgtacatgtgcaatcaggtagggttggggaactacgattaatacagaaattaatcatgttgagctcaccaccacgcgtcatcgttatggtggacaatgcgcatgtacctactctgaaattgcttcgcgccatgggggttatttttatcatttcgctgcgtgacgcattgagtaatattggcaatatcttgcaggactcttcgagagtcaattatatgagcgtggagttgcatgctgtgattaaggccattccttcggcacccgcctgggctacggaaaggggcgcgttcgatgaggttcagtatttaacccctatggaaacggaaataactttggatttacttcagggtctatcgcctaggcaggtggcaataaaaaggtttatttcagtaaaaactgtcagtacgcacaagcttaatgcactgaaaaaaatggaactcggggggatcaatgaattttttatcacgcatcgacgttaa

SEQ ID NO: 441114 - DNA, 447 bp, Serratia marcescens
gtggcgttcatcatcgacgtgttcgccggtgccatcgtggtctggcgggtgtcgtcgtcgatggagacgaccttcgtgctggatgcactggagcaggcgctgtgggcccgccgttcgtccggcaccatccatcactcggataaagactcgcagtacgtctcgctggcgtacacacaacgactgcaggaagcggagttactggcgtcaacgggcagcacaggtgactcttatgataacgccatggccgaaagcataaacgctctttacaaagcggaggtgatacaccggcagagctggaaaaaccggcaggaagtggagctggcgacactggcatgggtggagtggtacaacaatcgtcggctgcttgagcgactcggtcatattccaccagttgaagcagaaaaagcgtattacacttccatcgggaacaaggagctggcagcctga

SEQ ID NO: 441115 - DNA, 585 bp, Serratia marcescens
atgcagactctgaaatatgccgctatggttgaggccatgaaggccattgacgagccagtgatcattgttgtgggtagctttgtgggtgaggtgcgcgaagtcggcgcacgtctggctattgatgcaggcattacaccttattacccgagtcttagcttcagcccgtcatctgcaatgatagagcgtaagcgcaaggagctgatcagtaagggtgggaagcctgtaatgttcgttgatcaatatcctctggctgtccattgggagcgcggcttcaaaggattctcacttactgatgatgccgaggaggttgctgttgctgagatccaggcacagaatgtgtacattcgagctgctcccaataaaaaagagcgccagcgccgctgcgatgaaatgatgggtaaatcattgatacaactgaacaatttattcagcgctagcaaagaagcgttgattgagattgagcagaaggcggtagaactggaagcctccggaaataaagagcagcagcaagcctttctagaagaattgaaggaagaaacatttatgcagcgtgtatcacggcgtatttttggcgataagaagtag

SEQ ID NO: 441116 - DNA, 1812 bp, Serratia marcescens
atgagactacagcagtttaacgttaagaattacaaatctataaaagatgaaatagaagtatatatcgatgacatagttgttttaataggcccaaataattccgggaaatcaacaatattggatgcatatgaaaaatttgcatcattaggctcttcaaaaggtctgacggcccatgatttttataattcagacacatcaataccaattgaaatgtgcggaattttcacggatattactgaggctgatattcgtacactagggggcgaaaagtggttttataacgatgatgctctggatagaaggaatatggctaggaagtatggaggggattgggaggtaaaacaaatacctctggaaattaaactttattattgcgttaaatggatttggttcgaccctgaaaaatcagcacaaaaacaatcttatgggcttgatgaagattcggggaaacgtgtgttttctgatggtggctccggtggcttagatactttgctacaaagtcgagttcctcagccaataagaataagtccagataaatccatggatgaaacaaaaaaaataatcataagtttcttaaaggaagatgcgaaagatgaattattaaaaacaggggaaagcaaagcagaaataatacaaaaaatacaagatttgaccgatactctcatgaaggattctaaatcaaaaatagatggccttctaaaacaagtctctgaatcgtcatcatcggtttttcctgggctcgaactggagttaaacatactgtccaaagaccccgtagatgcagaggttatggtttcagattctaaccttactgtaaaaatggatggggtaagcagctctcttctggagaaccaaggtcacggcgttcgtcgctctgttttatggtctgctttgcaaatattgactcacgagtctcatatacgagataaaataaaaaaagccaaaggtaaagcagttaccattgagaaaaaacaatacatactcttaattgatgagccagagtcattccttcaccccccagtaattagagatgctagagagtcgctctataatttcgcatcgcaaaatgaaaattggcaggtgatggctactacacactcccctgtgtttatagatctatctaaaaagcacaccactataattagaatagaaaaagataagtctttaaacaaaacaatatctacggatgaattgtcgttttctgatgaggaaaacgataatatgaaaatgatcagattgtgcaatccaatggtcaatgagtttttcttttacgataatataatattagttgaaggccctactgaaaaaattgttataagcaaaatatgtgaggtggttggggttaattatcatataattgattgtttaggtaagggcaatataaagacctttgctagaatattaaatcatttcgatgttaactatatagtagtacacgattctgatataccaaaatgtataaaaaaaggcaacgtttcaggtaatggggcatggggtacaaacgtggccataatgaacgagtgtgttaaaagtaaaaagccaatggtgtttatacaaataccacatttcgaaggaatgttttttggtgatttcaacccatcaaataaagttgaaactgttatctcaattctttctgatagttcgtcgtctgaatacggggccatttttgacacatatagcaaagtcttgaatagagagccatcaattttcatcaagtctaacgaagaaatggtgaacaagtaccacgcattttatgctagcaacaaagctcacattgaggcgctaaagaatcctgaaatctggaccctatag

SEQ ID NO: 441117 - DNA, 822 bp, Serratia marcescens
atgactattgatacgaattatatcaaagatattgttattcccacgctaacgttattatctcctgtttttatttcagtggtaaaatggtggtattcacgcgggtcaaagaattacgacagtcgccgcaataaccagtttgatcgagtcagcgatgttaaacgtcagtctgttctgtcacgcattcaggggttgcgggatgggccgcagaatggaatggtgccgctgcgaaccaaagcactctatgaaagtatcggcatccgtttaccggtctgggtggcgcaccaactggtagattatctgggccgcgcgccagtggcattgagcgatcttgcgctgaactgtttcttgcgccgcacctccctcacttcgaacaaaaacgacgttttttccttggatggctgccggctgctacaccagcgtgtttcgctgtttgtgttcctaatcattagcgcgttggctatcacgtggggattctacatcaccgtgtttccattgtcggaaagcggaggcagcgcgacagataacagcccattgtggggagtattcttcttctttgcctatctgttgatggcgattttcgtcgtggcctggtcgattaatgaatgggagtccctgcgacatgctgaggctttctggctgaagtggcagccccacctgtatcaaaacgaagcggagtatcaggcgcattgtcagcatgcgcgcaatgttgcggcacaggaaaacgtgccggatatcgctttggagaccgttgacgatttgtcaccggccgaaaagccactgcgtggatggctgatgcgtaggctgggcaagaaaaataattaa

SEQ ID NO: 441118 - DNA, 2406 bp, Serratia marcescens
atgcctatagatataaaacaattagttcatgatataactccggaaaaaacagttttatttttcggcgcaggatcatccataccatctagagcccccagcgtggatgggataataaaaaaactagcaggaagattcaaagaagattctaatggatatagtctcagagagtttaccagcatattagaaacaaaatatacaagactcgagatgataactgagctaaggaagctatttgaagatctcaaacccactggaggcatactaaatacgcctctatatgattggaagtcaatatacacaacaaactacgacgaattaatagaacagacttacaactcatctcaaaaaagaataagagtcatttcttcaaacttcgacttttctaataccggcagtgctgacagtctaaaatactttaaattacacggaaccatagacaaagacatcgttgacggaactcaatctcgaataatcataagtgacggtgattacgaccaaaccgtagaatatagagagaaactttgggatagatttaaaaatgacattggtgactctcacttaataatcatagggcattcacttgcagacgcacacattaaagagctaattgaaaaaacagctagtataaatgctatttccggcgttggtaaggtatcattattcctttacaatagagatgataacagagccatgctttatgagagaagaggtttcaaggtatgctttggtggaattgatgatttttttgccgaattagctgctgcgaaacctcaagtagggccacaaaggaatgatcaagattatttctataatactatacaattacgtgcaacaacccaggatgtcaatcacttaatgtctggagatggcgatgcaattgccatgtttaatggttggccagccctatactctgatattaaatccgggctaacatttgagcgagatattatcagccttagcgatgagttaattaactcatcggacattacatcactcatcattctaggggcgagtggtgtaggaaagacaaccgcagccaggcaaatgctcgttagatgcatagataaaggtataatatgctgggaacataaaaacgatttcaatttagaagcattagcgtggttggatgtaagtaaggagcttttaaaaaatgataagttaggcgtattgtttatagatgaggctcactctcaactaaatgcaattaacgagttaattgacagactacgctcagacaatattttcagtttaaaaataatttgcgcctcatctaagaacctatggaatccgcgcattaaaaccccaaacatatataaacatggcaaagatgtaagtctttcacaattgtcaagtgaagaaatagaccgacttcttttcctaatcgaaaacaacccaactatgagggggttaactgaagaaaacttcagtggtttttctaggccagaaagaaagaggcggctagcggtcagatgtgagtctgatatgtttgtttgtttgaagaatatattcgcctcagagaaatttgatgatattatcttacgggaatatgctaatttatcgcctgaacttcaagaaatatataaaattgttgccgcaatggaaagtgcaggggttagagtccacagacaattaatcatcagattactaagcatccctagtgatgccattcaagccattttaattaacttatcagaaataattaatgagtataccgttagtgagcgggaaggtatttatggctggagaggaagacattctgtaattgtagatataatcgcaaaatacaaatattcagatgcagaacagataatatctcttttcgataaggttattgattgcatttcaccaacatatgatattgaaattcgtactattagagaactttgcaatatcgaaaacggactacaaagaatttcggataaaacagttcaaaatcgactactgagaaaaatgatttcaattgcgcctggagaacgcttacctagacataggctcataagaaatatgattgacttaggtgaatttgataaagctgaaacagaaataagaatttttgacaaagatttcaaatctgatagtgcaatcatgcgttataaagtttcgctcttaacagcaagagcagcaaacacaccaggcataatgaacgaagatagaatttcaattttgcgagaagcagagaaggtagcaattatagctctgcagcgttatccagatcacaaatacattttgagttcttattgttcacttgggcttgaactttacagaaagtcaaaagatatagcagtatttgatgacgcaataacaagattaaagcaagcagaggaaagaacgtccgatccagaaataagtaaattaatattgaaatttgagcgaattattacaggccaattaggtagcgatgaataa

SEQ ID NO: 441119 - DNA, 630 bp, Serratia marcescens
atgccgggtgttggtcagtcacaggcggcagagttcagccgccagatactggcggacttcaaagcgcggggtgtttcctacgacctggccggcgaaacccgacaaagcgaagaagaggggcagcgtctgttgatcacctttgctattgctctgattggaatctattgcctgctgacgttgcagctcaccagccactgggacccactcatagtcctgttcggtagcatcccattctcagtgtttggcgcactgctggcactgctttggtttggcatgccgctggatctgtttacgcaggtcggcatgctgacgctggtcggtctgatcagcaagcaaggcattctgatggtgcataccgcgaacactctgagtgaacgaggggtgaccaatatctggttcgcgattacccgcgcgtctgcttcccgtctgcgagccatcattctgacctcgctgacgatggtgcttggcgctatgccattgctgttcgcttcaggtcctgcggcggagtctcgctttgagctgggactggtcattgtcgcagggatgttgctgggctcgttcctgaccctcttcctgttgccatcactgtatctctttgtgcacagaaatcgaatggagacacgtctgtga

SEQ ID NO: 441120 - DNA, 948 bp, Serratia marcescens
gtgaaccttaccatcaatgatattggtatttatctgcctgaaaccacgtttgaacttgatcagatttgcatggagccgcgactgtcggacgcggagatcaaagtttatcaacgcttctatggtcttaagcgggtcgcaatcagtgatatttcgctggaggacatgatgttccacgccgcccgggatgctctgatgcgcagtggtgttgcagcagatagcatcaggctgctggtgcatgtccacacctctgcggaaacctgcgcctggcccaatggtctgttgacccggttgtgtcgccgcctgggcttgcaacacgcagcgtctctggcggtacataccaacaactgcgcatctaccctgagcgggctgatgctcagtcaaaactacttggcggggaacggcgaagagggctacgcgctattgctcaccgcagatctgacgttcagtgggattttgcagcaaatacccaatacgaccctgtgcggcgatgcggccacagcctgtgttatcagtctgaacggcagcggagcggtgatgaaatcccttgagctggactatttcggcgaacatgccaaaggagcctggcagtcggaggaagaacaggcccggtttgaaagcgactatgcgcaacgtttggcagaagtgatgcagcgcagctgtcaacaggccggtctggaatgggagcaaatccgctggatctttccgcacaacgttaatcttatctcctggcgaaatgtcgccgccaaactgaatgtcccgttaagcaaaatctatcttgataagctgcctgaactggggcactgctttggcgcggatatctttattaactggcgttttgccagtcagacacttcagcccggggatcacatcatggtggcaacggtaggattgggcgccgtgtttggcgcggcggtctttcagcttgcgcaacaggagcttgcatcatga

SEQ ID NO: 441121 - DNA, 1599 bp, Serratia marcescens
atgacgatgaaccaccatttagggcagcttctgcaggcagcggccacgaaatatgcgcacttagaggcgctgtcgataaaagatgacagctggagttatcagcagctgcatgagtttgctgcgctgctggccagaggttttgctctgtcgtcgggaaaatattgcgcgttactcggcccgcgccacatcggcaccttggctggcgcgatcgccgcattatgttacggaaaaacctacctgcctctcaatgaagaggaaccagcggagcggcttgggttgctggcgcgcagcacaggtttcgatctgctggtcacgcgtgatcaggagcgagcgctactgcaaattctgctggcgcagaatgaactgccactggtcattattctcagtgactgcgatctcagtcctgactggtgtcgcgactacccgcagcatcgtttcctggggatggacgagcttgctgcactccccgtcgttgagccccgcagcgataatccccatgcctatctgatgttcacctcgggcagtaccggtacccccaagggcgtcgaggtctcgcacgccaatgtggtgcgttacgttgaaaataccgttgcactgtaccagcccagccataacgatcgtttttcccagctggcgccgttaagtttcgatttttccgtacacgacctgtttgtcccttgggcagtgggggcatcaacccatgtgtttgacagcagccagagtatggcgttggggcgtttaatcgatgagaaacggctgacgttttgggcttcggtgccgtcgacggcactctggctgaagcggttgcgccagctgacgccaggggcatttccgcatttgcgccagtcgctgttttgcggtgaacccctgctgcatggtgccgcagatagttggcaggaggcggcaccacactcgcgtatcgacaatatttatggtcctactgaagccaccgtcgcggtatgcggttaccactggaaaagcgatccctctctggctgctggtgcggttgtgccgattggtcgtccctatccgggaaccgtgctgaaaattggccgctcgcgtcaggatggtcaatccggccacgaaggtgaattgtggatcggcggtgaacaggtcgtgcagggctactggcccggtttgccggtgcaggcggataacttcgttatcgaaaacggtgaagcctggtatcgcacgggtgactggggcactctggattcagaggggtgtctgcattttcttggccgctgtgacgatcagctgaaagttcagggacagcgaatcgaacggctggaaattgaatccatgctgcgacaggtatccggcaccgaagacgttgcggtggtgggctggcctatcattgaaggcaacagtgtcgaggggctggtgttttttgttggcacacaccacaaaagtaacctggaattacgcaaattatgtcaggagtcgatgccgcgcattatgtggcccggcaagctgatactgggcgcgatcccgaaaaaccgcaatggcaaaactgactataaacaactgcgtgctgaactggaggcagaaagtcatgccagctgtggtgcagaacaacgtgttactggacagaggtaa

SEQ ID NO: 441122 - DNA, 921 bp, Serratia marcescens
atgttcattcaacacgttagcgcacggctaccggcgatatcagtcaacctgcttgaacagccagagcggtttaacctgacctcattcaaggcgcagatctataaaaaattcatcggtattgaatatgtgccggtagccgttcccggtgaaatggaaacgctacttgaacagaccgtgtctgcggctgtgccaattgacagtcgcgagcgtatcaagctggtcgtgcatgctcatacctgcccgttggtcggcaactatggcgctctctcaatgcagcgcgtcttacggcggcagcgattacacaatgcactgtttgtcggtatgtgcgcaaaccgttgcgcatcagttttcgacgcgatgaggcttatccggcagcgtttgcaggaacagcccgatgccctggctctgctcgtcacgggtgagagtgcggtaacccaggagctgaggctggtggagaacaccgcagtgatgggggatgccgcaggcgcgatgttgttcggtactcgcgggccagggaatgagctgctggcgtgttgttcacatacttatggtcagtatgcgcgaggtgtctggctggaaggggcacctcgcgccagttacgagacaaattatcccgccatgatgctgcagattattcagcagacgctcgcacaggcggggatgacgctggatcaggtgcgctgggttattccccataacgtaaaccgtaaaagctggatcgaactggcgcggactatcgatctgccactttcccgtctgatgctggcaaacatcccattcacggggcactgctttggcagcgatatgatgcttaacctgtctcacctgacgtccacgggggcgctggagaaaggcgacgtttatctgatgatagccgtaggattaggaggttcatttggtgccgctctcttccgttactga

SEQ ID NO: 441123 - DNA, 1578 bp, Serratia marcescens
gtgccgctctcttccgttactgaaaatgatgctcctctgtttatccggcgggttgaggagattgtccggcgttatcctgatcatgttgcgctatgggtggcaggagaaacctacagttatgagcagctttggcaggcatcggctctgattgccggaacactgatgcgtaaagagggcgagttctgcgccctgatcgccagtaaaagcttcgccagctatgccgccattctgggcatcatgcgcgccggtaaaggctacctgcccgtggcctcggacgatcctgtcgatcgtatcgttgccgcccttgcgcaaattcactgttccagcttgctcagtgacaatagcggtatggcattcgccggcatgattgccagcaaatgcccggaggtcacgcctgtgtcattgccggaaatcatgacgtctgcggaagccgccgccgggcataatctgcccggtcctcagaaaaatggcccgtgcagcttattgttcacttcaggttctaccggcgtgccgaaaggcgtgattacgagccatacggcctttgccgcttatctggattccgcgctggcaattttgtgtccgcgccctgatgaccgcatctcacagctctctccgttgacctttgatttttcactccacgatatcgggctggcgtggtgcagcggagcagcactgtatgcgattgaccgtaacgacagcttcagtctgcctgggtttgtcagcagacacctgctgacattctggtcatcggttccttcaggctggctcagcatcgaacggctgggcgctttacggcccggtagccttgcctctttgcgcaccgtcgtgctgggtggcgaaccggtaccgctgggcctgatagctcgatgtcgtcaggcttcgcctcaggctgcgttttttaacatatacgggcctaccgaatcggcggtagcggtcaccatcagccgctggagcgatgacttccaggcgctaggcgagtggcctcttggctcaccattaccggggaatcacctgttactgctcgatgataatcagcaacccgtgactccgggagagcgaggccaaatctgtatcagtggcgttcaggtcgcgcaaggatatgtcggcgtgcaacctgctggaccatcgaggtttatcacgctacctggacagcagggcatgtggtatttaaccggcgatgatggcatccaggatgcccggtatggcctgttgttccgtggccgccgcgatgctcagtggcaggtacgtggttaccgtgttgaacggggcgaaattgaaggtttgatgcgtaaagtggcggagaccccgcacgtcgcggtactccctgttactggagaaaatgccttggtcatcagtatggcggtatttgtcgaaggttctcctttctcagtaaaagagatgcgtcagcgctgtcaccaatttttgcccgattacctttttcccgggcagatcatcgaaatgtcgttaccgcgcaaccgcaatatgaaaacggactatctcgcgctgcatcaccatctggcgcaggcatcctgtggcgcaaaaacacgggaggtacctgatgcaacatgctctgactga

SEQ ID NO: 441124 - DNA, 921 bp, Serratia marcescens
atgcaacatgctctgactgatagggggtgcggtgtggcgcattatgcctggcattcggttctgggggacgtatccgccagtctgtggtacccggcattcagcggaaccggcaaagcggtacattaccttcgggtcctgcaagctcaggctgaggagggggcgatcccctgcggcgcgcgctggccgctggtcatcatgtcgcatggcgcgggtggttcgcggtttgatcaatattatctcgcggaatgcctggcggcacggggatttgccgtgttgaccgtcgatcatcgcgatattcaggacgggcaacaacgctggcgcaatttactgacgcgcccactgcgtctggttctcgctcaacaggcattgcggcaggaagggctggcggaaaatatcgacttttcacgcccgttattaatcggtcactcagcgggcgcatacgatgtgttggtgaagtgtggctgtgtgccacgtttcgaactggaagaagaattcagcaccgtgctgacggagctgggtgcttttgacgtcagcgcctgccgcctgccttcgccgcttggcgtcgtgttaatggcgcctgcactctcgaacctgtttccggaagcatcattgtcttcactggacatcccagcactgatcctttccgcagatcaggattccgtgcgcatgctgggtacgccggcggattatgcggcgcgtctgccgactgtcatccaccacactctgtccggtgccggccactatgcgtttgttcacgagagtcctccgatactcagggcgctgaaccctgtggtgagcggtggcgacgtgcggccacgcaaacaactgcatgaagagatcatcagccatttaacggctttctgcgatcggttatgccatggagagccaacatttacccagggagcagcacactatgtttga

SEQ ID NO: 441125 - DNA, 927 bp, Serratia marcescens
atgtttgacccagtcagtcattaccgacagcacactgccgtgacccagccggggcgttttgtcgctgcgctggatgctttacctgacgatgtggatggattgattggcgcggtgcagaatctgctggttcattaccagacagataaagcgaaactctcgccagagattatcgctacccgcagcgctgaagtggatttacgctgggcagaggcaatgcttaaccgactgatacaattacaggatggaaacctgctttcacctcgtgaacccgcgaaacggctgctgtgcacctgccgcgattttgccgtgttgttgtgtgcctttatgcgccaaaagcagataccggcccgtgttcgctatggcttcgcgcacgatcaatacaagcctgaacggccaatgcatgatcatgtgctggtggaatactgggatggacagcactggcgttatgccgaaagtcgtctgcatgtgctgccggaacccttactgaatattgagcagaaacattttccgcgcgacctgttccttagcggcggagaaatatggcgacagatccgggccggcatcctcagtgaacgtgcttttagtggttaccactttaacgacgactatggacagtggaccgtacgtaacctgtttctgctcgatatgacttcattatgcggctacgagcccctgatgtgggatgcatggggcgtattactggaagaaaagcctggtgcacgggttacacacgttgagcagctggagctgctcgacagtctggcgcagcttaatgtgtgtgatgcatcagactgtgcgtcactgcgtaccgcgttgttgtcgtgctctgaactctgctgtcagcacgatgttcacagcttcagcccggtgaaaggggcttaccgcgtcagtatccatgaaatcggggaggaggcatgcgtccgatga

SEQ ID NO: 441126 - DNA, 942 bp, Serratia marcescens
atgcgtccgatgatcatggagggactggccagctatctgcccgctacgacgctggtgcttgagcgcgattatgagcgccttggcatttcgcagaatcaggcgcgggtgttcagccgcatgtatgaactgcccaactgtccggtggaagaaggggatgaacttagcatgctggtgcaaacctgcgagagtctgctggcagatgctccccagttgcgtcagcaaattgacgttgtgatatatgctcataccggagccgttagcggtgtatgggggcagagcatcgtgacgcagctggtgcgaaccctggggctgaagtatgcacagccgctggcgacctgcagtaataactgcgtagcgatcttttctgctctggatttggcgagacatcatctgcaaagcgcaggctctgacgcaaaagcgctgattgtggtgggagaaattgctgacaatgttgaattacgtgttgtggcaaatgtggcgattgttggcgatggtgccagcgccggtattttctcattgtcaggttgcggcccgaaaatgcaggctcatgcgattcacaactggccaggctatgcccatggtatctggctgccgaccaattctgactgctacaaagatttcgagctgcactatcagcctcgcctgaaagcggtaatcgatgatgtattgcggaaggcggacacggcactggaccagatcagctggattgttccccacaacgttaatatatggatgtggcgcaaggcggcagcataccttgattttccgctggaaaaaatattcctgagtaatattcgccgaaccgctcactgtttgggcgcagacatgtttatcaattttcactccctgcaggagagtgccgaattttctgctggcgacaaagtgttgatggtttcggccggcgttggtggagtatttggtgcggcactttttcagtattaa

SEQ ID NO: 441127 - DNA, 309 bp, Serratia marcescens
atgactaatgaaataagccaggtggcaacttacggactaaccacgctgacgattattaaattatttacgcttgcatggttattgggtgaggtgcttattatcactttgttgtttaccatcagaacgcgcaaagtgatgcgcgtttcgctgcccggcggggtaaatgttgataattccagccggatagggtcgttaatcgtattatctctgttctcactacttgcatctgcagggctggcgctgtgcctgatcgtgggacagtggttactgacattattcacatcgattgacgtcagtttttatctgtag

SEQ ID NO: 441128 - DNA, 1260 bp, Serratia marcescens
atgactcagaaccatagcgatacctcttcaagtctttcccggaaaatggcagagaaatttactattgagaatgactgcctgaccattggtggcatccctcttccccggctggcacaacaaattgggcaaacgcctttttttgcctactctcgtgagcttatagatcgtcaggtacagttattaagaacacatattccggaaaagattagtattcactatgctattaaagctaacccgtttgtccctgtcattcatcatttgtcacgattggttgaagggtttgatgttgcatcggctaatgaaatggcgctggcgttgaacagcggtgtttcgcccgaagatatcagttttgccgggccagggaagacggtggaagagttgcaacgagcagtggccgctcaggtgttactgaatgtcgaatcaatcaccgagctgcagcggatcaaagatattgcagtggaatacggtatcgccgcgcgtatctcactccgtattaatcctgattacaatctcaattcatctggcatgaaaatggggggagggccgcggcagtttggcatggatgtttcttatgtacaggatgccatgatgctgatccgcgacaatccagggcagctgcatttcgaaggttttcagattttcccaggctcgcagaacttacgcgctgacttcctgattgaagcacagagcaaggcgctggatctggtgattgaactggcgaaaattgcgcccgggccggtacggcgctttaatcttggtggcggatttggtgttccttattttcagggcgacaaagagctggatgtggcatccgtaggggaggccatgcatgccctggtcgctaaagcagagcagcacctgcccgaggccgagatcattctggagcttggacgctttctcgttgcgccagcggggatctatgttgcgaaaatcattgaccgcaaggtatcgcatgacgtgacttatctggtcgcagatggcgggatgaaccatcatcttgctgcttcaggcaacttaggtcagcttatccgtcgcaactatccagccgtcatcggtaacagagtgcagggcgaacaacgcgaggtggccaacgtagtgggcccgctgtgcacaccgctggatattttgttgaaccagggggatgtcgctgtagcaggaccgggggattatattgttgttttccagtcaggcgcttatggtctgactgccagtccgaacggttttcttagccagaaaaacgcggcagaagtgttagtctga

SEQ ID NO: 441129 - DNA, 1035 bp, Serratia marcescens
atgagtcagttactcagcggtgcaattaagtttattcgccataccgcgctttatgccctctgttcgggctttacatttttcgcctgggcccagcccgctgatgaggcgggttttcgcaggctggcagtcattgaccctgtcgcgaagaaaccaatggaagcggtctggttctatcccgggaatatgagcgggaatacgatgagcaactttggcccctaccatgtgtcggcacgcaacgcagtgaaaatggcacccgggcgctatcccctgattgtaatttcacacggcaacgcaggaagtttgtggagccatcatgatctggcaacctcgcttgcccgtcagggcaatatcgtgatcaccctgagtcaccccggcgataattacaaagatcagtcaggcgcgggtgcggcgagcaccctgtacggccgccctctgcaaatctccgctgcgattacggcagcgctgagtaccccggatatacgccagcatgttgacgccgacaaaattgcttttatcggtttctcatccggtggtgaaacgggattactactggcaggtggcaggattgatccatcacgctacgttagctactgtgaaaatcatcaggcagaagccctgtgtctggcaaaagggcatattaaaaacgatggtcccgctctcgcacctgaatcggacccgcgcattaaagcctgggttctgatggcgccagtgagtgcacctttcgcccctgagtcccttaaaatcttcaccaaaccgacgctaatcttcactggtgataaggatgaagagctctcctggcgcgagaacgccggcgagctggcaaaaattctgcccgtcaaaccacaactgaaagtcatttctggcgccgggcattttgccttccttgccccctgctcgacagaattgcggactgccacgccactgttgtgtgaagatccaccggggatcgatcgagtggctctgcacagcatgattgagaatgatatcacccgtttccttaccggagtctggcaaaaaagtaaagggggcgcttaa

SEQ ID NO: 441130 - DNA, 267 bp, Serratia marcescens
atgtctaataatgtggaactgatcgtaactatcaaaaatattctggcgaaagagctaaatatcgaatccctcgacgagttaaatgaatcgacatccttgcgtgacgatttaggtcttgactcaatggctacactgacctttctaatgtctcttgaagataatgtcgacaatttcactattgatgctaatacccttgaagggcatcacgtagaaacaattggatccatctgtgactatgtgaatgcgcggttagaggaaacagcatga

SEQ ID NO: 441131 - DNA, 897 bp, Serratia marcescens
atgtactatataaatcaggttttttataaggtcatggacaggcgtgaattaagacgaatgcccagagaccgatttaccatttaccagaaagatttgcaccgaatagcgcaggatgtcctcaccgaatcaacgttgcttgagggggaccagtattcctatacggagttgggcgacgcggtgttgcaggatgtggaaaagggtcaagcccttgatggcgttgatatggcgatgttctgctactggacgcctgagttcgatcccgactactctgccttcggtccgtattttatggatcgttataaaataaacggtcattcttttgatatctgtgataacggcagtctggcctcagccacagcattaaacgttgctggcagttatctgaaaaatggcagtgtgcagaaaatactactgctgggcatggagcaaaatacgatacccagaaatatagagcaaggctttcccgttccatcaagatcctgctctgttgccgcattattaacggcggagaaacggcctgaaagccaatggaagctcattaattctggccacattacggaatgggattcggggagattagaagatagctatggtttgctgatcgacattcttactcggtcaaataccaatacagatgatgtcgtattgttaacgcagcgcagtgggtatttctataagaaactccgttttcatctggaaaccacctcgcaggagttaccaatagactatgcatttcttcgccctgacgtcacagggatgaatgcattactgacactcgcaggtgaaacgcttgcaccactcaacaagcgaaccgtattacttatcgagcatgatatggaaagtttgaggatggcatggtctgttttacagaaagttcaggaggtggatcatgtttga

SEQ ID NO: 441132 - DNA, 666 bp, Serratia marcescens
atgtttgatattaattacccttttgggtctaagcattatcagccgttttcctgggacgctgaggaaatatcactgaaagcctattcaaaccgacaaaaagtcgctgcgcgcggcggatttgctgtggtttcagaacatcaattagcccatcaacagttaagttttattacagaaagtggtgctgactggcaggacacggccgcgctgaagatatacccgagcagcgctgccataacgcgccatcatctggtggtgtgccagcttccaccacaggctgctggctctgcctcgttttacgaacggacgcctctgtttgcctggcagcgcgaaatcgtgtgcagccagctggagtggattggacgctggacacaagtcctgatggagcatgctgcacagcgcaaagtgggatcatccacactgttgtctgtcccttccatacgcctgcgcctcggccagatcatgcaacaccacgacttactggagcaatgtctggttctggacaactggtcggcgcagcaggcgctgactgatatcgaaggcatggtggacgccttgatcaagactgcgggcggtcgggcaatgctgcaacacggactggtagaaatgaatagcttattcgccgtgttaaaccacatttatctcggaacctcccatgatgaattttga

SEQ ID NO: 441133 - DNA, 1092 bp, Serratia marcescens
atgatgaattttgaccgttcagtcgctctgactcactacgatgaaaaatggctggatctggcgcagctgtttcgttctctctctctggacgtgctcaacgatcgcgatgtcgtgctggcacatctggacaggccgtattttgatgaagtttatgctgatcgtaccagcacctgcttcgagcgtgctcgcatgtatgaaagcctgtcttatggcgatccgagcgtattgctctcctgtcccggaccttcgctttcaggcatcgtgctgcgggaattaggctcaccggaacaacaggaccagttctttgaccacgtctcgggccagcgtgcgcgtacttgcatggctgtaacggaaccggaaaaaggctcggatgccggtaatccgacctcaagcctgaacgctgaccatctccttcaggcggaaaaatggctggtgggcaatggccgtgaggccacgatgggcaccatcgtggtgagaaccggtccgggcccctacagcatcgtggtggtgatgcttacccctgaaacgctgtcgcataacggcacgttccgccagctcttgcctctggcgggcttgcagggcgctggtttgagccacctgcattttgacaatgtgcccgtcaaaccagaacaggtgctgggaatgcaccgccgccctctggagcgcggtatgcatgccgtgatcaaaaccttctatcgtatgcgcccctgcgtttgtgccatggcgctgggtaatgcacaggctctgctggatcatgcgctgccgtatttgcaaacgacctcggcgcgggaactgcatcgcgcgctgcaaagccaggcagacggcgctcgtgcactgaacctccgtgccgcacaacgtattgacgatcagatttttgatggcgccgccgtgtctctggccaaagcgtgcgcgacggaactggctgagaaagtggcacgcagtatgccgttgctgaccggcgtcgctcattacctgacggatgcctggctgcagaaagccacgacggatgtccatggttatgaatggatggaaggcagcctcgatatgcagcgtctgaatatcgtagcgggttaccactccccggcgaaatag

SEQ ID NO: 441134 - DNA, 1371 bp, Serratia marcescens
atggcaatgcatcctgtgctcaaccaacgaccggctcgccgttatcaggggttgaagttgttgaacacgctctgggacaccaccttcacgctctgggtcacgatgctggtatcgtccatggcggtattaatcaacattggcgtcatcagccagaatgctccccagacgctgtacgcgttagggttatttctgccgctgaactacgtaatgatggccatccacgaagggttgcgaattccggcactgcgttacagttcacagaatcacagcgacgcacgtgaggtgctgggcacgcgtctgatattgctgttcagcgcgatggttgtgttgatgacattacttgtcggctgtgtctggctgttccagtcgggcattgccgggctgttccatattgccgcggaacgtcagaacgatgtcatggcgtttatcctgccgatgttactggcaggtattccgattggttttgcaacgctgattctctcgaccttatttggccgtggactcaatcgttttgccagcctgctgggtattagcggcaccgcgcttaacctggtggcgacatggctggccgccacgcactggcatcaggggctccagagccttatctggggggcattgattggcagtagctacctgacgctcagcggtggtgcactgctgtacagtcgcggggtccggctctcactcactggcgtccgccgtgaagccgtacaggtattgaatgatattgcttttattggtgcgccggtggcaggaagttttctgctgttgttcggcttccttttttctttcaactacctggtgtcgttttatggcgccagtgaaatcgccggttttggcatcgcattccgcatccagtcattcgtcatcctgcccgcaattgctctcggaacggccatggcgatacatgccaataacgcgattgcggatcaaaactttccccgtatccgccagatcctctttgccggggtagggctcgccgccgcactttatctggtcatcagcgtgctggtgtttctgttacaggaacgtctggtgatgctgttcacccgggatgaaaccgtcattgttccggcgttgcgctacctcaactgtgttgcgccgtcctatctcagtctgggggtggttctggtactgatgaccgcgttggaacaaaccgggcaggggctgcggatattgctgatcaatatcgttttttacgcgctggaaattggcattgcctctttgctggggctcaaccacgtcgatgcaacgcggctctacctcgtgattgcgattatgaactggttatccgcgctttacgtggtttacgaactgaataaacgacttgccccccaggtcacgttgcctccgcgggaaatgcaaccttaa

SEQ ID NO: 441135 - DNA, 1575 bp, Serratia marcescens
atgaagcacagcttggcagaattgattcgcgatgcagatataaattacccgaacagaaccgccctgatcttcaaagatcatcactatagttaccatgatatctggatgcgggtatgtgctatcgctgccgggatgcggcaccgcggactgcagccgggtgacagggttgtgatttgtctgggcaatcatccggacagccttgccgcattctgggcagcgcaaaagctcggtgcctgtccttctctggtcgctatcgatacggccgtgaataaactggcttatattcttaataacagcggagccagacagctgttaacctctccggccatctccggcgcgctgatggcgtttggcctgcagcagatccctgagctcaacacagttattgtcgcgggagacctgagcaggacggaaaagggtatatcgctggaagagttcattgccgatccgctagcagaagcacaaatcccgttacaggccattagcgttgatctcgcatcgatcatttacacctcaggttcaaccggcgaacccaagggcgtgatgctgagccatcagaatatgctggctgccacggactctttagcgacatacctgggctatcggcaggacgatgtcataattgcggttctcccggtcgcgtttgattatggtctctaccaacttatcctgagttgctacatcggtgccactgtggtgctggagcccgatggtgttttacctacattggtgttgcgccatatccagcagtatggctgcacggtgatgccggggctctcttctctctacagtttgctggacacctatgccagcaggggcaagtttgacctgagccgcgtgcgtctggtttccaacaccggtatggcattacgtaagcagcatatccatatggtaaagcgcctgttcccgcaggcggacattttctcaatgtacggtctgacggagtgcaagcgctgtacatggctcccgccagccgatctggaacgtaaacctgacagcgttggtatcgcgatccccaacacgcagattctggtggtgaatgatcagaaccagccttgctcgcctggcgaagtggggcaactggtcatacgcggcgctactgtgatgcagggttactggcgcaatcctgaagcgacagcgaaaaaaattggcatacatccgctgtatggtgaccgttgcctgtactcgggtgactacggctggctggatgatgaaggctatttttactttgccggacgcatggatgaagttgccaaaatccgtggccgcaaggttattttcagtgaggttgagaaagccttattccgccatgaggcggttatcgaagcagcggtcatcgttcacaatgatgaacaggatcctgaggatcgtatcgtggcattcgtcgccacatcatcgcctgccgcactcactgaagccgagctgcgtcagttctgcctgacgcagctggagcagtatcaggttcctcacgtattcgttctgctgccgcgactgccgaaaaatgccaacggaaaatttgataagcataagttgcgctcagactttaaagatgccgcacggaggctgccggcatga

SEQ ID NO: 441136 - DNA, 813 bp, Serratia marcescens
atgaggaacaagcaggcactggtattgttgtgcgcggtccttgcggtgatttttgcaggcgtgtccgtcagtatcaccaccgcacgcacgacggcaccggccgaaacgatcggcggtgcgccacccgcagcgttacagggaccaccaccggcactggttgaaactgcacaggtgaaaaccatgtcctggcaggataaaaagaacgtggtggggatcgttaaagctgtgtattaccttgatgtgcgcacagaagtggcgggaacaattctgcaggtggcgccggcaggtggccagttagcggccaatagcgtgctgtttcgcattgatgaccgtgctgaacgtgcgcaactgaagcaaaaagaggctaatttggcaatggtgcggctaaatgctcaccgtgccgatctgctggtcaacaaagccatttcacaggctgatcagcaggcggctcatgtcaacctcgctcaggccgtcagcgatcaggaagagttgcgcagcttgctgcgcaaaatgacgatcaccgctcccttctccggtgtggtcagcctgcatgatttggcaccaggccagtccagtcaggccgggcagacgctgttttccttttatgatcccgcaaagctttatgtcgagttcagcgtgccggaagcggatatcagtgcgctgcatcccggtgtgaaagtcgcggttgatgatacggtgtccggatatgccggtagcgcgaccgttacgctgatcaatactgaagtcaatacgaccaaccgcacgctgacatgtagtggttcagcaatttcggacacctcaatagcctgttaa

SEQ ID NO: 441137 - DNA, 1635 bp, Serratia marcescens
atgattactggtgacttaaaaagtaaaatcgacggactatgggaagatttctgggtgggtggcatcactaacccgctgaccgtaatcgaacaaatcacctacctgatgtactccaggatgctggatacccaggaacaacgggacgagaagcgtaagcaaattgcaggcgttgattttaaaccacgctttgcacctgagcagcaggagttccggttcagccactacagcaaccttggctcggacgagatgatggaagtagtgcgcgacggcgtattccagcatttccgtcagcttggacaagctgaagatacgaaagtgacgctgctgggcaactttatgaaagatgctcgcctggagattgttaaaccgtcactgctgaccaaagccgtcgaggtgatcaaaaacctgccgctggatcgtggcgacaccaaaggcgatctctacgaatacctgttaagcaagctgactactgccgggattaacggtcagttccgcacgccacgccacattatccgcacaatggttgaaatgatggagccaaacccggcacgtggtgaaacgatctgcgatccggcctgtggtacaggcggttttctggcgaccagctatgagtacctgctggaaaaatacagctcgctggagtccattcataccgaaattggcaccaacgaacgcggcgaattagaagagcaaaaaatctttaccggcgatctgctgacgccgtggcgtgaccatgtggataacaacatgttccacggttacgactttgataccaccatgctgcgtattgccgccatgaacctgattatgcacggagtggaagagccggatattcactatcaggacaccatgagccaaagcttcagcaccaatttccctcaggccagtaaaaacgcattcaacctgattctggcgaacccgccgtttactggttcactggatgaggaagatatcgacgccacgctgtcggcgatggtgaaaaccaagaaaactgagctgctgttcctggcgcgcattctgcaaatgctgaaagttggcggacgcagtgccactatcgtgccgcagggcgtattgtttggttccagtaaggcgcaccagtcgctgcgtaaaacgctggtggaagataaccaactggaagcggtgatcaacctgccttccggtgtatttaagccttacgctggcgtggcaacggcgatcctgatctttaccaaaggcggccagacggatgaggtctggttctacgatctacaaaatgacggctacagccttgatgacaagcgtaacccgataaaagacaacgatcttccgcatctgctggcaagctggaagcagtaccgtgcattacgcggactacccgttgataacttcatgggcgataaatttgcttcgttgctgaagcagcagtacccggaaggaattgatgctggcgttgattttaaagaccgcactcagtcggcgtttgtggtgccgaaagcagatattgctgcgcaaaaatacgatctctctatcaatcgttataaagaagtggtgtatcaggcggaggagtatgaagatccgaaggtgatactgaagcggctgaaggaccttgagaaagagattctggcggatttggatgacttggaggatatgctgtga

SEQ ID NO: 441138 - DNA, 3414 bp, Serratia marcescens
atggagcagtctctcaattttgaaatgttgcgcagccagtggccggaactggcagaactcgcgtgtatggcggaacgttacgttcacaccgacccggaaagcagtctggttaagctacgcaactacaccgaattgatggtgcgttggttatatcgtcaggaacggctacctgaaggcatcaaggcaaatctgtatgatttaatgaacgccgatgtcttcaccagcatgatgccagaagccatcatcatgaaaatggatgcgctgcgtatccacggcaaccgcgccgcgcacggtggacgtatcaaagccaaagatacctactggctgcttaaggaagcttatttattagggatctggctgtatgttcgctacgcccacggtaatgttgatgactgccccaaattttctcttcctccgttaacgcaatcttcaggtcgtgcagatgataaacgtctggaagatgcaatcagggctcaagatgaaagccgtgagcgcgaactcgcgttacaacgcgcactacagcaagagcaggaaaaggccgaacaccttactcagcgcctgaatgaagccagagctcgcaaccagcatgttgccgatatcctatctattgatgaagcggaaacccgccgtcgcctgattgactcccgcctgcttgccgccgactggaatgtaggggaagagcttaataataccgatcaggttacgcaggaacatcccgttaaagaacaacctactgcaaccggtgacggttatgcggattatgtcttgtgggatgaggcgcataaaccgctggcggtggtggaagcaaaaaaaaccagcttcaatgccgagcaaggacgaattcaggctcgattgtatgccgactggttggaaaaagaatatggtcagcgtccggtcatcttctacaccaacggctacgatatctggctgtgggacgaccataaaactcatggttatcccccgcgtcgagtatttggtttctacagcaaggaaagcctgcaatatcttattcaacagcgtgaaacccgtctgccactgaacagtgtgccgcatgtaaaagacaacgaaggtaaggccgttgctggacgtttgtatcagcttgaaaccattgcccgcgtcagcgaacggtttactaacaagtaccgacaatcgttaatcgttcaggctactggtacaggcaaaacccgtgtagcgattgcgctaagcaaactgatgattgatgctcgctgggtaaaacgagtcctgtttctttgtgaccgcaaagagttacgtaaacaggcagcaaatgccttcaatcagttcaccaatgagccgctgtatgtggtcgggaaatcgaagaaagcagacacgcagaatgccaggatctacatcgctacctatcctggcatgatgaaaatcatggacaatttcgatgtcggttatttcgatctgatcatcgccgatgaatcccaccgctctatctacaacgtctacggcgatctgtttaagtattttgatgccctccagattggcctgacggccacgccgatcgacatggtgagtaaaactactttcggcctgtttggttgtgaaggacgtatccctaccgccaactacagcctggaagatgccatcgccgataacaatctggttccctatgaggttgtcacgcataccacagaattcctgcgcgaaggcataaaacgggagagattaagcgacgctcaaatccgcgagctggaagaacagggtatcgatcccaatacgctggaatttgacggcaaggcgcttgatgaagcaatttataacaaagatactaaccgctatattctgcgtaacctgatggaaaatggcctgaaagatcaggacggccagttgcccggtaaaaccatcattttcgcccgtaaccacaaacacgcgctgctgttgaatgaattgttcgacgacatgtacccgcagtttgctggacgcttctgtcaggtcatcgacaactacgatcctcgcgccgagcaactgatcgacgattttaaagggctggatgaaagcactaacaaagagctaaccatcgctatctctgttgacatgctcgataccggtattgatgtcccggaaattgtgaatctggtctttgccaagccggtcaaatcgaaagtgaagttctggcagatgattggccgtggtacgcgcctctgcgcggggctgtacggctacgatgacaacggcaaaccgctggataaacaaaaattccgcatcttcgatcactggggcaattttgagtatcacgagctgcataccgaagaagccgaagtcacagcgacaaaatcgctggcgcaaaaacgcttcgaagcgtgggttaggctgggggctgctgcacagcgtaagttcgacaaacaggcggtggatttagtcgctcaccagctccgcgagcagatcaacgcgctggatgaaaagtcgattgccgtacaggagaagtggcagcaaaaagcgcagtacagcgatgaaaaagtgctgcgccagctttccccgaaaacacagcaggatctgctatctgtcctggccccgctgacgcagtggctggatgttcgcgggcaaagcgatgccatgcgctttgatatggatattctggcggcgcaaactgcccgttataccaacccggaagagcttgatgtgctctggccggtcatcatcgagaaagtggaacgtctgccgccgcatctgactcaggtgcaacagcaaggacaacggattaatcaacttcgtgatttaggctggtggaagcaagccagcctggaagaactggaggatatccgcattcatttgcgcggcatcatgcacctgatggaaaaagacgcgacgccgaaatttggttcgatacaggtggatattaccgaagatgcgaacctgatccagacggagacccgcaaaaccaatatccgctcgattgatttcaaactctatcgtcagcaggttcaaggagcgttggagcccctgtttcagcaaaatccggtactgaaaaaaatccgcaacggcgatccggtaacacaaggtgaactggatgagttggcaaaactggtactgatccaaaaccccaacgttgatatccgagcgctaaaagagttctacccgcaggcaaccgcaagcctggataaacttttgcgtaccattatcgggatggacagcgacgcggtagaagtacgttttgcacagttcgccgctgacaacagtctgactagccagcaactgcgtttcctgtcattgctgaaaaaccacatccgcgattacggcaccattgaaatgcgacagctctttgaacagccgtttacacacatccacaacgaaggtgttactggtgttttcccagacatagagcagatcgcccggttgcaaaagatagtcgaagagttgggtgttgtgaccgacgtagcgacggtataa

SEQ ID NO: 441139 - DNA, 141 bp, Serratia marcescens
atgaaaaagaaacaggaagccccttgtgttcaggaggcatcaccaccattgggcgaagcgggcgttatcgtgatgcgggggagtgagcacactcctctttatcagcgggtggcgctgctggcgtctgggaaagccttttag

SEQ ID NO: 441140 - DNA, 621 bp, Serratia marcescens
atgaagcgcaaatatctaactggggaagaaataacaaggctacttaagactatttctatgaatatggtttctgttcgtgattattgtatgacaagcatggcgtttttgcacggcctcagggtcagtgagttgacggctttacgactggcggattacgacccgttgtccaggaagatttatatcgccagactcaaaggcgggatgagtaccagtcatcccttgctgccggaggagaatgcggccttgcaggtgtggcttgctgaacgacaggcgttgacggggcaatgccagccctggttatttttgtcgcgtaggggcaatcgattgtcacggcaagggttttaccagttactgcggcgttatggtgaacgtgccaatttatcgcttccagttcatcctcatatgctcaggcacgcctgtggatataatctcgcagagcgggggaatgatacgcggttgatacaggattaccttgggcatcgcaatattcgacataccgtgctgtatacggcggcgaatgccgcacgctttaatcacgtttggttgaaagatgcggggttaccgctgatgtcgccattacaggaatcgttgccccgcaatgtgctccataacaccaattaa

SEQ ID NO: 441141 - DNA, 519 bp, Serratia marcescens
atgaccaaagtaatgataatcggattactgttgttttctgcggtttttattggcctgtgtatttattttcaggataaagagggcgccatgtttgataaattgagtcaacaacgccaatctgtcggtggtggtgtgtttaccgcgggcgactataagcctgggcttttaaagcatatcgtgctgtttaaatataaaaagaccatcacgcaagcccagcgggatgcagtgacgagtcggtttttatcgctcaagcgctcaatgcgaccgggggcggatgcgccttatattctctctattgttgaaggtgtgcaaaacagtggggaaggggtggatggcggatttgaacagggatttattgtgacgttcaagtctgaaggtgaccgcaattattacgtgggaaaacctctggtagatacagagggggattacgatgaggcccatgacgcgttcaagcaatttgtggcccccctgctcagtgacgataacggcgtgctggtgtttgatttttcactgaggtga

SEQ ID NO: 441142 - DNA, 522 bp, Serratia marcescens
atgcgtatattttggggttttatgatggcgggctcaatcctgcttttgtcggcttgtgctgagaaaccgcaggtgaccgccgattacgatcatggcgtcaatttcagtcagtatcacacctacggttttgctgccaaagaagaaaagtaccaaacgctgacggatgagtacattcgtctgtctgttgctcaggaaatgcagcgacgaggttatacattcagcgcccgtcccgacctcttgatttattggcatgcttctacacagaacaaagtgcagatggatgatgagccctctctaattggccgtgtcgggtacgctggctgggcagggtataatcaaagcctatggacgtataccgagggcatgttgacagtggatctggttgacaggaataagcgccaactggtgtggcgcgcgacagccagccatgtcctggatgcggataaggcggtgagtcaggaagatatcgggcaaacggttacggctttattttcggcctatccagttccgggggctgagtaa

SEQ ID NO: 441143 - DNA, 423 bp, Serratia marcescens
atgagctatgcacaagatgagggtgcagcgtttcatgtggctgcgggggtggcgacagaaccggcctatgtcgggtcatcgcattatgtcgcgcagccggtatatgacgcaggcggcagttatcgcaacgccacatggggcacgtttgagctcggtgttttacagggagcccgctggcaattgccgttgtcgtcgccactgggtgtggcgttactgatggcttacgatgccggtcgtgacgagcgcatacgtacgcttggcggccacaatacgcagttgcgcggtatgggggacttagggggagcattggaggccggtgccgagttgagttatcagtttgcgccggcacgggtttatgtcaaggggatgcaggcactgcgttcgcgcgactacggcgatgaggcgcttgggcatacggcctag

SEQ ID NO: 441144 - DNA, 252 bp, Serratia marcescens
atgtggaagcgtgctggggaagagaaaaatgacggcgggcattggcctgagttgcatgtcatgtcgacacctggcgagcgcttgcgtgcgacgttgcagcaggcggcggcgttggaacgggccgggtgttttgatgatgcggcaaattactggctggcgggccttgaattggcccggcacgggaatgagcagcactggtgtgaggtgcgggcgctgctgtgtcaaaagcgaagcgcggaaccacgacgttaa

SEQ ID NO: 441145 - DNA, 429 bp, Serratia marcescens
atggaaggtgcgacggcgggagcctggatatggctgtgggtactgtggctgagcctcagtgtgttgttgttgggcgggatgctgtcgctgccccccaaagacgtggtaactcccctgcctgcccggcttcctccctgggttttgcggtttgtgcaaggggagatggcggtgggcggcacggtgcgcattggcctggggctgggcggggccgggtggtggtgcggtgcggcgggcttgttggtgtcggacctgtctcgcagcctgttggtggtcgggggtggtactctggtgctgatagcgctgtttaatgccgggcgtcggggggtgcagtccctcgttgggttggtcgtgctgtctggctttcagggggcgggatgggtcgtacttctgctgattgtgcttcagctctacgggttgtcggtgcgatga

SEQ ID NO: 441146 - DNA, 141 bp, Serratia marcescens
atgctggagcgtaaggggtgtttcaacgaggccgtgtcctattggcaggaggcgttgacgttggcggtatcggagcgcgagcgtcattggtgtgagtcacgagcgcacctgtgccaaaaacgcagtatgcagggggaataa

SEQ ID NO: 441147 - DNA, 1416 bp, Serratia marcescens
atgacctctgctatacatgccgttatagtttgcaatataacatcacctgtcgttattctgaacgtacgcggcaagtgcttatgcacattccaatatgccttatataatcgcagtaaatcatcatacacctttggatgcttaaatatggatttcaaggtatcactcgccaagcaaattaattatgaacttttacagtgcgtcgttaaaatgggcagaagcatacataaatcgttaaacacagaatcaatttcccaaacatgtcgaacgttggcagatgaaatcagttcgcaacgttatcaaccgtcgatttattcacgctttgccgtcacagatccaaagctgagagaaatctatgccccttcctttcgtgacaggttggtgcaatgctggctggtttatcacataaacccgtatgttgaacgtgtgctaatcgatgacacgtttgcaaacaggaaaaacaaaggcacgctggctgcggtacagcgagtccagcgcttcatgcgccaacctgaccacacatattatcttcagttagatatccagaatttttttaacgctataccgcgcaccccattgctgactcaatgccaatccattacacaacgttatctatcagaaagcccgctctatgaaacactggatttcattttagagcgatgcattctccacccagtagcgcgatgcacatggactgtttctggcgacaggcgattactgaacaccatccccccacacaaaaccctactcggtgcaggaagtgacaaaggactcccactaggttcttcagcaagtcaaatgttcgctaatttatggctaagccccttggaccacttcattaaacattcacttaaagcccgagggtacgttcggtatatggatgacttgtttctactcggcagctcatcaaaaaaaatgtctcaatggcgagaacttatcgcctcgttctgcgcgagcgaattaagcctcactttacacccgaaaaaacaaagcattcaaaaatgcagtcaaggtgcagattatttggggtatcgcgtttatcctcatcatctccacatgagaaaccgtaacattcgccggttcatttaccgactgcatttctttaatcaagtactatcggggcatcccccgaggcacacgcataataactcagacgcctttgtccacaagtgggcagcctatctcaacggtacccccattacaccccactatgaactactcactcaaattcagtcagtcatcaatagttatttgggcatgatgcaacacacgcaacactggcgccttcgcaagcaaatatggcaccgttatgcaggtttacttaaaacatggtttatccccgctgacgcaaactacggcgccatacgtatcaaacaatactgtaaacaagactggattgtgcagcagtacagagggtaa

SEQ ID NO: 441148 - DNA, 216 bp, Serratia marcescens
gtgagcgccgggtgtgagttcggctcgggcttcccgagtagcaacaacacctggacgtccgaggtcaacagcagtggtaaccactacaacgtcaacttgaccacgggcaacgtcaacaacaacaacgacagcaacagcaactacgttgcgtgtcggcagggtgttcttaccctctgtactgctgcacaatccagtcttgtttacagtattgtttga

SEQ ID NO: 441149 - DNA, 435 bp, Serratia marcescens
gtgaccttcacaggcaagggtgacagcacgccggtcaccgtcacagccacgtcaaaactcgacccgaccaaggcatttgaatataccttcacgctgaacgactggtacatcaataacgggtcaacgatcatgacatggtctgcggccaacacgtactgcacgaatcagggcgcgtctctggcgacccgtctgcaactgggcggcccacaactgaccacttatcagtacaacgttcgcggtacggttggttcgctgtggagtgagtggggggatgtgagtacgtacaccggctcgggcttcccgagtggcggcctcacctggacgtccgaggtcggcagcagtggtcaccactactacgtcgacttgaccacgggcttcgtcgactactaccccgacagcagcagcctctacgttgcgtgtcggcagggtctttaa

SEQ ID NO: 441150 - DNA, 2679 bp, Serratia marcescens
  misc_feature (2512)..(2559): n is a, c, g, or t
atgaaaaacaaacacacaggccatgctggcgtcttttcgcgccgactcagggcgctgacctgggtaaacattggcatacaagcgtgctttccgctggcggtggcgtttacgccaacaatcgcggcggccggcggtttcctgcgggataatggcagtaaaacggtggcgaagacccagatatataccttggcggccggagaaacgacagcctcggtggcccgaaaattcggtatcagcattgcagaattacgcaagatgaaccagtttcgtacgtttgcgcatggctttgaccatctgcaaccgggagacgaactggatgtgccggcggtgcgcgcaacgggtgatgcgtccggcaagaaaacggctgcgccgcacgaggatgcacaggcggtgaaggtggccggcattgcctcgcaggccggctctttcctggccaataaccccaacggggaggcggcggcgtcgatagcacgcggcatggcgatgggggaagccacgaaggaagtgcaggactggttgggccaatttggcacggcgcgtgtgcgattggacgcggaccagcatttctcgctgaaaaactcccaactggatctgttggttccggtgtttgaccgggacgataccctggtcttcacgcagggcagtctgcaccgtacggatgaccggacgcaagccaacctgggggctggcgtgcgctggttcaacgatggctggatgctgggggggaacactttcctggattacgacctgtcacgccagcatactcgcctcgggataggggtagagtattggcgcgacttcatgaaattgggtgccaacagctatttgcaactgagcaactggaaagattctccggacttcagtgattataaagagcgccctgccaatgggtgggatattcgcgcgcaagggtggttgccggcgttgccgcaactgggcggcaaactgacgtatgagcagtactacggtgatgaggtcgggctgtttggtaaggaccatcgccagaaggatccgcacgcgttcactgcgggcatcgagtatacgccggtgccgctggtgacgttacgtgctgagcagcggcaggggaaagacggcgagaacgacacccgttttggcgtggacttccgctatcaattgggggcaccttggcaacaacaggttgacccaggcgcggtacaggcgatgcgtagcctggcgggcagccgtcatgacctggtggagcgtaacaacaatatcgtcctggagtaccgcaagaaagagaccatccgcttgcatgccgcgtcgctggtgaccgggtatgccggggagaaaaagtccctgggcgtctccgtcaacagtacccatggcctggaccgcattgactggtcggcaccggcgttgctggctgcgggcgggaaaatcgtccaggatggtccgcaggcttacagcgtggtgctgccaacctaccagtatgccccgggcatcaacaattacaccgtcagcggcgtggccgtggacaagaaggggaaccggtcaaacaccagtgagacgcaggtgagtgtgcgcgcaccggaaattaataaggggaacagcacatttacaccacttgatagcatgctggtcgctgatggcaagagcactcaacatctgaccttgagcgtcagggatgcgcaaggcaatgcggtggatgtgcctgtctcggaaatcagtatcgatacggggaatctgaagtcagcatccgtctcttcgccggtgaaaaaagcgatcggggagtttgaggtaacggtgacggccggggtggatgaagaaatcgtcaccctgacgccaagcgtaagtggcgtgaagcttgatacagcgcgtgtggcgataaacaaggcgtttccaagcagcgtcaactcgacgtttgcggcatcgccgaagagtatcgcggcggacaacaccgcgacctcgacgctgacgttcacggcgaaggacgcggacggcaacctgatcaccacgctgaacgccggtgacgtgagcttcggtatcacggcagcggggggcgacgccagcaaggtgacgctgggtgcggtgaccaaggtgagcgatggcgtgttcacggcgaccctgaaggggacgctggcggacacctacaccatcgtgccggcggcgaacgggacgccggtgagcggcctgagcgacacggtgacgctgacggcgggcaccacgccggatgccggcgagggcaactcgacgtttgcggcatcgccgaagagtatcgtggcggatgacaccgcgacctcgacgctgacgttcactgcgaaggacgcggacggcaacctgatcaccacgctgaacgccggtgacgtgagcttcggtatcacggcggcgggtggcgacaccagcaaggtgacgctgggtgcggtgacgaaggtgagcgatggcgtgttcacggcgaccctgaaggggacgctggcggacacctacaccatcgtgccggcggcgaacgggacgccggtgagcggcctgagcgacacggtgacgctgacggcgnnnnnnnnnnnnnnnnnnnnnnnnnnnnnnnnnnnnnnnnnnnnnnnngacggtcgctacggcggtgcaggacatcctggtgaatggttacacgtacgctgtggacgcgggtttcccgaaaaccgggtttgcgggggcgaagttcaccgtacaattgaatggcggtga

SEQ ID NO: 441151 - DNA, 213 bp, Serratia marcescens
atgcagttaacgctgggccgacaccgttttaccctgagcgacaacgacgcgctgtttgtggcggaagccatcttgttgcagcgcaaacacccggatatcgtcttgcctgaacatcgcagcgataaacacggcgttattcgtctgacgaaccggcgggccgagctgcgtctgctgcatgccgccgaagtgattgatcactatgcgatcgattga

SEQ ID NO: 441152 - DNA, 642 bp, Serratia marcescens
atgatcacttttgagattcgtatggaaattaaagtcctgcacaagcggggaatgagtatccgggccatcgccagagaactgggtatttcgcacaatactgtccgcagccacctgaaagccaaatctgaaaagccgcagtattcaccacgcccggtatcatcatcactgctcgatgaatatcgcgattatatctgtaagcggatctgcgatgcgcatccctacaaaattccggctaccgttattgccagggaaatcatggagctgggctatcgtggaggtatgactatcctgagagagttcatccgttcgcagggactccccgcaggggcgttacaaaacgacactcaatcgcggtgtcatggccccaaaactgctcatcatagacgaaataggctatctgccgttcagtcaggaggaagccaagctgttcttccaggtcatagccaaacgttacgaaaagagcgcgatgatactgacctccaacctgccgttcgggcagtgggaccagacgttcgccggggatgcggctctgacatcagcgatgctggaccggatcttacatcactcacgcgtagtccagataaaaggagagaactatcggctaaagcagaaaagaaaggccggggttatagcggaagctaa

SEQ ID NO: 441153 - DNA, 387 bp, Serratia marcescens
atgttttctaaacgtatttcatttttctatccactgagttgggtcgtatttctggggttgggggcggtttcgttgagaaccggctctcaagagcagacctttttgaattggcctttatggcttggtttatgcgtgttagggacgttgatcattgttttatgggtggtggttttcgaaccgaatgacacgtcatctggtccttatgcctctggcctggtctgcttcgttgcctgggtgttgtggtttgtaatttcgctattcggaatagtggtgcaaggggttgatttctggccatcaatggaggcgttgttattgcttaatgcgctgactgtgggcctcgcttcgattttcttcctgggtttcttgatggctgaggggggagtgtga

SEQ ID NO: 441154 - DNA, 531 bp, Serratia marcescens
atgatggttactcataagataataaaagatgaggctgcacagttgaaagaactgatggatgaacaacttgagataccatcattcttttcttgtgttaaacctgcaatactaatggaagtctggatggttttatgcccactggttagtttctttttggctgatcaaagggattcggaattactcattgcaacaggaatgagtgcgtttcttggttttttaatatcagtaagcattgtcaatggacggagcttgtatctctcactaccagttcaattgagagagagttcgcaggtgttggagttgttaagtaaaaaagtaaaaagctacgcgatggtatttttatcactggtgctgatattatcagttttggcggcgaatagtgctttaggttctatggcatatatcataccgcttattttcttcacagtaatgatggtgttcatttttaatatggatattggccgctatcgtctttcagcatttaccgccgctctggagcttatcaaatcccgcaaacagggaggtgagtaa

SEQ ID NO: 441155 - DNA, 783 bp, Serratia marcescens
atggcgatgtttgatccgcacagcggaaaactgcagcaggtacgcgaggtagtgcgcttcaccccgctgcagcaggacgtactgaaatttttggcgctgatgctgatggtgttcgaccacgccaaccgggcgctggggctgcatgagccggtgctgttgcttctggggcggggggcgtttccgctgttcgccctgctgtgggggtacaacctggcgtcgcggcctgtccggcaggcgcaggcgacccggctgtggatatgggccgtggttgcgcagccgggctattggctggtaatgcgtcatgacgggctggcgttcaccgatccgaatattttgttcctgttcgctgccgtgacacaggcgctggcggtggcgtcgttgccgatgcgcaagggcgcacctaacccggtattggcaggcggcgttttgctggcgctgtggtgggcgtatggcgccacagacggcagctacggtactgccggcgttctgttgctgttggccagttatgggctgtgcgtttccctgccggggtacgtgacggccgtctggccggtgcgcgggctggcgatcgtggcctggccgttactggtgctgatgctcaatgccgagctgggcggcacgatgatgctggccgggttgctgctgccggcactgctcatcctggggacgctaccgctggcgacggcgttcaatcaacggcgcctgttgccgcgggggtttttcctgcagacctacgtggcgcacctgctggcgctggggctggccggcgtgtttttacactga

SEQ ID NO: 441156 - DNA, 885 bp, Serratia marcescens
atgaaatttacccagcaggacattaaactgttcgatgaaatatttaaaagcgcctccggttatgtattggacttttcaaatagaacgatgcgggagttttttgaagaagaactttccattgatattgataacgaaatatatcttgatgagggcgattcaaaagcaaaaagattacggtgctttatcaaaaagaccgaccgcgatacagtgttaaaagtcatcgataagctgtgggtttatcgtaaattaatgacaacagatcctgtcacggcgcgggatgaaatcttatatgctcaacttgttgagagaataaataataccgacatagtctctgctcaaggaataataccgccaaccatttctgtcattcagtccattgatgtaggttattttcttaatgaattggaaaccatgaaatcaatgccccctcagcaacggggataccgatttgaaggatggcttaacgaactcttttccgcattccgcctgtcgcccaatgctggatttaggattaccggtgagcaaattgacgggagcttcaacttacacaatgaaacctaccttattgaagcaaagtggcacaatcaaaaaacctcagccctcgacctgcatgtctttcaggggaaactaacgcaaaaagcaacctggactcgcggggtttttatcagttggcaaggcttttcacctgacgcattgaatgcctggggaaattcaaaaagcgttatctgtgtaacaggctatgatttatatcacatgctgttgaataatatcagcttgattgacatgcttgaaaggaaaatacgcatcgcggcagaaagaggcgagtattacgtcagcattgataaactttacccaggcatcattaaggctggccacccaaattaa

SEQ ID NO: 441157 - DNA, 849 bp, Serratia marcescens
atggttaggaaactaaaaaaaggtcgattgagtttcctaaccatcgaggtcggtatcttctgcgcgctccacacctacggccggcaactcaatcagcatccgcatatccacgtgtctgtcacccgcggcggtctcgacatcaaacacagcacctggcggcagctcttctttaaaaagaaagaggtagagcaaatctggcgcaacgccgtggtttacctgctgcgcgacaactacgcgcaaatcaaccccggcgccctgccgggtctcggccatatccgtaatgaagaccggtggcaccgctacctgcatgcccagtatcgccgttcctggaaagttcactttgccaaaaagacccgcggcgcctggcgcagcgtgaaatacctgggccggtacctgaaacgtccgccagtggcggcttcacagctccggcattaccgcggcggggccgtggtccatcagtattacgatcaccgcacgcagcagcacaaacgccagaaaatcagccaggaggagatgctgcagcgctacgtcagtcatatcccggcccggcattttaagatggtgcgctactacggcttcctggccaaccgcaagcggggctcactactgccgaaggtctacgacgccctggcgatgacggtacgggaaaaaccaaagcggcccggtttcgcagtgctgatgaagggcttcctgggcaccgatccgtaccagtgtatcctctgcaaaggccggctgcgttttgccggcgccgtggcgggcgagcacgcgacaaaaatgctctctgacaggctgcagcggatggcgaaaaagcgatggcttcagggcccagctttggataagtgcgcctga

SEQ ID NO: 441158 - DNA, 1620 bp, Serratia marcescens
atgaaaaccgaaatccccgacgacattgacgcgctgaaaaccatggtgcaccagcagcaggtgttgctaaagcagctccaggctcagatgtgccgctatgaagggcaggtagccggctatgagcgggaaatcgaacgcctgaagagccagctcgataaactcaaacggatgctgttcggccaaagctcggaaaaactgcgcaacaagctcgagaaaaaaatccgcgaggccgaaaaacggttggacgaaatggaaggccggctgcataccgccaagggggggctggaggccgtagcagcggtaacggcggagtctgctgaaacaggcgttgttccagaagggtcggcagaaaaaccggtcacaccgcgcccttcatcgcgcaagccgctgccgccgacgttaccacgtgagaccgtgcgtatcgaaccggcggaaaaggtctgcccggtctgcgccggcgaattggcggcgctgggtgaaacggtcagcgatcagttggatatcatcaacaatgccttcagggtcatcgaaacggtgcggccgaagctggcctgccggaagtgcgatgccatcgtgcaggcccccttgccggcgaagccgctggaccgcagttatgccagcccggggctgctggcgcgtatcctggtgagtaaatacgttgagcatacgccgctgtatcgtcagagcgaaatctacgcgcggcacggccttgagctgagccgtaacacgatggtgcgttgggtgcaggcactggcggaaaaactgagtccgctggccgatgcgctgaaccggtacatcctgtcggcgggcaaggtgcatactgacgatacgacggtgccggtacaggcaccgggcaatggcaaaacacgcaccgcccggttatgggtctacgtgcgggatgaccgaaacgccggggcatcgatgccaccggcggtgtggttcgcctactcgccagaccgcaagggtgcacatcctcaagggcacctagcggaataccgtggcgtactgcaggcggatgcgtatggcggttatgacgcgctgtatgaaaccggtcgagtaacggaagcggcgtgcctggcgcacgcgcgaagaaaaatccacgacgagcatgcccggcgcccaacggcgctgacgaccgaggcgctcagacgaatagcggagctgtatgccattgaggccgatatccggggcagcccggcggaaagtcggctggcggtcaggaaagaaaagagccggccgctgatgcagtcgctgtacgagtggatccaggaacagatgaaaacgctgtctatacacgcagaaatggcgaaggcgttcggctacatgctgaagcagtggggtgcgctgaacgtgttctgcggagacggttgggtcgaaatcgacaacaacatcgctgaaaacgcgttgcggtgcgtggcgttggggcgaaaaaactggttgttcgcgggctcgaacaaaggcggtgaagctgcggcgatcatctacagtctgctaggcacctgcaagctgaatggcgtggagccagagggctggttgcgcgatgtactcggcaaaatcagcgactggccatcgaaccgggtgcacgaactgctgccctggaacctcacaaccgtaaaataa

SEQ ID NO: 441159 - DNA, 840 bp, Serratia marcescens
atgagttggtacaccttctcgcttatggttctagttcaatcggtcagtgtcgccgccttaagtgcgccctggcccttcgtcgacaacccccggattgtaagctgcaaaaaccactggctccatggggagtgttcggaccaagtagtctacggtagtgatggggttgtgttcgttgacattgtaccggtgggtcgacctgaccctgcacgggggactcagatccgtgcggtcgggatgcattgcgactatgggagtatgctaactggtcaaccgtttggtgggtgccggtggggaccaccagggaccaggcattatccttgggtgaccggtaagtgcgagctgataaacaccgattcatgggaactcaccgctgactccacgtgtgcgaccggccaatggacccaacatatcggcgcagggccggggggcgagtgcgtgatcttcacccagcaaccaccgggtattactgcgaccatgaatacaccatttggtgttctggatgctgagaccgtcgcgaactcgggtaaccggttctgtcagaaggcactacctccgtcagtgcagtgcgacctcgatatccccacgattattgaccaccatacgctgccccagcagggctcggattccgtcaccgtgtttggttctatcgcgtgtggtgccaagcccgttgtggagatcgtgggagggagtgtggtagtcctaggcgtaggagtgaaaagccggttgtctacgaacgtcacgtcagcgaccaccgtgactatgacatcggatctgacggtgaccaacgccgctccgggggaatataggggctcagcggtcgtgcgggtttctccgtactaa

SEQ ID NO: 441160 - DNA, 264 bp, Serratia marcescens
atgttgaccgtttccacccccacccaatccactccgtcgccggttattcctgacagttacaccccgcgcgagcgctttatccgcctgccggaagtgctctacaccaccggcctgtcccgctccaccgtgtacgagatgatgagccgccggcagttcccggcccaggtctccctcggcggtaaaaacgtcgcctggctggcctctgaggtcgagcagtggatggacgaacgtatcgccaaccgtcaccagggggctgccgtatga

SEQ ID NO: 441161 - DNA, 870 bp, Serratia marcescens
  misc_feature (761)..(798): n is a, c, g, or t
atgaattttaagaaaaaacttgaagagcattttaagcagttcgaagcatccccagtgttatttgttggctccggagtgtctcgtcgttaccttggtgtgccatgttggcaagaacttttgaagcattttgctgaggctattggggaaaatcatataaaattaaaaacaaaatcaaatggtgacctgcccgaatatgctcaattattggtgtcggcatatgctgagaaatggtgggatactgaagaaggaaaattagcattaagtgaaaaagaacaggagaaaactttcattaacgaacagtctcctttgaagttgtcaatatctaaatatattgagaatgcacatgaaaatattatagataatgatgagttaaaacacgaaatttctctttttgcgaaagcaaatattgatggggttattaccacaaactgggatgtttttctagaaagcctttttcctaaatttacaacctttataggccaggatggattgattactggcaggagccatggtattgccgaaatatataaaatacatggttgctgcactgagcctaactcattgattttaacatcaagtgactatgataaatatagaaagaaaaacccttacctatcatctaagttactaactatgtttatagagaggcctgttattttcttaggctactctttaacagatgaacatatagctgaaatcctggaagatatagttagttgttttcctgatgccagtttggattttttacagaataaattatnnnnnnnnnnnnnnnnnnnnnnnnnnnnnnnnnnnnnncagtacaacggagtttgttgtgggatatggtgctatttcgatggtaaaaaaatcggaatcgatggcagctaa

SEQ ID NO: 441162 - DNA, 192 bp, Serratia marcescens
atggctacgaccctcaccccaactcacccgacattctgtttcctgtttgcggccgtacgccggtctgcgctgacggcttcaccacgtatggtgcgcaccgtggcggattctgagcacaacgcccgccgcgtgctggcccgtgattacgtgttgtcctttgccggtcgtctgccggttaaggcggcagcatga

SEQ ID NO: 441163 - DNA, 252 bp, Serratia marcescens
gtggccgagctggtcggtcagcaaggcaatgaccgaggcaaacgatgcctgttgcgcgacgtcggggcgctgcccgccgaggtcgagggtgtccagcaggtcgaggaacagcacgccggtggcgtgcgcatgctgaagacgcagaaaatcggcgtgcgggatagggtaatgggtgtcgcggtagtagcggtcggccagggtgttcatgccaccgccttaaccggcagacgaccggcaaaggacaacacgtaa

SEQ ID NO: 441164 - DNA, 795 bp, Serratia marcescens
atgccgcgcagcgtttattacgcatcgcggtaccaacgtgttgatgccgaacgcctggaactgcgagcacagatccgggcgttacatcagcttagccgcgggtccgccggcagcaggacgttaagtttgctgatgcgcaggaagggttatgccattgggcgctggttggccagaaaactgatgcaggaatgtggtttactcagtcgccaaccggggaagcaccggtatcgtggagcccgagaagaagcagtcgcctcgccaaacctgctgaaaaggcgatttatgccggcctcaccgaaccaggtatggtgtggagacatcagctatatccgcctccatggcggttggtgttaccttgcgttggtcgtcgatctttattcacgccgcgtggtgggctcggcactctcgttatcaccggatgcgaatctagcctgtcgcgcgatgcgtaatgccctggagacacggcggcgtcatgggcgactgctctttcattcagaccagggctgtcagtataaaagcaaacaatacagacagttattatggcgaagtggggtaatgcaaagcatgagtcgccgaggaaactgcctggataactcaccgatggaaagggtgttccgaagtctgaaaagtgaatggataccgagcacagcgtataaagatctgcatcatgcctcgcaggatattcagagctggctacaaacctggtacaaccagattaggccacataaatataacggagggttatccccctgcgagtacgaaaaacaatggaaagaggctacgaaggtgtcctga

SEQ ID NO: 441165 - DNA, 318 bp, Serratia marcescens
atgacccaacgtaaacaaaccaaacgccgtttttctcctgagttcaagctggaagccatcgagcaggtgactaaataccaacagcgtgctgttgatgtcgctctagccctggatttggatcccagccagcttcgtaaatggatccgtcagtatgaagccgagctccagggggttacgcctgccggcgtggcagtgacaccagaccagcgtcgcatccaggagctggagaaacaggttcgccgtctggagatggagaaagagattttaaagcaggcagccgtgttgatgagcgaaatccccgtcaaatctgtgcgctga

SEQ ID NO: 441166 - DNA, 303 bp, Serratia marcescens
gtgaacacgccatcgctcaccttggtcaccgcacccagcgtcaccttgctggtgtcgccacccgccgccgtgataccgaagctcacgtcaccggcgttcagcgtggtgatcaggttgccgttcgcgtccttcgccgtgaacgtcagcgtcgaggtcgcggtgttgtccgccgcgatactcttcggcgatgccgcaaacgtcgagttgccctcgccggcatccggcgtggtgcccgccgtcagcgtcaccgtgtcgctcaggccgctcaccggcgtcccgttcgccgccggcacgatggtgtag

SEQ ID NO: 441167 - DNA, 192 bp, Serratia marcescens
atggctacgaccctcaccccgactcacccgacattctgctttttgtttgcggccgtgcgccgttctgcgctgacggcgtcaccgcgtatggtgcgcaccgtggcggattctgagcacaacgcccgccgcctgctggcccgtgattatgtgttgtcctttgccggtcgtctgccggttaaggcggcagcatga

SEQ ID NO: 441168 - DNA, 1416 bp, Serratia marcescens
atgacaacgattaaccctatcttccagccgttcatcaatgcgcatcgttacaaggtcgctaagggcggtcgaggtagcggtaagtcgtgggcgatggctcgcttgcttatcgaggcatcaagacgtcagccagtgcggatcctatgtgctcgtgagctgcagaacagtatcagtgattctgtaatccgtttgcttgaagacacaatcgagcgcgaaggatatgcagctgagttcgaaattcagcgctcgatgattcgccatcttggcactaacgctgaattcatgttctacggcatcaagaacaacccgacgaagattaaatctctcgaaggtatcgacatctgctgggtagaagaagcagaggcagtaacgaaggaatcatgggacatccttatcccaaccatccgaaagcctaattctgaaatatgggttagcttcaacccgaagagcattctcgacgatacctatcagcgcttcgttgtagaccatcctgatgacatctgcctactgacggttaactacaccgataacccgcacttccctgaggttctccggctggagatggaggagtgcaagcgacgtaatccaactttgtatcgtcacatctggctcggcgagccggtaagcgcaagcgatatggcaatcatcaagcgcgagtggctggaagcggcaacagacgctcacaagaagcttggctggaaagcacgaggggccgttgttgcatctcacgacccgtcagataccggtccggatgccaaaggctatgccatgcgtcacggctcagtagtgaagcgcattgctgaaccgccagagcaggtcgatgtgaacgatggcgcagattgggcgactggtctggcgattaacgacggtgctgatcacttcctctgggatggagacggactcggagctggcctgcgtaggcaggtaactgactcattcgctggaaagaagatcaccgcaaccatgttcaagggtagcgaatcgccattcgatgaagatgcgccgtatcaatcaggggcttgggctgatgaagtggtgcagggcgacaatatccgcactatcggcgatgtgttccgcaacaagcgcgctcagttctactacaccctggctgacaggctctatctgacgtaccgcgccgttgttcacggtgattacgcagaccctgacagcatgcttagcttcgacaaggaagctatcggcgagaagatgcttgagaagacattcgctgaactcacgcagatacagcgcaaatttaacggtaacgggaagcttgagctcatgactaaagttgaaatgaagcaaaagctcggcatcccgtcacctaacctagctgactccctgatgatgtgcatgcattgtccggcgatggcgcaagaagaaacggaaatctacgttccctcatcctccggttggtaa

SEQ ID NO: 441169 - DNA, 243 bp, Serratia marcescens
atgtacgcactgaaacaacacacagctgaaagcaccaaggttattgctctcggaaataggtttaccatccagagatattctccattgaccagtaatgatgcgttcggctgcgttactggagaggatgaaagattttgcttcgaaattggcgcggaagtagacgcctatatcactaccatagaaggtaagacggtagaggttatcaaccgcggatgcggctctaaacttcagcagccaatttaa

SEQ ID NO: 441170 - DNA, 282 bp, Serratia marcescens
atgaacgaagctaaaccgcaagatggcagcaccgtgaagggatatcgcactttaacgccaggtgatattgagcgcatgaaccgcctcaaaggtgccagtcgtcatttttgcagtctgatcgaaactgagcgcgatgaggttgcagctgagttatgtgaaacgggaaatcattcagctgaagcgcatgaggccgcacgttgcctggctatcgctcacaccaagatgcaggaagcctgcatgtgggcctgtcgggcggtggctagaccggatgtggattgctaa

SEQ ID NO: 441171 - DNA, 438 bp, Serratia marcescens
atgatgaaaatcagcaataacggtatcgacttcctgaagcgccaagagggtgaaaagctctcagcatacaaagacacgcgcgggatccccacgatcggcgtcggccatactggtttggttgatggcaatcctgttgcaatgggcatgaccatatcgaaagagaaatcatccgacctgcttcgctttgacctgcagtggactgagagagctatcaacacggcgaatgtcacgctgaaccagaatcaatacgacgctctttgcagcctggtattcaacatcggcgcttcagcattcaacggctcgacactgctcagaaaactcaaggttggagattattccggtgctgcagatcagttcctggcatggaaacgagcaggcaacgatccggatattctccttcctcgcaggcagcgggaacgtgcgctgtttctgtcatga

SEQ ID NO: 441172 - DNA, 213 bp, Serratia marcescens
atgagtgatttattgaaatgggtattcattgagcgctggctcgtaaagtacgcggtgcgtgactggatgacggctgatgcaaacaagtttagcgagaggaaaaaatactactttgcccgaatggttgaggatttttgcgggatgaggcgtaaccacttagtaaggcgtgacctgcaggaaatattacaactgagaggtaaagttgatggctaa

SEQ ID NO: 441173 - DNA, 291 bp, Serratia marcescens
atggataagctacgcgaagagtttgagcagtggtggaaatctgaatacggagctcctctttcagatttcaatgaattgtggtgcgccgaaggtggttattgcgatgaggatttagatcggcaatgggaagcatggcaggccagccgagccagcatcgtggttgagtttattgagccaccattctatgcggtaaaaaaagactctacaccgatagacaacattaggtttggatccaaattagcaatcgaacaggtaaggcgatccatcggcctatcaatcaaaggggagtga

SEQ ID NO: 441174 - DNA, 231 bp, Serratia marcescens
atggtcaatgaagctatcaacaaggccatctcattacttggtagtcagaaaaaactcgcagactccgttggagtaagtcagccgaatgtatggtgctggttacataacaaaaagcgtgtttctcctgagaacgtaacggcgatcgttacggccaccaagggtgaagttaaggcctacgagatccgcccagatttaccgcagcttttcccaagacctgtagaagctgcataa

SEQ ID NO: 441175 - DNA, 669 bp, Serratia marcescens
  misc_feature (92)..(101): n is a, c, g, or t
atggataaccgtggttatatgttcgagcgcatgaacatagataccctttcagaacgattaaaactggcaatggaggaaggtggctttacgcnnnnnnnnnnctttacgcaagcttcgcttgcagaggctgctggaatcgctcagcctagtgtttggaaaatcgtcacaggcaaaactaaaacatcatccagagttgttgagctggctacggctttaggcgttcgccctgagtggctagctaacggtataggcccaatgcgggatggtaagtcttcggcaagcgatgggcaggatatcgatccgacaaccaagcttcctggtgtgtttgttgttcccttctttgaaggagagcaaaagaccaacaatgtcgcgatagtccctgacagcattaaatcgaaaaactgccgggcctacaggcttagccatgacactggattcccagagatgcctaagtcttcggtaatcgtgatagataccgatgaaaagcccggcaacaacgattttgtttacgcaactactggtaattctcaagcggtataccggtacatgctgggagataacgacggatacttagtcccaagcaacgataggcttcctgtcattcctatcggagacaaggccaaaatcattggcgtcgttgtatacatatcaagaaccattaaacggtaa

SEQ ID NO: 441176 - DNA, 774 bp, Serratia marcescens
atgaaagagcgcccagtgatgccagcaaatgaaaacgtgcagctcattcacgcagattgcatggaagccatgaagcatatcgctgatggctccgttgatatggtgtgcgctgacgtgccctacggcaccacgcaatgtgcctgggactctgttcttgaccttgagctgatgtggtcacacctgcaccgcatcgccaaaccaaacgccgctatcgtgctgttcagtgcgcagccgtatacctctgttctggtcaacagcaacgcccgaaactggaagacggaatggatttgggaaaagccgcatgctacgggtttttttaatgccaaaaaacaacctcttcgtgcccatgaaaatattcttgtcttctacaggaaacagccaacttacaacccacagatgactcacgggcacccacggaaaacatcaaagcgtggcgagccaaaaactgatgtttacggttcggctaggaagactgttacttacgattcaacgtctcgctacccacgagatattcaaacattctcaagcgataaacagacatgtggcggccttcatccaacgcagaagccggttggtctggttcgttatctgatcgagacgtacagcaatcccggcgatgtggtgctggatttcacgatggggagcggtaccgctggcgttgcatgctcagcgaccggccgccgattcatcggtatcgagaaagaacagaaatatgtcgaagttgcgcaccgtaggattttcggtgacagcgctagggaggtggagcgtgggtag

SEQ ID NO: 441177 - DNA, 183 bp, Serratia marcescens
atgctgctgttatccgagccgaagctgcagcagaagtcgcacagtcaggcgctgatgcttatcctgatgcctctgctgcacaagctgcgatcgatgccggcacagaaactcggcgttatttttctgttcgctcaacaatttcaacgcagtgggttgatgaatatgagaacgtcaacggtgtag

SEQ ID NO: 441178 - DNA, 282 bp, Serratia marcescens
atgagcgaagctaaaccgcaagatggcagcaccgtgaagggataccgcactttaacgccaggtgatattgagcgcatgaaccgtctcaaagatgccagccggcacttttgcaatctgatcgaaactgagcgcgatgaggttgcagccgagttatgtgaaacgggaaatcactcagccgaagcgcatgaggctgctcgttgcctggctatcgcccgcaccaagatgcaggaagcctgcatgtgggcctgccgtgcagtggcccgaccggacgcggattgctaa

SEQ ID NO: 441179 - DNA, 864 bp, Serratia marcescens
gtggaagcatctacttcatttaagattttttacgatgccaatgacaaagagctggcaaatcatgcaattgatgcaaaaactttgggactatcaattacctcaatggcagagctaattgaaactgctgatgaattgctcaatgaaggtcagcaaactgtaaaagtcttggtaacaaacccagccgaggaaggttccctgggtattgctttcacgattgttgaactattgccatatgcaattagtgcagcgaaggttataggattgacgggcctagcagctgcagggctcggagggagtgccttatcattaatccgtcaacttggtagtaaaaaggtgattgctatcaccaaaaaaacaggcaccaacacttcaattttggaagtcgaaggcgaagagattgaatgtagtaatgaggttgccaagttagtaacagatcctactgtacgccaagcactcatcaatgttgttagggctcctctgagtggtaaagatgatcctgtttttaagatcattgatgaaaacggcgaaacggtactcaagttggaaggtgatgaaaccgaagagatcaaaccgctccctcgtggcacccttcttgaaaaggaagtagaaacaaaggatgtgaacgttaagttcattcaagtgaattttgacggtgataaaggatggcgaatagagtataacaacgaccaacactctgtggcacttgatgacgaggaatttttggtcaaagttcgagcagggaccatcacattctcaaaagaagatctattcgttgtctctcttgaaacaacaaaaaccttcactgctcgcggcgtaacaaaccgctatgctgttaagaaggtcaaacggcaacgtccggcgtaa

SEQ ID NO: 441180 - DNA, 240 bp, Serratia marcescens
atgggtagcattaccctcgccgggcggcagatcttcattctcaacgaaaacgatagatacccagagcctcagcaaaatagccctccgatgttcgcaattcgcgaagacgaagagcagcagcactggctttatgtgtggcacaagggacgctggccgcttgtgtcagatgtaccgtttgaaacagagggcaaagccgttgatgccgcgctctcattcgactttgccacgctgtacaaatag

SEQ ID NO: 441181 - DNA, 195 bp, Serratia marcescens; identical to SEQ ID NO: 436095

SEQ ID NO: 441182 - DNA, 549 bp, Serratia marcescens
atgacccccacagaaaaactaaccttgctcatgatgtgcgacctatttgatcatttagaggtgaatggagagattgattcttccatagttcgtgaagctgtgattagtggcaatgtctgggctattgaacgcaaataccccatgctgttgtctgcagaggatgtatcaaaagacgttcagaaaagagttgatgcagcattatctgcatatcgcaacttaagcaattcacttcgtaaacttacatctgacgaatcaaacgagctaaaaaacaagcacaatattaaaactcatgaacacgcgattcagttcccaggttacgatggtaacaatgaatcggaatatttaagcgtgacctcaatgcttggtacgctaggcttatacgctgaacaacaagagatcgataagaactcgcatgaggaaaatgcgggcaaatacctcaagttgacttctgctcttgaagttctaaaaaaagccgggcatgacgtaaataaattggataagagtcacctggatgaaatattgtccctgtgcccaactttttatgaataa

SEQ ID NO: 441183 - DNA, 753 bp, Serratia marcescens
atgtatgtggataaagcgcttggcggcgtggaatgcgtccagacactttcacgactcaatcgcacttacccagggaaaaaagaatcaggaacctttgtactcgatttctataatgagccggatgacattctggcggcatttcagccttactaccaaacggcagaactgactgatgtcagcgatccgcagctagtctttgagctgttcgagaaacttcgcaccagcggcattttcctgtggaacgaagtggagcaattctgcgaagcgttcttcaccaagaacaaatccaatgctgcaataagtaatatctgcaagccggcggttgaacgctggaagcaccgttatacctcagcgattgatgcctatgtgttggctaaagagatgtttgaacgcaccaagaagaccggcgatgtggtgctgataactaatgcagaaaacagcttcaagacgtgcaaacaggaaaaagacaagctggatatcttcaaaaaagatctcggtagcttcgttcgtttttatgagtttatgtcgcagatcgtagattacgatgacaagagccttgagaagctgagcctgttcgcacggcatcttcgcccgttgctgcatgaacagcgtattgaagacgatgagattgatttaagtaatgtggatatgagccattaccgtttgtcgaagcttcatgaacaacatctgaagctgcaggaagatgcggaagaataccaaatcacaccggttagcaataaatcatgcggttag

SEQ ID NO: 441184 - DNA, 243 bp, Serratia marcescens
atgggcatttcgcaatttgcgaaatgttgttgcgtgcgggggtcgatgttgaacataaaaataacctcgggttttgcgccagtgacctcgcgcaggagcaaacgctacttgatctgttggcccattatcggcaatctcttccgcctgccgggcagcaaccagcaggggggccggctgatgatgcagaagttgaagccgaaaacgatgttgaaacagaacctcccgaaactgaagccgcgatga

SEQ ID NO: 441185 - DNA, 1068 bp, Serratia marcescens; identical to SEQ ID NO: 422290

SEQ ID NO: 441186 - DNA, 924 bp, Serratia marcescens
atggcaaacctacctgaaaccccacagtgggaagacggcatctaccagattgaggtctccgaccctgtactgggcgggcctgacgggataaccaatcgcccgctcaagcaactggccagccggacagtgtacctgaaacagcaggtcgagaaaggtggttcagacctggctgaacacatcgcggcagcagacccacacacccagtacgcaacgaaagccagcccgacattcaccggcatcccaacagcgcccacgcctgcaaacagcgataacagcaagaagctggcgacgacggagtttgtggccaaagcacttgcggcgcttgcaggcagcgcccctgagacgctggatacgctcaaagagctggctgatgcccttggtaacgatcctaactttgcgaccacggtactgaacaaactggccgaaaagctggccaaagaccagaatggtgcggatattactgacaaagcagaatttttgaagaatataggtgttgggtctgctggtaaaagaaatgtagggggcggctcaggtcaaattcctgatatgtcgttctttcaatcaacgaaaggctctaatggtatccagtatcttcccggaggtatcgttattcagtggggaatctggcaactctcgaccgttggtaactacaatgccgaatcgataggcggtattacatggtatacccactacaccaaaccgctttacaccatcgcgtttcctaacatggcgctggtgaattttatggggttagctggctcgacctttgagggccagagcaacgagtacaatacattcgtccgttcgaacatgagcgcgggaagtgatgggcaagcgggatcacgcacaaacgcctgtgtctctgtcacctcccgtattttggggtataccccaaccgtacattggcttgctatagggtattga

SEQ ID NO: 441187 - DNA, 429 bp, Serratia marcescens
atgatgactaaacagcgtcttattcaactcatccatattgcccgcagcgacctccagatggatgaggatacctaccgccagatgctgcaggggttaaccggcacggcttcaaccaaagggatggatcttccgcagctaactaaagtgctggattccatgaaaaagaaaggattcagggttaagcctgccggaaacgctaaaaccggtattgcgctggatgaccatccacagtctcgcaaaatacgcgctctctggctggatatggctgctgcaggcgttatccgtgacagttctgaactctcgctggcacgttgggtgaaacgggaaaccggtgttgacgggttgcgctggctgaactcggaacaggccagcagtgttattgaaaagctcaaaaagtggcattaccggacaacggggaaacaaacatga

SEQ ID NO: 441188 - DNA, 390 bp, Serratia marcescens
atgagcgaccatagccagtttcgcagtaaagggcctgaattgctggttgaacttgcccagcataccgctacaacggtgcgtgaaatcatcgagattgacatcgcagtggctgaccaaatcggcgaggcagtagccaaccgcatgatgcaggtctggggcgggcagaacgtgtatttcccgatgggcatggtctggaaggtcagccagcgcgacagggaaatctttctggagttcgacggacgcaaccatcacgagctggcccgcaagttcggcgtttcgctacagtggatctacagcgtggtgaaacgggttaaaagggaagaactggatcggatgcagggtaagctgtttgatggtgaacctgatgacgatgccggaacgagggaataa

SEQ ID NO: 441189 - DNA, 2010 bp, Serratia marcescens
atgaatccgcagcaggcagcgacctttgccgggatgctcggtaaagcggccacggccaccaaagcggatatgactgacctcgccaaaatgacctatgcctttagtgatgcgctgaaaattaccgatgccaaagagcttgagcgggcgtttggtatggcagcaaccggtgccaagctcggctcgtttgaactgaaagatatggcaaaggcactgccgggtatggctaaagctttcgctgcacgaggaatcacaggcaaagaagcgattatgcaaatcgtctccagcctagaggtagggaaaggcagcggctctgctgaagaagccgtcaccaatatgtccaactggctggcggcaatggggcgcggagatactatccagaaatacgctaaggctggtgtggattatcaggggtcaatgcaaaattacgtggcccaggggttctctcaatatgaagcctctctgaaaattgccaatcgctttattgacggtaaaggcaaggcatttgtgcaacagtggaatgcagcaaaggattctggagatcaagagggccagcagaagctgatggagtccttcgggctggcggaagtcttcaccgatattcagaccgtcaaccatctgctgtcgatgcgccagggctgggataaatatcagtccaataaagaggaaatgaatagtcccacagcgcagaacacgcttagtaccgattttaagaagcaaaatgatacgcttgaggctcgctggcgaaggactcaggtcggttttaatgagtcagctatcagcatcggagagtcattaaaaccagcattaatccagttgggggaaacgttcatccccttaatagacagcgtcggcaaatggattgcggctaacccgcaactggtgagtggtgctattaaagtggttggtgcattacttgcattcaagatggccaccatcggcctcaagctcgggctgaatcttcttatttcacctttcgtcaatgtctggaaaaacgcggtgctcctgcgggctaactggctgcggctatcgctcgcgctgggtgaaggcggcaaactccgctggctggtgaccggcttcagcacggtcgccaaaggagccggaacactggcccgcgtgctcggtggtggtctggttcgtggcctaatgctcgcgggacgtgccgttctcttcataggtcgggcgctgctgatgaatcccattggactaatcatcactggcgtagccatggccgcttatctgatctaccgctactgggggccaatttctgctttctttaagcgaatgtgggcgcaggtaacatctgctttcagtaacgcctggagtggtatcaagtcggcatggaatggcgtatcaggctggtttactggtttgtgggggaatgttaaagcagcttttaacggtgggatcattggggtcagcaaacttattgttaactggtctccactaggcttgttctataaagcctttgcgggggtgatgagttggtttggcgtcgatatgccgaaaaactttactgacttcggagccaatctgattagcggcctcgttagcggtattggtaataaactgtctgcagcgaaagacaccatcgttaacttcggcaactccatttcgggctggtttaaagaaaccctgggtattcactccccgagccgcgtatttatgggctttggcgacaatattggccagggggccgctatcggcatgcagcgtaccacaccactggccgcactcgcgggtcagcgtctggccaccgagatgacaccggatgttccccgcatcccgtcgccggaaatcatggctgcgggttattcaggtcgtggcgcggcagcagccggtggcggaacctctggtggtattcaggtcagctttaatccccagttttacctcaatggcaaagaaactgccgcacctgccgggcttgctggcgcactgaatatgagcctgcatgagctggagaaaatgctggaacgtctgctggctcagcaacaacgcaggaggtacgaataa

SEQ ID NO: 441190 - DNA, 885 bp, Serratia marcescens
atgtttgcggtactgggtgatattgagttcgagctgattacctactgggacggcttcgaagcgacattcggcgtcgattatgccgaacatgcccgaatcgaaggaaagcccggcctgcagttcgtcggtgataagctggacgaaatccagataagcctggtcttccatcagcattattgtgtgcccgatgtggagctggcacgcctgcgaacagccatgaaagcccatcaggcgctggcgctggtcttcgggaatggtgactatcgcggctggttcgtcattaccgacgtgactgcgaccagcgaacagaccgacagcaccggcaacgtgctggccgttaacgccactgcatcgctacgggagtatatcggcgacccgaagaacccgctgcagccgcctgcaatacgcacgcaggttcccggtgtcggggcggtttcgggtgccgttccttccccttcgggggtagcacagtacgtccgcgacggcgtcaattatgccaaacaggcgcagtccgttctccagaccaccatcagtgccgttcgggtggcgcagaaaatgaaggataaccccgccgtcgctctgacccgcgtgccggggctgatgagcggactgggcaacgtgtccggggcattaggacaaagcgttccggcatttactgcgctctcagaatccatgcctgatgccatcagtctggccagagccaccagtgatgcggccacgtatgtgcaacaggcccagtcttcgctgaatggcgttgacggcagcaatatcgctgcggcgctggatgccgtttccgggcagcttaactccgccagcaccaccttcacccgcatgtcgccggggttaagcactatggcagccaaaatactggcgaggagtgtgtga

SEQ ID NO: 441191 - DNA, 213 bp, Serratia marcescens
atgtttcttgaacatgtcacccgtgacggagagcgctgggacgctctcgcatggcagtactatggcgacccgctgggttatccccgaattatcgccgctaacccgcatgtggccatcacgccggtgctgccctctgggttgttgctattgattccggttatcgaggctaccgatgccagtacagaagaggatattgccccatggctgaggtaa

SEQ ID NO: 441192 - DNA, 1170 bp, Serratia marcescens
atggctgaggtaaacagtaccacacaggctgcgtcggcattaaccggcgtcagcgatgttctgagtccggtgttcacgctgtggtatctgcagaagaacatcaccaccgatatcgccccctatgtcacccgcgtaacctacagcgataacatcaaaagcgagtccgataccattgaggtggagctggacgacaccgatggtcggtggctggataagtggtatccgggcaagggtgacacgctgacgctgaagatgggctatcagggcgagaaactgctgtcctgcggtacgttctctatagacgagatcgaagtgagttcgcccgcgtccgttgtcgctatccggggcgtagccacatcggttaacaacgccctacggactaaatccagtcgcggctttgagagcaccacgctggcagctattgccggacgtatcgccaaaaagcatcagttgaagctggttggcagcattgaatccatcaaaattgaccgggtgacgcagtatgccgaaacggacgtcagtttcctgcgtcgactggccagcgagtatggctatgcggtgaaggtcgttagcgaccagctgattttctcccatcttgccacgcttcgtggacaggagccggttaagcaactgaaaccgcaggatgtcgcccgcttttccctgcgcgacaccatcaaccgggtctacaagtccgcaaaggtgaaacaccaaaagagcagcagtaaaaagctgatcgtctacgaggctgacggtggcaccagcgaaagcgagaaacaggccaaaggtggcaaggtcaccagcgccgactcactgaaggtcaacagccgcgtcagcgaccctgacagcgcaaaaatcaaggcggactccgcgctggccagccataacgaataccagcagagcggctcactgacgttaatgggcacgccacagctgacagcgggcaacaaaattgaactggtgggctttggtcagttatctgggccatggctgataaccactgcccgccatgcgtttgaccgcaacagcggctacatcacagaactggaggtggctcgagggccagtcacacagggcaaggcgaagaaaggtaaaaagaacggcaagagccagacactgaccgtctacaaatacgatggcaccacatccacggtaataaagggagagaagtaa

SEQ ID NO: 441193 - DNA, 513 bp, Serratia marcescens; identical to SEQ ID NO: 15559

SEQ ID NO: 441194 - DNA, 348 bp, Serratia marcescens; identical to SEQ ID NO: 15558

SEQ ID NO: 441195 - DNA, 1104 bp, Serratia marcescens; identical to SEQ ID NO: 15557

SEQ ID NO: 441196 - DNA, 579 bp, Serratia marcescens
atggctgagccgctacaacttccgccgccgcttgagggtgatatcagcctcagaacgctgggaagactggccgggcggctggataacatcgacctgagcgtactgatggtctatctcgtcgatatcgtcgacagttccgcgctgccatggctgggcgagcagttctcactgttcggcgatggctgggagcttgcggagtcggacgatgtacgccgcatgcttatcaaatccgctatcgagctgcaccgctacaaagggacgccgtggtcaatccgggaaattatccgccgtttcggcttcggtgaagtggatctgattgaaggcactggtcagatcggctacgacggcaaacacacttacaacgggctttttgtccacggcgatgctgaagcatgggcggtttatcgcgtcatccttcagcagcccatcactaacgatcaggcggcgctgttacgccagacgctcgctgcctttgcaccggcccgctgccatctggcgagcctggagtatcagtctgtcgctattcgatacaacaacaccgtcaattatgatggcagctataaccacgggagcagttaa

SEQ ID NO: 441197 - DNA, 924 bp, Serratia marcescens
atggcaaacctacccgaaaccccgcagtgggaagaaggcgtctaccagattgaggtctctgaccccgttctgggcgggcctgacgggatatctaaccgccaggctaaacagctggccagccgcacgctgtacctgaagcaacaggtcgaaaaaggcggaacagaccttgcgaaacacatcgcggcagctgacccgcacacccagtacgcgccgaaggacagcccgacattcaccggcacgccgacagcccccacacctgcagctaacgacaacagtaaaaaactggtgacgacagagtttgtggcaagagcgattgcggctcttgctggcacagcaccagagacactggatacgctgaaggagctagcggacgcccttggaaacgatccgaactttgcaaccacgatactgaacaagctggcggagaagctggccaaagaccagaacggcgcagatattccagataaggttgcatttttgcagaatgtaggtgttgggtctgcaggaaaaaggaatgtaggaggtggttcaggtcaaatccctgatatgtcgttctttcaatcaacaaaaggctctaatggcatccagtatttaccgggaggtatcattatccagtggggaatctggcaactaactacagtcggtaactataatgccgaaacgataggtggcattacatggtatacccactataccaaacccctttataccatcgcctttcctaacatggcgctggtgaattttatggggctggctggctctacctttgaaggtcaaagtaacgaatacaatacttttgttcgttcgaatatgagcgccgggagtgatgggaaagcaggctcgcgcacaaatgcatgcgtttctgtcacctcccgcattttggggtatacacctactgtccattggctagctatagggtattaa

SEQ ID NO: 441198 - DNA, 441 bp, Serratia marcescens
atgacgctggacaatctggtcgggctgggactggaggtgataacgcctgacgcgggggcgatcaaaaaattgctggccgccgccgcgcgcaaccgacgcgatgcgggtatcactcagctcagcaatgagagccgtttcgacacggcatataaggcggtcatgcaaatggctaatgccgctttacaagccaaaggataccgcacgctgaccagcaagcccggccatcaccagatcatgatccaatcgttgccgctcaccgtagggctgccgcgcgaggcaatgatctgcctggacgcattgcgaaagcagcgcaacgtggcggattactccggcgacttggtgacggacgcggcggtacaggcttgccttgagcagacagaggcgctgtgggggcggcttatcgactggctgcaacgtgaatatccgcagatagtggcgtaa

SEQ ID NO: 441199 - DNA, 207 bp, Serratia marcescens
atggaaattatattccacaaatgcgagtttgtcggtgaaatgatgccgctgctggattcgcgcaaggtgctgtacctcgccggctacgaacgcattgaagcggtgctgtataactgcattcaccacgggcaattacccgccgatttacatacccgccgcgcgctgagagatcccctcataatttccccaaagcgtaaccatgtgtga

SEQ ID NO: 441200 - DNA, 375 bp, Serratia marcescens
atgaacgacaaagaaatcgagcaggaaatccaagccaaaggcaaaaccgcgccgcgcgtgacgcctgatcatatcgagagcgttattcgctcagaggtctatttcaccgtcggcgatgccatcaaggcaactaccggcgtgagaattaaatccgaatatgtcgaaggtgagcgaattttagccccgctggatttattgaccatctgcaccttggtgctgcgcaacggcttcacggtcaccggcgaaagcgcctgcgccagcccggagaaattcgacgccgaaatcggcatgcagatcgcccgcgccgacgccgtgcaaaaaatctggatgctggaaggctatctgctcaaacagagactgcacgaaggcaaataa

SEQ ID NO: 441201 - DNA, 2685 bp, Serratia marcescens
atgccaatcgtcccaacgtatgagcgtcaatcccgcgcggaaatggcgccggttaatcaggttgatattcgcgtgccgcagactggcgcaggcgaagccttggcgcaggttggtggaaactaccttcaggctattgggcaagagaagcaaaagcaggatcttgccgacatgcaggacaagctcaaccaattttccgtgtatgccgatgacctttacaacaaccctcagaacggtctgataaccctgcagggaaaaaatgccattggccagggggaggcattcgccggacagatttccgctaaagccacggagctgcgcgactcaattcctgaatacatgcgtcaagcatttgaccagcagatccagccgctggggcgtagttatggcaatcgcgcgcgccagtacgaagtcgggcagaagcagcaatatgaatcaggacaatatcaaggggttcttgacaacttacagcagcaagaatctgaatcttacaataatccgcaggaagtaactttaataaaacaaagccgtgtaaacactattattcaatatggtcaatcacatggttggtctcctgagcaaatggcagcagagcttcacaaatataacaatcaggcactggagaagcgcgcccaaaattatgcagttagtaacccaggcgggtggctaaatggtgattttatgtctgccgatagcggcggaatggacatgcgtgcaatagctatcgttgaatctggaggaaaacatataaacgctgatggaagcgttgtcacctcttctgagggggcgcagggaagattccaattaatgcctgcaacaggaaaagaactagctgccaagcgaggtgtgcggtatgacccaaaagatgagcagcaaaacgcgctgttggccagcgattacgccaacgaactttacggaaaatacggttcagaaaccctggctggcgcggcttacaattgggggcagggccgggttgataagcttatcgataagattggagacccgcgaaaaggagaggtttccgaaactgaatttattcgcaatcttccggcggaaactcgcggctggctggcgcggtaccgaaaaaataaaaccggtctcgacccggtatcggtaaataaaatcgacaatatggccgaggcgcaaatccgggagcagcgcgtagcggttcgcaatcaaattgatccgatactaaacaacaccatgtcgcagctatacaacggtgaagttcctgatgccatgccggacagggccacgattcaatttgcgtatgggcagcagggtgaaggtatggtgaagcagcttggcatcgccatcgacagcgcgcgcacgttccaggccattcagtacatctcgccggcgcaacagcagcaggaactgtcgaaggtaaagccgcaggttaacgatccggactatgcgatcaagatggacgcatacggtaaactcgccgccctggtgcagaaaagcaacacggcaattcaggctcagcgcgacgccagccgtttcaacgacgccatgctgatgggggagaagcttgatccaacagataaggcgatgcagaaagctgctgatgcgacacgggcggctcagaattttcgcattaatgacgccagcacacatgacgatgttgtgcagcaggttgcgcagaccgggattattccagacaaggtcaccacgcagcttacggcaatttccagagccaaaagcccggaggttgtgaagcaaggagcagaactgttcagccgactgtatgaaacagatcaggcctcggtaggggatatgccgaaagagatgcagggcttttatatgacggtcaagcaattaaccgattcaggcatgagttcagtcgatgcggttcagcatgctcaggacgttacttataaccaaaacgacgcacttaaaaagcagctatctgcagaccaaagtacgagcccttataaaaaagagcgcgataaggctatggattctgcacggagcagtatggctcagtggtttcgaattgacccagaagctgaagataaaacgccagaggctgcggcgtttcgtgcagattatcagactctttatgatcttaactaccgaaccactggcggtaattcagacgcagccaaaaagcttaccaaccaacagatatcaaaaaactggatgatcagcacggtaaatggtactgctcagtttatgaaatatgcgcctgaggcattatataaccacgggccatctggatggcaggctgcacagtgggaggaggaaaagcatcgccttatgtatggtgatcgtaatgagacaatcgtaactagcggggcgaagcttggcattacttctggacgaactgcttttgtcgaaacaaaaacacctgaatctaaaattggtggcgagctggtaatagtgccagatgtatctaccccaagaaatggagattatgccatttgggttaaagctgaagatggctcgccgcgcccatactataacaagtatggtcaagagatgcgctggaagccttcattacaggattgggagccataccagaaaatggaaaaagacagggaggaagccggagaagagcaaaggagaaaggggcaggaaattcgagactttaaagcaaagcatcgagcgctggatgagatgtataaacgtttgcacgatgagcgcataagccgcaatagccaacctatttggggggatcagtaa

SEQ ID NO: 441202 - DNA, 2523 bp, Serratia marcescens
atgggcggactggcaagcattgcggcgacagcgcttgatccgacgatggtggcctcaatgtttattccaggcgcgcaaggaagcgcactggctcgtattggctctcaggcggccattggtgccgcaagcaccgcagtcagcgaaattgcgttgaacaaccagcagattaccaggaccttgggggaaagcgcgggccacattgctgcgggtacgttattgagtggtattttcgctaccgcgggagcagccatatccccagccgtgagaaaggctgcgaccagagaagtaggtgatgccctggataacctgagtgtaactagcgcagtggacaatgccgctgcctctctaccggaaggtggaagcgttggcgccgcccgcataagtgaggcgacgctggaagatttgacgccggtatcaggtggcgcgatcggcactctcgcccgtaaagctggcagctacctaacgccggtcacgcgcttaatggagtcgccatccaagaccgcccgccgcaccgcgctggagctggcggagaacaacttcacactcgagggtaacctgcgtggtatcgagacgccgatcgcggcggaaacccgcgtccgcggttggcgtcgtgaagaggctgcagtcgtggtaaccaacaaacaggcttacgcaaagtataaggcagatggcggcgatctcggttttgcatcgttccgggaggaggttggtaacgccatgcgcaacggcgacattcacggcaatgccgccgtgcaggatgcggcacgtgcgatgcgccaagtggtggatagggtgaaggtggcgcagcagaaacttggacttttaccggtggacgaagagcttaaagctatcgggcaaaccagttactttcctcgcatgtatagagtcggaaagattattaatgagcgagataaattccgcaatatgctggttgattggtggtcacgtggagaaaaaaccatgtcacgcgaagaggcagaaatcgcggctgatgccactacaaacaaaatcgttggtgccaaaataccgcaagacttcgcaaatgtattcactgtaaaggccgccgggagtacgaaagccagaacgcttagcgttccagatagcctgatgaaagactaccttgaaagtgacgctaattacgtcttgcagcgccatatccgtgaggcatcagcggaagtagagttaacccgtacattcggaaataagagcctcgacaagcaactgaaagatatacaggatgaatacgatgcactaatgcgcaatcagccttcagaacaggcaaaattggcaaaggcaagggataacgacattcgtgatatcacagctctacgggatcgtttggttggcacgtatggcatgcctgacgatccatcatcgttctttgtgcgcgcaggcgctttcctgcgtagcgccaacttcgtgacaaagttgggcggtatgaccgtgtcggctatcccggacttggctcgcggcgttatggtaaacggctttagcaactccatgcgcggatactctgcgctgatcagtcgatcgccagcattcaaagccagccgggccgagatgaagaaaatggcggttgggctggaaaccatcttgcatactcgggcgcgcacgatgggcgatctggtggacagttcttcgcgcaccacgtctgtggaagccggcatggagcgcgtaacagatgtgttcggtaagctgacgctgatggggcatttcgacgatgtgaacaaatcggtaagcggcatgataacgtcggatagcatcctatctggagcggccactacaaagaaactggcgaagctcgggatcaatcctaatatggcaggccgcatccgcggcgagttccagaagcatggcgaggtgatcgacggctggcatataggcaattttgaaaaatgggacgaccagtatgtcgcaggtgtattccaatcggcggttttgaaggacgtcaacaacactgttattacaccaggcatcggtgacaccccattatgggcaagtaccccgcttggtaagactgtattccagtttaaatcattcgccaccgcgtcatataaccgcgcgacgctgggcggattgcaggaagggacggcacaattttactatggcacagctttccagatcggccttggtgcactgacctatgcgctgaaacaggccgccaatgggaaggatgtcgatacatccccacaaaagctagttctggaaggtctggatcgctcgggcattctcggcccgctcatggaatacaacaacatggcggaaaaggcatctggcgggatggtcggcctgggggcgattttcggtaccggtactcagtctaggtacgccagcagggggttcataggttcagccctggggcctacgtttgggttgctggacacgcttactgatgtaacatccggcgtgcttaatggtgacgccggggaccgtgtattgcataatggcagaacgcttttgccggggaataacttgttctggatcgctcctttgattaatcaggtagatccaggcatgcgataa

SEQ ID NO: 441203 - DNA, 1038 bp, Serratia marcescens
atgcctgtaagaaaacttccagatggtcgttgggttgccgatttctacaccctagatcgcagcggcggcaaagacggcaaacgcgtgcgcaaaaaattcgcaacaaaaggcgaggcgctagcgttcgagaactacacaatggagaaggttgaagatgcgccttggcttggtgatgggaaagataggcgttctttaactgaccttgtgcacctgtggtttgagcgccacggtatcacccttaaagatggggaaaagcgcaaaagctccatgctctgggctgctgaatgtatgggttcgccgatggccattgaattcaacgcacaactcttcacagcatatcgagccaaaaggcttgagggacaatttgccagaaccaaacgtgtcgcgcaggtttccccgcgtactatgaatttggaacacgcttatttcttggctgtttttaatgagttgaaaaggttgggtgagtggtcggcgcctaatccattagaaaacgttcgccaattccgtacagacgaaagcgaaatggcttacctcattggggatcagatagatcggcttttagaagagtgtcggcgtagctctgccaaagatttggaaatggttgtcaagatatgcttggcaactggtgctcgctggggagaagcggaaaagctcaaacgtagccaggtagcagcaggtaaagttacgttcacaaaaacaaagggtaaacgcaaccgcacgattcctattgaccaggaactaatagacttgctccctaaaaagaacggattgttattttcgccatgctactacgctttcaggtctgctcttgaacgagcatctattgaccttcccgccggccagttaacacacgttttgcgtcatacgttcgcaagtcattttatgatgaacggaggaaacatactcgtgttacaaagaatccttggtcacactgatataaaaatgacgatgcgttacgcccacttcgcccctaaccaccttgaagaggcgcttaggctcaatcctttaaagtgtcgcaaaagtgtcgcagcaacttaa

SEQ ID NO: 441204 - DNA, 567 bp, Serratia marcescens
atgattgactataaaacagcatctaaagatcagctcaaagctgaaatgaaacgtctttccgctgtggtttcagataccccctttggaaccaaaaaagagtttttccatttacctgcgattcttaacgctgatgaacaacctattgctattgcaagcggcattatggataacaatacatggctgataacactaacaaataaacgcgttatttttctcgataaaggtatgatatttggggttaagcaagttgacgtaaatctaaataacattgttagtgtaggcggcaaaaccgggctaatgttcggtgaaatcatgatctctaccagtggacaaaattacatcataaaaaatgtcatgaaatcatgcgtaatacctttcaccaaccttatcaatgacatcagaaataagcctaccaaaatcacaaactcggactctcaaccgtccaaagtatcgctttcgtttgatgaacaaatggcaaaaattgagcgacttgctgatatgaaagaagaaggaatgcttaccgatgaagagttccaacaacaaaagcagcgaatcctgaacggataa

SEQ ID NO: 441205 - DNA, 582 bp, Serratia marcescens
atgagtaaattccaagtcaatatggatggtgacagtgcgccgatcctagaccgagtgcttgaagcgtacggttttagccaaaaactgatgctggccgatcatttaggcatagcctccagcagccttgcgggccgttaccgccgaggcgggttcccagcggatattgtggttcgatgcgcagcagaaactggtgttaatctcgaatggcttgcgacgggtaaggggcgtatgtatgacgacgagaagctggacacattgacaatgcgtaggaaaaaactaatcgatggtcagctcttcgatgcgggttacttaatgttcgacaaaactttgattttgcctcccaagccagagctaataaaaccctttagcttggttgatgaaagcaaccaatacattatagaacaagagtttacagacgtttttgatggcgaatggcttttggatatagagggcaaaatcagcattcgcaccttaaaccgcatcccgataaagaaagttcgcgttagcggcatcggtatggcgtttgactgtgcaattgaagatatagaaatagttggtcgggttgtactgacaataagataa

SEQ ID NO: 441206 - DNA, 222 bp, Serratia marcescens
atgcgacctaacattacaatcgtgatccctgaaccgtacttgccgttagatgaatactgccgccgtaccggtacgaacaaggaaactgccagaaatcttatctcttacgggaagctgccgatcaagccaaagggtaagcagaaaaaaggccttgtagaagtgaacatggctgctcttaccgtcatggctctaagcgaatgcgatattgcgctgactgcctga

SEQ ID NO: 441207 - DNA, 510 bp, Serratia marcescens
atgtttgattttgtgaactccaaacacccgcaccttgatagcgcttgccgccgcttcgtcctgatgcacaatctggccgagctggcgccggcgctgaacgtttccgcccaggtgctccgcaacaagctgaacccggatcagccgcatgagctgacgttgtcccagctgataaagctgacagctatcacagacgacgcggcgatcctggacggtttgctggctcaactgaattgcctgccggcggtgccagtgaatgaagccaagccgggcaatctgcctacccacacgttgagtgctaccgctgcgatcggcgccattgccggcgaaaccgcatccggtgcacctatgacgcaatcccgtaaaaacgccattctcgaccgtgccaatcaggctattcgtgatctgtcgctgatcgttgtgtcggttgaagcgcgtttccaatccacgccaatgttggcggccgctgttgacgtgttcaacacctgcgcccccgcgttcggcatgagctga

SEQ ID NO: 441208 - DNA, 615 bp, Serratia marcescens
atgaaaaaatttctaaaatgggttttaataatttttgttgttcttattgtaattggttatatctctggtaaggacaaacagactaccagcacaacagcgctttctagcagtacaactacagagcaacccaaaaaggaaagggtagaagatagttaccctgatcaggaaaaacgattcattcaaattgttgagcaggcaattagtggctcaaaagcttccgccaatgatatgcaaaaaggcggtgttaaagcagaccgtacagacgccttatgtggtttattgaagaataaatcggtaaaagattgggtcggtaaagttgataccgttgattccaatagtgacggtaaaggggtgttaaccattcaacttactcgcgatatttcggtaaaaacttggaataacgcgctatctgatatctctgataacaccttgctaactcctaggactccaattttcaatgctgcttcaaaccttaagaaaggcgattacgttgtcttttctggccgattcatagcagacaatgaaagctgcatcagagagtcgagcatgggcttaagcggtgggcttgaagaaccagagtttatctttaagtttagtgaaatagcgcccaagtaa

SEQ ID NO: 441209 - DNA, 534 bp, Serratia marcescens
atggcggccgtgctggggcagtttatcgctgacaaaaccgggcgggatgttcttgatgatggagatctggcaactctgcaagcaaacttgcaagaagcattgatgaatattatgccagtgggcatcccgcaaccgtggcctactgcaataccaccaactggatggttgatttgtaatggggatgcgtttgataaagtaaaataccctcgccttgcacttgcatatccaacagggttattaccagatttacgcggggagtttatacgaggatgggatgctggacgtggggttgatgttggacgtggggttttaacctcgcaggaatcaacccaaatttatgataaggctggttggactaactccccggcgggaggttatgtaaccgtggagatggtcaatcctgacggtgtagggacggttaataattccttctcatcccaacggaaaaacgatgccactagtgaccctggaagcacaaggtatccagtccgcccaaggaacgttgcgttttgttacatcgtaagggctgcataa

SEQ ID NO: 441210 - DNA, 1095 bp, Serratia marcescens
atggcacatggactaaatgaatgggtctacaagataaaaggcttaaaaagcgaaatgaataaatcaaatagaattaattattatgataacttaaaagttttctcagtcattgccgtattgttgtttcatacatctgttgagtattacaaaatcaatgagcatggttgggtttctgcaatagcgtactcagcaatcacaaggttctgcgttccaatatttttcatggtttctggcgcgactataattagcaaatcagaatcattagtttgtttcttcaagaaaagagcattgaaaatattgccgccattgtttttttggtcgttgctgtactcaataatattgtcaaaaataaatggaaccgacttcaatattatggaatcgatcgctggcatcgtaacaagcccggtatatattcacttttggttcatttacgcaattatcgggctttacctgatgatgccagtatttatgagcatcagtgaagacaaaaaaataattgtatgcacttattacacaagtatatggtttttatttgcttcaattattccatatggaaggttggttggacttccaattcctgagtatataggtacaccgtacatgtttaacgagatgtatcaattctttaattactctggatacatgactcttgggttcttggtttcaaatatcgagttagatagtaaaaaagttgcaattaaaatgcttctgttatcaattttaatgtcagttgccttattctttatggttattcaagacagcataatgaaaggaaaaatcacgcaagacctatgggaatttaaaacacctctggtggttattttttccgtctctgtgtttttatttttcaaaaacgccaagacctctttaacagataaatacggtgataaactatcatccattgcaggattggtctttcctgtatatcttgttcattatttatatatatttttaatagttaggcattttggatatgcttttaaagcattaccagtaattatccagataccaattgaaacagcgataataacattatccagctttataactgtgtttattatgagcaagataccttttataaatcgcttaatataa

SEQ ID NO: 441211 - DNA, 1899 bp, Serratia marcescens
atgaaaaaaatcatctttgcctctgtcttgggactctcgggaaacgccatggccgccgaaacggtaaatatcaccctgctgggcacctccgatctgcacggcaccttcgtgccctgggactacgccagcgacacggagaatctggcgggcagcctgagccagatagccacccaggtcaaaaaggtgcgcgccgagcagcccaacctgatcctggtggacgccggcgacaccattcagggcaacttcgtcgaaaccttcaagcatgaggccgtcagcccgatgatgctgggcctcaacgcgctcaattatgacgtctgggtgatgggcaaccacgagttcgacttcggcctgccggtgctggctacgccgctcaagcagttcaagggcgcggcgctggcgggcaatatcgtctgggacaacggcaagccctatctgccggcctacaccatcgtcgaacgccagggcgtgaagatcggcattatcggcatggacacgccgatgaccgcggaattcgccaagggcaccgatcgcatcaaagggctgaacttcaccgatccggtgcaggcggtgaagcaggtcatcaggcaaatcgacggccaggtcgacgccatcgtgctggtggcgcatatgggcatcgacaatgagaaccagcgccccggcaccggcgtggccgacatcgccaacgccaacccggagctggcggcgatcgtcgccggccatatgcatgtgaagatcgacaaagcggtggttaacggcgtcatcatcaccgagccggataaatacggtcgcgcgctgtcgcgcatcgatctgcagtttgaacgccgcgacggcaaattcacgctgatcgacaaaaacagctacacctaccccatcaaggggatgacgccggacagcgccatgcaggcgctctaccagccgtaccatgacattttgcgcgccaatgccaaccgggtcgtggcgaagctgagcggcagcgatctggtgcccgccgacgaattccgcggcattccccaggtgcacgtgcaggataccggcatcagcgcgctgttccagcaggccgcccgccactatgcgccgctggcgcaggtgatcgccctgcagatcgacaacgatcgcgccaaactggacgtcggcgacatcaaggccaaggatatcgcctttaactaccaatacgccggcggcgagatcaccgtgtatcagctcaacggcaaagcgcttaaacgctacatggagtggtccgccgactatttcaatcagctgcagccgggcgacgtcacctacagctttaacccggcgcggcgatcgtccaaatattccaccaacgatttcttcgacggcgtcacttacaccatcgatctgcgccaacccgccggcgcgcgcatcgtcgatctgcgcctgacgaacggcacgccggtcaccgacgatatgccgatccgtctgggcatgaacagttaccgcatgggccacctgacgcaaaagggtggcgcgctggaggggcaatccttcccggtgctgttcgacagcaaagcgcaatacggtgaagaagaaggcaccattcgccacctgaccctgcgctacctgacggaagtgaaacacggccagtatcagggcgtgccgccgcagcgctggaagctggtcggcatggagggttacgaaccgcagcgggcgatcgtcaaacggctgctcaatgagggcattatccaggtaccgaccaccgacgacggccgctacaccaacgtcgcgtcgatcaacgtcaaaaacgcgctgttccgcaacgccgacgattaccgcgccgccctcacctcgctggagcaacagcgccaagccgccgtggatccggtgcaacagcaccgcctgcaggatcggatcgcgctgatcaaggcgctcaacgacttctga

SEQ ID NO: 441212 - DNA, 657 bp, Serratia marcescens
gtgaatcctcagcagccgctgctcagcgttatcgtgccgttttataataacgaagcgttcgttatcgctgcgctggattcgttatttgcacagattagcgacgatatcgaggtggtgatcatcgacgatggctccaccgacgcctccggcgcactggtcagccaatatctggcgcagcggcggcacccgcgcgtggtctttacttcacaggccaacggcggcattgcgcacgcccgcaacgtcggcttacgtctggccaccggacgctatatcaccttcctcgacggcgacgatctgctgagcgacgactatctagcgatcctgcgcccccagcttaccgccggtgaatatgatctgatcgattttaattatcagaagttcaccgagcatccgccgacaccggataaccgcgcggcgcggcccgtagcctacgacttttcacaattggggctgggcagcctgcaatcgcttttcgaacgctcgatgtggcatctctggagccgggtatataaacgcacgctgctggcaggggaagcgttcgaagaaggcaggcgctacgaagacgtaatttttacgccttttcagtatttcaaaactcgccgcatcgcccatcttgacggcgaactctacttctatcgggctttgttgaataaataa

SEQ ID NO: 441213 - DNA, 2148 bp, Serratia marcescens
atgcctgacctttcacgcagagacatcctgcgggctgccgccatcggatcggctttctcgctgttgcccgcctcgattcgcaaagcgctggccattcccgccaataaccgcaccggcaccctgcgcgacgtcgaacacgtggtgatcctgatgcaggagaatcgctctttcgaccactacttcggcaccctgcctggcgtgcgcggcttcagcgatcgcttcaccattccactgcccggcgatcgccacgtctggcagcagcagggcgccgagcggctggtgctgccctaccacctggacagcaaacgcggcaacgcccagcgcgtcaccggcacgccgcactcgtgggtggatgagcaagccgcctgggatcacggccgcatgagcgcctggcccacctacaaaacgccggcctcgatgggctactaccgccagcaggagctgccgttccagttcgcgctggccaacgcctttaccctgtgcgacgcctatcactgctccattcacgccggtaccaacaccaaccggctgttccactggaccggcaccaacggcccgtccgccgccgacgtggcggtggtggtcaacgagtgggacagccccggcccggcggagattggctaccagtggacaacctatccggaacggctggaggcaagcggcgtcagctggaaggtgtatcaattcctgccggacaactttaccgacaacccgctggcgggttttcgccaataccgcgccgccagcattcaggtgggcaatccggcgcggccgccgaaagacttcaacgccttcgtgccctacagcgatgcgctcaacgaggccgcgccgctgtacaagggcaacggcaacaccctgccggccgccgacggcaacgatctggacgccatgctggccggattccgcgccgacgtgcagcagggcaaactgccgcaggtcagctggatcatcgcgccggcggcctattcggaacaccccgatccctccagcccggtgcagggcggctggttcacccaagagatcctcaacgcgctgaccgacaacccggaggtgtggagtaaaaccgtcctgctggtcaactacgacgaaaacgacggcttttttgaccatatgccttcgccttccgcgccgtcgctgcgcgaagacggcagcttcgccggtaaatcgaccgtgccgttcgacaccgagatcttccagcacgtggctccgcccggttcgcaggatcaaccgccgccggacggccgcatctacggccccggcccacgggtgccgatgctggtgctgtcgccctggagccgcggcggctgggtcaactcgcaggtcttcgatcacacctcggtgctgcaatttttggaaaagcgctttcaggtgcatgaacccaacatcagcgcctggcgccgcgcggtgtgcggcgatctcacctcggcgttcaactttgtcgatcctaacggcgaagcgctgccgagcctgcccgccaccagccgccacgccgccgacggcctgcgcctgcgccaggaacagctgccgcaggtgccgctgccatcccccgcccaccagcgtttgccccaccaacgccgcctggcacgcccttcccgcgcgttgccctaccagctgcacgttgaagccaccgtcgcggccgagcagcgccgcgtgacgctgaacctgttcaataccggcgagcagggagcggtgtttcacgtctacgatcggcgggatctgacgcagatcccgcgccgttttaccgtcgaggcgggtaaggcggtcagcgacgactggctggcggagaatgagtaccatctgtggttgctcggccccaacggctttcatcgcgagctgcgcggcaccctgagccggccacagccggaggtgcgtttgcgcccgacgggccgcagcctgctgctgcagctgaacaatccgagcaccgaagcgatagcggtcaccctcgaacgctgcccctacacgcagcaagggccgtggcctatcacgctgccggcgggcggcagccaccagcaagcgtttgacgcccgcgccagcggcggttggtatgaccttacgctgcaaggcaccgacggctggctgcgccgcctggcggggcggctggaggatggcgaacacagcgtcagcgacccgctgatgggccaggggtaa

SEQ ID NO: 441214 - DNA, 615 bp, Serratia marcescens
ttgaatttcaaagacggcggccaagcggccatcactcggttactgcaagcctatggattccgatccagacaggctttatgcgagcaacttggggtttccagtagcactatggggacacgttggatgcgtgatatttttccagcagattgggtcatacaatgcgcaatcgaaacaggcgtctctcttgaatggctttcctttgggaagggtgaaatgtacacacacaacgctcataccacatctcagacagccacagaacccgcgaatgaccatgctatgagtgacgtagttaccgttccccggaaaaaaataattgatggaattttgtacaactccaacttttacctcatggacaaggcactgttaccttctcacttacaatcacctatcgtgatcacagaaggcacccagtacatcgttgcagaacaaaaattttcagatgtgactgacggtacctggttggtagaaattgaagggcaagccagcatcagagacttggctagaattccaataggaaaggttagggtcagcaatccaagtgcaacttttgaatgctctctggaggacattaaagtgctggcgaagtgttgctatgtattactgacgcccctttaa

SEQ ID NO: 441215 - DNA, 222 bp, Serratia marcescens
atgaaaccgagcatttcaatcactttacctacccctcatgtatctattgaaaagtacagtgagctaaccggtctctcacgggaaacaattgacgatatgctggctgatgggcgcctgcctcgccaccgcctccgcaaagataaaaagcgcgagaaagtcatgattaacatggcaaaactcaccgtagacgcgctttctgattgcgatgttgcaatcgcgtaa

SEQ ID NO: 441216 - DNA, 249 bp, Serratia marcescens
atgagtggattgaaaggccgccgcatcagtgcggatatgtttgccataatgctgaagatatctgccgggcagctggtttttgcggcccggcatgacaaaccgttacgcggactgatcctgcccccttacagaatcgagggcgggaaaagctggagctcgaccacctcaacgcggagcatgacgtttgatatgcaggaagcggtcgatttcagcgagaaatttcataaaattcagtcgcctgacggctga

SEQ ID NO: 441217 - DNA, 558 bp, Serratia marcescens
atgctgatcggctatgcgcgcgtctcgacacaagatcagaacctggagcttcagctagacgctttgacaaaagctggatgccaaaaggtgtttgaagacacgatcagtggtactcgtgctgatcggcccggtttgggcaaggcactagaaatgctgcgtgagggcgacacattggtggtttggaagctggatagattgggccggtcagtcaaacaactggtagagctggtcagcgctttgcacaaacaaaacgtccagttcaagagtctcaccgattctattgatactggaacgccgtcgggccgattctttttccatgtcatggcaagcctcgctgagatggaacgagacctgatcgtcgaacgaaccagagcggggctggacgttgccaggcaactcggccgcaaagggggtcgaaagccgaagatgaccgacagcaagatagagtcagccaagaagctactggccagcggagtgccccccaaggatgtggccaagaatctcggtgtgtccgttcctacgctttaccgctgggttcctgcctcggcgcagccttaa

SEQ ID NO: 441218 - DNA, 375 bp, Serratia marcescens; identical to SEQ ID NO: 248453

SEQ ID NO: 441219 - DNA, 291 bp, Serratia marcescens; identical to SEQ ID NO: 248454

SEQ ID NO: 441220 - DNA, 639 bp, Serratia marcescens; identical to SEQ ID NO: 185447

SEQ ID NO: 441221 - DNA, 1521 bp, Serratia marcescens
gtgaacacgatatacataccattagacagcggagagtctgcggtcctcaaggatccagataccttacttcctcgtaaaatttacgaacagcttgcccagttcattgaaaaggctgttaaggatgttgatgaagtaccgaaaaattcagaatcgtttaacgaaacgcgcagtcataaggcaatatcgattgacggtgaaagaggaacgggtaaaacatcggtactagtgaatttaagagattacctggaaagtaatcataaagagtttgcgggagatattcatattctcgatcccatcgacccgactctgcttgaagatggtgaatcgctgtttttacatatcattgttgctgcagtacttcaggataaaaaaattaaagaggcgcaaagtaaagaccttgataaatcgagactctttatccagaaacttgaaaatttagccaatggccttgaatccattgacctgcaacacagtcagcgagggatggataaaatccgttccctctatggcagcaagcatctggcaaattgcgttgaagcatttttaaaatccaccctggatttaattgggagaaaattattaatactgccgattgatgatgtggacacttcgcttaaccgggcgtttgaaaatcttgaaatattgcgtcgttatcttacatctccgtacgtattgccgattgtgagtggcgatcgtcgcctgtatgacgaagtatgctggcgagattttcatggacggttgaataaagactcatcttatgaacgtaagaagtcttatgatatagccaaggaattggcaattgagtaccaacgtaaaatattaccactgccgcgtagattaagtatgcccgccgtgagtgattactggcagcaagacggtatggatgttaccttggacaaagacggtatcccgttgcgcaactttatggcttggctgaagatatttatcaccggcccggtgaacggtcttgagggtagcgatttaccgctaccgattccatcgattcgtgccctaacgcagtttataaatcactgtggtgatttaataatagaacttccaccagaacttaaaagtatggatactcctcttactgttcgccgttggtggcagatgcctgatgttccacgcccagtacttgaagcttttgcgttgaaacaccgggagctcagtaaagaagctaagcgggagtatgctgatgcctatcaagtcttcaatgaaaaatatctagcatggaattatcaacattctccagtaggaatgaaaaataacgaaaacggtaaattagttgatgatatgtgttggatcaacaagttgctgagttattttcagttcgaaccaaaagctggagcagtctatttaacccttaaggctcagctaaattgggctgaatggaaaaatagtaagaatcgtaacaattcgatatttgataccgtacttttccagcccttgcttcaggatcgccctgaatacgtcatttttaatgcaggagaaagcggtgatgctgccaacttactgatttag

SEQ ID NO: 441222 - DNA, 612 bp, Serratia marcescens; identical to SEQ ID NO: 96773

SEQ ID NO: 441223 - DNA, 951 bp, Serratia marcescens; identical to SEQ ID NO: 96774

SEQ ID NO: 441224 - DNA, 633 bp, Serratia marcescens; identical to SEQ ID NO: 237688

SEQ ID NO: 441225 - DNA, 171 bp, Serratia marcescens; identical to SEQ ID NO: 231573

SEQ ID NO: 441226 - DNA, 135 bp, Serratia marcescens; identical to SEQ ID NO: 231572

SEQ ID NO: 441227 - DNA, 177 bp, Serratia marcescens; identical to SEQ ID NO: 231571

SEQ ID NO: 441228 - DNA, 972 bp, Serratia marcescens; identical to SEQ ID NO: 147049

SEQ ID NO: 441229 - DNA, 1272 bp, Serratia marcescens; identical to SEQ ID NO: 147048

SEQ ID NO: 441230 - DNA, 423 bp, Serratia marcescens; identical to SEQ ID NO: 231569

SEQ ID NO: 441231 - DNA, 672 bp, Serratia marcescens; identical to SEQ ID NO: 231568

SEQ ID NO: 441232 - DNA, 678 bp, Serratia marcescens; identical to SEQ ID NO: 231567

SEQ ID NO: 441233 - DNA, 222 bp, Serratia marcescens; identical to SEQ ID NO: 231566

SEQ ID NO: 441234 - DNA, 420 bp, Serratia marcescens; identical to SEQ ID NO: 231565

SEQ ID NO: 441235 - DNA, 780 bp, Serratia marcescens
atgcaggaaaccaccacgttaaacgcccttgttatgcgccgtgcgcgcgatttgattgctgattatggatggcctgaccataccgatgttgatcagcgtgatccggtcaataaaccgggctggataagcatttatgtccgtctggatgcggcaaatattgttcatctgctgcctttgctttgtaccggtgacgtacccgcagatctgcaaagtgccatgacaaaaatatccgggacgccagcgcagattattttatccggcagccgctatgccgacgcgccgcagcttccggaggacggaacacagatagctttcccctgggccggggaatggctgacggagccggagattcaggctgtaacggattgcctgtcccgcgccgtgcgggatgtatcccggcaggtatgggaggatgcgcgccggataaaggcggcactgaacacgcgcggggaaacgctgttttatcgccagacccgaaacttccgtctggttgtgaaggaaaatgatatgccctgctggctggacgatgatgacaatttgccggtggtgctcgatgccatcctgaacaaaggggcacgctacagtagcgtcgagttctttgttatcagcgacaaagtggatcaaatcctggcatgtggccagatgtgcgatgtgctgcgtattccgggcgagcctccgcgccggtggatggatttaaccctgttacatgaggtcatggcagaagcgcgtgcagaaatcagtcttgtccgcaatgccctgtcagcaatccggccagtttag

SEQ ID NO: 441236 - DNA, 507 bp, Serratia marcescens; identical to SEQ ID NO: 139929

SEQ ID NO: 441237 - DNA, 192 bp, Serratia marcescens; identical to SEQ ID NO: 231562

SEQ ID NO: 441238 - DNA, 231 bp, Serratia marcescens; identical to SEQ ID NO: 139928

SEQ ID NO: 441239 - DNA, 2010 bp, Serratia marcescens
atgtcagtaaccgatgttaaagcaaaagcacccaaaaaagcgagcagcaaaaaaattacgaaggcacaggaggctgccctgaagatcgcccttgaggccgctgcggtcgagtacgttccgctgtccgatctcgttaaatccccgctgaacgtgcgctccatcccctattccgtggacagcgttcgcggtctggccgactccatcgagacgctcggactgctgcagaaccttattgttcacaccctcgcggacggacaatccggcgtggccgcaggtggccgccgattaactgccctgcaactgctggcgcaggaagggcgtctcgctgctgaccataccgttatggtgaagcgtgtttccgacgacattgccgcccttgcctccgtcgccgagaacgagcagcgcgccgccatgcatcccgccgagcagattgcaggtttccgtacgctggcagggcagggcaaaacccccgcgcagattggcgacgcgctcggcttcggctcccgtcacgtgcagcgcatgctgaagctggcaaacctcgccccctccctgatggagaagcttgcacaggacgaactgaccgttgagcagtgtcaggcgctctgtctcgaggacgatcctgcccgtcaggtcgaggtattcgaaaacgtgaaggccagctggtcaaacgcgcccgcacacctgattaaacgcgctattaccgaaaccgagatgcgcaccgacaacgccaaatttcgttttatcgggcgcgatgcctacgaggcggcagggggttacgtccgtgaagatctgttcagccaggacgagggcgacggtacggctgacagcgtgctggttgagcgtctggtgcaggaaaagctggagcgtatcgcgcaggacattcagcagcgggagggctgggcatggagtcgcggacgcgcagcccgcatctggtaccacggcgaagacggtaaggagttcgtgcagcctgctgaacccgatccggtgtacacccctgagcagcagcagcgtcttggtgcgctgcgggagcagtacgatacatatgacagcgtttgcgacgagtcagatgcgatcgaagcggacatcctcgccattcaggcggcggcagaagccagcgcgtggactgacgacatgaagtcaggcgcgggagtgatggtcagcctgtacgaagggcaggtgtacgtgcagcgcggtgtgcgcctgaaagcggatatgcctgaagaaaccgtaaccagcagcgtaacggtgccattcacctcacgccagcccgacgccgcagaggggatcagtgttccgctgctcacgaaaatgacctccgaacgtacgctggcagtccaggcggcgctgatgcagcagcccgaaaaggcggtggcgctgatggtctggcgcatgtgtacctgcgtcttctcgggctgcctgaccacgacgcatccgttccgtatcagcctcactgtatctcacggcagcctgacggagaacgccccgtccggtaaggatggcgcagcgtttaacatcctgatgaccgaacgggcaaggctgaaagccctgctgccggaagggtgggagaaggacttcaccaccttctttgcccttgacggcggggtgttgatgtcgctgatggccttctgcacggcctgttccgttgacggggtgcagacccgcgatatggggcacacctcgcgcagtaccctcgatgcggtcgaggcggcaatcggcttccacctgcgcgactggtggcagccgacgaaggacaactacttcggcagcctgaaacatccgcagattgtcgcctccctgaaagaggcggggctgacgggcgcggcgggtgacgcggagaagatgaagaagggcgatgctgcagcgcatgcggagcactttatgcagcacacccgctgggttccggcatggctcaaaggaccggagtcagcgggtgaatccggtgcagacgacgcggcttcagataccgacagccctgacaacgacaccaccaacacggcacacgccgcctga

SEQ ID NO: 441240 - DNA, 432 bp, Serratia marcescens; identical to SEQ ID NO: 231558

SEQ ID NO: 441241 - DNA, 729 bp, Serratia marcescens
atgatacctgcaaacctgtcactggttcccttcagccctgagcgacgcgccgcgatggaggccatcgcggaggttgaacgccggcggtcgcgcggcgcggtgtccacgatgtatccgtatgccagcgcctttttccggcggctcacgggcagcacgcgcatcactatcagggaaatccatcattttgcgccggtgctgacggcgcgggagctgcggggcagcagggacagctggctcagtgccatcgatgcgctgattgaaagtcgcgggacgcgttgctggctgccgcttcccgttggtgcgggtcagcgcctctttccggaggtggcctttcagcagaccgagcgggttcgctgtcaggacgccctgcgggatgaaaaatacacccgacagcgtcacaaagaacggtgccagcgtgagcaggcgtaccaggcgctggcggggcaggcggagattgagctggcattccatacgcctgaaacggtcagcagctggagcgcacgctggtcggggactgaactgcgccagtacgacctggaagagatgttctggcgctggagcgagcgtttcccgtcactggagccaatggagcgctggacgatggagagtcagcctttctggacggtgatggctgaaacgaatgcgctggcaagggaaagtccgggatctgtctggcagctggagcgctggatggtacccaacaagctgacagcgcggagtcaggtatga

SEQ ID NO: 441242 - DNA, 360 bp, Serratia marcescens; identical to SEQ ID NO: 96789

SEQ ID NO: 441243 - DNA, 375 bp, Serratia marcescens; identical to SEQ ID NO: 96790

SEQ ID NO: 441244 - DNA, 288 bp, Serratia marcescens; identical to SEQ ID NO: 96791

SEQ ID NO: 441245 - DNA, 345 bp, Serratia marcescens; identical to SEQ ID NO: 231547

SEQ ID NO: 441246 - DNA, 264 bp, Serratia marcescens; identical to SEQ ID NO: 96792

SEQ ID NO: 441247 - DNA, 831 bp, Serratia marcescens; identical to SEQ ID NO: 139920

SEQ ID NO: 441248 - DNA, 531 bp, Serratia marcescens; identical to SEQ ID NO: 139919

SEQ ID NO: 441249 - DNA, 393 bp, Serratia marcescens; identical to SEQ ID NO: 96794

SEQ ID NO: 441250 - DNA, 690 bp, Serratia marcescens; identical to SEQ ID NO: 96795

SEQ ID NO: 441251 - DNA, 351 bp, Serratia marcescens
atgactgatgtgtctgttattaacgctgtacccgcgacccctgcaaagaaaaaattcagcaaagtcgcgttactcaaagcgctgaagtttgccctgcctgtcgcagcccttgctgcgtttttccctgatacggttcttgcctcgactgcgggtaaagatctgatgtccagcggcgatgcaaccgttaaaggaacatttggtaaagactccagcgtggttaagtgggttattcttgccgaagttctggtgggcgccgtgatgtatatgacgaccaagaacctcaagttcctggcgggctttgcgatcctgtccgtattcgtcacggtaggtatgtctgtcgcaggatactga

SEQ ID NO: 441252 - DNA, 306 bp, Serratia marcescens; identical to SEQ ID NO: 96798

SEQ ID NO: 441253 - DNA, 567 bp, Serratia marcescens
atggaacacggagcacgattaagtacacagcgggttattgccatcggctttattgccatgggggtggttattctgggaagcatcaccaccaatgttattcaggccgtcaacaactaccgccttcagaatgagcagaagtctatcgtcacgccaatgcttttcaacgcgccgtttgccgtgtcgcagaaccaggcagatgcctcctacctgcaacagatggccctgtcgcttatcgcccttcgcctcaatgttaccccggaaaccgttgatgcctctcatgagcagctgctgtcctatgtcaaacccgcagcgcagaacgagctgaaaatccggcttgctgaggatgcgaagcgcattaaggacaacaacgttaactcgtctttctatatgaccagcgtgaaggtttacccggcaagcagccgcgtggacgtacgcggccagttgaagacctggataggcgactcgaaaccgtatcccgagctgaaacagtacgttctcaagttcgagcgcgaggacggcatcagctggctcagtcacttcggagaaatcaccgatgaacaaaaatag

SEQ ID NO: 441254 - DNA, 744 bp, Serratia marcescens
atgaacaaaaatagtcgccgtgcgctgctggcgttgctgatgctcgcttccggtcagacggtcgccgcacccgctgcgctttctgccacgattgtcccgttgacgaacggcggacaggccagcatcgcggtcagcaataccgacccgaacctttttacagtcgcaggtgaccgcgtgacggccctgaccagcctcgacggtgagctgacgcgtcaggaacagacggcaagcggtggtgtgattgtcagcaccctcaacaaaaagcccttcacgttcattctggaaaccgaacgcggcctcaacttctcggtacaggccgtgccgcgagcgggcgctgggcgaaccatccggctggtcagcgagctgtccggtacgggtgaagcggcgcgcacctgggaagagtcttccccctacgaggccacgctggtttccctgagccagcatctgctgggcgggcagcttccgtccggctggcaggctatccccgttacgcatgaagccctcaacgctcccgccggactttctgcagtccccgagcgcgtctgggtgggtaatcaccttaaggtggtgcgctatcgcgtcaccaacaataccgggatggcccgcaacatcgcggaaagcgacttctggcagagcggcattcgcggcgtgctgtttggtgaagcctcgcgtcagctgatggcgggcggcgccctgcaggtcttcattatcagcagcggaggtgcggctgatggccagcattaa

SEQ ID NO: 441255 - DNA, 1395 bp, Serratia marcescens
atggccagcattaattcagtggtgaagcgcaagcagtttatctggctgggtatcgtgctggcgaccgtgggcgtggtgggcggcggcggctggtatctggcggatgcacgctacgagggcagcagcgatgcggcagccgccggcgagcctgcgcccgatatgaccggcgtggtggacagcacctttgaccagaaggtgcagcagcatgccacgaccgagatgcaggctacggcctccgagatgcagaagcagtatgccgaaatgcgccgcgagcttgagctgctcagcaaggggcaggcaggctatcagcaccagattgacaaactcagtcaggataatgcggcgctttccgctcaggtcagcgcgctgggggcgaaacccgtcaccgcatcgggtgagccggccccgcagccgccagtgcctgcgccggggcctgaaggtgagccgcagccgaccggtttcccgccgcagacgggggccgtcccgccgccgaccgcgttctatcctggtaacggcgtcacgccgccggcgcaggtgcagtaccagcccatccccgtacccaaccagctgcgccggcagtcttttgcccacagcgacgagagtaaaggtccgtccctgccgtacatcccgtcgggcagcttcgccaaatcgatgctgattgagggggctgacgccaatgcctccgtaaccggtaacgagtccacggtgccgatgcagctgcgcattacgggcagggtggaaatgcccaacagcaaaagctacgacctgaccggctgcttcatcgggcttgaagcctggggcgacgtgtccagcgaacgcgccatcgtacgcacccgcaacatcagctgcctgaagcacggcgtcaccatcgaccagcccattgccgggcacgtgagcttccggggaaaaaacggcatcaagggcgaggtggtgatgcgaaacggcaaaatcctcggctgggcatggggcgcgggatttgttgacggcatcggtcagggcgtgcagaccgcgtcccagccttcggtcggcctcggcgccacggcatcactcggcgcgggtgacgtgatgaagatggggattggcggaggcgcctccaaagccgcccagaccctcagcgactactacatcaaacgcgcagagcagtaccaccccgtcattcctattggggcgggtaacgaagtgaccgttgtctttcaggacggttttcagctgaaaaccattgaagagctggcgcacgagaatgacagaagcaaagcggagggcgacgaccgcagcccggttccgccgccgtcagtcccgcagggcggcatgaacgggttcagtaccgaccagatgctcaaccagctgggcaggcttaaccagagccagtttatgccgaaggccgactcacaataa

SEQ ID NO: 441256 - DNA, 540 bp, Serratia marcescens; identical to SEQ ID NO: 231534

SEQ ID NO: 441257 - DNA, 225 bp, Serratia marcescens; identical to SEQ ID NO: 231533

SEQ ID NO: 441258 - DNA, 186 bp, Serratia marcescens; identical to SEQ ID NO: 96804

SEQ ID NO: 441259 - DNA, 402 bp, Serratia marcescens; identical to SEQ ID NO: 96805

SEQ ID NO: 441260 - DNA, 567 bp, Serratia marcescens; identical to SEQ ID NO: 96806

SEQ ID NO: 441261 - DNA, 2631 bp, Serratia marcescens; identical to SEQ ID NO: 231529

SEQ ID NO: 441262 - DNA, 348 bp, Serratia marcescens; identical to SEQ ID NO: 96808

SEQ ID NO: 441263 - DNA, 648 bp, Serratia marcescens
atgcgcgcccttgccctgggcctgacgctgctgaccggcagcgtgacggccgctgacctcgggacgtggggcgatctctggccggtggcggagccggatatgctgaccgttatcgaaagccggctgcagacgctggcgcagtccggcgagatggacaaaaagatggtggagtttaaggcgcgcgtggtgcgcaacagccagcgcccgcctgccgttgagggaataacccgcgcggtgcgctacgagcggcgctggtttgacccgagcgtgcgggtggacaaggcgcttgccgacgacaggggcaacgtgtttgctcaggcggggcaggtctttaatccgcttgatgtggtgccgtttaacgaaaccctgctgtttatcaacggcgacgatgcggagcagctcgcgtgggtacagcgacagaagcctgacaccctgatcacccgcatcattctggttcagggcaacattccgcagacgtcggagaagctcgacagccgcattttcttcgaccagaacggggtgctgaccgcccggttcggcataagccaggtgccggcgcgggtaacggcggcacccagcggaaagcgcctgcaggtggaaatcattccgcccgatatggcgcagcatgatgcaggaggtgtccggtga

SEQ ID NO: 441264 - DNA, 987 bp, Serratia marcescens
atgctgaccgtctctctgttcgggctgcttctgtggggtaacagccacatggcagcggcggacgccgcctgcgaagggcgcttcgtcaatccgatcaccgatatctgctggcgctgcatgttccccctgtcgctcggcagcacaaaagtcacgggcggggatttaccggacacgtccaatcccggtagcccgatacagttttgtcccatgccaccgccggtatttcagcgcgttggcctggcaatagggtactgggagccgatggccatgaccgatgtggcacgttctccgggctgcatggtgaacctcggcggattcaccgttaatctcgggaaaatggggatgggcgccgccaaaaaagatgacaaacaggtcaatggcgcgttctaccacgtgcactggtacaaatatccgctgacgtactggctcaatatcatcacctccctcgggtgtctgcagggcggcgatctggatatcggatacctgtctgaaatcgacccgacatggggggacagcgccctgacctccattctgaatccggaggcggtcatttttgccaaccccatcgcgcagggcgcatgtgcggccgacgcggtggccagtgcagcaaaaacgtcggttgacgcgctgttctggtgtgccggatcgcaggggtcaatgtatccctttaacggctgggtgagcaatgagtccagccccctgcagtcttccgttctggtcagcgagcgcatggcgttcaagctgcaccgtcagggtcagataatggagagcgtcggggaggataaaaaggtctgcttcgagtatccgtcacccattattcccaaaacgcgctggcgctatcagatggtgaatatgtatccggacgtggcgcagtgccatcccttcggccgaacggtcatgcgctgggaaacggggcgtaacccgccgaacacgaagaaaaactacggctatcttctctggcgcaagcgcaactgcgtcttcctctga

SEQ ID NO: 441265 - DNA, 630 bp, Serratia marcescens; identical to SEQ ID NO: 231525

SEQ ID NO: 441266 - DNA, 1854 bp, Serratia marcescens
atgaaaagagcaatactgatgtcgatgctggccattgccaccacgatggcaagcgtgaatgcatttgccgatgctgacgcgcagtacagggcgggggctgattttgcccgtcaggtacaggggcagggtgagagcagcctgaaaaactttaacccctcagcgtctatccccaactataccgcctcacccggtgagaaaaagtactatggcggtgtgacggcgaccggtgatggtgcgctgaaagcggacggtaccacgggctggactactaatgaggctacaaaagccgtcaccgactcgtttgttaacaacccgaaggagcccatttcgcccgacgcgccgtttattaaggccagccaggatgtccagtcccgcgctgataccatcatcggcaaaacggggcagacgcagtgcgaagcgcagaatatcagccgcagtgagttcaccaactatacctgtgagcgcgacctgctggttgagcaggcctgtacgcgcacggccagcattaccggccactatgaagatacatctgaaacaaaacagattgttatccagtctcagaatatttcgtttgcttcctccgaagcgggatacacaggaacatggactgcgccggtgacagggaaggttgttgctgcaacagccacctattcctggaataaacgtctggcgttcagtaatcctaactggtttatgcgagtaaccacgcctttcgggttgatttccatggataacgataccggtagcctggcgctgagtagcggcatgcagctgaagaaaggcgcagggatggtgttttccattcgtaccaggagaaacaatcccactacagattcaatctggaagcacagcaatatgcgctacagcttcaccgttacgctccagattgaaattcccgccaaaaaatgggtaccagacgtggtctggaacgaatcctgcccgttcagcaagagcgaaggtacgctcaaaaagacggaatgtattgagccggggagcacaaaaacggtggtggttgacggcgtgtcatacccggtcacgcaggcttgctggaagtacaaagacacgtatatgacccaggctgctgacaatggcacctgcaaaacctacatgaacaatccggcctgtacgcttgcctcacgcacctgcgccttcacggcagaagacggcagcggctgcctgcatgaatacgcgacgtactcctgtgaaacacgtacttccggccaggtgatgatatgtggcggcgacaccttctgtctcgatggtgactgtgagcgggcgcagaacggtaaaaacaacgattttgcacctgtcgtttcggcactcgccgcgctggccgctgcgggcaaggacgtggcagccattaacagcgttaacgtacgcgcctttaccggcagcgcgaagttctgcaagaagtttgcggcaggcttcagcaactgctgtaaggacggcggctggggccaggacgtcgggcttgccaggtgcagcagcgaggagaaagcgctgggcaaggccaaagagaataagctcacggtcagtatcggtgagttctgttcaaaaaaagtgctcggcgtctgtctcgagaagaagcgcagctactgtcagtttgactcaaagcttgcccagattgtgcagcagcagggacgtaacggtcagcttcacatcggctttggcaaggccagcagcccggactgtcgcggcatcacccagactgagttgcaacaaatcaagttcgacaaactcgacttctcaaactttttcgacgatctgcaaaagaacaagaaaatcccggataacgacaccctgacgaagcgcgtccgcgaggaaatcgccgcgcaactgaagaacaaacagtaa

SEQ ID NO: 441267 - DNA, 189 bp, Serratia marcescens; identical to SEQ ID NO: 96813

SEQ ID NO: 441268 - DNA, 750 bp, Serratia marcescens; identical to SEQ ID NO: 96814

SEQ ID NO: 441269 - DNA, 249 bp, Serratia marcescens; identical to SEQ ID NO: 96815

SEQ ID NO: 441270 - DNA, 564 bp, Serratia marcescens
atgccggaggataccgacatgaaccttagacataccgtgtttaccgtggcgctcatgaccctcagtctggccacacaggcttccacaatggacgagatcaaatcgttatggcatccacagggggcgcgagcgtctggatctctgccaacatcaccggaagaccctgaagttaagccacttccggcgaagcagccggtctggtaccgcctcagcaacggccgccagattaatctggccgactggaaggtcgtgctgtttatgcagggacactgcccgtactgccaccagtttgatccggtcctgaagtcgctgtcggcacgggtggggtttggggtgatggcctacaccatcgacggtcagggggatgcgtcctttcccgatgcgctgcccgcgccgccggaggtaatgaaaacctttttccctaacctgcccgtggccacgccaaccacctttctcgtcaacgtaaacacccttgaagccgtgcccctgctgcagggcgcgaccgacgaacagggctttatggcccgaatggatacggtccttcagatgcgcggagtgaaatga

SEQ ID NO: 441271 - DNA, 1374 bp, Serratia marcescens; identical to SEQ ID NO: 96817

SEQ ID NO: 441272 - DNA, 2823 bp, Serratia marcescens; identical to SEQ ID NO: 96818

SEQ ID NO: 441273 - DNA, 801 bp, Serratia marcescens; identical to SEQ ID NO: 96820

SEQ ID NO: 441274 - DNA, 1128 bp, Serratia marcescens
atgagttttaatgctaaggatatgacccaggggggtcagatcgcgagcatgcgcatccgtatgttcagtcaaattgccaatattatcgtttactgtctcgttattctcttcggcgtaattgttgctctgactctgtctattaaactgacctggcagacgtttgttaatggcatggtctggtattggtgtcagacgctggcccccatgcgcgatattttcaaatcccagcctgtctataccatccgttattacggccatgagctgaagtacaacgcgcagcaaatactgcaggacaaatatatccagtggtgcgcagaccaggtctggacggcctttattcttgccgccatcatcgcggccgtggtgtgcgttattaccttctttgtcaccacctggattctgggccatcagggtaaacagcagagtgaggacgagataacgggggggcgccagctgactgacgacccgaaagcggtggcgaaaatgctcaggcgcgacggtctcgcatccgacatcaaaatcggtgagctgccgcttattaaggactcggagatccagaacttctgtctgcacggcaccgtcggggccggtaaatcagaagttatccgccgtctgatgaactacgcccgccagcgtggcgatatggtcatcgtgtatgaccgctcctgtgagttcgtcaaaagctactatgatccggccacggataaaatccttaacccgctggatgcgcgctgcgctgcatgggacctgtggcgggagtgcctgacgcagcctgacttcgacaacgtgtccaacacgcttattcctatgggcacgaaggaagaccccttctggcaggggtcgggacgtaccatctttgccgaagccgcttatctgatgcgcaacgacaaggaccgcagctacagcaagctggtcgacacgctgctttccatcaagattgagaagctgcgctcgtacctgaaaaactccccggcggcgaacctggtggaagagaaaatcgagaaaacggccatctccatccgcgccgtgctgaccaactacgtcaaggccatccgctacctgcagggcatcgaaaataacggcgagtcattggggtcggttccggctgagggcgaaatgacaccctaa

SEQ ID NO: 441275 - DNA, 2703 bp, Serratia marcescens
atgttaacccggtcgttgagtgaacatgcaacagggtgtttcttcaccgacgagcgtctgtcaaagcgcttttgggcgatcctgctatcgccgccggatgattttacgacgtggtcgtcattgcaggaggagtgctaccaactgctcgttgagagtattgataaccgttatccgcgcacttatcggttgaccgacgtgcgccagctaatggggaatatctgtgataatggcttgttgaccagcccggcactgccttggctggatgtcattgcagaacagctgctgctacgtaatggtgatttgctctactaccgcgagaataaggtacaagactatgtgcggatagcggcagaactggacccggctctgcttgcgggctggcgtcttggtgactggctacagcaaagtcctcttccgcgattgtcagacatcacccgggtggtgatggcgcagaatccgttcttcgcaccgcctgccagcgcgggcaaaccttttgcggaggggcacgtccatctgggcggggtgacagcgggagataccatcctgaatggttatctttttgaagatcttgaactgccaaaaagcaacaaagcatcgctgtgggcacttgaagagcgcgatgatttaacgccgctgttggttcgggcaaagtcactgctttccttattactctccgatcggtttgaaacggttttaaagaagtatgcaaccttgagtaacccgatgacgaaaagcctgagtctcccggactggctaatcctcgctaaaaagaaccgaggaacagaaaacgtcagtcccggctggctgttaggccagctggcgcatgcctctgaccgaaagcatccttcacgctggctgtggcttcagctttatctttgccacacttaccaactgaaagacacccatccgcttgagcgcacggccatactctgcttttggcttacggttaatgcgcttcgacgtcgcattattatggacgggcaggggcttacgcgttttaccgaacgctatttcggcggtgcgctgcgctcgggcaagaaaactgacagcagcaatatgcgttatctgtttgccggcaaagacgatatggccgaagtgaaggcatccccgactgcttttggccatgaaatggtggcaggtttttcctcgtcgctgctcaagacccttggtgtaccgctcgtttctccaccgtatatctttggtgaacatgagattaagccagacgaacgcgcgctgcgctacattgaagtgcttgagcgctggcagttttgtgggcatttttcacgctctaaaacggcaggccgcggtaagcgaccaaaggctgatttgcaggccaactggaaggaggcagagcgattgctgcagaagctctacagccacaatggctggaatcatccgatatttttaggagggaaacgcaacccgcactttcattttcagccgtcgaactggtttcggggtctggatattgcaggggatgaaaatgccctgaaaattgcgggttttgcaccgatgctacgatggctgcgcagcgggctttatccggtgcccgatgggcttcgcgccagtacgggctttcatttcagcatccatgccggggaggattatgcgcatccagcgtcggggttgcgtcatatcgatgaaacggtgcgcttttgtgagatgcgagagggggaccgattgggccatgcgctcgcgttgggaattgaacctgcgctctgggcgaagcgacatggagagatgatacttccgctggatgagcatttagataatcttgtctggcagtggcattatgccacggttttgtcgggttcattgccacttgcacaggcggtattaccgctgcttgagcggcgcattgcacgttttgtcgcgcgttgtgattggtgcaaggagagactacctcaaatagattgtagcgtggcggataaacgagctaacggtgatgaaccatctctaaaaaatatcacgcctgatacactctaccgggcttggcttctgcggcgtaattgctcgtatcgtctccgaaaactccacggtggagcgccgttaacctcgcaggagaaatgcgcactaccagactggtcaacgttaagtgataaagacagtgtggcggcgcagctttatcagcaacgacactccagactgcttgacgatctccctccacaactggtggttgtgcgggtcgcggatgaatggagtacacaggagttgattggattgggaacccccgaaaaactgcgtcagcaggtaagcggtggtcaggatatcctccaggatattgatacgccagtagagctggaatttgtgtatgcgttgcaggattatttgctcgatcgttacgatcgtaaagggttaattatcgaaaccaacccgacgtcaaacgtctatatcgcgcggttaaaaaaacatgtagaacatccaatttttcgctggaatccaccggatgaagaactcttaaaaccaggcgctgaatttaatcgccatggtttacgtagagggcctgtaagggttctggtcaatactgacgatcctgggattatgccaacgacattacggacggaatttttactgctacgagaggctgcgattgagcgtggcattagccgaacgatggctgaatattggctggaaaggctgcgcctgtacgggctagagcagtttcagcgcaatcatttaaatgtatttgaagtttttgactag

SEQ ID NO: 441276 - DNA, 1221 bp, Serratia marcescens
ttgaccgattgggagtcgcaattatctaaaagcttaccagaaggctggctttcggtaatcaagggaaaaatgacaattttgccttatcctattgcagaaacaggtattaactcggggttgagatggaagtattgggaggacgttgagagcaataacgctagtgaagaattgaatgataaggcaatttttcttattagtgctttaacacaaaggaatttttatacaaatgcaaagcagtcgattgttcttaatattggtcgaatttttgaaattatcattgccagcttgatctcagatctggatttatcagatctgcaacgaatcttacaacgctcaccattttattctgccagcgctcttgcgccaactaaaaaattaaaaattaatgaggctgagggtgaagattctggagggaatgtggatgatctcgaaaaagaagaatcctatgatcgtgaagatagattagaaaattcattggagtatttgtatgaagatattaaactatggcgaaaagaaaataatgttgatagattaaaaatatcgccttggatggtatataaggtttttaacaaagtatacagtcaggtcgcaagtaatgctattgaccaaaagggtatgcaggatattactaaggcaattaatattgtaggccgagtattttattcaacttggtcggcatttggtagttttgaaaaaggcgagttgttcgggttaccagacgtggtagtaacgactaatattaactcctcaaaaaatttctatcaacatgctaatttccgtaccaacctcggaccatttacccctgaacagaatctacagcaaggaccgtcaagtcggagtgctatgaatcgacaagcttttggtcagatgagtagaacagtcagttatgttctgagttcacatcctctcaaaagatggatcgatgaagtattattagcagatttaaaacagccatcaaaaaatcaggatgatacgagaaaaataataaatcagagaaaactgacgaaagctcggcgattcattattgacagattaggcatcgatgagaatgaaaagttaacaaaaaaaatcattaaagagcggctaacggcattgtacaaatctctaaaagaagtcgatcaatttatcaattctgtaatcagtgagttctctcatagcgatccagcagtgagaattctgttagaggcatacaatgaaattaacctaagtggtgacaaataa

SEQ ID NO: 441277 - DNA, 201 bp, Serratia marcescens
atggaaaacaaacatcgcagtagtgatgaagattgtggcgaatcgtgggctaccggtagcttcgaagatgcagccaggccgttaatcagatggttggctgaaaacgtacacccgcaccacacagccattgtcaccagcaaccgcgctgagctgttagaagcgcaatcagtggttgccactgaagtctatttgaaagggtag

SEQ ID NO: 441278 - DNA, 924 bp, Serratia marcescens
atgtacgatatcgtcgtcatgggcagtatcaatatggatgtgattgtgaactgccatgagtttccaaagagtggggataatacattctgtaaatccattcagatgactgcaggcgggaaagggaataaccaggcggtcagcgctgcccgttatggcaaaaacgtctgttttattggctgtattggtgatgatgatgccggacgccagctgcgtcagaatctcaaaaaacgccggattgacgattcgtacatgatcgtaaaagaaggggcaaagacgggttcctgtgtgggtctggttgagccgaccggcgataacacgctgctggttaacctcggggctaactttgctttcggtccggaagatgtcagcaaagcgctggaagagatcagcggaaagattttgctgatccagatggaaaccagccaggaatcggtccttgctgccatgcgcatggggcgtgcaaaaggtatgtttgtgatcctggacccggcgccggtgcagggcattaacccggaatgcttcccttatgctgatttgattgttccgaacagcagtgaaacccgccatattaccggtgttaccgtgaatgatgaaagaagcgcactggaagcggcaaaaatcattcacaaaatgggtgtgaaaaacgtcattattaaaatgggtggcgatggttgcctgctttatcagaatgagaaatccgtctttattccagcgctgcgggttaatacggtcgatactgttggagcaggtgactgttttgccggcgcactcgccaattatctgattgacgatgaaagtaatatcgaagatgcgatccgatttgcccaggttgtcgccggtattaaagtttctcgggcaggtggtcacgatgcgatcccggcgatggatgaagttaaagccgttattgaaagtattaccgtctga

SEQ ID NO: 441279 - DNA, 1287 bp, Serratia marcescens; identical to SEQ ID NO: 149533

SEQ ID NO: 441280 - DNA, 678 bp, Serratia marcescens; identical to SEQ ID NO: 149534

SEQ ID NO: 441281 - DNA, 231 bp, Serratia marcescens
atgatttttatcacgcgttttatgaatagctttctgcatcaggcgtcgttcgccacggggtattggtactatgatcggcatcgctcagtccggttggtgattttggttggtttggcgattgatcagatcgcacaatccgggctgagttccctttcagtgatctactattccgcgcagctatttaggggaagtcccttccattcgttaagtctgttttttaagctggcctga

SEQ ID NO: 441282 - DNA, 1023 bp, Serratia marcescens
atgaccatcaccactgtcggtatcgatcttgctaaaaatgtgtttgctgttcactgcattgaccaaaatggtaaagctgttctggttaaacccaaggtgtcgcgtgcagcactttctgaactcatcgcaggtttacctccctgtgtcattggaatggaagcctgctcgggtgcccactattgggcaagattattcaggcagtatggccatgatgtccggttgatggctccgaaatttgtctcaccctatcgcatggcgggtaagaccgggaaaaatgatgcagctgatgcaatagctatttgtgaggcagtgcagcggccgcatatgcgctttgtaccagtcaaagacgaaagccagcaggcaatgcaatgcttacatcggacaagacagggatttatccaggaaagaacagcaacgtataaccgtcttcggggcctgatatctgaattcggggttattgccccacaaagcactgatgctctgcgtcatgttgtttctgaccagaaggaaactctgccagtacaggttaggctgtgcattgatgatctattgacacatgtcactaatattgaagagaaaatcgccgaatatgacagggtattatctcgtgtggccaaaacagatcatcgcagccagcagttaatggaactgaaaggtgttgggcccaccacagcgagtgcgctggtcgccagtattggcaatgcccatgattttaagaacgggcgccaactggcagcctggttggggctaacgccatcacaatacagtagtggcggaaaatcaaagcttggcaggataacaaaagcgggtgatgcctatctgcgaaccctactggtccagggagcccgttctgtaatggtaggggcagagaatagaacggacccgtttagccgttgggtctgctcgttgattggtaggcggggatactggcgtgctgtcgttgcaatcgccgccaagaatgcgaggttgtgctgggcatcattacattacggcgatgacttcagactgtattcaacaacgtga

SEQ ID NO: 441283 - DNA, 480 bp, Serratia marcescens
ttgactgttcggggaagcccttatagtaggataatttccgaattccaagcggacccccagaaggatataaaagccaaaatcgccgccctgacctgcgtccatttcgaggtaaccgaaaacgccgagaatctgctgcataattctcttgccgcctggcagagcccacaggatacctcactgtggctcgacgacttcggctccggctacgcgggaattaacgctattcgcggttatcactttgactatgtgaaaattgataaggattttttctggcacctgatgcgcaaagagtccggccgccagctgatggatgcgctggtgacctttttatcgcgcaaccatcataatgtgattattgaaggtgtcgaaagcgaagcccataaagaatggctgcagggaatggagtggtttgctatccagggacattactggcgggaagtcagtattgaacaactggtcgccgatgatattgccatgtaa

SEQ ID NO: 441284 - DNA, 636 bp, Serratia marcescens; identical to SEQ ID NO: 84879

SEQ ID NO: 441285 - DNA, 999 bp, Serratia marcescens
atgtcgctgaggaaattactaacgctttttatcgtcttaatggcgctgggaaccacctcgtcctgggcctcctgtacgcgtctctcatcgccaacggagatgctggacatggtggtgggcagggtggtggtgccctcggatctgccggtgggctcggtgatccttacccgcgactggacgatgagagctcccggcggggcaagctatagctgtacttccggcaccaaccgctttgcggcgaagatcgtgtcgccaggggccacggaccttggaaataaaatctactccaccaacgtgccgggaatcggcatgcgtttcagccgcggcggcgaaacggtaaatatcgtctatcccgacgtcttttcgtcccgggcatattacaccaccaactattattccctcgaagggtcgcgctttacgctggagattatcaaaaccgcggcaaccaccggcagcggcaccctggcggcgggtaagtacacctcctacgactgggagagcggcgataacccgatcctcgaaacctatctgagcgccaacgccatcaccgtggtctcgccctcctgttcagtgctgagcgggaaaaatatgaatgtcgatgtgggttccatccggcgcaccgacctgaaaggggtcggcaccaccgccggcgggaaggattttaatatcgacctgcagtgcagcggcggcctgagtgaaacgggatatgccaacattagcacctcgttctccggtaccctggccaccagcactaccgctaccatgggcgccttgctgaatgaaaaagccggcagcgggatggcgaaaggcattggcatccaggtgctgaaggatggctccccgctgcagtttaataagaaatacaccgtcgtccgcttgaataatcaggagacccgctacatcaccataccgctgcacgcgcgtttttatcagtatggtccgacgaccagcaccggcgaggtggagtcgcatatgatctttaacctgacgtacgattaa

SEQ ID NO: 441286 - DNA, 2487 bp, Serratia marcescens
atgaagcagaggtcattctgcccgggaagattaagcaccgcgatcgccatcgcgctgtgctgctttccgccattttccagcggacaggaaaactcgggaacggtatatcagtttaacgacggctttattgtcggcagtcgcgaaaaggtcgatctgtcgcgcttttcgaccagcgcgattaccgaaggcacttactcccttgacgtctacaccaacgacgagtggaaagggcgctacgatttacgcatcgcgcgcgataaagatggtcggctgggcgtctgctacaccaaagcgatgctggcccaatatggcatcgcggcggaaaagctcaatccgcagctgagcgagcaggagggctactgcggtagcctcaaatcctggcgcaacgaagaaaacgtcaaagacaacctggtccagtcctccctgcggttgaacatttcggtaccgcagatctatgaagatcaacgcctgaaaaactatgtcagcccggagttctgggacaaaggtattaccgcgctcaatcttggctggatggcgaacgcctggaacagccatacctcttcggtaggcgggtcggataacagcagcgcctatctgggcgtcaacgccggtctgtcgtgggacggctggctgctgaagcacatcggcaacctgaactggcagcagcagcagggtaaagcgcactggaacagcaaccagacctatctccagcgccctatcccacagctcaactccatcgtcagcggcgggcagattttcaccaatggtgaatttttcgacactatcggtctgcgcggggttaatctttccaccgatgacaatatgttcccggacggcatgcgctcgtatgctccggaaattcgcggcgtggcgcagagcaacgccctcgtcaccgtgcgccagggcagcaatattatctatcagaccaccgttccgcccggaccgtttaccctgcaggatgtctatccttccggctatggcagcgatcttgaggtctcggtgaaagaagcggatggctcggtagaagtgtttagcgtgccttacgcttccgtcgcccagctgctgcgtccgggaatgacccgctacgcgctctccgccggtaaagtagacgacagcgcgctgcgcaacaagccgatgctctatcaggcgacctggcagcacgggatcaacaatctgttgaccggctacaccggggtcaccggttttgacgactatcaggccttcctggtggggacagggatgaacaccggcatcggcgcgctctcttttgacgtcacccattcgcggttgaagagcgatgcccatgatgactcgggtcagagctatcgcgcgacctttaaccgcatgtttaccgatacccagaccagcatcgtgttggcggcgtatcgctactcgacgaaaggttattacaacctcaacgacgcgctgtacgccgtcgatcaggaaaaaaatagtcgcagcaactacaccctgtggcggcaaaaaaacggcatgaccttcacggtgaaccagaacctgccggacggctggggcgggttttatctcagcggccgtatctccgattactggaaccgctccgggaccgagaagcagtatcaggtcagctacaacaattcatttggtcgtctctcctggtcggcgagcgcgcagcgcgtctatacgccagacagctccggtcatcgtcgcgacgatcgtatttcactcaacttcagctacccgctgtggtttggcgataaccgcaccgccaacctgacgtcgaacacctcgttcaataactcgcgctttgccagctcgcagattggtatcaacggttcgctggacagtgaaaacaaccttaactacggcgtgtcgaccaccaccgccaccggcggtcagcatgatgtggcgctcaacggcagctaccgtacgccatggaccaccctcaacggcagctacagccagggcgaaggctatcgtcagagcggcattggcgccagcgggacgatgatcgcccacagcggcggcgtggtgctctcaccggaaagcggctcgacgatggccctgattgaagccaaagacgcggccggggcgatgcttccgggatcgccgggcacccgtgtggacagcaatggttacgccatcctgccgtatctgcgcccgtaccggattaacgccgtggaaatcgacccgaaaggcagccatgacgacgtggccttcgatcgcaccgtggcgcaggttgtgccgtgggaaggcagcgtggttaaggtcgcgttcggcactaaggtgcagaacaacctcaccctgcaggcgcgccaggcgaaccacgagccgttgccgtttgcggcaagtattttctcccccgacggcaaggagatcggcgttgtcggccagggcagcatgatgtttatcagcgatgcgaacgccaaacgcgcgattgtgaagtggagcggcgggcagtgttcggtggatctgggacagcaaacaacaaaggatagcgtatgtcgctga

SEQ ID NO: 441287 - DNA, 702 bp, Serratia marcescens; identical to SEQ ID NO: 127374

SEQ ID NO: 441288 - DNA, 597 bp, Serratia marcescens
atgaaaaaggttcttctctctgcagcaatggcaaccgcgttttttggcatgactgctgcccatgcagctgataccactgttggcggcggccaggttaatttcttcggtaaagttaccgatgtatcctgtactgtttccgttaacggccagggcagcgatgcgaacgtttacctgtctccggtaaccctgactgaagttaaagcggcaaaagcggatacttacctgaaaccgaaatctttcaccattgacgtctctaactgccaggctgctgatgacgtaagcaaactgggcgtgaactggaccggcggtaacctgctggctggcgcaacccccaaacaacagggctacctggcgaacaccgaagcggctggcgcgcaggatatccagctggttctgtctaccgacaacgccaccgcactgaccaaaaaaatcatcccgggtagcggtgatcagcaaccgaaagctgttggcgatgctgctgccgtagcgggtggcgcacgtttcacttactacgttggttacgccaccagtactccggataccgtcactgccggtgtggttaacagctacgcgacttacgaaattacttaccagtaa

SEQ ID NO: 441289 - DNA, 906 bp, Serratia marcescens
atgatttcacaagctcttcggattcatgaatccaccgttgcacgtcaccttagcgactacgttctttctgaaaaacttaagcctgaaaatggcggaagtcaaagcaagctttctgcaactcaaaccatgcacctaatcgagcatttgactgagagaacctatcctcatactcatcaaattgtcgcctacgttaaagagacttttggacttgattacactgtctctggtatgaacaaatggcttcaccataacggttttagctacaagcaaccgaaaggcgttccacataaatttgatggagcaaaacaacaagctttcatagatgcttacgaagcgctaaaggcaagttgtgacgaggatgaatcgatagtctttatcgatgctgttcacccaaccctatcaacaaaaatatctcatggctggatacgaactggtcaagataaagtgattgaaacaacgggaaatcgcagtcgattgaacattcttggcgcactgaacctgtcagatatcggagctactattattgatgattatgagagcattaacagtgaaacgatagttcgctttttctgtaagttaagagagagttatccgttagctcataagcttcatatcattttagatggtgcgggatatcaccgtagtgacttggtcagagatgcggcatttgtccttaatatcgagctgcattatcttccaccttacagcccaaacctcaatccaatagagcggctttggaaagtaatgaatgagaagtcgaggaacaacgtttacttcaaaagtaaacgggacttcaaggcggcaatagaccaattttttactgtgactcttccagagatcgcaggctctttggcatctcgaattaatgataattttcaggttctcaagcctgcatcttcaagttga

SEQ ID NO: 441290 - DNA, 1833 bp, Serratia marcescens
atgagaagattactgacgacattggcgattttactggtggtcgtggtggcggggatgtccgcgctggtactgctggtcaatccgaatgattttcgcggttacatggtcaaaaaggtcgagcagaagagcggctaccagctgacgctcgaaggcgatctgcgttggcatatctggccgcagctcagcattttggccgggcgcatgacgctgaccgcgccgggcgccaaggcgccggtggtgagcgcggaaaacatgcgtcttgacgtcaaactgttgccgctgctgtcgcatcagctgtttgtgaaacaggtgatgttgaaaaacgccgtcattcgcctcacgcccgacagtgaagagctctcgcaagtggacgccccgattgcgccggccggcagcggcgctgatgcggcagacgcggcctggaaattcgatatcgataacctgcgcgtcgtggacagcctgttgatttggcagcgcgccgacaacgagcaaatcaatgtccgggacatcaatcttaccctgcagcaaacggagaaacggcaggcgcggctggacatctccagtcgggtcaaccgcgatcagcgcgacctggccttcagcatggcggccgatatcgatctgcagcagttcccgcaccagatcggtgccaaggtgacccagttcaattaccaattgtcgggggcggatattccgaacggcggtattcaaggcgagggcaatgctcaggtggtctatcagcagacgccggcgcaaattgccgtcagccagctgaacgtcagtgccaataacagtcagttgaccggcgatatcagcgccagcctgggggcggtgcccggctatgtggtgaacctgaattcggctaatctcgatctcgacgcgctttccggttggcaatccagcaccaataccgccgagcagcccgccgtgaccgccgcgccggtgatcgccagccaggttgacgatcggcagcagaacctggaagcgctgcgcgatttcaatgcacagctgaatctgcaggcggcgcagttgacctaccgcggtatgaacgttacccagttagccgtcgcggcggataatcaacgcggcctgctgacgctgcataaacttgccgggcaattggccggcggcgatttctccttgccgggatcgctcgatgctcgcggcaataaaccggtgataaacgtgcagccgaccctgaaccaggttgagctcggtacggtgctcaaagccttcgacatgccgcagatgctgaccggcaaattcagcatgaaaggagatttgaccggcgatcgcctttcttcacagtcatttgagcaccgttggcgcggtacggcgcagttggcaatgcaggatgcgcagttgcacggcctgaacattcagcaattgatccaacaggcggtggcgcgcaacgataacagcgtgcgcgggcaagacagctatcagcgctataccgaagtcaaaagcgtctcggcgcgggccagcctgagccagggcactgtcaagctcagcagcctgacggcggattcgcctttgctggcgctgaccggcgccggcagtatcgatatgccgggaaaacagtgtgatatggcgcttaacgtgcgcgttacaggcggctggcaagggcgcggcgaactgatcgagcaactgcaaaaaacgccgatcccgctgcgggtttacgggccgtggcaacggctgaattaccaactgcaggtcgatcaggtgctgcgcaaaacgctgcaggatcgggctaaagatgcgctgaacaaatgggctgaaaagaacaaggattcgcgtgaaggccaggatctgaagaagctgctcgacaagctgtaa

SEQ ID NO: 441291 - DNA, 2976 bp, Serratia marcescens
atgccccgccgttcgatcctgtccgccactgagcgcgaaagcctgttgacactgcccgatgccaaagatgagctgatccggctctacaccttcaacgacgccgacctagcccgcattcggcagcgtcggggcgcggcaaatcggcttggtttcgcggtgcaactttgctacatgcgctatccgggcatcgcgctcgcagctaacgcagagccggacacctctttactgcgcatggtcgcggaccagatcaagctgccgggcgatatctgggacgaatacggtcaacgcgccgaaacgcggcgcgaacatctgttggagttgcagtcagcctacagcttccaatcattcacgacactgagccattatcggactgccgtacaaagtttggatgatctggcctggcaaaccgataaaggtattgtgctggcacgtgagctggccgatgggttgcgccgcaagtgcattttgctgccagcagtcggcgtgatggagcgtatctgcgccgaggcgatcacccgcgccaaccggcgtattcacaccgcattgaccgaggccctgacaagtgcccaccgtcagcgcctggacgaactcctcaagcgcacggacggtggtaaaacgaccaaactggcgtggctgcgccaatcgcctgcaaaaccgaactcgcgccatatgcttgaacacatcgaacgtctcaaagcctggcaggcgcttgacctgcctgctggcatcgaacgacagatacaccaaaaccggttgctcaagatcgcccgtgagggcggccagatgacgccagctgatctggccaagttcgagccgcagcgacgctatgccaccttggtcgcactggccatcgaaggcatggccaccgtcaccgatgaaatcatcgatctgcacgaccgcatcatcggcaagctgttcaacgcggccaagaacaagcatcagcagcagtttcaggccagcggcaaggcgatcaatgacaaggtgcggatgtatgggcgcataggacaagccttgatcgaggccaagcaaaacggcggtgatccgtttgccgctattgagtccatcatgccgtgggacaccttcaccgccagcgtcacagaagcgcaaacactggcgcggcctgcggactttgacttcctgcatcatattggcgagagctacgccaccttgcgccgctacgcgccgcagttcctcgacgtgcttaagctgcgagcggcgccagccggtaagggggtgctcgaagccatcgacgttttgcgtggcatgaacagcgactgcgcccgcaaggtgcccgcagacgcgccaaccgcattcatcaagccacgttgggccaaactggtcctaaccgacgagggtatcgaccggcgttactacgagttatgcgcgctgtcagaactgaagaacgcgctccgctcgggcgatgtgtgggcacaaggctcgcgccagttcaaagacttcgacgaatacttggtgccggtcgagaagtttgtcgccctgaagctggccagcgcattgccgctggctgtagccaccgactgcgatctgtacctgcgtgagcggctggagttgttggagcagcagctcgccacagtcaaccgcatggcggcggtcaatgatctgccggacgccatcatcaccactgcgtctggcctgaagattacgccgttggacccggcggtgcccgatgctgcgcaagtcctgatcgacaaaactgccatgatcctgccacacctcaagattaccgaattgctgatggaggtcgatgagtggacggacttcacccgccacttcacgcacctgaagaccggcgacaccgcaaaagataaaaccttgctgatgacgacgatcctagccgatgcgatcaacttgggcttgaccaaaatggcagagtcctgtcccggcacgacctatgccaggctgtcctggttgcaagcttggcatgtccgcgatgaaacctattcgacggcgttagccgagctggtgaacgcgcagtttcggcaccccttcgccggaaactggggcgacggctccacgtcatcttcggacggacagaacttcagaaccggtagcaaggcagagagcaccgggcatatcaacccgaaatatggaagtagccctgggcggacgttctatacccatatctctgaccaatatgcgcccttcagcaccaaggtggtcaatgtcggtgtgcgcgactcgacctatgtactcgatggcctgctgtaccacgagtccgatctgcgtatagaggaacactacaccgacacggctggcttcaccgaccacgtgtttggcctgatgcacttgcttgggttccgctttgcgccgcgcatccgtgacctaggcgacaccaagatgtacattccaaagagcgaaactgcctacgatgcgctcaagccgatgattagcagcgacaggctgaacatcaaggcaattcgtgtccattgggacgaaattctacggctggccacttcgattaagcagggtacagtgacggcatcgctgatgctgcgcaagctcgggagttatccacgccaaaacggcttggccgtcgccctgcgcgagctgggacgcattgagcgcacgttgttcatcttggactggttgcaaagtgtggagctgcgccgccgtgtgcaggcaggactcaacaagggcgaggctcgcaacgcgctggccagggcggtgttcttcaaccggttgggtgaaatccgcgaccgcagctttgaacagcaacgctaccgggccagcggcctcaatttggtgacggcagccatcgtgttgtggaacaccgtctatctggaaagggcgacgaacgcattgcgcaatcacggcaatggtgtcgatgacagcctgttgcaatacttgtcgccactgggctgggaacacatcaatttgaccggcgattatctttggcgcagcaacgccaagcgaggggtggggaagttcagagcgctacaaccgctaccaaagccttaa

SEQ ID NO: 441292 - DNA, 321 bp, Serratia marcescens
atgtcacaaaccaaatctgaagctgaactctttattttgaaataccctttcaccacagcggcgggtgaatcaatcccccagctcacccttaaacgcctgacggttaaagacctcaagcaggttaaaaaagtccacaaagacccgaatgactgggatgaaccactgatttcccgcagcaccggtctgcttcctgaagacctggataatatggatttagcggattatctggatctacagaaacgatttcagcaaatcactgggctgggcaagggcaacgaagacgctgatgcaggcgcaggggctgctggcgaggtggtttag

SEQ ID NO: 441293 - DNA, 498 bp, Serratia marcescens
atgaggcgctggcagaaggcgacgttatccgcatcctgcgcggggtgtgacatgtactgcaccctggcggatttgcttgagcaggtaccggaaaggacgctcattgagctgactaacgagtcggttggctttgatgagcagcctccggtcaatgcgaccgtggttgagagttgcatccgctacgccggtgaactgatagatgcccacctgcgtgggcgctataccctgccgctgacggaagtgccgaccgttctgcgcgacattgccatcacgttgacccgataccgtctgtacgtccgccgtcctgaaggtgacctgcctgacaccgtgaaggacgataacaaggaagcacgacggcaactggaggctatccgcgacggaaaactcacgctggggctgcagtcgactcagaaagatgtgcctgagtccggtgaaatccgggcacgggcacgccgtcccacctttggcgggcgcgatggcttactggagaaatactga

SEQ ID NO: 441294 - DNA, 654 bp, Serratia marcescens
gtgtggactagcctgataaaaaaactgccgtggcgaggcatgctgctggccgttgcggttgcgggcgtattgtatggcctctaccgctggggctacagcgagggacacggcagcgctgagcgcgacgggaatgcctcactcagtcagctgcagtcgcagttcgatacgtaccgccgtgagcagacggagatggagaacaccgcgctgcgggcctgggcaaaacgctatcaggagcaggtagccgcaggccatcaggcagaggcgacttaccttgagcaggtatcgctgcttgaaaaccagaaccaacaactgaaagagaaaattgatgatgtcacacagcgctggattgatgaaaaaggtaagagccatcccattgagtgcgtgtttactcgcggtttcgtgcgccagtacaacgcagccctcggatatgacgacgcatccgtcgacaccggtcattcaaacgcaactgccgccgctgacaccggcactggcacagcgccccggcctcctgaagcccctgacgccgggctacgcaactcaggcgtctcccagcgtgacgtcctcgccaacatcatcgacaacgcgaagcagtgccgcatctggcgcggccagataaacgggcttctggacgaacgggaaggattacagaaatga

SEQ ID NO: 441295 - DNA, 288 bp, Serratia marcescens
atgctgacggcaattggtgttcctgagcataacgataaaaataaacgcattaatcttcatcaacgtatcgaactgcttgacgggcaatatactccctacaaggacacgctgatggccattaaattcctgggtaacgccggcagccatacctatgatgaagtgacaaccggcgatatcgaagcggcattcgagattatggagtatgtcgtgaatgacctcttttccgggcgtaaggagtcgattgacgttctcaccagacgactacatcgcaagttcggaaaccagtaa

SEQ ID NO: 441296 - DNA, 285 bp, Serratia marcescens; identical to SEQ ID NO: 131144

SEQ ID NO: 441297 - DNA, 828 bp, Serratia marcescens
atgatgagcaagctacaggaaaaatctgcgcgaatagttgcaataatgaacaacaaaggcggtcctggtaagaccagttcagcgacaaatcttgctgtccactttgcccgaactggaaagcgcacgctgctgattgactccgaccagcaggccaatacaaccgaagtgaccgcaaatggcaaaaagtattattccatgtacggccctacaatttgcgacctttatagtaattcccgatttgatatccgtgatgtcatcattcctgcgatggccggtgaaacgcctatccctaaccttaatctgatcccgtccgaccctacgtttgaaaaaattatcgaacagacacttacacgcagtcaccgcgaaaaaatcctgggccgacatcttgagaaagttcgcggcgaatacgattacatcattattgactgcgcaccagggctcaatatcgcaaccggcaatgccattttcattgccgaccatgttcttgttcctgtcgacggcggaagtttttcgcttagtggcctggaaatcatgctggactacatggatgagatctctgaggaagattactcgcgtttcagcgtatttcgtaataactacaacggcgccaataagaaaattaacgcctatatcgataccgtgctgacttcacatgagagaatctcaccgcgcctgttgaagagccggattcgtactgatcaggcaatagtgcagtcgcaggtggcttgtctcccactttattactatcagaaaagcgcaatggctttagttgactacggcaaactggctcgcgagctagaagaaattatcaacagtgaggcagcataa

SEQ ID NO: 441298 - DNA, 954 bp, Serratia marcescens; identical to SEQ ID NO: 131142

SEQ ID NO: 441299 - DNA, 327 bp, Serratia marcescens; identical to SEQ ID NO: 131141

SEQ ID NO: 441300 - DNA, 807 bp, Serratia marcescens; identical to SEQ ID NO: 131140

SEQ ID NO: 441301 - DNA, 594 bp, Serratia marcescens; identical to SEQ ID NO: 131139

SEQ ID NO: 441302 - DNA, 753 bp, Serratia marcescens; identical to SEQ ID NO: 131138

SEQ ID NO: 441303 - DNA, 600 bp, Serratia marcescens
atgaataaagaatacgtcgaatttttaaaaatgctgtctccgtttattatacttgctatttcaacgatattaataccctggattaaaaggttttattcttcatatatttcttttttctctttacctacgagtaagaaaatagaagcaatagaatatatcaatggttataaaaaaagtagtaacaccctgggaaaactaaagcacaaaataataataagcgattataagctgcatgaaaataccgatttatcaaagtgtgtaattagttttttctatgaggatataagtaaaaacggatacttcgcaaaaagtttattacgcattaaagggctgtatgtaattgaaaatggtagaattcgtgtaaatgtgggaaatgttctgttcgccctggctttttggttgtttacatttttcacatactacctggcttattatttttcggcggactggaacaagggtttgcctaatgctatctttcctttttcacttattgtagcagcagtgttttatacattccttataatgattgtttcaactagatttatatctgttcttaagaacaaaaaacggtttaataaatatcttagtagtagattgtaa

SEQ ID NO: 441304 - DNA, 342 bp, Serratia marcescens; identical to SEQ ID NO: 125566

SEQ ID NO: 441305 - DNA, 864 bp, Serratia marcescens; identical to SEQ ID NO: 96833

SEQ ID NO: 441306 - DNA, 258 bp, Serratia marcescens; identical to SEQ ID NO: 96832

SEQ ID NO: 441307 - DNA, 555 bp, Serratia marcescens
atggcagttcgcagcaaagcaaatacctgcagatggttggtggcagggctgctcggtctggccctttatgcccccgcaccggcagcgtatgccgccagcatcgagacgggtttttctccggaaggaacggcactgcagctggtccttaagactattgagtcagcacagcacgaaattcggctgatgggctactcatttacgtctcctgaggtggttagcgcacttgtcagagcaaaacaccggggtgtggatgtgaagatagtgctcgatgagaaagggaaccggaacaaaaccagccagtcggcgatgaatgttgtggtgaatgccggtattccgctgcgtaccaacggtcgctacgccatcatgcacgataaagtcattattgttgataatcatacggttgagtcaggcagctttaatatgacccgctctgcggcctcgagaaatagcgagaatgtgctggtgattaaggacgtgccggaagtggcgcaagcctaccttcagcactggcagtcgcgctgggacgggggaacggagtggcattcttcatactaa

SEQ ID NO: 441308 - DNA, 237 bp, Serratia marcescens; identical to SEQ ID NO: 96831

SEQ ID NO: 441309 - DNA, 309 bp, Serratia marcescens; identical to SEQ ID NO: 96830

SEQ ID NO: 441310 - DNA, 543 bp, Serratia marcescens; identical to SEQ ID NO: 96829

SEQ ID NO: 441311 - DNA, 705 bp, Serratia marcescens
atggccctgtcacccgcccagcgccacagcgccatgatccaggcgcagcgcaaactggataaccagcaggcgattgccggctgggacagcctgcacattcaggtgcgggcaatggaaaacgacattgcgcggctgcgcaacctgccgaccattgccgagcgcatcctgatgaaacgcgacgtgttgctgccgcgctggcagcccacggtggaggcttatcttgcggcgggtgacgttcacgccaatccgatttttgcctggtgcgtgatctggttgttcgacgtgggcgactttgatttggggctggattgggtggacatcgcgatcgcccagcgtcaacagacgcccgaccggatgcggcgcagttttgccgcttttgcggcggacaccgttctggcctgggcggaagaagaagccgcccagggcaacagcgtggagccgtacttttcccgcaccttcgagaacgtgcgggacaactggcggctgcatgaggaaatcagcgccaagtggttcaagtttgccgggttgatgctgctgcgtgacgacaacggcgaaccccgcgccacggccgtggaagatgtggccacgctggagcaggccgacaatctgctgatgcaggcgcacgcgttcgatccggttggggccaaggtcaaaacgcaccggcagcgtatcgccgcccggttgcgtgccctggcgaaagagtaa

SEQ ID NO: 441312 - DNA, 1029 bp, Serratia marcescens
atgcaattaaatcaacgtgcgcgtgagatgctggataaatacagcgccggccttgcgcaagaatacggccagtcgcgtgctgaccgctatttttctctgaccgacccgaaagaaacccaactgcgtgcggcgctgctggagtccgtggacttcctgtccatgatcacctgcgccgatgttgaccagttgcagggccaggtggtcaacgtgggtaatccgggcatctttaccgggcgtaaagagggcggccgttttatccgcaataccggcgtcgacgggctggagtacaagctggttgaaaccgactccggcgcggccctcaaatgggcgttgctgtcggtgtgggcgaacgccggcgatgaaaacgaattcttccagcgtatgcaggaattcaccaaccagtcctttgcgctggatatgctgcgcatcggcttcaacggcaccaacgtggccaagtctaccgatccggagaagaacccgaacggcgaagacgtgaacatcggttggcaccagtttgtccgcaactacgacaaaaaccaaatcatcgatacgccgatcacgctggatgaaaagggcgattacaaatcactggacgcgatggcgtcagaccttatcaacagcaaaattccgcagcagttccgcaacgatccgcgcctggtggtgctggttggcgccgacctggtcgcggcggagcaataccgcctgtatcaggctgccgatcgcccaaccgagaaaatcgccgcgcagatgctgggcacctccattgccggccgtccggccatcgtgccgccgttcatgccgggcaaacgcatgatcgtgacgccgctgagcaacctgcattgctacacccagcgcaacacccgccagcgcaaggcggagttcgtggaagaccgcaaacagtacgagaacaaatacctgcgcaacgaaggttacgcggtggagtacccggaactgtacgcggcctttgatgaaagcgccgtcaccatcggcaaggtgaaagagccaagcgagccggtggcgaaggagtaa

SEQ ID NO: 441313 - DNA, 822 bp, Serratia marcescens
gtgtcccaattaatgaccgattggatttgtatttgcgcggaaggcgaaaccggcgacaaacgttttgttgagcgtcaatggttaatcgatgccgccgagctatacgatccgaaattaaaaaccgccatgatctggcctgaacatagccgcgaaaccgaatacgggaattgtggcgaagtgctggccctgaaatgtgaagaaggcgaagacggcattatgcggctgttcgctcgcctgcggcccaatatcgggctgatgcgcgccaatgcagcggggcaactggtgttctgctcggccgaatttacccccgatggcaattttcggggcacgggcaaatcgtatctggaagggctggccgtcaccgacgagccggcgagtgtctacaccgaacggctgcactttagccagacccgcaagcagggtttgatttatgcggccactcaacccttgaacctgataggtaaaaatatggctaaggacaaaaaaaacagctggcgtaaattcttctcgctggaggatgaattaccggaagaaacaaccggcgagccggataaattacaggcgttggcggaagctgtcgccgcactggaaaatcgcgtttccgcgctggaaggcaaaaccgaagaaaccgccgcgacggttgaagaagtccaggaagatgtggaaaccgtgaaagaagtggtggacacccaggaattcaaactgctgcgcgacaatatcggcggcatcgtgaagaatttcagcaaactggacgatcgcattaccaagttgccaaacaaaaatccaaagggcgacgcgcgtaagccgttcaagttcctttaa

SEQ ID NO: 441314 - DNA, 681 bp, Serratia marcescens
atgctgtttatgtgcgtgttcgtcgacagcggcgacagcgtgttcaagttccgcgacctggaaggctgcggcgtcgacattgccgtttggcaagatcacgatccggaagccgcgcgaccctttggcaaccgcgaggtgtggggcggcttcgacccggcccgctccggggatacctcgaccttcgttattctggcgccgccactctatgagggcgaacgcttccgcgtgctggccaccttctactggcagggcatgaactggaagcaccaggccagccagatcaagaagctgttcaagcgctacaacatgacgcacatcggcatcgataccaccgggatcggcagcggcgtgttcgagatggtggaggcgttcgcgccgcgccagaccgtcgctattcgttacggggtggaaaccaaaaaccggcttgtactcaagatggtcgacctggtggaaaaccagcgcatcgaatgggacaacgagcagaaggaaatccccgccagcttcctggccatccgtcgcactaccaccgccaagggcggcagcatgacgttcaccgccgatcgcagcgccgagaccgggcacgctgacgtgttctttgccctgtcccacgccgccgacaatgaaccgctcaactacgagaacgaccgcaaatcaacctggaaaacgagaaaagccgcatga

SEQ ID NO: 441315 - DNA, 1050 bp, Serratia marcescens
atgaagaagaacaaacaccgccgccgcgctgaaccgcgccagtccagcgccgccggcagcaaccgaaaaatgagcatcatgaacctgggcaacctcggcaagcccgagccggtactcaccaccggcaccgattaccgggaaatctggtacgacaacgactttgaccactacagccaaccgattgaccgcctggcgctggcgcaactggtcaacctcaacggccagcacggcggcgtgctctatgcgcggcgcaacatggtggcggccaactaccagggcggcggcctgtcccatgaaaagctgaaagccggcgtgttcgattatctgaccttcggcgatctggccatcctcaaggtgcgcaacggctggggcgaggtgatcggcgtggagccgctgccgtcgctctatctgcgcaggcgcaaggacgactcgtttgtggtgctgcaaaaaggcgagccgttggtgtacctgccgcaggatattatcttcttgcagcagtacgatccgcagcagcagatttacggcctgcccgattacatcggcggaattcactcggccctgctcaacagcgaggcaacgatatttcgccggctgtactaccacaacggcgcccatacgggcggcatcatctacaccaacgacccgaacctcagcaccgaggtggaagaagaaatcgtgcaatgcctggagcaaagcaaggggatcgggaatttcagcacgctgtttgtgagcatcccgaagggcgatccggaggggattaaatggattccgatcggcgacatcagcgccaaggatgaattttccaatatcaagaacatcagcgcccaggacgtgctgaccgcccaccgctacccggcgggactggccggcatcattcccagcaacgcggccggcctcggcgacccggtgaaggcccgcgagacctaccggcaggacgaggtgatcccgttgcagcgcatgataatggacgcggtaaataccgatcgtgacgtgccagcgcacctacatttgaaattcgacatcgaaacaacacaatcgggtgcgctatga

SEQ ID NO: 441316 - DNA, 1311 bp, Serratia marcescens
gtgagccgcagcaccctgggcgagtgggccgagcagaagaagcgcaaccgcgaattcttcaaggcgttcgatctggagaacgaggaaaccggcgagcgtgtttctatggcggatatggtcaacggcagcaacgccaacccggccattcgtcgttgtgagttgatggtcagaatgcgcggctttgaagacatcgccaaggaaaagggctatgtcggcgagttctacaccatcacggcgccgtcaaaataccactccgtccacagcggtggcggctttgtcgagcagtggaacggcgccaacccgcgcgacacgcaaaaatacctgtgccgggtgtgggccaaggcccgcgcggcaattgcccgcgccgggatcagcgtgtttggcttccgcgtcgtcgagccgcatcacgatggcacaccgcactggcacatgctgctgttcaccctcgccgccgacctcaagccgctgcgccgcatcctgcacaaatacgcctgcgcggaagacaagcaggagctgcggacgttcaaggcccgcaaggcccgttttcacttcaagaccattgacgagagcaagggcagcgccaccggctacattgccaagtacatttccaagaacatcgacgggtacgccctggacggggaaaaggacgaggaaaccggcgagaacctgcgggatatggccaaggcggtcagcgcctgggcgagccgctggcgtattcggcagtttcagcaaatcggcggggcgccggtcaccgtctggcgggagctgcgccggctgcgggggcagcagctggataatccgcagatggacgccgtgttggcggctgccgatgtggccgtcgattgggcggcatacaccgaggcccagggcgggccgttggtggcgcgggcggatctggtggtgcgcctggcctatgacatcaccgagcagggcaacgcttacgccgaggacgtccagcgggttgcgggcgtctattcgccgcgcctgggcgaggcgtcgcgcgtgtgcacacggctggtgcagtggaaggtggttccgaagttggccgaagcgtcagcgcaggccggtgtttctggcggcaacgccgccccttggagttctgtcaataactgtacgccggggctagggcgtcaattatcggcactgcttaaacgtcgcggatttgagggtagcgatcgggagatagccattctggaacggggcagcagcctggttattcacgacgaccggcggctgattttgcgccaggggcggttggaagaggtcggcagtcagccagagcatgagctttggccgggctggaatgggtga

SEQ ID NO: 441317 - DNA, 393 bp, Serratia marcescens
atgaatgacgctcgcgggttcatccagtggctgattgataacggccgcgaaaccgaaggttcgatcatgccgctttatgcggcatggcgtgatcgtcctgtgtcagaggaaacggccaggctgatgccggtcggtcgttccgctaaatgctgtatcgatcatcgctacgtcattgccaagaccgataagaccttcacgctttacgagctgcgccacaacgccgccggcggccgcgcggtggtgattgcgctgtatgcggacgaggtggcgcttgttagcgatctgataaaccacagcatccgccagactaaggtcgccagcatcggagagttggttgcggaaacccagcgtctggccatgcagtgcgatgcggcgttggccgagttccagtga

SEQ ID NO: 441318 - DNA, 627 bp, Serratia marcescens
atgaaaaaatttaccgatatgcaaattttatggctgaaagaaaattgcagcgggcatacgtaccgagagataacggaagcgtttaattataaattcggctgcaagttcgatactgtgtccgtgctgcataaaattaaatctttggggcttggtaaaacaatgctcttagagcggcagtacaccgaagcgcaacttagttttatatatgcgaacaaaaacttaacttattccgagataactgaaaggtttaatcttgctttctcagagagtaaaaaagtggctgcaataagagccgcaatgaaagcaagggggtgggggaagtatgggacgccaccaacgaaaaatcgtcgaatacttattgatggaaaattagttcgtttagatgtttatgtgtgggaatgtgtaaacggcccgctaccgaatggttataccttaattcatctcgataatgacgatgataataacaaagtagaaaacttaaagcttgcgcctaaaaagacaaaggcagcctatgttagggctggctatggcgatgcgcccaaagcgctggcgcctgcgctttatgcccaggttatgctacgcaatcacctgagaggtctggaaaagcaggtgaggggcataaaatga

SEQ ID NO: 441319 - DNA, 231 bp, Serratia marcescens
atgaagaatacgttggccgatctggttaatcaccaattcatgatgctggaaacccttaccgatccgggtttgaagggcgaagcgctccaggaagaaatcgcccgtgctaaaggcgttgcggacgttgtcggcaccatgatccaaacgtaccgcgtcgcactggatgcacagaaagctgtttatgacggctatgccggccgggttccgaaggtgttggggattgacgaatga

SEQ ID NO: 441320 - DNA, 900 bp, Serratia marcescens
atgattaaaacagtattgaaatgggcgggcagtaaggcccgtttgtcggcaaaattgcgcgaatacctgccggaaggcgatcgcctggttgagccgttcggtggctcctgcgctgtgatgatgaataccgattacccggaatacctggtggcggatattaacagcgacttgattaatatgtaccaagtgatcaaagaggatgtgcagggatttatcgactccgcgcaagccttattcatgacggcgaacacgcccgagcaatatctggaatttcgccaggtgtttaaccatacctgtgccgatcggtttcggcgtgcggttattttcctgtatttgaatcgtcactgcttcaatggactgtgccgctacaatcgtgccggttttttcaatgtgccttatggcaaatacaaagcgccttatttccccgaagaagagatccgcgtcttcgctgaaaaagcgaagcgagcaacgtttatctgcgccgactttcacgaaaccctgcgcctggtgcgttctggtgacgtggtgtattgcgatccgccttatctgcctgagaagggcaaagacgcattcacaaattaccactctggagagtttggaaagcgtgagcacttgagtttggccgttaacgcccgccgcattggtcagtcaggcataccggttgtgatctcgaatagcatccgggcggccgagattaatctctaccacgggttcgatgtggccgaaattgacgcgccacgcagtattagcgccagtggcgatagcgccaaaaccgcaagggaagttttggcgtcaataacgcctacggaatcctcgccccttgggctttcgatccgggtcagttacccggcgtggtgctatggagagcagccagaagcggcaccggaggtcaccccatga

SEQ ID NO: 441321 - DNA, 159 bp, Serratia marcescens
atgacaattgacgccatttttatcatcgccgtagcgctggccttcctgctggtgattgccgcagcggctgcgatcttcttcgtgatctctatcgcgctggatattcggcgttttcgccagcgcaagacaccccgttacgaaaccgaaaattacgattag

SEQ ID NO: 441322 - DNA, 228 bp, Serratia marcescens
atgccaaccatcggacaagacattagcaaccgtgcggcggccgagtcgttcgaatacgtgatcaatctggcccgcaatgaggcgcttgctgatgcggcggttttgttctcgggccagttggatcgcctagctacagatgtggccattagagaactgtccgccgttgagattatcgatctgctgcgccaggaggccgagaactggaaaaacagggggatggactcatga

SEQ ID NO: 441323 - DNA, 405 bp, Serratia marcescens
atgaaaacaattgcggtacaaaaagaagggctgttgtccgacttcaacgcctggggcgtaaagcccagctatgcacgtttcttcctggataagtgcgaagaaaccaacgggctgatctcactgaggcaagattttgtcaatgaaccccacccagcgactaacccttaccaatggtttgccgccaacgttgcgttctggtgccgagtgtaccgcgaagcgcaggcgccggtggggcaggtggaagcgctggccgctatccgcgccatctactacatcgcgggcagccttgggcttgaggtgacaacacgcatgatcgccttgtggtggaaaagcgcccaacccctgcacggactgccggccccgaatcaatcgcatcacagcggcgaaccccgccaaattcactaa

SEQ ID NO: 441324 - DNA, 384 bp, Serratia marcescens
atgatggcaaatcatgagcattggcttgcggtgtgccgtgccacggttaccggccaccacagcaaaacccgcaaggtgtggaacgggcttagcccggctcgccgtggggtgctgctgcacgctgccggcatgaaatctttcttttgcaactacagctgggacgacttcaacgagcgcgagttgcaccagttgaaaagaggcattcagcgcttgcaggcaatggtgagcctgttcggcggtttcaacgatctggacttccgcaccgaggcgccaggaatcccgacgaagaaggcagcggccacgaaggcacccacgggcgccaactccctgcgggccaaggccgagttgttgcaacggattaacggcttacacgtcaatcactga

SEQ ID NO: 441325 - DNA, 549 bp, Serratia marcescens
atggtcggtcagaaaatgttcctgcaggtggagcgagaggagtggaaccagtggaaatcggtatcacagcagatttccgagggacttcgggatgtggtcggcaacacgccgatcggtcaggtgacacaggatatcgtctaccggcaaatccaacttatgaagtcgctgcccctggaagccgccgaccgtgttcgtgaaatccagcagcgcgccatacaggccaccattcacggcgaacgccctgacgcgctgtacgagatgatcatgcagtccggtgatgtggcggccagtagggcgaagatgattgcacgcacggagatagggcgggctactggcgcactgacgcaggcccgcgcgctggctgttggctctgaggggtactggtggcgcattgagggcgcaggtacgcgaccatcgcacaaaaaaatgcgggataagttcgtgtactggaacaacccgccgacgctggacggcatgatcggtcacgccggttgcctgcctaactgcaaatgtcaccccgatgttcaaatacctgggccaagaaagtga

SEQ ID NO: 441326 - DNA, 582 bp, Serratia marcescens; identical to SEQ ID NO: 148319

SEQ ID NO: 441327 - DNA, 402 bp, Serratia marcescens; identical to SEQ ID NO: 52339

SEQ ID NO: 441328 - DNA, 828 bp, Serratia marcescens; identical to SEQ ID NO: 28366

SEQ ID NO: 441329 - DNA, 690 bp, Serratia marcescens
atgatgaatgcacagcaattggaatatatacgcatcaatctacgtactgccctagtggattcatcgggcggaacgaaggggcagttagaggcatttgctgaacatccgccagcagataaagatcgaaatccacggaaaccagtacatgttgttctactggatgatggtcggggagggattaggcaagttagagccgaaaattcagctttgcatgtgctggaaactcgaagcaggcgtcggccattcccactgataaacgagaatgaattttctgcggcaccttggcgcagggctgtaaatttattgtctgaacatgagcaggcatggatacggtactgttatgggttggagctggattttgaatatcaagtaatagtttgcgaaaaaatttggaatgattacaagagccgtttacctatcggccttttaaaaaaaacaaaaaaaaggcttgtttcattagtttggctggccgtccaggaagttgcagctactcgccataacaaaacatataaggaatatgcaggcgctgcacttgcgcggatgatggatataaatcgctctacttggattcgagtttatgcctatcattggttggagctaaaattatccatccagcagctagatgaacgggcactgcatggcgttttagatgtaaaacaagactttcagaaaggcaaggagatgaaatag

SEQ ID NO: 441330 - DNA, 222 bp, Serratia marcescens
atgtataccgtagtcattgcttcggtgatattaaatatattattgctatttgccgtcattaaactttaccggagaaacagggttgactatgaaccctctttcctgccgacaattttttaccacatgactaaatatataaggcattctggctcatggaatgaaatggagttcatgcgtgacgaattacgccgtgtattaaggaaggtgcgaacaagttcctga

SEQ ID NO: 441331 - DNA, 792 bp, Serratia marcescens; identical to SEQ ID NO: 96825

SEQ ID NO: 441332 - DNA, 720 bp, Serratia marcescens; identical to SEQ ID NO: 96824

SEQ ID NO: 441333 - DNA, 738 bp, Serratia marcescens; identical to SEQ ID NO: 96823

SEQ ID NO: 441334 - DNA, 5241 bp, Serratia marcescens
atgatgagcatcggatcggtaaaatccgccggcagcgcgggcaattattacaccgacaaggacaactactacgttatcggcagtatgggcgagcgctgggccggaaaaggggctgaagcgctggggctcagcggcggggtggaccagaagatctttacgaaggttctggagggacgcctgccggacggcagcgacctcagccggactcaggacggggcgaacaaacaccgtccgggctacgacttcaccttctctgcgcccaaaagtgtctccgtgatggccatgctcggtggcgataaacgtctgattgaggcccataaccgcgcggtggagaccgccattaagcagatagaggcgatggcctccacgcgggttatgacggagggcaggagcgagacgcagctgaccggcaacctggtgatggcgctgtttaaccacgataccagccgcgaccaggagccgcagctgcatacccacgcggtggtggccaatgccactcagcatggcgatgagtggcgcacgctcagcagcgacaaagtgggtaaaaccgggtttattgagaatatctacgcgaaccagattgcctttggccgcctgtaccgtgccgcgctgaaggatgacgtcgcggcgatgggctatgagactgaaacggtcggcaaacacggcatgtgggagctgaagggcgtaccgacggagccgtattccagccgcagcaggaccatcagcgaggcggtcggggatgacgcgtccctgaagtcccgcgacgtggcggcgctcgatacccgccagtcgaagcagaaggttgaccccgaacagtgcatggccgagtggatgcagaccctgaaagcgacggggtttgacattaaagcctaccgtgaggcggcagacctgcgggttgtgcaggggaatattcccgcaacgacgcctgaagccattgatattaacagcagcgtcgggcaggccatcgcgatgctgagcgaccggcgggcgcggttcacgtattccgaactgctggcctccaccctcgggcagctgcccgcgcggtcgggcatggtggagatggcgcgtgacggcatcgatgcggcgataaaaaatgagcagctcatcccgctggataaagagaaggggctttttacctcgaacatccacgtgctggatgagctgtcggtgtcggcgatgacccgcgatttacagcggacggggcaggccgacatttttccggataaaagcgtgccccgcagccggtcatacagcgatgccgtaagcgtcctggcccaggaccgtccgccggtggcgatcatttcgggtcagggcggggcggccggccagcgtgagcgcgtggcggaactgacgatgatggcgcgcgaacaggggcgtgacgtgcagattatcgccgccgacaggcgttcgcgcagcgcccttatgcaggatgagcgcctcagcggcgagcatatcaccgacaggcgggggctgacggagggtatggcctttacgcccggcagcacgctgattgtggaccagggggagaagctgaccctgaaagaaacgctcacgctgctcgacggcgcgctgcgccataacgtccagctgctgattgccgacagcggccagcgcaccgggaccggcagcgccctcaccgtcatgaaggaggcgggagtgagcacgctcgcgtggcagggcggtgagaagacgcgggtctcggttatcagcgagcctgaccggcggcagcggtatgaccgcctggccgctgactttgcccgaagcgtccgcgcaggtgaacacagcgtggcgcaggtcaccggtccgcgcgagcaggccgtgctggcaggcgctgtccgcgaggcgcttaaggcggaaaaggtgctgggcgagcgggaggtcagtatcaccacgctggagccggtctggctcgacagccgccatcagcaggtgcgcgaccactaccgggaggggatggtcatggagcgctggaatgccgaagagcgcagccgggaacgctttgtcattgaccgcgtgacgggccgcaacaacagcctgacgctgcgtaacgcccagggtgagacgcgggtgacccgcctgtctgaactcaacagcagctggtcgctgtaccgcaccggcacactgcaggtggccgaaggcgaccgtctggcggtgctgggccaggcgcaggggacgcggctcaggggaggcgatacggtgaccgttaaggcgctcggggaggcggggctcgtcgtcagcctgccggggcgtaaggcggacgtggtcctgcccgccggcgacagtccgtttaccgccgcgaaggtgggtcagggctgggtggagtcgccgggccgctcggtgagcgacagcgccacggtctttgcctcgctgtcgcagcgcgagctggataacaccacgctgaacaaactggcgctcagcggccgggcggtgcggctctattccgcgcagacggcgcagaaaacgacggagaagctgtcgcgtcagtctgcctggagcgtcgtgtctgaacagattaaggatgcggcggggcatgacaggctcgatgatgccctggcgcaccagaaggccgggctgcacacgccggagcagcaggctatccacctggccattccggtgctggagggaaacggcctggcgttcacgaagccgcagctgatggccgccgcgaaagaatttgagcaggacagcctcagcctgcaggtcatcgaaaaggaggcggaccggcagatacgcagcggcgccctgctgtcggtgccggtatcgcctggaaacggcctgcagctgctggtctcacgccagtcgtacaatgcggagaaaagtatcctccgccacgttctggagggaaaggaggccgtcaccccgctgatggataaggttccggacgcgcagctggcgggcctgaccgacgggcagcaaaacgccacgcgtatgatactggaatctcccgaccgctttaccctggtgcagggctacgcgggcgtgggtaaaaccacccagttccgggcagtcatgtcggccatcggcacgctgccggaacgggagcagccgcgcgttatcggcgtggcccccacccaccgggcggtgagcgagatgcgcgatgcgggcgtgcctgaaacgcagacgctggcggcctttattcacgacacgcagcagcagctgcgcggcggcgaacgaccggacttcagcaacgtgctgtttctcgtggatgaaagctcgatggtcggtaacgtcgacatggcgaaggcgtacagcctgattgccgggggcgggggacgcgcggtctccagcggtgataccgaccagctgcagtccattgccccgggccagcccttccgcctgctgcagaagcgcagcgccattgacgtggcggtgatgcaggagattgtccgccagacgccggaactaaaacctgccgtctacagcctgattagccgcgatatcggcagcgccctgacgaccattgagagcgtggcgccggcacaggtgccgcgcagggcggatgcctggcagccggacagctccgtcatggagttcagccgcgaacgggaggaggccattgcgaaagccgtggcggccggcgacctgatgcccggcgggcagcccgcgacgctgctggaggccatcgtgaaggactacacggggcgcacgccagaggcgcaggcgcagaccatcgttatcaccgccctgaacgccgaccgccgccaggtgaatgcgatgattcatgacgcccgtcagggtgccggcgaggtgggtgaaaaagaggtcacgctgccggttctcacgcctgccaatatccgcgacggggagctgcggcgcatggcaacgtgggaggcatcccgcgacagcctggttctgctggacagcacctattacagcattgaggcgctggacggggaggcgcacctggtgacgctgaaggatgcgcagggcaacacccgcagcctgtcgcccgcgcaggcggcgacagagggcgtcacgctctaccgtcaggacaccattaccgtgtcggaaggcgaccggatgcgcttttcgaaaagcgacaacgagcggggcttcgtggccaacagcgtctggtcggtcagtgagataaaaggtgacagcgtcacgctgtcggacgggaaacagacgcgtacgctcacgccgtcagcggagcaggcagagcagcacatcgacctggcctatgccgtcaccgttgaaggctcacagggtgcgagcgaacccttctccatctccctgcagggcacggacggcggacgtaagcggatggtgagcttcgagtcagcctacgtggcgctgagccgcatgaagcagcacgcgcaggtctataccgacaaccgggataagtgggtggccgcgatggaaaaatcgcaggcgaaaagtacggcgcatgacattctggagccgcgcggcgaccgcggcgtcgcgaatgccgctcgcctgacggcgacggcaaaagcgctgggtgaggtgcctgccggtcgcgctgcgctgcgccaggccgggctgcagccagagggctcgatggcgaaatttatctcgccggggcgtaaatacccgcagccgcacgtggcgctcccggccttcgaccgcaacggcaggcaggcgggcgtctggctgagtgccctgacctccggagacgggcagcttaaggggctcgctggcgaaggtcgggtgatgggcagcggggacgcggcgtttgcgggtcttcaggccagccgtaacggcgagtcgctgctggcgcgggatatggaagagggcgtgcggctcgcgcgggagaatccgcagagcggcgtggtggtgcggctcgcaggtgaggcgaggccgtggaaccccggcgccattaccggcggtcgggtctgggccgacagcctgcccgacagcaccggtacgcagcccgcagaaacggtgccgccggaggtgctggcacagcaggcccgggaggctgaggtgcagcgggagctggataagcgtgctgaagaggcggtccgcgagatggcccgcagcggcgacgggccggccggtggggctgacgttgccgtccgggatgtagtgcgggatatggagcggataaaagaaacgccggcatctcccctcacgctgccggatgcgccggaagaacgccgccgggatgaggcggtgtctcaggtggtgcgcgagaacgtgcagcgggaccgcctgcagcagatggagcgcgaaacggtgcgagaccttgagcgtgaaaagaccctgggaggcgactga

SEQ ID NO: 441335 - DNA, 1062 bp, Serratia marcescens
atgcgcggcgtgcgtgaggacggtaagaacggctggctgtttatctcctccaatgctgacacccacgcttccctcaagccggttatctccatgtggctgtccatcgccattcgcgggctgctggcgatgggtgaaaaccgtaaccgccgcgtgtggatcttcgccgacgagctgccgaccctgcacaagctgccggatctggttgagatcctgccggaggcgcgtaagtttggcggctgttacgtcattggcattcagtcctacgcccagctggaagatatttacgggcagaaaccggcggaaacgctgttcgatgtgctgaacacccgtgccttcttccgctcgccgtcgcgcaatatcgctgagttcgccgccggtgaaatcggtgagaaagaaatcctcaaggcatccgagcagtattcctacggtgtggacccggtacgcgacggtacctcggtcggcaaggacatggagcgcgtcaccctggtgagttactccgacgtccagacgttgccggatctctcctgctacgtcacgcttcccggaccttatcctgccgtgaagatggcgctgaagtatcagcagcgtccaaaggtggcaccggaattcattccgcgtaccatcgacgggaaagcggaggaacgcctgaatgccgcgctggctgcacgtgaacatgaatcccgcagcatcgccatgctctttgaaccggatgccgacgttatcgcgccagaggccagtgcagagaataccggccagccacagcagccacagcaactgacgcccgcgccccgcgctgcagacgcgccatccgcttcggcatccgcagcgggcgcggcaggcaccggcggcgtggagcctgagctgaagacaaaggcggaagaggctgagcagctgccgcccggcatcagtgaaagcggtgaggtggtggatatggcggcatgggaggcgtggcaggcggagcaggacgaactgtctcctcaggagaggcagcgtcgtgaagaagtgaacatcaacgttcaccgggcgcctgaaaaggatcttgagccgggaggatacatctga

SEQ ID NO: 441336 - DNA, 1653 bp, Serratia marcescens
atgaaaacagttaaacgcctgatgctgtccggggatgcggtgccgttggtggatgtcaacgtggtgttggagttgaacgcctgcgggcgcgggtttatcaccgcgcaaacggggcaggactacaccggcaagctggtgcggctggatgtcggctataccgacgatattctgcgctggtttaccggctacgttgagcgctcccagccggcggaaaacggttttcaacggctgttcgtgcgcgaactggcgggcgtattcgataagttgtggccctgcgccttccagcacccgacgctgcgccaggtggccgattggttgcaagaaaacagcgggatcaccttcaccttgccgaccgccgactacaccgacaaaccgatcccgcattttacccacagcggtaacggctatcagctgctggccaatttggggccggcttttggcgtgccggattacatttggcagccgctgccggacggcggggtgttcctggggagctgggcgcactcgatgctggccggcaccccgatcgatattccggccgaattcagccagagccaatccagcggcaacagcatgacgatccccctggtgcaggcattgcggccgggcgcggtcgtcaacggcaagcgcctgtctaaggtacggctggagaacgacaacacggcgatcacctggctggcgttgaacccccttaccggtaaggcagaggacaagccggcggcgcagcgccagattgaagcggcttaccctgaactggccgccgggctgcacctgccgaagttcgccagggtggtggcacctacggaagcggtgagcagcggcaatctggccgatccgttccgaccccgctatgcggtggacgtgcagctgctggatgcggacggcagcccggccaaaaacacgccgatttatccggcggtgcctttgccggtgccgatggctggcagtgagtccggcatgttccagtttccgccggccggcgcgttggtggaggtgggctttaccggcgggcgcccggataagccgtttgtgcgtcagaccgtagcagagggccatgcgctgccggacatcaagcctggtgagcagctgcaacagcaacgcgccgaggtgtcccagcgagtgacgcaggcgggcgattgggagcgccaaaccgatcagaccatccgcgagcattcgatgaaccgcgagatccacgcggacgaagaaacccgcaccctggtggccagaacggccacagtgcaagccaatgacaaaaccacggtattgggaacggcgacgctgttggccggcgccatcgtgcaaatcgccgaaggcgactacagcctggccacccaatccgggtatgtggccagtgtggcgaaggatgccaaaacggaagtcggcggcagcctgatcgagaagatagggaaaatccgtagcagcatcgccgccgttcgccaggacgtgatcgcgccggtggtgtgggtgggcagtcagcagattaacgtgatgtcgctcatgctggacaccctggacgtggtgaaggagctggcgcagcgcactgccagccatacccacagcaacaccggcgccccggttaacgccggcgagattagcgcgaccggcgaaaagtctgggcaactaaaggccaagtatgcccccgtcattgggtag

SEQ ID NO: 441337 - DNA, 567 bp, Serratia marcescens
atgacgatagtcaccctggcccttaatggcgaggccatcgcgttaaaaggcctgatggtcaccccgatgatgcagtttcaggataaagaccaatccggccaaacgtccagcaccgccaatgccgaacaggggattaagcccaaggaattgcgcatttcgggcatgatcccgttcagcgaggccaaggtgctgacgcggctgtttgcgctggcggaggcaacggaaggcgggaagttgaagcgctaccgcgtggccaaccataccgcgcaggccatcaactttcgcctggcgacgttcaccggctcaatcgacgcccccaagcaggacggcaagcaggcctggctggtgacgttcatgttgcgtgaacacctcagcgtgccggagaaaaaaagcgcccgtgaagacaacaaaaccgccgcccgcaagcagacgccgggcggcaatggcgcagtgaagggtggcaaagccgccgaagacgatcagcaattgagctggttcgagcgcaaggtgttgaaaccggcggatgcgctggccgccaaggtggtggggaacgatgaaaacagttaa

SEQ ID NO: 441338 - DNA, 723 bp, Serratia marcescens
gtgtggcgtaagtcaacgttgaagatgccgggcgacatgcaggcgttaacctgttctatggtgccggtgcatccgtgggtacacggcatcggccgcgcggaggcatcgggtaattacctgagtccgcaaaatgcggtgaactacctggccgaacggcttggcagcggcggcgatgaactctccgttaccgtgctgttggtgtgtgcgacctcatacgcggagtttatgcccctgctggccagcatggcggacgtgttgccattgccggtgctggggcaggtgaagcggatggcacaaacagcggccacgcaagccgtggagaaaatgcagatccccggcaaattcggcggcgggttgccggcggcggtgccgttgtcgacctccgcccagcgcctggcactgaacgcgcagcgtattgccgaggccaaggccggcgccgccgttggtgccagtgtggcggggctgcaatccgccctggccggttttatgcaggtgcggcagtccgcattagacggtgtgagccaggccatgacggccctacaggggaagacggcgccggcgtgggcgttcacgggcaaggggaatgcggcgagtttggccgccgaaatgaaaaagaacgtaccgcagcaggatgccgtgtttacgctcggaatgctgtttgcaggcaaagatttatcgacgctggaggcgatgatccatgacgatagtcaccctggcccttaa

SEQ ID NO: 441339 - DNA, 429 bp, Serratia marcescens
atgaactatggattcagtgcgactaccggcgccttttatgtctatgaagaccgcgccgattatgaagccaatggcaactggccggaggatgttaccccggtttcaacctccacctgggaacggtattgcggccaggggccggccggcaaggtgcgcggcgccaacagccgggggctgccttgctgggtagatgcaccggcaccgaccaaagccgaacttgccgagcacgccgccaggcaaaaagcggcgttgatggacagcgccgccagggcgatagcgccactggaaagggcggtaaaattgcgcatggccaccgagaaggaaaaagccgcgttgacggcgtgggaaacctacagtgtgttgcttaatcgcatcgatcctgccgccgcgccggatattgcttggccggaggtgccgggtgtggcgtaa

SEQ ID NO: 441340 - DNA, 2865 bp, Serratia marcescens
atgtcacaaactgcgatcacctttgctttcgagcaatggaaagccaaagaggccataggcggcacgcgcgtggtgctggatgaatttgtgttcgccaacgtgccgggcctcgatccgaacaagcccatcgaccgcaaggaaggaatgccggcggcggggcatgttgtgcatcgccaggccgtcaacaaaaccggcgttgtgaacagcaacaccgtggtgtactcggtgacgctcggcactgagatcggcgactttgattttaactggatcggcctggtcaataaggccagtggtacagtggcgatggttatccatgccccgacgcagcgcaaggtggcgaaccgtgccggtcagcaggggaacgcgatcacgcgctctttcctgatggaatatgacggcgccgccaaagaaaccggcatcaccacgccggccgagacctggcagattgattttaccgcgcggctcggcggtattgatgacatgcaacggcttatcaatcgtgaccactacggcgccggcgcgtttttcggcaacggctttttggtcgtgaaaagcggggcgcagtatgtggtgaatgccggcaccggttacgtgggcgggctgcgtgcggtactgccggcaaaccaaaccatcaccgtgggcgccaagccggtcaaggtgtgggtggatgcgagctaccagggcaacgtggtaagccaatgggcggcggtggtgaaactgacggttgccgcgacggcagccgattacaccgacgctggcgggtttaagcattacctgtttgcggtggccagcattgacgctgccggcaacatcaccgacctgcggcccaagggatcgttgtcagaccagaccggcaacgaggcgtttttgcgcaaggacaagaacctggccgatctgaaaagcccggcgacggcacgcggcagcctggggctgggaacggccgcgacgcgcaatgtgggtattcagggcggacaactgatggaagtcggggcgtttggcctcggttccggctcccggcaccgcgatgatgcgtactgtaaccaggcggagatctaccgggttaataacacctcgaagaacgcgccaggccgggaggtttacggcgtgctcagcctgccgtgtgacggtgggccatccggcggctatctggccgtgcaaaataatggcgatgctttctttggccggtcgaatattgccagtaacggggtgacctggttccaggcctacaccacgagattcaagcctacggctgccgatgttggggcgctgactgatgcccaggccgcgcagaaatatgcgttgcgttcgttcaaggtcaacggcaaaccgttgtccggggatgtcaatcttgtggccggtgacgttaacgcctggaacaagaccgaagcggatgcgcggtatgtgaagcgcgtgggcgacgatatgacggggccgcttaagctgccgcgcctggtgttcccggatgccagcacgtccagttctgacggtgatattgatagggataatggttttacggttgagtccttggtcgcggccaacaacaaggggtatccggtgccgggtggcatgggggtgctgttcacgggcaaggtcaacgaatatcgcaatgtgcaatttgcagtggggtctggtgaccgtgcgttttatttgcgttcgctgcgcaaagacagtgcggaatcgaaaacatgggcgcgggtatacaccacggactacaaaccgaccatcacggacgtgcgggccgccgaccatagcaataactttgccgcgcggatgggggtagtacgtgttttaaccggtgccaataagccgacatcgcccggcccctggagcgtagaaaatagctcttggacgcctgttccgtggggatcgctgtatgtgtcaacgaacggcaccaatttgagcacaacttccggtaacgggaagttcatccattacctgtttatcgcccacggcaccgcgaacaagttctatgtggcgacagatgttaatggcggatttacgggctgggaaagctatctgcccaggagcggcggccagctttccggggcagttaagagcagtgccgaaatcacggcaaaatacctttcgacgcccgcgggcgcggtgccggaagggagcggcgcgtatgcggcgcaactcgacaccaaagcgccgttctaccaggaaaactttgattgggatgtcgccgagggtgggagctatgtgccgttggtgaaaggccggagcaaccgcaaagggcagggttaccctacggccgtgagctttgggtatctgctggatgggcaaggcagctttgccaagccctgcatccacgtgcggggagacaataacgcggaagcgatctggcgatttgatcccaataacaagcaattttacgcacctggtaatgtgcttgcaggccaagcaattttgcataccgatggcaatatcacgggcaacatctggggcggctatctcagcaactggctgaacaatcagttcacggcccgcgataacaacatcaacagccgtgttgattggaacacgtttaaccgcgaggttggcgccagggccaccattgattacgtcaatagtcgctcggctgttgccggcggtcgcaatgcctggtggtacaaggacgaggtgacgggattcattatccagggcggcgtcgtcaaccgtggcgattatgttaaccgcgtgggttttccacgcggctatgtgcgcgaatgctttggcgtgcaactgacgctggccagttccaacgggagctggtttggtgacagtcgggtcaatatccaggcgcgggatctggataacaacgggtttaatgcaacgatggatggccaggaacaggtggtgttctggcaatcggtgggagtgtga

SEQ ID NO: 441341 - DNA, 600 bp, Serratia marcescens
atgcctgatttcgataagcaactggacggcctgcgcctgccgtcatggatgaaccgaggcgaaccggccaagttgctacgagcggcccgcgcgttctggcgctgggtgcatggctggctggtgtggccgctgcgtcaattggatgccgccacctgcaccgtggcgctgctgcacattttggcctatcagcgtgatattgcccgcttcgacggcgagccgctggatctgtttcgcaagcgggtgatgtacgcgtttatcaacgcccgtgatgccggttccgtggcgggctttgtcgccattttcgagcggctgggcgtgggttatgtggagatcctggagcgccagccgggcattgattgggacgtgatcaacgtgcgcgtcaccgatggccaggtggccggcaacaccgatttgctgatgcagatcatccggcagtacgggcgcacctgccgccgctatcgatttgaagttatcaacaattcctccttgcagctgcgtgtcggctgggtcgggggtgaatacgtgtgctacagcgcgacgcttgccggcacccaacaaccgagcagcgccagcgtgtcgcgtgcgtctttaaaggggtag

SEQ ID NO: 441342 - DNA, 1185 bp, Serratia marcescens
atggcgacgaaaccgcaaattgattatgagcaggcgcttaccgaaagcggtatgccgctgaccgaagaagacgtaaaccagaaatttactgccttggtcaacgccgaaggcttaataaccaacacctccagaatgtcgccgttctggcggttaattcaggtcattgtgaccacacccgtgatgtggctcaaggcggcgctggtcacggtggtgatgcgcaacatgtatctggccaccgccgccggcagctttctggacgtgttcgcctggggcgtgaacgtcaagcgcaagccggcaacggcggcggcgggcgtggtgcgttttttcaaggacaacgcgcaggcatcggtgaccgtaccggcgggaaccgtcatacaaaccgagcgtatcaacggtaacgtttacagcctggccgtggcgcaggaaaccacgctgccggccggcaacgcctccgggcttgtcgcagtgaccgccaccgagccgggcggggcgcacaatctggcgccgggctatttccgtatcctgccgcaggccgtgccggggatcgtgcgtgttgaaaacgaggacggttggttaaccacgccgggcgccgatcgggagtcggacgacgatttgcgcgaccgctgccgcaaccagtacaacctggccggcaactatcacacggatgcggtgtatcgcagcatgattgccagcgttgccggccttagtatcgatcgcatcttcttcaagcatgacgccccgcgcgggccgggcaccgccaatgcctatctgctgctggattcgggcgtggtctcacagccctttatcagtgcggttaacgactacatcaacgggcagggccaccacggccacggcgatgatatgcagtgctttgcgctgccggaaacccagcacgcactggcggtgacgctgttcgtcgagaataaggccaactttaccgccgacgagctggcgcagctggtgcgcaattgcgaagccctgatccgctgcgcctttcgccagaatgcggagtatgacgttaagaagacctggccgtatgcgcgattttcattttccaacctgggccgggagctgcaccgcgcgtttccggtgctggagtcgatcaccttttccctgggcgacattgtgagcgagctgaacgtgccgcgcctgtcgtcgctgaaagtgggggtcagcaatgcctga

SEQ ID NO: 441343 - DNA, 348 bp, Serratia marcescens
atgcgcgatcccttatatatcgacctgctgattgagaacggcaattttacgttaaatcccggtaatgaaccggtgttatgcaataaccgggtgagcattggtcaagactgcgtacacgccattattgaaagtgggttaattacccagcttgtggcggaaagaagtccgacacttcgcgcggacgtgctgatgcagattattttattggtcgaggatgatgaacgcattattcccggcaccgttgtggtgcatgaggaaacaaaatcccggctttgggtgaccgcagaaacctatgatttcggcaaagtggaggccagcgttaattatggcgacgaaaccgcaaattga

SEQ ID NO: 441344 - DNA, 771 bp, Serratia marcescens
atgaaagaacaatctttgcccatcgttccatggatcggcggtaaacgccgtctggctaaacatattttgccgcttttcccagctcatacctgttatgtagagccattcagtggcgcagctgctctgttttttctcaagacacccagcaagactgaagttatcaacgatatcaatggcgaactggtgaacttataccgggtagtgaaacaccatctggaagagtttgtccggcagtttaaatgggcgctggtgagtcgccagatctacaaatggttgcaggatacgccagaagaaacgctgactgatattcagcgtgcagcccggttctactacctccagaagcaggcatttggcggcaaagtggcagaccacaccttcggtacttcgaccaccagtgcaccacgctttaacctgctgcgtattgaagaagaactgtcgatggcgcatctgcgcctgtcgagaacattgatagaacatctggactggcaacagtgcataaagcgctatgaccgcccccatacgctgttctactgcgacccaccatactggggaacggaaggctacggcgtggagtttgggctggaaaactatgaccacatggcggaactggcgcgtagtatcaaaggaaatatgattatttcggtgaacgatatcccggaaatgcggcaggcattcgacggcctgaatatccagacggtggatatcagctacaaccttaaagtcaccgggaaagcctcacgacggaaagagttagtgatttgtaatttttaa

SEQ ID NO: 441345 - DNA, 909 bp, Serratia marcescens
atgggacgtacaaaatcacaatcaattgaattagttgaagatgtaccgctggcagacggcctcaacgtaaatcttaacgttatgactgagcgtcgccttgaaatcatgcagcaatatggggatggctctcaatacgattacgagcgattggttcaagaaacaaaattttatctgtcacaaagtgccgaatctatgctggaagcaggaagacgcctgctaattattaaagaatctgagccgcatgggaaactcatgcaaacagttgaggaacggcttggcttaaattacaacactgcagggaagatgatgcaggcagcagccaaatatctttctcctcaaatagcttcaaaatcgtcggcgcttacgaatttggggaaaactaagctatttgagcttatgaccgaagacgatgaggtactggccgaattggctgatggtggcactgttgccggtatgacacttgacgatatcgatcgcatgaccagccgtgaactgaaagctgcattgcgcgaagcccgcgaaaccaactcagcacagcagcgtgttctcgctgacaagaatgagaagattgacgcgctctccaccaaactggagaaaaaatcccgtatccagccacccaagcctgacgaagaggtgaagaagctgcgggctgaggtaacagcattatccaccgaagcggaatcagccatcaccgttcgccttttcagcgcgtttgaaactctgtgcgcatattgcgcagaaaatcagattgatacgcccaaagattttatggcagggcttgtttgtgagctggaatatgccgcccgcagccttcgttcgacctttgaccttccagataccccgacaggcaacgctgctccagcctggctgactgagccagaacctgagattaaccggcaggaggcgtaa

SEQ ID NO: 441346 - DNA, 1770 bp, Serratia marcescens
atgagcgccgccctgactgaacgactggtttctgttgcccgcgcggcacgtgacgcggggcatggaaagcgcggtgcggtatatgacgcagcctgcgctgagctgggcctctcccgtgccacactgctgcgcaagctgaaggaggtatctgtgactgataaacgtaaaaaacgcgttgatgccggacgcagcgcactgagccgcgacgaagccgcaatgatatctgcaaccctgcgtgaagcgacccgtaaaaacggtaagcgcctgtattccatcgccgatgcggtggagaccctgcgcactaacggctttatctccgcaggcagaacggatgaagaaaccggcgaatttttcccactgtccgaggacaccatcagccgcgccctgcgtaactacggtctgcacccggagcaactggacgccccggccccatcttcggagatggccagcctgcatcctaaccacgtctgggagattgatgcgtcgctttgtacgctttactacctgagcaacggccacaagggattgcaggtgatggacagcgcgaagttctacaagaacaagcctgccaacatcgcacgtatcgccagtgaccgcgtgtggagctatgagattaccgaccataccagcggctggatttacgttgagtacgtgatgggcgcggagtctggtgagaacctctgctctgttcttatcaatgcgatgcaggaacgcggtggcgcggatgtgctgcacggtgtgccgaaaatactctacctcgaccccggctcggcgaacactgccggtatgacgaaaaacatgtgccgctcgctgggcatcaacctgatagcgcacaaaccgcataacgcccgtgcgactggtcaggtggaaaaagcccgcgacattatcgaacgcaagctggagccggggttgaagttccagccggtcaacagcctggaagagctgaacgcactggccgtgaaatggcgcagccactttaacgccacagcagttcacagccgccaccgtaaaacacgcacggatatctggctgaaaattaccgccgatcaacttctgaaagcgccgtctgttgaggtctgtcgagaacttgccgtagccgcgccggaaagccgtaaggtgacgtcaaaactgcgcgtaccgttccggggtatcgaatacgacgtctctgcagtgccaggcgtcatggtaggcgagaaactgatgattacccgtaatccatggcgcaccgacgccgctcaagtggtgcttactggcgaagacggccacgagatgttcttcctggtcgatgaagtgaaaaagaatgaattcggttttgccgagaaagcggctgtctttggcgaaagccataaggcagtagcggacaccccggcgcagacagcggcaaaagagattgaacagcttgtcaccggcacggaaaacgccactgatgccgctgcggcgcgtaaagcgaaagcgctgccgttcggcggcaggcttgacccttacaagcatattgacgacaccacgttaccgacttatatgccgcgccgtgggcaggcttctgaagtgcgtagcccccgtgttgagcagcgccctttgactcacgttgaagccgcgaaggtactgcgtgagaaattcacagcaagtgggcacaagtggacgccggagcactaccgccagttagcggcacagtacccggatggcgtaccggaagttgcgctggatgaggtgatggtcaccctgaccactccggcccgcagcagcgttatcagcatcgttaacggcaactga

SEQ ID NO: 441347 - DNA, 1167 bp, Serratia marcescens
atgctggtactgaagcaacaactgaaagaggcccgcatcccgcaggcggtggtggcgagagccgttgccgtttccgaggccacgctggcccagattgtgaaccataacgagtggccccgcaccagtcctgaggaggtgcgccagcgcctggcgtcttatctggaaagtcagggaattgatacagcgaagagttttgatgctgcacagggcgctgtcacgccccgtacagcgggcactaccgataaaaccaacctcagtgaggaagagaacatgttactcaaaaagcaggtgttatttccagcaactaaaaaagcgtttggcctattccgtgacccgtttgccgatgatgccatgcagggcgcagaggatgtgttcaccacacccgatatccgctatgtgcgtgaagcgctttaccagaccgcccgccacggtggctttatggcggttatcggtgagtccggcgcgggtaaatccacgctgcgccgcgacctgattgaacgcatcaaccgtgagaatgcgccagtggtggtcattgaaccctacatcatcgccatggaagataacgacgtgaaagggaagaccctgaaggcggcggctatcgccgaggccatcgtcagcaccatcgcgccgctggagaatatcaaacgcagtcaggacgcccgttttcgtcagttgcaccgcgtactgaaagacagctgctcagcgggtttcagccacgttctggtgattgaggaagcccacagcctaccgatcccaactttaaagcatctcaaacgtttctttgagctggagtccgggtttaaacggttgctgtccatcgtgctgattggccagccggagctggcagacaaactttctgaacgcaacatggaggtacgtgaagtcgtacagcgctgcgaggtggttgaactgttgccactggacaacagcctcgaagagtttctggcgttcaagctgcaacgcgccggtaagcagctggccgatgttatggacgccagcgcggtggacgccattcgcgcacgcctgagcaatctgggtagcaaccgtaaaagcatggtcagcctgctgtatccgctggccgtcagtaacctggtgatagctgccatgaatctggctgctgaaatcggggttcctcaggttaacgccgacgtcgttaaaggggtgtaa

SEQ ID NO: 441348 - DNA, 270 bp, Serratia marcescens
atgaaatgtattaccgatatcaaccagcagttgcaccatttgcagtctgccattgccgcgctgaacgccatgaacagcaccgttcagagcgtcatgattgtaggcagtaagccggtcatccgcatcgccagaaacggccactgtgcccgcctgctggcgcaggggaaagcaagttatatccatgttggccatgacggttcaggccgctttcgtcagggcgtctttgagttgcatggctgccggattacctggtcagaatcattacattaa

SEQ ID NO: 441349 - DNA, 612 bp, Serratia marcescens
atgagcgaaataaacaaagacgaatatatgaaagaccgcaaaggccgtctggtgccggttgcgcaggtgtccgattacgatctggcgatggactcctttgtcaaagagcaggtcgcagcagctaaggtcaaaagtgctgacctcagcgacttcaaacagcgcgcttttgatgagtgctatgcctggcttgacctcgtggccgagaagtacggcagaacacgcggtggggtcaagggtaacgtaaccttcagcagctttgatggcagtgaacaaatcactatccgtgtgcaggaaaccctgacttttgggcctgagttgcagatagccaaagacctgattgacgagtgcgttaccgagtggtctgaaggcgcgaacgccaacctgcgggccatcattggtgacgccttccaggttgacaaagagggccagcttaataccgggcgtattctttccctgcgccgggtcaaaattcaggacgaacgctggaaccgggcgatggaggcgatatcggaatcactgcaggtagccatgtccaaaacctatattaatttccgggagaaagacaaacacgggaagctaattaatatcccgttagatatcgctgccatttaa

SEQ ID NO: 441350 - DNA, 189 bp, Serratia marcescens
atgtccatcaaatgtaccaactgccagaaaggtatcaccaccatgaagttcagcgaggccagcgttattacctccggtaaataccgtgtccctgcggttctcgtcacgctggtatgccctcactgcagccagcattactacgtggaagtccctgccatggagttcatcccctgcgaggcgaaaaaatga

SEQ ID NO: 441351 - DNA, 297 bp, Serratia marcescens
atgaaaggcatgaaattttataaccgctccactatttatagcctggccctgaaaaccttcggccctgaagcacaggcgctgaagctgatggaagaagccgccgaactggccgctgctgccgcccgcaacatgaatggcctgggcagtgaagttgacctggctggcgaactggccgacgttgaaatcatgattgaacagttccgcctcaacgggatgggcctgatgattgactatcataagcagcaaaagctggaacgcctcgccgaacgtctgggggtgacttatgccgcagaataa

SEQ ID NO: 441352 - DNA, 186 bp, Serratia marcescens
atgctgacacttatcggcttccttctgctggtaagcccgtgcggccacgatgcgtgcgacgcgctgccggtatctgaacgggtttactcaagcctggccgaatgcgaacaggtgaaagaggcgacccaatggcgccgcccgcgcgccgttctttactgcggcgacgtttaccgaccggagaaatga

SEQ ID NO: 441353 - DNA, 213 bp, Serratia marcescens; identical to SEQ ID NO: 149130

SEQ ID NO: 441354 - DNA, 705 bp, Serratia marcescens
ttgctggatctggtagatgagctggaggagaacaacctgacgcaggtgtttacgtccttgcaattcatcgagctccagtacagtgaactggttctggaagctgacgttgttcttttgagagaagtatttcccgtagctccccttcgatgtaaagtcgtagagctgctgaccaatatccttgaggcagcgctcagcgatgtcgtcaaccttcatctctttacctttctcttcccacagacgagaaaggacctgtttcagcgcagagatttgccattcatccagcaagcccttggccgaggccattgcacaaacgaggctgacaatcgcgtcttcttcgtcatcgtagttctgtatgagctcgaacgggttgaggcagacgtgtgttccttcttcaaagtgaacgaagtcgccattgagcatttccgacaacttctgataagacttaccggcatcaatgacccagacttgggccccctcagacagataggaaaaaatcagttcgttggtaaggaaggatttacccgagcccgattcggctgcgatcacaaggttcttgttggtattactgtcgtgaagagacagactcatgagctggccgttgcgagaaatcagcgccgcatgataggtcccggtccccttccactccccaaacactggcaggaccacagccgcctgttcggttgtcatggtcttgtagcggaatag

SEQ ID NO: 441355 - DNA, 2829 bp, Serratia marcescens
atgaaggtggcagggctggtggggcaagcagtaagcattggggagcaacctgtcgaatacagcttatacctgttcagtggtgacggttccaaggtgaaagttggctcaggctcacagaacctgactgtaactacagcctatggctccgttggctacaccccgattgatgacattgcacaagtgaatcgtgtcattgaaaactttaatgtgaacctcaagcagaacaaggggccagactgctctataaccctcagtgcagaccgggcgaagaaagaggccgcaagcaagggggccgggagtgccagtagaacctgtctgtttgagtggcagcagatccctgatgggttgctccaggaacagctatcggaatccccttcgctttctggttcattggcctccaacggcaatcatccactgggatggcgggtaagcattttcacccgtaatggtacacgggtgacgttgaacgaccagacgttcaacatcgaagctgttgatccaccagctccgactgttgaactgtcatctaaattcaacttcaaagacaacatctacatggtgccgatgacaggtaactacctgggggatgccataatcagctctgaacgcgctgatctggatattgccatctcgcgcaactctggtgtcctggagtctgaaactttcgctccaggatggggagccaccaataaggtgtatcgtcgcataaatactgatgagcgagctttgtgggaggagactacttacaaggtgaatgcggcgtacaacaaggtccctgatgtgaaaacggaggcgatctatcgggctatcgcagcaccttctgacagcatccgtcctgtcgttgaagttgatggtgataacgcgattgacactcaggcattgcctgttcgcgtcctcattcgtgatcagtacaaacctgatggtggttatgacgccaacacaatgggtgtgtggaaagtacgtctgattcagcaaaaggcctacaacgagacggttgctctcactgattatgcggaagcatcaaacggagaagctcagttctcggtcgatctgtctggcgtggatacttcctctgtccgcatagcggctgaggctgttttggacagccccgttgaaggttacaacagaacagagctgtccatcaggcctgctttcttaactgtgcttcgtggtggagccatcgctgctggagtagaggctcgcaagttgtctggtgaagccccgttcaccgctgtgttcaagctggctctggataaccgtcaagatctccgtgctaccggccaggtggtgtgggaaaccacgaaggatgacggtaaaacttgggagcagttcatcccggaagagcgttacaagtatcagcttgtgaagaccttcgacaagggggagtaccaggttcgagccaaagtggtgaacgtaaactcaggcgcggaaaaatacaccgaagcggtcagtgttgtcgcttacgacaaaccggatattgctgttgtcggcccgaccacgttgtttgtgggaagtgaaggcaagtacacggcgagtctggcgctgaacgatgagccgatcacggatggcaatgccgttgttgagtggtccactgacggtggaaaaacctactcacataaagggaacagcatcacgctttcaagtgatgaagaaacccgataccgcctgtgggctcgtgtgcgttctgctaatgcaccggctgatgacgactatgcctatgacgttgctaaaacggcggttgacttccgagctgtgaaggcaccccgcccttatgtggtagggcctcaagtcattgagacgggcaagaagtatgtgttcagtgccaaaaccagcctgccttaccgtggtatggacgtgaagctgaacgggttcttcacgctgcctgatggctcgattgtggagggtgataccgctgagtacgtgccttcggacaatgacctcaaccaggcaactgtagaaacgaagtacaccacctggatcgaaggataccgcgataagggtgcagaagcctcgcatagtctacgctcccgcgtttggcagtatgtgtggccgggcttcgcaatgcaggtccggaagagcgcggacgcggctcctgcgacgatcactgcgtcagtacggccaattgccttcaacggtaagctggaagagcctacctacgaatgggagttgccggaaggggccgtgattcaggataagaagcaagatattgtcaggtcctttgtggtcaatgagccgggcgattacaacatcaaggtgactgttcgtgatgctcgcgggcatgaggctgtgatcgagaaatcgttcaagatcgaccagtccaagccctacgccattgacctgcaatactctggctcgaataaatacgagcgtgagcctttggatgtactgttgagaccgtacatttctggcggccacccacgcgaccgtattttgactcatgtttactcggtcgatggcacaccgttggaaaacagcggttactacggcaaagcaactcttcgcgctggtgagcacagcatcaagctgaaaataacctcagagatggggcatgaagctgagggtgaggtgagcatcaatgtggcagagaacaagttgcccgtgtgtagcctgaaatcacgagagaccgttggatcgtggatcgtctatgcgaactgcgaagataccgatggacgcatgaagtcctacgaatggaccattgccggtgagttgaagagcatcagctctgatcgagtaactatcagcaagggccccaataaaacgatgccgaccatatctctggttggagtcgatgactcaggtggcagatccgaagctgttacgatgaactaa

SEQ ID NO: 441356 - DNA, 816 bp, Serratia marcescens
atgttggcagggctctggtcgccatttccgatatgtaccgatgtgccactcccagagttaatggcttgctcgtcggtgttaccagcgccaggtttatcattctggtcggagcccgtcagaggacctttttccatttcttctttgatgcgtttggcatcattcaacatctcacggctttgtttacgggtaatcccgtcagacatagctacagcgcagacggcgcgacatctttcttcgttaagctcaaacagaagacggagattgttcaaggtttctgtatcagaacatacttcattatcgtacaactcgcgcacacagtcaggtagcttgagcaacgacagatgcgtagatacgaaagtgatattcttaccaagacgatcagcaatatccttttgtttccaaccttcttcaacaaacaggtttaacgcctcggcaatctctaccggagtcaaatcatcccgctggatgttttcgatcaactcaccagcagtctcgtccaggttgttctggaccttatcattaaccaccaggtcgatagtctcaataccagcgtgtttacaagccctccaacgccgctcccctttctggataacgaacttgccttcttcgttcttcggaaacacgatgatcggagactgctgcccttcggtcagcaaggtggctgccagatcttcaatgttacggaagcgcttacgcacctgtaccttggaaacaacgtcgtcaacagggacggtaagaacctctttgcctttcttgcctttggcggctttagcaagttcggacaggccttttaaattgttcaatgccatcgcttag

SEQ ID NO: 441357 - DNA, 450 bp, Serratia marcescens; identical to SEQ ID NO: 52349

SEQ ID NO: 441358 - DNA, 2379 bp, Serratia marcescens
atgttgtgttctgtgacaaactgccctcagcgtgtcatcagattcctggaattgcggaaatcggaaaaggaaaatccagagaaaggaggtaagataattccgagcactcaaatgcgcgcgggacgtaaagtgcgcaaggacagaatacttactgctgtagaaacaaggagaaaaagcgtggctgttctaacgatcaggggcgtcagaagttacagtgcagacaaagatgtgcgtatcgacctgagcaacaaggttacgctcatctatggccagaatggttctggaaaatcaacgatatcaaactatttttctggctattatccggaaaagtaccgcaagtgccgttttgaaagtcaggaagatttatttccgcttgtctttaatcaggattatatcgaaagaaaatttagccttgagaacgttcagccgggcattttcacacttagcgagcacaataaagatattcaggaacaggttgatagtaatagaaacaaaatagcacgaacagatacaaagataggcgaacttaacactgaaatcgccgggcgggcggaaatggagttgaccctgataaataactgcgctgccagaatgtttaaaaggacatccgctgaccggactcgattctcgtcttttcttacgggagcgaagcagcagagaaatttttatgatcgaataaaagatattccccttgcagtcaatcaactggacgcggatgaactttctgttcgttttgaaaacctgcagaatagcaaaggtacaaatttaccttatatcagctttagcctcccgccagagctcaaccctgatgtgatccggctaatttattcaccgcttcagcccgcgtcagggacacaatttgccgaattcattgcgaatctgggaaatgccgactgggtcagagaggggaggagctttattcgtgacgatgtctgccctttctgtcagaacacgtttgatacagcccattttgccgaagaaatggcgaggatgtatgacaaaagctacaccgacgcgatcgatgtaataaacaaggcggcagaagaattagcggacaatattgactatctcaatgacctgtccgagagagttttcagacatcccgctgtaagcgaaggtgatgaggttttcagctcactcaagttacttattcagataagtcagacaaactatcagaccatcctcaacaaactcgagagaccttctgagatgtacgatatggctgatatttctgaagcgcgcaataccctcatcagcaatatagaaaagataaataataccgtttctgcgaacaaccagctggccgataactacgatgcagaaatggcgagattaaaggctgatgtcgacacgtatctgcgccagatttgcgacgagtatcttgtggcactgacggctgaacttcatgaggtcagggctcagaaaacaaaagccgagcaacaggcctcagctcttttgactgaaagaaggcagctcggggagcaaacgtctcggcttgtagggcaactttcagtcattcaacctaccatcgactccatcaataataatctcaaagcgttgggcgtaactgacttccacatatgctgccatgacgaggagatgaagctttaccggcttaggcgtgcaagcgacccaggggaaagagaagtattcagaacgctgagtgagggtgaaaaaactcttattgcgctgctctattttatcgaatcctgcaccggcaatgttacgccctatgccgtccacgatggccggaagataatagtaattgatgatccgatatccagcctctcacataattacatttatgaagtagcctcgctgataaaacgaaaaattattaaacctgagacagcccgccatctggtaatcctcactcacaacctgttttttttccaggaaattttgctgacgtccgtgaggaggctggagagtaaactcgatgcccctaaaggctggtcactgctgcgtattgtcaagaatgatcacagcgactgtatccctttatccatgcacgaaatgcttaacgagtatcaggctctgtggcagacactcaaggacgtgcgggacaacaagagtcagcttattgtgctgcctaatacgatgaggaatattcttgaatactatttcagctttgcctgcaaagaggagaaactggaaaaaacgcttgcagctctggcttctgaccacgccgaaggccgttatgattcattctatcgggccataaacagacattctcattcagatggcagaaatattctttctacaggcattatggataaaagcgaatatttcaggcttttcagaaagatttttgaagaaatggacgaactgagacattactgctcaatgatggatgaaaagcaagaggaagctatttag

SEQ ID NO: 441359 - DNA, 705 bp, Serratia marcescens
atggactacggccgtgcgctctcccttcgcgagatggcccggcattacactgagctgccaaaataccttctggcgccggaagtggccgcgctgctgcactatgtcccggactggagccagcacgcttttttcaataccctctggaataccggagcccgactgaacgaatgtctggccatacgacgacgggattttcatctcaacgagtccattccgcacgtcgtactgcgcacggccaaacagcgacgcgccggtggcggccgcccgcgtaagggaaaaagcgcaaaccgggtggtgccgttatcggacccagcctacgtcgatgagatgcgcaggctgtttgccagtacgaaggagcagtttgaggacgacccaattaccggtgaacgtcgcgcacagccggtgtggaaagttaccgaccggacggtgcgtaactggctgggccgggctgtcgatgccgcatatcgcgacggcgttaaactgagtatcgacgtcagcccccacacgttcaggcacagttttgcgatgcaccttctgtatggccacgttcacccgaaggttgttcagggactgctgggccacgagaagtttgaaagtaccgaagtttatacgaagatttttgcgctggacgtggccgccagtcagcagctgcggtttacactcaatacgagtgacgcacttcaactgctgcgcgataataattaa

SEQ ID NO: 441360 - DNA, 1104 bp, Serratia marcescens
atgcttgatgatgatgaagcagaccaggcccaccgggcacctgaactcagtccggacgttcaggctctgatcaacaacggactggaatttctggacaaggcaagggaggagctggaagcggcaaagccaaagttttcggttgtcagcttctggactgccgttgagatactactgaaagtacctctcgtacacgagcactggacgctggcttgttccggaaaaaaaattgtccgaagtaagtatgttgcaggcgactttcagtctgtgacttacgatgaaacctgtgcccgcctcggtgatatcctcgagaaacccttgccaagagaaacaatggcctttttcgataaggtcaggcagcatcgcaaccgggtggttcacttctatcatccctcattcagtgacgctgaacaggagcagatccaaagagaacaagcagatgcctggtttgctctaaaccgtcttatgcgcgatgactggaaatccctctttggtgtgcgcttacgtcagaagcttgctggtaatgaaactatgatgctccgggggaatgagttttacgctgctgcgagactaaggcagattcaatctgaagttgactcgctcgtcaggaacaatgttgacgttcatgaatgctaccagtgcaaacagaaagcatcggtcactctcacagagccagacgtagaccctcgttatgttttacagaataccacctgtcaggtctgctacgtttcttcatcatgcattttaatcaattgcccagaatgtaaaaagagccagactctttttgacggaggggatgactttgcttgtattggatgtgggttcgaaagcagcagaatagcgttgcttgattcaccgttgcgtactatcgatgaacagaccctaaacatactacctgctggctgcaccgactgtatgagtgctgagagtgtctgtaaatcaggtgacgggtatctttgtgttgagtgtttaacgttttcaagcacattaaagcagtgtggacattgtggtcgttttagcgattatgtacctgaactaagctttatgacagggtgtgcgttctgcgatggcgacgacagtttctataagaataacttaggttcatga

SEQ ID NO: 441361 - DNA, 168 bp, Serratia marcescens
gtgcaaagcaccttcgatatcagcgtgacggtcaataatggcgtgttcaccatcacgatccccgattatggcgatggcgtcggttatttcctgaaagatgcgatcagccagtctctggtcaagctcccctttgtttatacctactctgtaacggtggttgcacaatga

SEQ ID NO: 441362 - DNA, 675 bp, Serratia marcescens
atgactgaaaatcggcgtgagcgcctaaaagaatggttcgccgggaagtccctcccagcgaaggagaaaagctacctgtcgcagctaatgacaggtaaggcgtcctttggggaaaaagcagccagaagaattgaaggaacttatggcatgccgcccggatatcttgatgatatggccggccccaaaaaaagagtgtcaactatcccgccagaaaacgaatggggaactgttgacgcttgggacagtaataccccattacctgatgatgaggtcgaagtaccattcctgaaagatatagaactggcgtgcggtgatggcagctatggggatgaagactacaacggattcatgctgcgcttttcgaaagcgacgcttaagcgggttggagcgcagaaaggcagcgtcctttgctttcccgcgcacggaaacagcatggaaccattgattcctgaaggaaccaccgttgcaataaacctgctggataagaaaattgtcgatggcaaggtttacgctatcaatcaggatggctggaagcgcctgaaagcacttcatcgttcggggcccaacaaggtaataattcgtagtttcaatagcgctgaatacgatgatgaagaggcggacatagatcaggtggagatcattggacgcatgttctggacttctatgctgtggtaa

SEQ ID NO: 441363 - DNA, 921 bp, Serratia marcescens
atgagtaacctttatcctgttattatggctgggggaacagggagtcgcctgtggccgctttctcgtgaattattccccaaacagttcttagcgctgtgcaatgaattttccatgttgcaaacgacagtcatgcggcttaaagggttagagattattaatcctcttgttatatgtaacgaagagcatcgttttatcgtggccgaacaactgcgccaaatcacgcgtttatcgcataatattattctggagccggtagggcgtaatacggcgccggcgattgcgcttgccgctttgcaggcggtttccagcggtgacgatccgctcatgttggtattggccgcggatcacgtcattcaggacgaagcgattttccgcgatgcggtcaatcaggcggttccctatgctgaagcgggaaaactggctactttcggcatcgtgccgacgggcccggaaacgggctatgggtacattcaaaaaggtaccagcgtcgacggttccagtatctgcggcgtttcgcgctttgtcgaaaagcctaatcttgaaacggcgcagcagtatctggccagcggcgactatctctggaatagcggtatgtttttgttcaaagccagccgttacctggaagaattaggccgtttccgcccagatattctggacgcgtgcaagcagtcgcttgcgcatttgacccccgatatggactttatccgcgttgaccgagatgcgttcattgcctgcccggatgagtctgtcgattatgccgtgatggaacagactgccgatgctgtcgtcgtacccctggacgcgggatggaatgacgtgggatcatggtctgcgttgtgggaaatcagcgaaaaagacacaaaagggaactctactttcggtgatgttcttgagcataactgggctttgttgaataaataa

SEQ ID NO: 441364 - DNA, 1065 bp, Serratia marcescens; identical to SEQ ID NO: 422312

SEQ ID NO: 441365 - DNA, 933 bp, Serratia marcescens
atgatttatgtcaatgcgcgattcttaacgcaggatttgacaggggttcagcggttcgctcaggaaatatgccttgcgctgagtaagataaagaaaaataaaagcccgcttctaataaatctttgcaatacggcgccgatcttttatcgtaataaaattgttactcatcacgatgttatatataaacgctatccgcaaagttactctgcaaagtttcgtttcgtttataataactttgttcccctgatgttgcgtcacagtaaggcgttgattacagttagcgaattttctaaaaaagaaattagccaggcgtttgactacccattaaataatatttacgtaatctataatgcggtgtccgagcagtttaaacccatagcgtcggcatccaatacagagcgcccttatttattggccgtttcgtctccaaattatcataagaactttcatggtctgattgccgctttctctcaaatggcaaacggccaggaagtgacactgaaaatcattggggccgccaacaagaacttcgcggatgttgggttttcgacggaaggaactgcaacgaacgataacatacagtttttggggcgtgtgagcgatcaacagcttgtagaactctattctcatgctcgcgcctttgtgttcccctctttatatgaagggttcggcattcctccgttagaagctcaggcttgtggttgtgcggtagtagcgtccaatcgggcttctttgcccgaggtattgtcgaagagtgcattgtactttgatccggaaaacatcctggaaatgaaacaggcactggagcggattatgcaggatgaagcgttgcgccaaattttaatcgctgagggatttacgaatgtcaaacgtttcgattggatgcgttcggcagcagcgttgagcgagataatgacgagatctatgcaatga

SEQ ID NO: 441366 - DNA, 1512 bp, Serratia marcescens
atgaagcaacttcctcgtgacacaccagagcaatcgctgatcactcagtacaaaggatctcgccttgtcgttaaggcctatgctggcacgggcaaaaccaccacactggtgaaatacgctcataacaacctcgactctcgcatcctctatctggcatacaaccgggccatccgcgatgaggccagagaaaaatttcctgcaaacgttgactgcaaaacgtcccaccagcttgcctacgccactataggaaggggctaccatcacaaactcacaggcaacctaagactcaccgatattgctcaagcggttaataccaaaaactggacgtttgccaaagatattctcgacacactcaacgccttcatgtgcagtgcagatatgcggattctttatacgcattttgctcgtgccgatacaggcaaggtgcttacatccaaacaggagagataccaaatccaggtagtcgaaggtgcagaactgatatggaagcggatgaccaaccttcaagatccgttcccgaccgtacacgactgctacctcaaacagtatcagctcgggatgccgaatctgtctcgtcggtacaccaccattctttttgatgaggcccaagacgccaacccggtcacaagcagcatcgtcctacagcagaaatgcaaggtaatcctggttggagatcgccaccagcagatctataggttcagaggtgcaaacaacgctcttgatagcaaagagctcatgaacgccgaccaactctatctcacgcatagcttccgctttggccccaacgtgtcgctggtggcaaacgcccttcttgaactcaaaggcgaaacacgccctgtggttggccggggaccggcagatcaggtagtcatgttcttgcctggtgatgtcggtcatcgcgcaatacttcaccgaaccgtcatgggtgttatcgagacagcgctctctgcgactgaatccggatcacaagtgttttgggttggtggcatcgacgcttatcagatcaatgagctcctggatttgtactggttctcgatggccgagccagaccgtgtaaaaaacaagaagctgcttgatgaatatgaagactactttgagtatcaagaagtagcgaaggccaccaaagatcctgagatgatgagggccgtcaagatcatcaatagctatgatgaaatccctgagcgcctcaccactcttcgacgtaatacagtcaaagaagaatttggggccgacattacagtctcaacagctcatcggtgcaaggggttagagtgggactttgttcagctctatgacgattttccggatgtcctggacccggagctcgacccaatggcccgagacgatgaaataaacctgctctacgtcgcatccacaagagcgatgcgaatcctcgcgttaaatagcgcggttgagatggttatccgctatatcacccaaaagcgcatggtcgagaaacagatgaagatggccgcaatggcaacagaagttgaagggaacacgaccaaatag

SEQ ID NO: 441367 - DNA, 1680 bp, Serratia marcescens; identical to SEQ ID NO: 10332

SEQ ID NO: 441368 - DNA, 1134 bp, Serratia marcescens
atgcgtaaaaaccttgatatagaaatgcttcgagcaatagcgataagttttattttgttcgcgcatttatataatttatttccttggcaatcagccggattggctaaagcatacacctatttagatttatggactggtgtggacttatttttttgtgtatctggctatataatagcaacctcactaataaataaacttcctaacgaaacgtcaggaagggaatttttcaagtttgcggttcctttttggattaaacgcgcatggcggctttggccttctgcgtggctgtggcttacaattttgcttgtatgcagcttggtatttcgccatagtggttactggggcttccctgggcaaaacgctatgtatcaaacatatgcaatgctgcatgttgcaaatttttacggttttgaatgtcgtgcacagtatgatttgccgagccttttaaattatgcatgtggtgccaatcaaatatattggagcctgtccatagaagaacagttctatttaatttttccatttgctgccgtttttataaaacgaaaatatctaatcccatttttccttgtggtttttgcagtgcaattccctgttaatcgtggcggttcaattttgggatacatcagaacggatgcgatcgcgctaggtgtcgtcattgctctatgggctcgttctgaaagctataacttgttagagccaagggtattgaggcttaaaaggtattcaatccctaccattgcaatattgctatttatgctaattgagctaggaaactctagaatagccgccatttcattttcaacaggccttattgctgtagtcgctggcattcttgtatgggtcgcaagttttgataggaattacttaaccttcacgcctattctaaaaaaaattgcatcatacattggctcacggtcatacactatatacttagctcacatacctgtgtacttcttaacaaaagaagtttggtggcgataccttcctgaaggttttcatcctgatggaagctatacactacgatacataattacggccattataattcttgtggttgtaacggaagcgagttatcgccttattgaaataccgcttagaaataaaggccgacatatatctaaaaaattccaatag

SEQ ID NO: 441369 - DNA, 171 bp, Serratia marcescens
gtgtttgccagggccaaggccgatctgctgggcgagtattcgacgcagttcagccgggcgcccaacgccgggcaggaaaacccggaaacccgcagccgcttgctggccgaggccgcttttgtgctgcgcaacatgaagggggtgcgtcgatcgtcggcgcggctggtatga

SEQ ID NO: 441370 - DNA, 501 bp, Serratia marcescens
atgagcaaactcgactcattgacccaatttatcaaggcacatttgccggcgcggatcgccaacctggaatttaccagcgacatggacgggctgcggtttattccggcgcagcgcgagctggggttagaccagtatcagctggcggtgatgcagtttgaggtggtgttgtcctgggggcgtttccccttccgcctgtttgatccgcgcaatctgtgcgccctgctgatgtcctggctgatagagcacaccgacgaggggctggcagagcagggctttgatctggaaatgccagagatagtgatcctggcggataagcaaacggccgttgtcgaggtgacgctgacgctgtatgaggcgctgacggtggtcagggatgcggagggcatgatccccttcgatggcgagcgctggcgattggctgacccgcaaatctggtgggcgctggaagggacggtatacggcgccgatgcgaccggggcgccgatcggtaaaacgtcatga

SEQ ID NO: 441371 - DNA, 711 bp, Serratia marcescens
atgatcatcaatggcgagctgagtaaaaaacagctgcgagagttgcgcggcgagctggccaggctggagctgggccagaagaagaaacagcgctttttgtggcgcatggccaagtacggcgtgatccagacggcaaagcagcacgtcaaaaagcagcagaccccggacggtgaagcctgggcggcaaggaaaacgcgccggcgcggcaagatgctgcgcaacctgcccaatttgctgcacatccgcgacctgccggacatcgaggcggtgcgggtttacctccagggcggcgggtatcgcaacggtgagaacccggtgccggccggggcggtcggcgcggcccagcaggaggggatggggacgcaaatccgccgccaacggacgggcaagcggcacaacgaccccaaccgcaaggcgacattgcgccaggccaaaaagctgcggcagttgggttaccgcatcaagcggggggtgcggtggcggcggccaccgttgaaagaaattgccggggtgatgtcgttcgcccaggcggggttgcttatcagaaaactgagcgggaaagcggcgaaatccgtttggacggtagaacttcccgcccgtccgttcctgggcatgagcgacgaagaatttaacaaggcgttggcacgtcaactacaggcgatcgggttcggctgggatgtcaaggcgcaggatatgaaggggaaattatga

SEQ ID NO: 441372 - DNA, 876 bp, Serratia marcescens; identical to SEQ ID NO: 39017

SEQ ID NO: 441373 - DNA, 354 bp, Serratia marcescens
atggacaataagctgagcaagccggtagcgactgttgacgtacagcgcggccgcatggatgggaatacgtttgctgttgcgtggagttcggcaggccatgcattgccggatggcccacacttcatttactcgcaagagtacgtctccgccttgctggcagagctggaagcgaaggataagtgcatagcagaggcggaggtcagaggtgtagagaagctggcagccgcattcaaatcatgggctagtgacgaaactttcccagattgtgaagcgcagcggcattgggccactgcgagccaagaggctttgtcttttgctggtgttctgcgcaatgggagctgtgatgatcgataa

SEQ ID NO: 441374 - DNA, 564 bp, Serratia marcescens
atgatcgataaatatctactcgaagatctgagcctgcgccgtgatgaaaaaggcgatctggcacggtggattattcaactccaggcagatgtagacacagagcggcgcaagtcggcatcgctagaaagcgtcatttacgctcgcgatacgcgcatcgccgagctggaagtcatcaggacagacgccgcccaggtgttcaaagaaatcggcaacgagctgggctgcaatcccgacaacgagtcgatcatgatggctatctatgagctgaaagccatcaaatcagccggtgaaaaactcgttcgctgcaaaggtcgctaccacagcgagcaaaactaccgggcactcgctgcgctgttcggcgttaccactccttaccttccgccagttgatggggatagcgaggccgtaatcgctgagttgcgcgccaagctggctacgccggtgcggttgaaaaaggtcgattccagcaatgttccctatgccggtgacggctttaatgctgccgttgattattgcgccgaccgcgttcgcgccgctggcttcaccgtagagggggatgagtag

SEQ ID NO: 441375 - DNA, 276 bp, Serratia marcescens
atgagtaaagacgcagccgtaaataaaatcaccctgaccattcagcgcatggatgtgacctttgagccaaacaccaccgcgtataacagcctgattaacgacatgacgatggacaataaggtggcgccgcacgatacctatttgcgccgcattgtttccaatgacagcaaagcggtgctggatgaattattgaaactgccgggcgccgcgctccagattgccgaagcggtcaatgcgaaatatgcgcccaagctggaaattgaagtaaaaaactga

SEQ ID NO: 441376 - DNA, 372 bp, Serratia marcescens
atgaacagggcggcagggttggggctggcggtgttggtggcggcgttctggctcgggtggctggccaatggctggcaccgtgacagcgtgcagttggctgtcgagcgggcggcgtcgcgggccggtgagcagtccaggcaggaagcgcaggcggtggccagcgcctcggcccgccagttggaggaaaagttggatgcaatacgaaacgcgccacccaaagagatccgcaccgaagtggttaagccggtttttacccgcgtgtgtctgtctgatgactttatcaggatgtacaacgacgccgccgaccgtgccgaacgtgccctttcaggaaaatctgcgggtgaagtgcccggaaacgctaccgcgccttaa

SEQ ID NO: 441377 - DNA, 678 bp, Serratia marcescens; identical to SEQ ID NO: 52331

SEQ ID NO: 441378 - DNA, 795 bp, Serratia marcescens
atgggcgtaacagatcgtggtttacgcgcatggaaacgccgtcctccatcactgcgccagcgtcgtgatcttatacttctagcgcatatacgtgagcagcatcggttgtgtttggggagctatggtaggccgcgtatgacagaagagttgaaagcgctgggcctgcaggttgggcagcgtcgggttggacgtttgatgcgccagaataacattacagttgttcgaacgcgtaaattcaaacggacaacggatagtcatcataccttcaacattgcaccgaacctattaaaacaagactttagcgcaagcgcacccaaccagaaatgggcaggcgatatcacttatgtttggaccagagaaggatgggtctatcttgctgttatccttgacctgtattcccgtcgcgtgattggctgggcaacaggtgatcgattaaagcaggatcttgcattaagggcactgaatatggcgttggctttacgcaaaccaccaccgggttgtattcaacacacagaccgtgggagccaatattgcgctcatgaatatcaaaagctactgctcaaacatcaattgctgccgtccatgagcgggaaaggcaattgttttgataactccgcagtagaaagcttctttaaatcattaaaggctgagttgatttggcgcagacactggcaaacaaggcgagatattgagattgcaatcttcgaatatataaatggcttttataatccacgccgaagacattcaacactcggctggaaatcgccggtggcatttgagaaaaaagccgcttaa

SEQ ID NO: 441379 - DNA, 318 bp, Serratia marcescens
gtggtcgacaaggtggcgcgacgtgtccgcctccaggcgattgccaagattgccgatcggtcgctgaacagtacgccggggagcattgccgcgcaccaggcttggtttgcccgcgtactgcgtgaaatgtcgcgcagcacccagattaacggggtgacgttccccggtgaagtgaagtccccgcaggacggcgacgtcaaaatcacctggcgcacgtccaccaaggtggaaatttatctggtgatccgtacctacgaatgcccgaaaggcatcacggtgagcctgatgctggataattcgctggaggcaacagcatga

SEQ ID NO: 441380 - DNA, 456 bp, Serratia marcescens
atgacaaagcgtatttcgggccagtcggtcgacttcaacatggacggcgcactgatccacgcggaaaaggtcagtttgagcattaccgacaacaccgccgccgcccaaacccagggcgtgccggacgggtgggtaagcggcgacgtggcggccgagggcgaaatcgaattgagcaccaaggcctttgcccaggtgaaagccagggcgcaggccgccggcagctggcgtggcatcccgcctatcgatctgatgtggtatgccaaggccggcaatgaagaactgaaggttgaggcgttcggttgcaagctgattgtgagcgacattctggacgttgatcccaagggcggcagcatcatgacccacaaaatcaagttcgtcgtgacagatcccgattttgtgcgcctggggggcattccttacctggagtcggacgttacgcagaacctgatcgggtaa

SEQ ID NO: 441381 - DNA, 303 bp, Serratia marcescens
atgcaggagcatgagaaaaatattgtctggctgttggtactgggggcgattatcgccgtgggccaggtgctgagcagccaggagccgatcaccctgcggttgttcattggccgcatcgtgctgggttcggccacctcgatggcggcgggggccgcgcttatctgggtgccgggattgtcgccgctcgcgatcgtcgggctgggggctgcgctggggattgccggccaccaggcggtggaactgtggttgcggcgtaagggcagcagcctgctgaaagggaagggaaaacatgactctgagtga

SEQ ID NO: 441382 - DNA, 342 bp, Serratia marcescens
atgactctgagtgaaaaacagcagctttttaccgtgatgatcgcccagctgatctattgggcggacgagcggggctatcggctgaccttcggcgaggcctaccgcacgccggaacaggccgcccgcaatgccaaaaccggcgcgggcatcgccaacagtctgcacacccagcggctggcggtggattttaatctgttcattaacggccaataccagacacagaccgaggcctatttaccgctcggcgagttctgggagtccatcggcggcagttggggcgggcgcttcaagggtcgccctgatggcaaccactttagcctggaacacaacggggtgcgctga

SEQ ID NO: 441383 - DNA, 294 bp, Serratia marcescens
atgttgatcaccagctcgagcggagccaacagcaacccgagcgcacccgccacaatctgcccgcaggcttcgccggcactggtcacgccctggagttcgccggccgtccactgcaccggggccaacagattcatgaaccacccgaacaaggttttgaccgcgccccacacggcgccaatcgcccgagaaatcggactgaacagcccggcgaacggcgccagcgtgccggccgcctgtttaaacccgctgataaaccctttcacaaacgccttgatgggctgccagaagatgtaa

SEQ ID NO: 441384 - DNA, 642 bp, Serratia marcescens
atggataacaatcaccaaaaattcgattcacagtcgattgccaatcgggtcagggagctgtttttacattacgggattggaaaacgtcagcatgcccgcgagctcagccgcatcttggatctgagtttttcacatgcgcaccgcaaactgaaagggcaaagcccctggacgctggaacagatcaacagcgtcgcggccgcgttgggagaaacgccggcggcgatcgccgatttgagcgccgaacacgagaccaccgagccaaacatggcgcgcgatgccatctttttcgtggcgggggtggcgatgccttgcgtcgggcacattggcgatgagcttcctgccgggcggccggcggaatttgtggcgctgcgcgtggaagggcagtggcgtatctatcgcgccgatgaggcaccggcaggcccgcgttacggcgtcgatctgatcgaaatccggcccggcttcggcgacgacgagcggctgagcatcgcggtattggacgattcgcatcaggcggccgatgagctggccaagtatctcggcggctgcggcttcaacgcggtggcgttttacgacgtcgacagtttttgccaggcattgcagcaaagccctgagagatcccctcataatttccccaaagcgtaa

SEQ ID NO: 441385 - DNA, 306 bp, Serratia marcescens
atgtacttgctcggccaaaccgaagaaacagttgaatctgttaagcgcagcggtcgtctgaccctttcagatggtgggttccacacccttaaaaccgtacacaccatccaaggcgtgtactcagaaatctttatcaaatcgaagagcggtatgggcgtcgggcgtttgatcgtgggcgacttccagaagctgctttattcgactgacccggtggacgtcaacgccatcgaccaatttgtaaaacaaggcatgagcatccctgaggctatcaaggctgtgatgcgaagccgtaaacaggctgcataa

SEQ ID NO: 441386 - DNA, 705 bp, Serratia marcescens; identical to SEQ ID NO: 8686

SEQ ID NO: 441387 - DNA, 438 bp, Serratia marcescens; identical to SEQ ID NO: 196181

SEQ ID NO: 441388 - DNA, 144 bp, Serratia marcescens
atgaatcttaccttttcgcataccctcagccccagcgccaaaactggcgacaagctgctgaaaaccgtcattgacggcatgaaccttcagcagcggcagatgatgctggatttattgcaacaaggtgctgccgcttccgcctga

SEQ ID NO: 441389 - DNA, 216 bp, Serratia marcescens
atggatctgtttgctggttatgttgagttgcagcgtatcgagttggtagctcgtttgattacgaaaagtcagtgcacgagtaaagatagggagcttgctttagattggattgcggatcttacttgcgatttggtaaagaatttcgagcaaatgcaaaaacgcccccagagtggaggcgttaagtcaggcggaagcggcagcaccttgttgcaataa

SEQ ID NO: 441390 - DNA, 276 bp, Serratia marcescens
atgcgcgtaatgaaagtcctatgccccgaatgcggcgccaatgccattatcagaaagaccgcccggaagcatcgccaaatttctgacctgtattgtgcctgcactgacgtggaatgcggtcacacctttgtgatgaatgtgaccttttcgcataccctcagccccagcgccaaaactggcgacaaactgctgaaaaccgtcattgacggcatgaacctacagcagcggcagatgatgctggatttattgcagggtgctgctacccccgccgcctga

SEQ ID NO: 441391 - DNA, 219 bp, Serratia marcescens
atgcgtgatggtttcttccaatctctggcctttgaacgtgtcgatttggtggctcgcctggtggcgggggcgccggttaagcctggcgaccatgagttggcgatcgcctggattgcggaaatgacaacggcgattgttgaaaggcaacaggaagaagaaaaacgcccccagggtggaggcgttaagtcaggcggcgggggtagcagcaccctgcaataa

SEQ ID NO: 441392 - DNA, 303 bp, Serratia marcescens
atgcaagaacatgaaaaaacgttctggagcctgctgttattgggtgcgctgattgctatcggcaaagtgctaagtagcaatgagccaatcacccccagattgtttatcggtcgggtgatcctgggggcgggcacggcaatggtcgccggcgcggcgcttatttgggtgccggggttgcccgtcctgggtgtggtggggctgggggcggcgctggggattgccggccaccaggcggtggaactgtggttgcggcgtaaaggcagcagcctgctgaaagggaagggaaaacatgactctgagtga

SEQ ID NO: 441393 - DNA, 378 bp, Serratia marcescens; identical to SEQ ID NO: 52335

SEQ ID NO: 441394 - DNA, 1284 bp, Serratia marcescens; identical to SEQ ID NO: 132304

SEQ ID NO: 441395 - DNA, 279 bp, Serratia marcescens; identical to SEQ ID NO: 132313

SEQ ID NO: 441396 - DNA, 945 bp, Serratia marcescens; identical to SEQ ID NO: 132314

SEQ ID NO: 441397 - DNA, 852 bp, Serratia marcescens; identical to SEQ ID NO: 132315

SEQ ID NO: 441398 - DNA, 942 bp, Serratia marcescens; identical to SEQ ID NO: 132316

SEQ ID NO: 441399 - DNA, 1371 bp, Serratia marcescens; identical to SEQ ID NO: 132317

SEQ ID NO: 441400 - DNA, 600 bp, Serratia marcescens; identical to SEQ ID NO: 132318

SEQ ID NO: 441401 - DNA, 450 bp, Serratia marcescens; identical to SEQ ID NO: 132319

SEQ ID NO: 441402 - DNA, 759 bp, Serratia marcescens
atggtcgatcacagcgccgagccttggtatccgactgccgcgtatctgtacgtgctgcatctggacggccttgcgctcgcctgggagttcctgcgccggcatcccgactatcggctcgactggctgcgccaccatcgccggtcgcaagcggcgcatcgctggggcttgcgcctgctggaagacccggccttggatgcgcgcgacgcgcatccggcctggctgcccggccacgccgccgtggtgcagctctaccccgatgccgatccgccgctggacgcggcgacgttcgcgttctggcgcatccccggccacaagcaactgttgcatgacggcaaagggctggcgctgatcgcgcgcagcccaggccactgcctgcgcttcgcgctcgcgcccggcctggaggacggcatggctgtcgcctatgcctatcgcggcggcgctgccgcgcctgcacgcggacaggtgcccggcgcagccctggccgataccaagcccaggccaacgcctggcgcgctgctggaactgcacaccttgcaggcgctcgacgcggccctggcgggcgcgtccttgcgtgaagtcgcggaaggactgttcggcgtagatgccgcagccgattggtacagcgatggcgggctgcgctccaaggtgcgccgcctggtgcatcgcggcgatgcgctgatgcgcggcggctaccgccgattagcacagcttccgccgcttgagaagggtcgttttgatgtggacgcaaaacggccctga

SEQ ID NO: 441403 - DNA, 519 bp, Serratia marcescens; identical to SEQ ID NO: 339223

SEQ ID NO: 441404 - DNA, 279 bp, Serratia marcescens; identical to SEQ ID NO: 335299

SEQ ID NO: 441405 - DNA, 351 bp, Serratia marcescens; identical to SEQ ID NO: 342013

SEQ ID NO: 441406 - DNA, 1311 bp, Serratia marcescens; identical to SEQ ID NO: 342012

SEQ ID NO: 441407 - DNA, 795 bp, Serratia marcescens
atgcaagaaataaataaaaatgagtggatgataaatgctcacgaagcaattgttaaagaattatcagatagctttcaaaaccagcagcaagactcatggagtgaaaactatataacaactaggatgttgatagcgcttctaagttttggtcaagatattaaatggacttccatgtctcaaagaataaaatgggattcatttaaattaaaaggtgcgaaagaaactgcacttggtgacatcgcattttttataaaaataatgctaacatctgaattgtatttagagggggttgtcttttatgaggctaaaaggcaatactacaatgaaaaacattacccactaggatttaattcaattaaactagaacagttgattagaatccaagaggttacaaacgcaagtaatattctgttatacgatgttgatattgaaagaaaaagtgctggagctttttccttacctacagttttcgttgaaaagttaataagtgaagcaccattggctgtaccgggtcgtatattgacccattatggcaatccttgggtgaaatcattgtctgaaaatctttccggatttggccttgattactcaccagatgcggtgaataagatgaaggaaattataaaatcgtcagaacaaccattacatgttattaatgccagcacgagtatgttaggtataatcgagcctgaattggacagcagctttattccaatggatagctatgaaagtctgatctctcctccatcgccagatccaactatctcacgttccaagaaaaatagaatggattaa

SEQ ID NO: 441408 - DNA, 225 bp, Serratia marcescens
atgtcgtttcaagtggaagttcatgatggcgttgtaaaaacctttaattcttttaagggatttgggtttatcactagagataaaggtaaagatgtattctttttttatgaggaaatagttggggaagataaattcttaaatattggtgatagggttaggtttaccattgagaaaaaatccaaaggacctagagcctataacatcgaaaagctaccatcagagtga

SEQ ID NO: 441409 - DNA, 1173 bp, Serratia marcescens
atggacaaacccaattatccacattcccccatcgcttctatagatgccttggcccgttgcttaggtgtcgcatcaactaagctgttgtcaatttctagagatatagataattcatactctgaatttattatagaatcaaaaggaaaagaccgtacagtatatgaaccaaagttcgagttaaagagagtccaaaagagaataaatcagagaatattcgaaaaggttaaatatccaatatatcttcatggtgggattagagactccgataataagcgtgattacgtggaaaatgcgcgaatacattcagctagtggctgtaagactattatcggccttgatgtaaggaacttttatgacaacataagggcggataaagtcaccccaatatttaagttgctatttaaatttccaaatgatgtatctgagcttttgacaaaattaaccacatatagaggaaaggttcctcaaggtgcatgtacctcatcatacatagctaaccttgttttctttaactcagaatacacagtggtatcgagacttagaagcctgggtattagttatacacggctattagatgatgtaactttatcatcaccaaaggagctatcgccagagcgaattagtgagtgtatcagaagtgtggttgctctattcaaaaaacatggcttagaacataataaaaagaaaacaagaattgagaataaaaacaataatgctcaatcttttattgtcacaggcctctgggttgggcataaaacaccaaaagtgaccaggcatgagcgcagatacataagaactatggtccatgcatgcgaacgcttatatctggatgataattcaactgatgcttatcataatatttggaataaaacatcagggcttgttgcaaaattaaatagactagagcaatcaaatcataaaggtcttagagaaagattaaataaagttttgccggtgtatgacgaggccgcaagacggaagataatattagattgtaaaagcttattgaagttgaatgcgacgagcttgacttatggtcaattgactcggctgaatttggtttattctaagttgggaattctgtctagaagttttctttttgaatccagattgtggcgccggcggttaaatgcacactttaagaataaaccaaagaaaagtgaggtatggtag

SEQ ID NO: 441410 - DNA, 159 bp, Serratia marcescens
atgcgggggtatcgtgcgatttcgtggaagatctattctgcgtataaattcgtcgcgcatacaaccgacaattgtctggcgaaaaggttaggagttattcaagtcgattattttatcctgatgtggatccttggtctggccgtacatgtgtacgattga

SEQ ID NO: 441411 - DNA, 450 bp, Serratia marcescens
atgaatgagcttaagcctttcgatgacaaactcgccgggttgattgccgggctatcggcttcccgccgtcgcgagatggcggccgagattgccaagcggctgcgcatcagtcagcagcagcgcattaagcgccagcaggcaccggacggcacaccgtatgccgcccgtaagcggcagccggttcgtagtaaaaaagggcgagttaagcgagagatgtttgccaaactgcgcactcatcgatacatgaaagccaaaggcaccgcggataaggcgctggtcgagtttgccgggcgcgtgcagcgtatcgcgcgggtgcatcaggaggggttatatgatcatgcaagtcgtttttcgaggttactaaagtatgaaaaacgtgcacttttgggctgggagccaactgaggttaaatttattggcaatattatcattaattatcttgactcttaa

SEQ ID NO: 441412 - DNA, 2202 bp, Serratia marcescens
atggaacggaatttattacttggtaacggtaatgtattaacatcaactgagccccttcctaaagggcgtgatggaaaaagactaccttatactttagccgaggttagggaaaaaattaaccccgaattggatgaggtgctaagaaaattcgaatctcttagcaagttggctaagccgcgcggggaaagtgtttttaatttaactttgcacccagcgttccttgggaagagctatttcccagaggatattttgagagtctctgggttgagggatgtaggcagccgacagctaatcattacaccaaagaaggcagccagaaagtgtgatgtaaataaaccactggtgaccgctcagctttttgtgagtggtaatgaagattcgattggtaaatttaaacaaatattgaatgataactcttcgccaaagtatttaaaggacgagtttatcgagattgaaagtattgatttctttgatgttgcagatagggagaggaacttccaatatgcaaacgaaaatgtaggtaagtttgaggttgttctgcatgctggcgctgaggatgatgacattgtcaaagcgttcatgacatatgcatccgaatttgacatcgctgtagattataaaagtagaatacaagttggcggtctaacttttttggttgctcactcgacacctcacaatatgagaaaggtgcttgatttctcattgattagagttgtaagaccaatgcctgctttaaggtgtactcaacctaatattgtaagaaaaatatcaggtattgttacaccagagttacctacagaaaacgcaattttaggtaccgagagaattgcgattttcgatgggggcttggggacgacagaccttaatcaatgggtgacagagtacgcctatccagatactcaggatacggtgggttatttgttgcagcatgggaatgaagtaacatcaacgttcttatttggtagggtggatgaaaaatccccatattttaatcaaccatttatgaatgttgaccattatcgtgtgctttcgcctacttcaggcagtaatggtgattgggatttgttcgatgtcctaaagaaaatacaatcggttctggatactggtgattataaatttgcgaatttaagcattggtccgcacttaccaattggtgatgatgaaattcatgtctggacggctgttttagaccagctttgtgttaaacatggcattcttttaactgtggcggttggtaatgatggtaatgaggagggggatgcagcaagaattcagcctccttccgatatggttaacgctctgtcaattggtgcggcagaccgcagtggtgacaagtgggggcgtgctccatatagctgtattgggcctggaagaagtcccggattcgtcaagcctgatgggattatatttgggggtagcgatgacgagttattttatacctataatcccttgctcggttcgattgtaggagttcaggggacaagttatgcatctccattagctttaagaactgtcgctggggttgcggcgttatctggtagtccattgaatacaatagcattaaaggcactattggttcatcatgccgaaaagtcaaaaaaatgcccgagggaacatataggttgggggcgtttaagtgaagacccaaatattttaatagattgtaaggatgatactgcaactattatttattatggctcattggctaaaggtaaataccttagggcaccaataccatttcctgatgtgcctttcagtgagtcttttgaattaactgcgacgttgtgtatccagacccctgtggatccggagcattctatcaattacacaagagctggaatgcaggtcacatttaggcctcgtttggggttggcagatacagataccgtcgatttttttggtaaaaacagccagtatcaaacagaaagagagtgcagaagtgaagggcataaatgggaaacttgtctccatagaagcaagaagttcaatgttgacacagtgcttagcgatcctgcctttgacattaaatatcacgccagagactcgtcacgtaatgttagtggtaagtcggctccagatatgcaatatgctatggttatcagcgtaaaagtggctggtttggatatgtataatataatcaggcagcgatatgatgttttgaacccaattcaactcagaactcaaattaatatccagtcctaa

SEQ ID NO: 441413 - DNA, 1086 bp, Serratia marcescens
atggtaaatgtgagagaggaggagcttttcaagcttgtggagcaaggtatcaagggtaacgccaatgccttcatgttgctttgccgcagaatgattagcaatctaaagaagaatgatgaagagctagcctcaagactggccaaattaatttctgatgctaacgttgtgcgtggtgtttcaaatcctccaaagcctatgcctgtagatggcgactctcgccgttctttgcttcaagaagcgtctctcgtagctttaacggaagaacctgtttggaatgacgatattgcacgaaaactccatgcaattgttaaagagagagagaatgttgagcctctcctaaaggcagggttggagccagttaaaacagtattgctttctgggcctccgggagtggggaaaacaatgtctgcgcactggttggcatcgaaactgaacttgccacttctcacgttagatttatcaacggtaatgagctcgttgctaggtaagacaggaagtaatataaaatccgttatggactacgctaaagaatcaccatgcatattattattagatgaattcgatgctgtagctaagcgtcgtgatgatgatagggatgtaggtgaattaaaacgcttggttactgttttactgcaaactattgatgagtggcccgcaacatctctgttagtggctgccacaaatcacccggacattcttgacccggctgtatggcgtagatttgaacatgtattgaactttggtaatccatcagttaagcttataaaattatatcttgaaaatcatggcgtaagtgaactcttgtcagagcgtttatcacttattcttgatggtgtttcttttgcaataataagtaggttgataaacttctctaagaaaaatgaagtgctatcagcagtgccttttgaaagttcactgatagatgcatctatcagtgagtgtggccactctaaagatatagggcataacgagcttagaatattacagtattttttagagggcggatctaatagaaaagttgctgaattagtcggtgtttctcatccaacagtttctaaagttttgaaagaatggggggttaaataa

SEQ ID NO: 441414 - DNA, 258 bp, Serratia marcescens
atgaagaccaagaaccttaagcccaaaggtgacgtgcgcgtgcgcaagccggacggtacctacctggccgccgagggggaaagcctgttgctgtccgcctactggttgcgccgcattgccgaaggtgacgtggatgttagtgatatcactatcccgcaaaccgaggtcgatgttgccgtgagcaatgttgtacccccgaaaactgaggcgactcctgtagagacagccgcgccaaaatccaccaagacggagaagtaa

SEQ ID NO: 441415 - DNA, 708 bp, Serratia marcescens
gtgagtgggaagccaatcaagaaaaagtcggagcaagtcggtcaggcagctccagcagaagttaacgcgcctgaagcgccggttattactccgactgttacaggacactatcagcccgttacccagtccagtgcgccaccgcaaccggattcggcagcacctgagctaaccggcagcgataccatcgtgaccctgaacgtttccgggtcgcaaatggataccgagcaggtcaatcaagaccaggtaacgctgactgacgttctggcacaggaatatgcggacaaacctgctggcgttgagtccagtgcgccaccgcaaccggattcggcagcacctgagctaaccggcagcgataccatcgtgaccctgaacgtttccgggtcgcaaatggataccgagcaggtcaatcaagaccaggtaacgctgactgacgttctggcacaggaatatgcggacaaacctgctggcgttgaagtgttgttggttcaggcaatatcactcaacggtttttaccgtgccgggcagttctggccacacgaaggcgttcatgcattcgtcagttatgacgcggacagtgataccaccgagaacgaggccaacatggttgcgccattcatcagcatagcgacagccgagcgactgaaagctgagcctaacctccgggtcacggtcgtagaaaccgtcgtcactgacgccgagggggaataa

SEQ ID NO: 441416 - DNA, 954 bp, Serratia marcescens
atgactgttgagctgctggcactctgtttcgagctgccggacacaattgacaacaaattgcctgactggctaccaatgctgcctatcggttcattcaccggccgtgatggccgctcgtgggtcaccaatgaaccagaagcggtgattgccaaatcgcttcagtacaacaaacttccgttcgacatggagcacgccacagagctgaaaggcccgaaaggtgaacccgcgcctgcttatggctggattgacgacatgaaaatccagggcgatcagatttgggcgcatgttgaatggaacgcagacggtgctgcgctcgttcaggggaaaaaatacctctactacagccctgcatttcattacaccgctgatggcctagtcacgaaactgtccagcagcgggctgaccaacaaacccaacctgttatttcctgcccttaactcggagaaaaccgatatgacaatgcctgctgaaattgcagccgcgttgggcctgggtgcagacgccaccgttgaaagtggtgtcactgccatccagggcctgaagaacgcagaacaagtggcgctgaaccgcgcgcagactcccgacctgaccgcctttgtgccgaaggatacttaccagttggcgctgaaccgcgccgagaccgctgaaggcaagctgaatgaccaggcagtgaaagacgctgaagccctggttgatgctgccatcgcctctggcaaggtggccccagccaaccgcgagatgtatctggccacctgccgcagcgaagaaggccgccagcagtttggcgagttcgccaaggcagcaccggtgattgttaatgccgacccgaccaagaaggtgttgggtaaaaaagacaagcaagaactgaccgagaccgaagtggccatgtgccgctccatgggcctcaccgaagagcagttcctggccgccaaacctaaagccactgaggaataa

SEQ ID NO: 441417 - DNA, 543 bp, Serratia marcescens
atgcgtcatttcgccatggccaacgtgatcgccttaaaaaagaggtgcttcaccgcatggctggcggccccaaaccaaccccggttgattaccggggctgtgatggaactcatgccagcttttacaaaagaggctgggagtcagtcggccccagggatatcgccttgcaatgccagcgttacaaggaaaaataccatgttaaaactcattaattcaccctggtcagtgttggcattgctggccctctcaatggggctgtgcgcctccctggataaactcgcctttggtctgtggtggtgggtgttcgctggtgtcgtcgtttgggttttggcgaccatgcaaaatctgggtcactacttcttttctctctttttggcatgtctctttggtggcgtcggcgggatgttgattagttggggggcggcttcagcctatgtctttctcggctggttcgggatacctctgtcgttattgtctgtggttacggcatttctggcgattcatcagcttaaacagcggggagcgctcatttggatccgataa

SEQ ID NO: 441418 - DNA, 189 bp, Serratia marcescens
atgttcggtttattcctgctcgtttgctacacctaccagccgtgcgattacgttccgcagggctgggtatatcccgatcgctccaactgcctcgaagatattcggcagcagtccctgccggcgcagtatgagtgtttgccggttgatggtgttatcccagtgcagagatcgcacgatacgaagagctga

SEQ ID NO: 441419 - DNA, 363 bp, Serratia marcescens
atgaaattggatatgtatgaagtgctgtctcgttggggcgtgtgggcgcgagaaagtagtggcattgactattcgccaatcgctgcaggcttcaagggactactacctcatccgtccaatggtaaactgtcctgctgcgatgatgatgggttggtgatcgatggatgtgtggcaaggctgaagcagtacaagccggacgagtacgacctggtgattgcgcaccatgtttatggagtatctttacgcaagattgctaagaggcgtaagtgttcggatggaacaataagaaaggaaatgcaaacagctgaagggtttataggcgggtgtttggcaatgttggatgtgagattggaattggattaa

SEQ ID NO: 441420 - DNA, 2214 bp, Serratia marcescens
atgagccaagcggctaccgcctacgcttacccatggaacgaaccgcgcccggctgttgccgggccggtaagaccgcttacccgtgaggaactcgctcaggggcaagctgttttaaccaatatccgccgcctgccgcgcttcctcagcgccatgttcctgacgcgttacaccaacttgctcaagagcaaagggttgcacgacgccaacaaatggctggtattccagttcgatcgccgcatctggccgcgcctgcaaacggtgagcgccaaaaatgcgatgaacctcgccgcgtcaatgcggttttctgctgaagtcgataattacgcagctctgcccggcatggatgacaaagagatccgccgccttgccgatcgcgtggccggtcaacttctgcagaattacgcagattactgcgatgagtttgtggcggagaacggcggcgacaatgccgggcttttcgaagatgccacccaatcagaattttatggccgcattgccggtatggcgcgcgccttcaacatcacccctatgcactggcgcaaataccgcaaaggcaaactggatgcccggtcagcgattgccagtttgcagcggttggttaattccgaatggtgggaacgtcagttgaaggcccagcgcacacgctggcgggaggcattgctgatcgccgtcggtaatgtgaatcgcggggcgtcgtcatacgccagtcggcaggcaatccgggatgtgaaagcccgccgccagtccaattttgattatctgaacagccgcgagctagagaacgtcgaaaccggcgaacgtttcagcctgatagacaaggtgatggcgagtatctctaacccggaaatccgtcgtatggagttaatggcgatgatcgctggtgttgagcaggccgccgctatccgtggcgataaagggatgttcatcaccatcaccactccatccaaatatcacccgacgcgcgccgtcggcaagagcagcccgaaggtgcattttaaccacaagtgggacgatgaagcctacacgccaaaagacggccagcgctatcttgtgcagctgtttagcaagatccgcacggcgtttaaagatgcgggcctgcaggtctacggtgtgcgcgttgtcgaaccgcaccatgatgcgacgccgcactggcatatgatgctgtttacctccaaaaaacagcgccagcaggtgatcgacatcatgcgccgttatgccatggctgaagatggggacgaacgcggcgccgccaaaaaccgttttgactgcaagcacctgaacaaaggcggtgcggcgggctatatcgccaaatacattgcaaaaaacatcgacggctacgcgctggacggcgagcgcgatcatgaaactggcgagctgttgactgatacggccgccgccgtcaccgcgtgggcgtcaacgtggcgtatccctcaattccactttatcggcctgccgtcgcgcggcgcatggcgtgagtgccgcaagatccgctctgtcagtctggccgatgagtttgacgaaaccgttgaggcggtgcgcgctgctgctgatgccggtgactttgccgcttacattctggcccagggcggccctaacgttgcccgtgacgatcagactgtgcgtgtagcccgccgtgttaccgacgagcgcaacgcctatgacgaagaagtgcagaaaatcgcggggatttttgctccgcacatcggcgccgatcgcgtttatgaaacccgcaccacgcaatggcgcatcgtcgctaaagccgttgccgttgagcctttgactttgaaaagcgcctccggcgcgcctcggagtcctgtcaataactgtgggttggtcgacagcaaaggcgctaccaatacgcaggatagtgagcctgaagaggctgtggcagtgctggagcacccaccggaaacaccgattgactggaatgacatgatcgttacacggtctgttatgagccgtatacggtctattccgtcacagataaagaaatcacagcgtagttttgacccttatcacttgccagatatggccccttcagcaaggttgaccacggtagaacgtgatcggttgggagtaattcgggcagatttggcccggcacgacattgctgcccagcgttgggagctggaagcgctagcacgtggtgctaaagttaaatttggtgatatttcaatgcagtatgagccggttaatgattgggcaggtttttaa

SEQ ID NO: 441421 - DNA, 696 bp, Serratia marcescens
atgctcaccccatcgttgatcgaaggtaaaaatttgctcagcgagtttgaagtgaggcgagtaattgctggtgcaaagcaattgcctgacagataccaaggtatttgcattgagggcctagtaaaaatcatctgtggtgatactgaagaaggcgagacactctgtgaacgagctatccttctggcaccgcatgatgcagtgagttgggcaaactatgcgctcgcctttgctaacaaaggtttgcatagcaagcaaatagagattctcaagcgtgctgtcgatgttgttcgaaacccagaacttatccgtgatgtcatagtagtggcgtcgttctggatcgacatggacctgttaaaaaaggtggttccaatgtttacagcaatggaaataaaacctgatgaatcgtgtgctttagcgatccgcaacttagacaagctcttggatcttggggagcaagctaaggaagtcgaggctgtggctaaagcagtcatgaatgtagcagagaagcataaccttccagcgatcagcagccaagtgggtgatgacggctatggcatgttagcttttaattttgttgttgatactgatgatgttgactacttatcggttctcaataacgagttgatcgatgaaatgcttgctttaggcttggaaacaagtagttgcatcggctatttcgaaccaaaaggtgattaa

SEQ ID NO: 441422 - DNA, 1074 bp, Serratia marcescens
atgtccagagagagccgtcaaaaggttatacactataagaaagctgtcataccaaattgcaatgctacattgcaggacatattgaactcaataatatctgaaaatggcaccgctaataaagtcgcatcgcgtcgagagcaaataaatccatctgatagtgatagtggttatcgtttaattaatagaaatagctcttatcaatcaattctttttggtcagttgattttatttgaacaaggaaaaagtcaagcattaatgaccattagtgatgatgttaccttttatgatattaacgccataacctctagtcaaataaaacttgctagtgatgaaaatatttcagaagaagaaaaacaaaaaatcaagcgagagtttgtagactcaattctttattttggtgtactgcgcgatcatgtaatgattgttcaatcaagctctttacgtgcaaaagatattgaaacacatctaaactggttaatacatagctttggtaccgtgtttaccgaagataattacttagtgcttcaagataagccgactgaagaaacaataaataaaatgatgaacagtccggttaagaaaattaacttgggtagtgtcccggtaaaggcacaaactccagatggaaaaacaatcatctcatcacgttctgagccatcgtcaagcacagcattgcaaaaagttaaaaaaataaaattcatgccaactggtaaaggtggtgatattataaaggcagctttcggggagaagtggtttgatgatctaaaactagaagactctcttgatgaagcaaatttgcaagttaacttagaaataacatacttcagaaaaacaaccaaagacggacagcgtgttctagatactcttgccacgtctttgaggaacatggacgatgatgatattactattaatttacagggcggcggggaaataaagggtaattcattacgtttatctggaaaggtcaacatacaatataataatggacttattgatgaaaatgatttatatttacagatgtataaatggttgatctcgaagttacatgctggagagatcgaagttaaaaaatag

SEQ ID NO: 441423 - DNA, 921 bp, Serratia marcescens
atgggttttcccttcgcggatcaggttgctgaccgccgccgtcgccgtcagcacctcaaagatcgccactcgcccgccgccgggccgcctcatcagcttttgcgcgatcaccgcctgcaggctgccggccagctgggcgcgcacatagggtttctcttccgccggaaacacgtccaccagccgttccaccgcctgcggcgcgctgcgggtgtgcagcgtcgccagcaccaggtggccggtctccgccgcggtgagcgccagccgaatggtggcaatatcgcgcagttcgcccagcaggatcacatccggatcttcgcgcagcgcggcgcgcaacgccgcatcgaagctttgactgtcgcggccgatctcccgctgctggatcagcgaacgccggctgcggtgcaggaattcgatcggatcctccagcgtcaaaatgtgccgcggctggtgtcggttgatctcgtcgatcatcgccgccagcgtggtggacttgccgctgccggtggcgccggtgaccaggagaagcccgttgtcgcgccgcagcagcgccgggacgatggccggcgccgccagctcggcaagcgaaggcgcctgcccggcgatacgccgcaacgcgagagacatccccgcgctttgctgaaaaacgttggcccgcagccgttccccgcccggccggtgcagcgccagatcgacctgccccagccgccgcaagctctcgcgctgctgcgcattcagcaatccgtcgcagagggcctgcacgccttgcgccgtcagcgttggcgccgccgccagcggctgcagttcaccgtcgatgcgcaacatcggcggatgaccggcacaaaggtgcagatcggaagcattatgctttacactaagggccacgaattcatcgatatccatatcactctcccgggtcaataa

SEQ ID NO: 441424 - DNA, 657 bp, Serratia marcescens
atgagtggtggcaaaatttctttggttgatattttacctaaaggtgacgttttacaaaaaatcgaacgagaaattacttttacagctttagaaaatgacaagttagagaaaattataaaattaaaaccaaatgatatttttcagatagggatcacgtcatgggacaagtactgtaatgatacaccttcccaagataagatggtttttgcggcagaatgtcaaacgatggatccattgttatacaaaaaggttcgaagagtaataggtgaacccgttataaatgatatcgtgtacatcaagggagaggttcaagatgacaaacttgcagataccctcgctattgagtttatggcggcacatatatatccaaactgtttaattatcgctgatgtgatgatgggaaacccttacaaacccctatatccgcaaagatatgattttcagaaattcaaggggcttggactattctctaaacttcttgataatgcaaaggagtattgccgattgaaagggattgatgaaatttgcctcacggcggctgatatgcctttaaaatcattatttgaaaagcacggtttctccgttcccaacacatggatggggaaagccgcccttaaaactggagttggcattccaatggtactcaagctcgcataa

SEQ ID NO: 441425 - DNA, 747 bp, Serratia marcescens
atgtggggatttgaccacgccgtccggttgcgtgaaatcgcgatcgctgccgacctggatctgccgctctatctgctcgccccggaagtggccgtgctgttgtcctatatccccgatatgcatcagcggctgttcttcgaaacgttgtggaataccggtgctcgacccaatgaagccggtgcgctgacaccgaacgattttttcttccatgatgacctgatgccgttcgtgcgcctgcgcacccttaagcagcgcaaagcccctccccggtcggttggccgtccttccctggaaagcgtccaggaagagaaacagaagcccccactccgggcggtgcccttgccggatttggcctacgtccggcgtgtgcaggagtatttcaccaccttcaaggtgatgacgcgccgggcgacgccgctctgggggttcaagagcagtgaaaccccgcgcaactggctaaaggcggcagtaggacgtgcggagcgtgacggggtcacgttttcggtgcgccctattgtgccgaaaacattccggcacagttacgcggtgcatctgttgttgaatggggtgcatatcaagaaggtacaagcactgatgggacaccaacgtatcgagagcacggaggtctacacgaagatattcgccctggatgtgacgcgcgaccttggcctgacgttctcgatgcaaccggaagaggcgatcgccatgatgggaatcggggatatatctaagatattatctaggtga

SEQ ID NO: 441426 - DNA, 858 bp, Serratia marcescens
atggaaaacaaagcgattggattaatcactggcgcgatcaagagcgacgggcaattcctagcactggcgacaaaaatccgtctcaaagatggtcgcgatgaactgttgtactttgcgttccctaagttaaaaggtctgctgtttaccctgcaaaccaaactggccttgatgcacgaaaacggcactttcaacacagcccaaagcagccaggaaacttaccaggaacaagcacgctaccgccaacaagcgatggagttcaaagacgctgaattgacagcaccagatgcgaagaagggcgttaagacactttcaacactgcctggagacgcctatatcacgctgagtatcgagcgcgtagacggccatcaggtgaatatcgatatccccgatgcggccatcgagatcttcaccggctacatattgcataccttaaaggcggcaggcggtgacgccctgatggaacacgctatctctaacctggatttcatggggctgtactcgttggagtacaaaacgaatggcgagctggactacaaatatttcaatcaagatccgtggcaaatgaacgcactgaagcaccacatggcaatcctctacaccgtcaaaaacggcagcaagcaggaggtcaaatgtgcggccatcgtcaaaacgtctatcccaagcgggacgcaagagacgctcgacatggctaagcgggtggcagaggggaaccctcaattggccgcttaccagcatcggtttgataccatccatacgcacatcctgcacaatccgactgaccagccaatggaactcgatgctgccctggacatattatcccgtctctaccttacccattcagcggcaggcacttcttaa

SEQ ID NO: 441427 - DNA, 267 bp, Serratia marcescens
atgcagggttcagaacgcaaaagaccccgtggtagcggggcctcttttggctacgttttctacttggtgagtaggaatagcagcgtggtaatcttcttcttcgcccccaaagtatatccccgacaacatattagatcaaatacccttgaaatgtgccattacccttatataatcctcagcgcgaagaagaccaaagatacccgacttatcaaccttttggagagtaagctggtttcgacatccagctatcagagacatggttcctaa

SEQ ID NO: 441428 - DNA, 825 bp, Serratia marcescens
atggagagggctaaccgcgctactgaacgtgcctatgcggagctacagcaggcgtatgacttttataatcagcgcttgtttggcggccagctgccggactgcctgatcacgttccagcgcgggaagaacactatgggctatttcagccgtaaccgctttgtttcaccggcggatggcacgcagatagatgagattgcccttaaccctgagtattttccggtctacccgctgatcgaggtcatgcagacattggtacatgagcagtgccatatgtggcaattccactacggcaagccatcccgcaaggggtatcacaatgcagagtgggcagcgaagatggaagccgtcgggttaatgccatcgtcgacaggcagaccgggcggagacaaactcggccagtcgatcaacgattacccaatccccggcggccgcttccagaaagaaacgctggaactgttccgtaccggctttgcgctcagttggtttgaccggtttccggtcaaagtggaacaaccgaaagacctgacgccaataatcgaacaatggcgggaaacgctcgctcaggcactacaggcgaaccccgcaggggtaattcaacaggatgccgcggaagttgaacggctgctgacgttggcactggtgccatccgtgcaagctaccgatgacggagacgattcggaggtcgcagggattgttctgcaaccgaaacccaaaacacgccacaaacatgtttgcccggagtgtggggcggcggcatggggcaaacccgggttgaatattctgtgtggtgagtgcaacgtcgcatttatcgacatcgataactaa

SEQ ID NO: 441429 - DNA, 261 bp, Serratia marcescens
atggggacattaacgatcaggacacagccagagcacgataccgccctggtggcagtagggaatcgcttgggtgaaaagacggcctcgcagacattactcaagtcgctgatgacgtatgagcaccactgtgaagagattggggtcagtttggatatcgaaaattattgtacgttaaggttattttttgacctgcctaatttagctggcctcagccgacgaaacttaccggctgacggtatccggttgcttttccatatataa

SEQ ID NO: 441430 - DNA, 228 bp, Serratia marcescens
atggatcatatcgagatagccaataagtggcgggaacataataaagaacatgccggtgacggcgtagttctgatctgggcgggagaagtctacggctggaagaactgtttacgtgacgcccagcatgagcgtccaggcgcgatcgctgtagatgcagacgcgcatgtgttcatagcggaaggtggtaatgactatgacggcgcgaaacggtgggttgtgcaacagtaa

SEQ ID NO: 441431 - DNA, 843 bp, Serratia marcescens
atggggcttgttaaaagtttgctagatgacatgcaggaagaaagaaaagaagaatggatacgcgaacatctggggctagatgaagacagcgagcttgatgagctatctattgaatatagagatgcagagtttcagtttcatgaataccaggatcatcttacagatgaagccgcctatcagtttgagttagaagaggagcaagaaagggaaatagaatggttaaaaaagaatcctcatcttaatatttttaaaaattactccagtgccttagaagctgttctctctctcaacacgattgaaaacaatgaaacactcataaaaatgcaagtggcctactcagtcactatcttggagtcttgcctcagcgaaatgttaaaatctgtggttttatcctccgattgttacatacgaaatgcagtttcacatgtgaaagggttaaaagaaaccactgtatctttaaaagaaattctcgatgatggttctatcatagaaaggcgggtaattaacttcctttctgatatgctttatcatcagattccaaaggttttaaatacctatgaggttatcttgcaagcaacacaacctaaaggattacaattaggtgagttgataaagttgaccaaactacggcatgatattgttcaccgcgatggaaaaaccattgaagggaaaaaaatttctcttacttctaatgacgttgataactcagtcagtcttgttcgcggttttttagctattatcagtggttatatttcctctgctattattgctaaccataataaattagaagaggaagagagattaataagagaagaatttttaaaaggcataccgccgttttga

SEQ ID NO: 441432 - DNA, 372 bp, Serratia marcescens
atggattatcaacaacgtaacccactaacgacatcagaaaaagaattctacgttaacctggtgcagctttgtccgcctggcgttgtggttttatctaagattaaacttgctgagctggtgaaaccaacagcagagtccgggagtgataccttttatgatcacatcaaaaaaatcctgagttttaccctggattttgttgtgtatgatttgaataacaattataccgtagcggtgtttgactatcaagggaatgggattttcaaagaggaaaggaaatcatttctttctgagatatttaaacaatcttcgattgaatatttttgcatttcaagagttgcggaactttacttaattgatgtttttaaggggtaa

SEQ ID NO: 441433 - DNA, 294 bp, Serratia marcescens
atgcgcggttctaacgtagccatcgagaaagttgatgagagaagccattcgatttacaggttcactttgcccgttgatttcttcaagcttagcaagaagttcaacagggacattactgtaagaaaccgattgatcacttttatcaacttccttcaattcaaggtatcgcaaacctgcgataactgcctcagggagaggacgaatcttaccgccgatcttaacaaattcattcacacctatgagctgggtgattttcgtcgtgtgaacaacttcggggtcaaaacacaagaatag

SEQ ID NO: 441434 - DNA, 645 bp, Serratia marcescens
atgatttctacaacaacatttatcgcacttgcgatgcagtgcgcagccactgttcaccctgatactgcgatggatgttgtcagggttgaatcaggacttaatccctatgctattgcagagataattccaaaagagcaaaggataaaagatgggaagagcgttataactcatcttccaaataataaaaaagatgcgctttccatcgtcagaaacatcgaattgaagaaacgacgctactctgttggattgatgcaaattacgagcactaactttgacaaattcaatgttgatgctgaaaaactgtttaacccttgcaccaatctaactgtattcgaaaagatactcaccgactgctacaccaggggaaaaacgctcaagaacgcgttgagctgctactactccggtaattttaataccgggaaaaagaaagagtctgagttcaataagacaagttatgttgaacgtattggctatcctgattcaccagggaaaacttttgttgttccaagtactaaatatgacaaggctacagataaaataggagaggataaaagggaaattaaggataagaaggtcatcacattatacccaaccacgttaattcgcggcgaattcatcgccgataaccatacactaaataggtaa

SEQ ID NO: 441435 - DNA, 2751 bp, Serratia marcescens
atggcaaccttatttaaggcattagcacggcagccggtattacgcgggattggtgtcccgcttattccgttcgttgtcgtagaaggagcgctgattactctcagcgctaacgtaagctggttctgtcttatcctcgcaatcgcggcatggtttatcatgcgaagaatgaccaatgaagatgagtcgatatttcatctcatttggttgaaatatcaaacgcgtggcgtgtttaaaatgaatcgtcattatgacgccactgttatttcagccgctcaatatgatgcggttgatatgtcggagataatcaatagcatgaaattgaatgagcgtatgccgctggaaaaaatcattccttattcatctcacattgatactcaaatcgttaaaacaagaagcactgatgaaatcgccacttgggaaattttaggtgtgcctttcgagtgcgagaaagatgatgatttgaaaattatcaataatcaattaaatactatgctccggtcgtgggagggtaagccggtcactttttatactcaccgtattcgtgaagagttttacgagcatctggattcgccgagtggtaatgacctcgctgatgaaataagtcataaatattacgacgggatcagagacacgaagctttatcgcaaccgtattttttatacagtgtgttacatgccttttaccaaggaacaaaaggcacaaaacgctatgcgtaaacctgccgagaaaaagaaggccattgaagaaactctgcctgagatgcgcgaaataatcagtaaattaagtgcgtcgcttaaacgctttcatgcaaggccgctaggcatgtatgaagatgaaactggtgtttattcttcacaactcagcttttatcagtatttgttatcgggtatctggcaaaaggtacgattaactaaaacgccattttatgaagttttgggtggtgttgatttgtttctttcacaggataccgggcaagttaatacggcgaggtctaaacgcttcttccgctccatagaaatcaaggatttttgtgagcagaccgaggcagggctaatggatgcgttgttataccaaccggtgacgtatgtattaacgacttcattcagtgctatggggaaacgggaaacgatcactagcattgatgacaagctaaagcacttaaacagcgctggtgatgaagctgagtcgcaattggtggatttgaaagttgcgaaagaccttgtgacatcgggtgtcatttcgtttggccgcttccattactcgctaatgatatacgcagatacgatggatgagctggtacgtgacagtaacgctattgtgactgttctcgaagatctggggcttatcgtatcactgtcgatgttgtcgctgggtgcggcgttcctggctcagttgccgggggtgtatcatcttcgtccgcgcctggtgccggtcagcagtcagaactttgtggatattgagtcattacataattttttcgccggtaaacgcgacggtgttccctggggggagccattggtgcagttgaaaacaccctcaggcggaaaatatgacctcaatctgcataacacgctaatgggcatcgatgagcggggaaagaagacgcttggccatgctgatatcctcggtgcgtccgggtcaggtaaaacggtgttgatgctgttcctggccgcaatggctcagaagtggcgcagggaggatttgttccccagcaatgtgaaatccaagcggctgacgacggtgtattttgataaagaccgagcagcagaaccggggatcagggcgttgggggggcagtatttcatggttaaaagtggtgaagttagcggattcgcgcccttcatgttggaacccaccaagcgcaatatcattttcatcaagcaattgatgaaaattctgtgtacagcaaatggcaatacgctttcagagcgtagagaaaagatgctcaatgacggtatcaaccgggtaatgaaattgcctaaagagcttcgtgcttttggtgttacgaaactcttggaaaatatcagcgagccatcaacagcagaagcccgggaagatggccttaaaattcgattagcaaaatgggctcagggcggtgatttagcctgggtgttcgataacgataacgatactttcgatttgagtgagtatgatatatttggcatcgatggcactgagttcttggataatcccgatgtttgtcccgccatatccttctatcttctataccgtgttaccagcttgctcgatggtcgtcgtttaattattcaaatggatgagttttggcaatggatcggtaatgatgctttcgccgattttgtttataaccgtcttaaaacaatgcgtaaacttaacggactgatgatccccgcgacgcaatcgccagaggagattataaaaagcagtgtgtcaggggcaatgcgtgaacaatgtacaacgcatttctatatggcgaatcctaaggccgactatgatgagtacgtgaataagctgaaagtccccgagcggtattttaatattattaaaagtcttgatccgttatcgcggcaatttcttatcgttaaatcacctttgcataaaggcgaccttaatgattttgctgcgcttgttacattggatttatccggtcttggtgtaaccaccaaattactcagcgctgataaagacgatctggaaatcttcgactcaatctttaaagaaggcatgaagccggacgagtgggttgattcgtacctaaaactagttgcataa

SEQ ID NO: 441436 - DNA, 717 bp, Serratia marcescens
atgaaaagcaataaactgactgcatgtgtgctgctggctgcgttgttttctccatcggcttccgtattggccgggggtattccggtttttgatggtgttagcaatatccaacgcgcccaggagttcgtgcgggagatgcaaaactggcaacagacagttcagcattataagagccagcttcgttcttatcaggatcagcttgcaacggcgaccggcgtgcgtgatgtacagcagttcattaaccaggccaaaagtatgaaaaacgagataaaggcacttcaggaacgtggcttgagcctgaatgactttattctcagtgataacctccctactggcgatttagagcgtatttacgacaagtataagtcgtttgatgtttgcgatcccaaagctgattcgtcaattgccaccgtgtgtaagcaggaagtggtcaataaagcctggcagatagagcagacttcggaggttgaaaagaaaatcaacgatacgctgaccaatattaaccagctggccgatcgcattagctactccaaggacagcaaagagtcacaagatttggcgaacagtatccaggcgcagagtgtgcatttgaacgtgctctctacgcaatgggaaatgaacattaaatctgccgaacagcgtgataaactgttggaagcgaaacgacacaaggcgtttcgtgaacaacaggcaaaggcgtctgtacctacttactaa

SEQ ID NO: 441437 - DNA, 1173 bp, Serratia marcescens
atggcgggtgaaggacttttcgtccatttccataataccgtcatggatgccctgcaagcagcaacgcagggcaagatgatggcttatgccggattaatggcaactcttattcaagcaacaatttcactctatgttttagtttctggttatcgtatttttgctggtaaactacagcgtccaattgaaagtatcatatgggacttagcaaaaatgtcagtaatattggcgtttatgcttaatctcggaggttatttaactctaacaattgatgcgcttaatggaatgaaagatgggtttgcttctgtatctgggcatggttcagatccctggcaaatgttagattcgatgtggcagagtacatctgatttagccaataaattacttcaattggacgactctacttacgtaaagcttgatggtggcattggcgctatgcttgcttgggctggatccttagttactacgcttgtatctgctgcggtttttgtaattgcagagataacgatactactaatgggaattgttgctcctatatttatcttttgcatgctattgggcttcttgcgtcaaatgtttaataattggctgcaaattatattctcaagtattttgacagttctttttgcgactctttttattggtataaccataaccctatttaatgatgttcttgccaaagctaaccaacaagcggatatgagtaatttaatactactcggtgctcaggcttgtgcgaccggtgttttggctgctgtacttgtttggctttccagtaagttcgccacacagctcgctggtgttggcgttgaaggcacaatgcaggcagcggcagcaatgggtgtgggggttgggttgtttggtgcctctaaagctgcgcagagcatggttaagatggggaaaggcggcgcaaaagatttggggaaaggcatgagcgagggctttaagggcgatgcccgcacgacaggccgcgcagggtatgccatgggacagggggcacaaatgacggccaaggccgttactgagaaataccgtaatattatggcgtcgagagtgagcggggagagtcctaaaccagctgacatcactccgaaagcgccaaaaacctcttccgggatgcaatggaaaagcgcacctacagttaaaaccgaaccaaagattaaagacgccatgtaa

SEQ ID NO: 441438 - DNA, 702 bp, Serratia marcescens
atgttaagtaagtctagtaaaactaaagactatctggccgcttcaaaaagttttgagttaaaaactattcagcgtgatcagcgcgataagaaaattgcttttattattgcgggggtcggtgttcttttcggtgtgctggctttgattggccttattaccttactgccattgaaagaaaccaaagtcgatctctatgttgcagataaactgacgggttatatcgaaaaggtcactacggttgaagatggtaaagaatcagaaaacttagcgttagcgaaatatttcatcggtaattacgtcgaaaagcgcgaaggttataactggttccgtttacaacatgactatgacgccgttcaagtctacggaaccggtgaagtgaataaaggttatctcgattggtacggtggtgccaatgcgccagataaggtttatggcgcaacatccaccgttgaggtgcgaatcattactgactttgtaaccgaatcatcgaataaagataaccctgatttattggcaactattcgctgggaaaaacgtatccgggatgtgaaaagcggcaacgttgtttctcaattctggactacacgtctgacttatcggtttgacccatcgcaaaaaatgtctgctgagcaacgtcagttaaacccgttgggttttaccgtaaccagctatcagcgtgaacaggaacagggggcatcatga

SEQ ID NO: 441439 - DNA, 930 bp, Serratia marcescens
atgagagcgttaagcgcactttcacttggcgttgccctggtgtggtcagggggcgttttggcggcggctgtaccacagggcagcagctatgacagtcgtatgcagcaggtgtcatttaatcccaggaataccacggtagttaaagcctctgaggggtatgtgtcgaccctggtgtttgatgatgatgaggacgtgatcagtacgcgtgtcggcatgccgaaaggctgggatgttcagaaagaggctaaccgggtgtacatcactgtagcgccgatcaagcagacggtgaaagccgtcaagagcggtggtgatgacggtgagacggaagaaaccgttcaggtattccagccgaccgatgaggggtggcgtaccaacctttttgtgacaacgactaagcggttctacagcctggagttgcgtctgattgacgcaggcaagtcaacgaaagatgtcgcgtatgtcgtcaactacctctacccgcaggaagccaggatgaaagaacaggttgcccaggcggagcgacaaaaagagttcgaaaaacaacggatgcaacaaagcatagagcgtcaatttgaattggctaaagctccccgaaattgggcgtactcgatgcgagtggcgaaaggtagccgccttattacgccggactttgcctatgacgatggccggtttacgtatctgggcttctctccggttaagacgttcccgagtgtgttcctggaagaaaacggcaaggaagtctctgtgaaaccaaccacagagcaaaaaggcgattttaaggtgatggtgatttcacaaaccaacccccggtttgtgctgcgctctggtgacagcgtggtcggggttgaaaatcaagggttcgggaaagtgaccgtaaaagacgggaacacagtctcgccaaacgttgagcgtgtggaggtacagccgtga

SEQ ID NO: 441440 - DNA, 1221 bp, Serratia marcescens
gtggctgatatggaaaaagctgtccgggagaagtatttgaccgagcagcaagaagcggcaccggcagaggattcaaaagccactgccgctgatgttgccaagatgaaaaaacgcccgaaaaacaagatgctgtttggcattggttttatggctatcggggtggtgatcatcgggacatttgcttttaactattgggaaaagaaccgcagccctaagacggattcgaagcaaagcagtgatgcgcagcgtaatgatggcgtggctgcgcggcgtaccgacctgggtaaaggctctgatccgtttgcggcgtctgcgcctgttgctgccagtagtaccccaggcgatgacggccagcaacaagctgccagcggcgacgccgccccattacccccccaaaaaccgacattttcgcgctatatggcattggagacggtggacggggcagccaatgcggaaaatagcggtaaaacccgcaaagaagagcaggcaatcgaggatgcacaggccaacgctaccgctgtaccggctgcgacctcatccggtacacctggcgcaccaggcacattagaagaagggggatcatcgccggctaaccaaccaaaagttagacgcatatcgctcaaccccgacttgtatatatcggaaaacacaaatattccttgttccctggactaccggtttatttctgatttggccggtaaaattcgctgcaccatcagtaaagatatctacagcgcgagcgggaacgtcaagctgatccctaaagggacagaagccaaaggagtataccgcaccgggacgttacatcacggccaggggcgcgcgttcatcatggtgacaaagctaaggacgcgggagaaaccctacctcgatatcccgatgatggatacacaagcagccggggagttgggggaagctggggtgtcaggctggattgatagccattggctcgaccgtttcggtggggcgctgatgctggggatgatccccgacgttaccggggccattaccgatcaggccggtagcaaagaccgtaatacggattacaccgaaaacagccgccagtcattggcggaagtggctaaaaccgcatttgaaaacagcgtcaatatcccgccgacgctttataaaaatcagggtgagattattaacctgattaccggtgaggatatcgatttttcaaatgtttatgctgttaaacaaaaaggatggggatactaa

SEQ ID NO: 441441 - DNA, 1032 bp, Serratia marcescens
atggaaaagaaaataaacgaatcactgtcgtattaccaaaatcagtattttggcgattttctggcaatggagggattaaccgaagttgcggttaatcgtccaggtcaaattttcacaaaaattgcggggatttggcaagaacatgaatccccaataacattagatgattgcatggcattctcgacagcactcgcaaacgccaatgatgatgatatctccgacctgaaacccatattatcagcgacaacggaaaccggagagcgctgtcaggtaattctcccgccaacttgtgaaagggaaacggtatctattaccattcgtaaaccgacgttggttaacgttgaacatcaatcttatgtagcaaacggtttttataatcgggtgatggggaaagaaaacacccagaaccatgatgatgaactgctgaagctttaccagtcgggcaatattcctctttttatggaaaaatgtgttgaatacggaaagacgatgctgattgtgggggaaactggctcgggtaaaactacttatatgaaaaccctgatcggttttatcccgttgcatctgcgcattaccacgattgaagataaccccgaaatcaagttttataagcacaagaattatgtacatctcttttacccggctgaggccggtgataaggcgattgttaccccagcttcattagtgcgttctaattaccgtatgaaccctgaccgaattttgttagcggaaattcgcggcggggaagcctgggactgtttaaaaatcatcggttcagggcatgaagggattatttcatctttacatgcaggctctccgtatgaagcgataatcggtatggttgagcgttgttatcaaaataccgaatgccaaaacatgccttacagtgttctgctgcgtaaagttttaaacagtatagatgtggttgccagtattgacattaatggcaatgttcgccggatgggggagatttatttcaaacccgtacatcgcgagcaatacatgaaggagctggggcatggggcaatttaa

SEQ ID NO: 441442 - DNA, 1827 bp, Serratia marcescens
atggggcaatttaaccgagggcaatgggtttttgtggcgatcatgatgggagtgcttaccgtcatggtcgccagtgtagcggtttacttcctgaacggtgtctcgttgcgccgctttttcaaaatatatcgattttcaatgctgttccaggtgttaacggatagcaatgtccgttctgatatacggttacaagggcttttggctctggctatagggtttggggtttccctggtggcgatgttggggctgatgatccaactgtctacgcaaaaggtcgcgctgttcgggaatgccaaatttgccagtgatgccgatattcgtcgttccaaggtcgtgacctggggcgatgatagtaaagggggggtcattatcggcctccataaaggtaagctgttgcgctacatcgccccggattttatctctatgggggcgggtacacgcgctggtaaaggggcagctgtagttattcccaatttgttgagctggttgcactcgatgattgtgcttgaccctaagcaagagtgttacaagataaccagtaagttcaggcaattaattctcggccataaggtttatcttctcgatccgttcagcagcaaaacccacggttttaacccacttttctatattgacctggcctcagagaaaggggctggttatttgaagaacctggcagaaactgtttggccgtcagttggattgagtggcccggaagcgcactttaacagcgcggccagtcgggtttttgttgggtttaccgaactgctgtattacctgattaaatatgacaagaaattccttgcgagcatcagcgtaaaaccgcttttttctatcggtacggtaatggatttgtattttgccgtagatcaggaagcgcttttgtcagacagggaagcacttgttgaaatgtctcaagggaatgctaacgatacgtatattatcaacgatgcattgaacaagattaaaaaattgtttgaggcagagggtgaagctaaatctagtacagaagagacatttcagaaaaagcttgattcgtttacgcttccgctttttcgtgcagctaccgaccgcaatgattttgatttgcgagagttacgtaaaaagaaaatcacggtttacatcggtgttaacgccgatgatgcaaagattgctgattcatttttaaatctgtttttcaatttcgccattgacgttaatatgcgtgaaaacccggacttcgtgccggaaaacaaaaatgatgttcttttcttgcttgatgagttcccatccattggtgcgatgcattacatcaagaaagcctctggattcattgctggctttaagctgaaacttttaactatttaccaaaatatcgcacagctgattgagatttacggattgtatggggctaagtcattaatggcaaaccatccttgccgggtgatttatgcggtcagtgaaaaagaagatgcggatgaagtctcggctaaattaggttacaccacgttaaagaatacagggaaaagtaagaatagaagtaagggcggattaagtcgtggtgaatcagagagtgacgcacagcgtgcgctggttcttcctcaggaacttagtacgttgaagtttgatgaagaatttatcctgcttaaaggggaaaatcccattaaatgtaaaaaggcattctattttagcgatcactacttcatggataggttagtttcagtttcacccaagcttgaagcagaggttaaaaaactgaatagggggacagcggtaggtcggaaaggacttaaatatccctcgaaggaacttatgctttctttaggggagcttgaagcagaattgttttga

SEQ ID NO: 441443 - DNA, 693 bp, Serratia marcescens
atggctggaatcaataatatacaaatgcatcgaattgaaatgagcattctggcacagtgtgatttgaatagttttgcgatccttgaggcaatcagtactggaggcgttgactactttgaacaaatccaggaacaaaccatcattgctgacgaacggttattagaaaaaaacgctttagttgatttggttgacttctgtaaaagccattatgatcgagacttgggttttcaatcaaaaatggatgacggttttcactgttattatacttgtataattcctgcaaataaattcattccatttgcccaaaagtattctcccttcgtcgaattcttgagtaaatttagagaaagtgatgtagatattatagaagtcagtttcccggaaaaggtaaagaagatcatattagatgaattcgcatacggggatgacttagccgctactttatttatggagaaacataacgataaagagggtggtaagtttttaatttatgcgctgtcgaaatatggttcgaacattactaaaacaactttgatgttagagcggctttacgattgcacaattgaaatggcagcaaaaacagatgcggttaaattgctttgtcaccgaattaaagaagatataaaaaacgagtttggtatttcatatattaacgaattaatggaaccgttcgaagacgattttcgctgctag

SEQ ID NO: 441444 - DNA, 561 bp, Serratia marcescens
atgcaagaattttcaaatcagcaaattaccacccttgagcaagtctgcttactactcggcgacgggtggcacattgaccgtctaaagtctgagcaatggcgtcaagtcttgcgctctcctgaataccgacactacagcatcataatcacctgcacatatcaccagtttcaactgttggccgtcattggtcattacagcgacctagcgattaaaatttcccacagtagaacgccaacggcgatcagccgtgatatccgcaagcgcttattcaatggccttcgggcaaagcttgcagatgcggatagccaacgacaaagagaagctgaacggaaacaggctaaagagtggtttatcgatgctataagccgcttagtcagtgtcgaacggcctcgctatggtcacaccgatagagtatgtggattgagtcatgaggggatcggcggcgaggttcaacactattgctatgaaaattataaactcaacctaaaagggttaacgatggatgaaactattcggatcgttgggtttattagccagctaagagggcaaaacaatgtctaa

SEQ ID NO: 441445 - DNA, 270 bp, Serratia marcescens
atgtctaagacctgcgtctatcatcatgctggttccagcggcatgaatacgtttaaaacagaagtttttaaattggataacgggcagttagaagccgtgtttacacgaatcaaacgtaaacgctttccagacggaacggaaaaggaatttgtggatcaagtctcacagtttaccgcaagcagcaaagaagaattaaaaggactagatttacccaagttgcgctcaactaaaattttactcgattctgaattttttaagggtgaagaatga

SEQ ID NO: 441446 - DNA, 516 bp, Serratia marcescens
atgaacattcaagaagccctcaacgttctcggtttaactggtgaagttaatcaggcagaactgaaaaaagcatttaaacgcctcgctgttaaatatcacccagataaaaacccaatcggcgcagaaatgatgaaaatgattaatgcggcgtatgaattccttactaataacattgaaaaaataaatcaatttcaatcacagaatgaagaggatgtgtataactacagtgatgaaattgaaagtgtattaaaaacgattgtgacgatggaaggggtaatattcgaagtgataggaaactgggtttggattcgaggtgaaactaaaaatcataaagacatacttaaatcactaaaatgcaagtgggcacctagtaaaaaagagtggtattacagaccagaggagcataaaagtgtttacaacaggaaaacgcacaccatcgaagaaatccgcgaaatgtatggaacaaatggacaaagaaaagcaaaaggtaaaaaacaattagaaaaaacaaattaa

SEQ ID NO: 441447 - DNA, 186 bp, Serratia marcescens
atggaaaagaaaactaaagaattagttgtaggtgacatggttataaatgttctaaaccggtcttattatccgctcgaagcggtggagaaatcaggttccgggtatatcgttaccatgacccccgcaaatataaacggcaatcgatactacgcagaatacgcaacccgtcatcaaatccaggcttaa

SEQ ID NO: 441448 - DNA, 210 bp, Serratia marcescens
atgaaagaatctaaccgcaattttgataccctccgcttatcccgctttgaagtcgtatttattgcagaaaattcttttggtgaagttgtgatttgccgttatatcactaatgcactgaataaatttgatgcggctttccaattcggccaaaacaacaaaggttataactatgttgtgaaggaagtaaatgaagtaattcaagccatctaa

SEQ ID NO: 441449 - DNA, 558 bp, Serratia marcescens
atgggggatgaagtaaaacatgtacaacttagactggatgttgacgcatacgatattttaaaatcagaagcgacaatagcagggttaacacctgcatctttattaaaaaaaatcgtattggctattacagcaaccaagagcaccgctaactatgaaattagtgacttcaattttcaggaaaactcggagaagcttaatgttaaagttagcttggagctgaaagaaaagttgcagcgtgaagccgctagaaatggttggtctttgtccaaagagtcgcggtttcgcctggcatcttcattgaccaacgctccagctttttacccggatgaagttgcagagcttcgcagggcgaggaacgctgttgatgttgtagggcgtaatttgcattacatcatatcaaaaaaacagatgttaactattaacgatgatgaatttttacaggatgttcaccgtcttaatgaaaacattgaagccttgaaaaaacaggttgatacgttaacaacagctgggattaataggagtaactttagaaaacggggaggcagagatgggcgttag

SEQ ID NO: 441450 - DNA, 1149 bp, Serratia marcescens
atgggcgttagtgttgataaagagtacaagattagaaaggcgcggagtgatcgagcgtcaaaaaatcctcttgcacataaagctaggaatggtggtgctgcttatcagaaaggagtaaagcagcgtactacttctaaaggcgctagtcgtgaagttatggttaagatcacaggtaatgccaaaacagccagaggaataaaaaattcaattaactacatcagtcgtgattctgatttaaagttaaaggatgatgaagggagagaatatgaaggtgataaagatatttccgaagcctacgactatatgatttcccctgaggataaaacacgtcttgatgataacaaaaaccctcatataacacataacatgatgttcaatacaaattccatggtcggtgttagccaggatgatatgttggattcagttcgggatattataaaagaaaaataccccgacaatcgatttatgatggcttatcatcaggacacagacaaccctcatgtacatgttgttctgcgtatacctgacaatgccggtcatcggataaacatacgtaagcaagatctccgcgatttacgctctggtttcgcacaaaaactccaagacaaaggctataacgtaaaggccactcataagcatgactttgcacttaaaactaaaataaaagcagaacctgataaaacgcgtaatctttatgaagtggttgattttgggaacacgcattacaaaaacgaccctaaaaataaacgtcaaaactatattcaactgaaaacgataaagggcgaaaaggaaatgactatttggggaaccaacttagcaaatgagctgctcagggaaaaagtgaatataggaagtgttattaagataaaaaaggaaggggaaacaactgttaaggttcctttgtttgataagcaaggtgaagtcaaaggctataaagagtctaagcgaaataattgggttgttgagaacaaaggtgtgattggcattgatagaaaggttcagtttaacaacgttgaagtgctgaatgatccgcaacgtttcataaaacaaagtgtcagcataaagcagttccaagatgctaaaatgagtttgctgaagcaacaacaacagaacaaggttggaataaaagtaggcgtgttcaagctataa

SEQ ID NO: 441451 - DNA, 243 bp, Serratia marcescens
atggcagaaaaaacctttgcactggaatcgctcgaccagttcaataaactccaggacatgccgtttattgatgagattgctgtaacgcttggcctggataaggtacagctcatcgccacaccagactttgccatccaatccgccatcaccggagtagcgcttgttgcgttggatcgtgaagccgcgccgctcaaatacctcgagaagcagctcttcaaaggtgtaggggtcaatcttgcgtag

SEQ ID NO: 441452 - DNA, 432 bp, Serratia marcescens
atgagcgacaacgaaatctacagtgaagtaaaacgaatcctttctaacatccgttctgtgcgagcttttgcgcgtgaaactgattatgacttactgctggagatgcaggaaaagtttagcgcagtcatagaagaacgccgtgaagatgccgagcgtgaaaagcgagagcgtgctgaacgcgagacgaaacgtatggaattactccaactgattcaatcagaaggtttcgacccgagcgaactgttgctgggtgttgaatcctctggctcgtcaaaaaaatcaaaaacaggtgtaaaacgtgcgcctaagtaccaatttgaagtaaatggacaacttcaatattggtcaggtgttgggcggaaaccgaaaccgattcaagacgcattggatcagggtaaatcgttagacagcttccttatcccgacaaactag

SEQ ID NO: 441453 - DNA, 594 bp, Serratia marcescens
atgtccccagcagtcatgaccctttcagatctgagttatcaattaggcattatcggattgatcgaatatcaggaacgtcttgaaatatacagatggcttaaagacaacagcaacagtgttgctgaccctcgcaacgctcccggggaagattatgcatcttctgaagaagagagaatggatcatggggatgactgggatggaagtaacagaatggaagatccacagttaagtcatactggtacaagaggatgtcaaaaaatcgaggatgaagatgattcgatgcatttcctagcctttaacaaatggctctttacagttggtgacaaagactgtttcccttcagttcctcacgcccattaccaacgtaaaaccaccccgtggccaaagttaaatccctataccggagtggtatataacagcatgaatgctgaagatgtttcttccaggctcaccaaaagagagatgaaattactgtggaatgattctaagtttattgaagagtgcaggaagcagattatttggtatagtgcgtttgcacctcattactcttttcctaatgcacgatttggcaggcatattcttccacggtggtaa

SEQ ID NO: 441454 - DNA, 690 bp, Serratia marcescens
atgtataacaccgatttaccgacccgcgcggagctgccgtctgcgatgaagctgatgcagtccactattctggcggctatcgtcgctttgacactgctgataaccatcgtgatgccttcagaatacggtatcgatccaacgggcgttggccgcctgctgggccttaaacagatgggcgaaatcaaaacgcagctggcggaggaagccgccactgacaaacaggcgagtacgagccagtggggacagtcaaccactccggtgaatgaacgcccggtgccagataacccgccgacaatcacgcaaaacaactatccggagctgagcgttccggcgacaactcgtgcgccagaagccccaactgccggttctcagcgcaatcagctgttaattactctgaaaccgaatgaagcggctgaagttaagatggaaatgcgtaaggatgcccgggtgacttaccagtggacaagctctggacctgtcaacgtggatgcacacggcgatccggttaacgcaccgaaggggttttaccacggctacggcaaggaccggcagataacctcaagggatggtgtgttgcaggccgcctttgacggtaagcacggctggttctggcgaaatcgtggttcacaaacgattactatccagcttgataccaatggcgaataccagagcattaagcgcgtaatctga

SEQ ID NO: 441455 - DNA, 759 bp, Serratia marcescens
atgacaacattactgccgggggaaaccctggcagcctctctggccgaaaaagtcagtgatacatggcaaagaattattgctcgccgcactgctaaggagacgataacgccgggatggattttgcagtcgctcgggcttcagccgggctcaacggaactgcggagagccatttttgaactggtcaggcgcgtgccctatcagcttgggtcatggaataaccaaagcatgagcctgtttgagcagggttttggcgactgtcgtcataaagccgccgcggccgaacgattgctggtagccggtgggattacggcgaagagaaaactggtgcagtttgactgggctgatttacccgttcctccagaaatactggctattttgccgcaaacccagggatttcatgacacagtgacttttgagttaaacgggaaaacatgcctgtttgatgccacctgggatatcgccctgcgcggcgcgggcttcccggtgatgccttcctgggatggcaactctgatacctggtcggtgacttcccggatgtcgacgcagcaaaccgtacagatgccacagcccgggcaggatatttacagcgcgaaccagatgagctggcctcagcgcgagaaaaccatggcgttcaatcaggcgctgaatagctggctggacgacgttcgggctaaccgtgatgactggtgcactatggtccatagcgatgttgaggccacacggctgagtctgaaaacctgcctgggacttctgagttaa

SEQ ID NO: 441456 - DNA, 429 bp, Serratia marcescens
atgcaaaaacaatacttcagtcagattcgtcgccagttcgtcaacgtcaccggcgtgttgctcgcttcattcgccgccattccagcccttgcgactcaaggcggtttctccgcagagaaagagccagtcgccactgagcgcatgtatgccggtcataaggttcaacaggaaaacagtcaaagccgcattcaggccgtgccgtcaatgcacgaaggagcgtggatcacgctggaaggcaatgtcatcagccagcagcaggaagagtggtacaccttccgcgatccaactggaaaaatcaaagttcgtattccgcagaaagtctggaacgggcagcacttcgatgctcaggatttggtgcgggtgagcgggcagataagtcgtgagaatggcactacgagcctgaacgttgaggttatcaaaaaaccttag

SEQ ID NO: 441457 - DNA, 2328 bp, Serratia marcescens
atgaatgaaggaggtagccagctttgtcacttaactcgtcgagaaattccattgcgggataatgtgctaaaggtagtttactcgaagaaatggttttcagcagcgcagcgattttatgtggttgacctgtattcgacaatgtttggcaatgaagttaatgatgacatagagcagaaagtatttggtccaatcgatgacaatggctcgaaatcaataagggcgtatctaaaagatgatcagtcgcagtggcatcataattttaaaaatttatttatctatcttgacgctcagaaattacgaacacctaaaggtttagattggataaggagcagatatccgcaattaactcaaatgcaattaatgcacgagatgcaggctctaagacatttgcattgtactctatgggctgagggggttagagagttagtatccgccgaaaactctgatgttaaatttattatttcagaccaccctgtgactgtttataattatgcgtgtccgcctgattcggatttttgcaaatatcctaatgacccagatatcactcttaaaggttcccaaactatatttccattggatcaaaatcgctgtctaatcctgacaaatcttgagtatgctaaaaatcccaaaagtgttgacccacttgagcagagaaccaattcatctcgcatgcattttagcatggtcaatactattaactttatcaacacgcgtaagctgactgcggatgaagtaaatcatattaattatattataaagagtagatctaaagagtatattgctgcggcaaaagaggagtggttgcatcctgaagataatataactcttggctgggaggagcttcggaataccttgttaccaaggcgaaatgacttgcatctatttggtggggaaatgtttgtcaaatttgaagacggaacggttcactatcaagatgcctttggtagaactacacaacccaataaaaagttaaataaaaaaacagatgagtccacattgggacgtaacgatctctgtggatgtggtagtggtaggaaatataaagtatgttgtcgaaatacgccagtcgatttacgttgttcatggagtgttctgagcattagagaaagaaatattgcattttgtaattgtattaaggatgtgcttaaattaaataaggataagtcatggatagatgttagaagagatatctcagatgagaatataaaaaccatatatgaatttttttcagttctatggcctcgtgatacagacatctattcacttcttcccaaggccgatggcgtctttagggggttatactccggactggtagatatcaggaatattcacctcaatgccttgccagtagcatcgttttttgatgattttctaatccaaaatcccatagtgaaccctaacattgttaggccggagtttagccctataaaaaacccggagatttttaaataccaatctctaaaagatttcttgttttttttagacctagagccattcattgatcttggcctcatcaatcttattccaaatccggttgattttgatattgagctcatgggcgcaatgatggaaattgttacgggtagagagagaaaggatgagtacgtttgtaatcaagattatcaatcgagtttgggattaattttagaggactctttgaattcaactgcaatgatgccaagagatatgagagttcagtttcttatagaggagctagggtatgatatactggcagctgaggcaattaacaatgaatttgaaaaaggtgctgagtcgaaccccttagtgttgctgcaaaagacacaaggaggtagcaaaggtcaattcacgcatttcaatatggtgccaaatttcgaaatggggcttttaatagctcaggttacaggttctattcttgttacggatagcaattcacgatggaagcagtttatgtcagcacagcatcgtaatcaaggaatagctaattacccttgggcagacacagtttcttcattaacgtcaataccaactgatactaaatttttaaacacattcaataaatcacaaggtcatttcgcattagtgagaagtgtattaaaaaacgttgatcaaatggtattgaatgatagccgtgatcctgggaaattaaacagtttagctgttcaggttaatgatattacaaagcgttttgctcaaaatagtgattcactgaacctgaagagatttaggatttccaatccagaaggtggtttctatgatgcgaacgtacagcgattgctagcgtcttcaagctgtcttaaatatgaacaaagagttaggtctgtatatggcatagatctttcgcaataa

SEQ ID NO: 441458 - DNA, 534 bp, Serratia marcescens
atgcgtaaagtaagcgcggtaacagataccgctgatattaatggtgagttcacagagggcaatgtcgctcaaggtgttccaccaacaatcctggttgcagatatttttaatacctggcagcgcgaattaatcggtgtggttgaaggatctgggcgccaactcgagccggagaacgataatcagttaaaagaggtaatcggtgagctgaggatgacctctcttctgtctgctcctatcgttggcgcacttacttctcaggggtattgcatcatccctactcagacgccatctggtggaaagaaaaacattattgttcaaatgggaaccggcactattaatgcgccgtcaggaacagtgcagtatccgatccctttcccaaagcgggttattgctatcgtggcaacgaaatatgcagatggaaaccgctccgtgtccgtaaccaatgattccaactcagcatttggcgcatatggctggatcagtggtggtgccggtaatgctgacaactttggctggatcgcgattggagaataa

SEQ ID NO: 441459 - DNA, 669 bp, Serratia marcescens
atggatccggtggttttttatcgggagagtatggttcaggtattaagtaaatattttgttgaaagaataaatgttaccgatgtggtatccagtctatccgcactaatgtgtttggcgctgaggaaagggcctgccgatgtctatttgatggaggccttcggtcagaatgagagttataataactggggagagttcactcacttcatggccacttatcatccgtcagtaaagtgtctgctctggtcttcaaaaccgaccatgtttataaataaattcaataattttgagcggggggaggctggctggcagataccaaaaaaaattgacataagttgctttgttagttttttgacacgattttttgatggagagaattttgcctcatataattcccagttttacataggtcctcccatgtcaaacctcacacctagtgaaatagctataattacaggtatcattgaaggggatagtatcaagtgtttggccaagaaatttaatgttgcatataaaactataagcacgcacaaacggaacgccatgataaaaatgcgcatatcgtcgacagctcagctacgtagcctttttctggacgggcatatcttgcgaggcgataaggaacgatatcttccaattgaaactagctctaaccaaccttttatgttgtaa

SEQ ID NO: 441460 - DNA, 222 bp, Serratia marcescens
atgttggtgttccaactggccgatcgctggggtgagtcggatcctcgcaagatcgccgcgctgccggcgcacatcctgaatcactggcgggcatacttcaaactgcaaggcatgacggccgatgcggcggagagtgcccccgttcatcaatccggtcagcccgcgcaaagcagtattgatatgcagtgtgctgacgttatgcgagtgctgggaaatggctga

SEQ ID NO: 441461 - DNA, 999 bp, Serratia marcescens
atggttcagcacacggcgataatatcctctgaagaggatgcgctgcgctttgttgagatgtatgtttctggacaggagcttcctgatgggatttcattcagcggctggccgaacctgacatttaggcttactggtgaaaaatttcacggtagtcttactccttcagtaatgaagggatttattgagatgcaatcacagatcaataaatcatacgctctgctaaaatacggggttcctgacccacggaaactttccaaggaagagaaagaatccatagaaatacaggtggttgtagaagaaggctcatccataattgaagtaaatatggatggtttgcttggtgaagttgctcacgcggtggtcggaaaaatgggtcctcaagagatcatcatcacgattttgggaacagccctgatatggggaggggtgtccctgttcaaaaaataccttgaggatcgtaaagaagttagaatggcagaattaaaaaaagagagcgatagggaacacctatcaacaatccaattcatgtcagagcaagagacaaaacgcacagagctgctaacacagttgattaacgagaaaccaaagcttgacaacatggaacgtcttgcgcacgacgcaaaaacagatctggtaaaatcattttctaaagctgagacagcggaggttgctggagttgttttagatcaggaacttactaaaacacttacaaccaatgccagaagaaaatcagtagaaatgcgaatggacggtatttatcgtattgaaaaagtagactctactgatccagaggcattcaaagttcaagtccgaaatgtagaaactgatctgaggatttcatgtattgttcaagatgttttcttggatgctattgaatttaaaagagcattacaacaagctgaatgggaaagaaaacctgtacatctttccatcaacgctaagcagcttgatggtgaaataaaaagtgcgataattctgtatgttaaatcagtagattaa

SEQ ID NO: 441462 - DNA, 198 bp, Serratia marcescens
atgcttaaggaaaaagtggtcaagcactacggctctcagcgtgcaatttccgctgctcttggagtcagtgattcggccgtatctcaatggggggaagtcattcccgagagaattgctctaaagctaagccgcatcactgatggcgttcttgtatatgacccgtcgttttacaaaaagtctaccgcgccagcggtttaa

SEQ ID NO: 441463 - DNA, 540 bp, Serratia marcescens
atgctccatactgtccattttctatctccgataacctcagcttcggttatccagttacagaattgttgtttgggcgctttacaacaacaggcaactgaaataaatatccacatatcaagccagggtggggataccgcggctggatttgctgcgtataactttctcaaatcgctaccggttgtccttcgtactcataacattagcaatgtcgagtctatggcaaatgtaattttcttggccggttcagagcgatttgtcaacccagtttctcggttcttgatacatcccttgctgtggggattcggttcccctactgcagaccatgcacgtctgcgcgaatacgggaaatgccttgataatgacctggagcgctttatcaacatcttcaatattgaggctggtgttgcttatgattggggcgccttggtaaataactctaccattctgaatgctgaacaagccgtcgaacatggcattgctcatgaggcaagacaagcaacacttacatccggtggcattaactggtgggttaattcctga

SEQ ID NO: 441464 - DNA, 870 bp, Serratia marcescens
atgagaaaagtaggaagcacaactgatacagcagatgcaaacggcgaatatacgaatggtaatgtggcgcagggcatcccgccgaccattatcaatgctgagatgttgaacactttccagcgcgagttaattggcgtggtcgaaggtgcagggatggaattagatcctgctgatgataatcaggtggcaaaagcgatagaaaaaaaagtaggtagtggaagattattaaacataaaaacgttcacttcttcaggaacctacactccgacacctggaatgcgatatgtggtcgtagaggctgtgggcggcggcggcggcggcgggggatgttctgacacatctgccgataatgcagctgttagtggcggcggtggatctgggagctatgtccgcaccaaaatcgataatacagccataggagactcggctgcgataactattggtataggcggcgcgggcggcatcggtggaaacgcgggatctaacggtggtgatagcaaattcggttcattggtaacagccactggagggcgcggaggtaccacatcaacaagttcttcctccttcgcattcatcgctgtagggggggctccaggagcaaaccccagtgtgggaaatataatttcatcaagaggcagccgtgggggctctggactgttctttaactcttcaaccggcgccgtgggcggggatggtgccccatctcaatttggcggttcgggaataggctctgggagttcaggcactaccggatccgatggaagcggtttcggtagtggtggtggtgggaatgctcggcaatcatcttctgcttctgttaatgggtatgcaggtgcacccggtgtgattgttatttatgagtattcctaa

SEQ ID NO: 441465 - DNA, 1071 bp, Serratia marcescens
atgagcggagtttatgttggtaatataatttcgaggggtaacaacaaccttgatttaatccgtctattagcggcaatttcagttattgtttaccactcttttccacttaaccctcagtggggattaactgaccccataaaagacatttttggctacatgacaactggcggcttggctgttaagatttttttctttataagtggacttttggtgactaatagtttgttgtcaagaaaatccaccatccatttcgtgatctctcgcgcattcagaatattccccggactgactttcgttttgattttaaccgcattagttattggacctatatttacaaccatgccacttgttgattatttcaagtcatggcaaccgcttatatacatacttaaaaacttatcactgcaaactcaatacttcctaccaggactatttgaaggcaacaagtatggggtgaacggttctttatggactattcattatgaagtatttgcctacgtagtgctgcttggtatttacttttttggcattgggaaaagccaatggttatcgtcattggcttgcctctgcataatcattgagccaatctcgccattaaaaggcgttttatttgcatcatccgataataatgccatatacctactagcaccgtgctttgcccttggatccttactagcaataaataaagattcatataaatcgaacataatcacaccagtgattatatttgtctcacaatttatttttaccagtgaggaaatttcttcattattaatatgcgtatccgtttgtcttgcctcactccatatttcatcattagagatagtaaaaaaaatcagagtaaggcaagatatttcatacggcgtttacctatggggatttcctatccaacagattatatctcaaagctttcactttggattctttgcgaatgtattactatcaatattgctgacgatggtgatcgcgctagtttcatggatggcaattgagaaacccgcaattaatttcgcgaaactaattttgacaaagggagttaattcaccatccgttaggaatactcataaataa

SEQ ID NO: 441466 - DNA, 2172 bp, Serratia marcescens
atggcacaaagatacaacaccggaaacccacgtccttctaacagtatgaaggatcttaatgataacgcccttgcttatgatgacttccttaacggcgaacaagatgaggcttacgatcggtttcaaaaaccattccctacagtgcgccggcaggttgccgatcgcatagatgagataactggtgcgcaaaagagcattgagcagtatacggatgaggctaagcaggcagcggacaatgcccagaacatcgcagacgccaatacctactacaccacacagtcagaccccgacgggacgattgctgggattgctgggacaccaagcggaaaatatttccgtgtaggacaggggccggggaatggatttaaatattatctaaacaatgatggaatagcgattgaggtagctgattctgttggttctgctgcaatccaagaagttattaatcagctgcaaaactcagagatcgggccggaggtggcatttactgatgctgtaggacgtactcacacatttattcaagatggtgacatcactacaaagaaattgaaactcattggtagtgatgggcaagatgtttggctttctgataatttcggacgtcgcattgcgttagcacgaaaacataatgggattatgctcactgattccgatggtcttgcgacaaacaccatcacaattgagccgaacgatagcgagcggctggagatgggggatcagttcgggcgcaggaaggttatcggttggtctggtaatcagccgccagacaattccacctggttgaaagacgccatccagcgaatggagattattgcgctgcaaagtcgagagcgcgtaatgactcgcggaaacaatatcgcacgcctgatttttgagtacattatttttctcttcactggccagtctatttctagcggcacggagtcttttcccagtctgagtaaaacgcaaccgatggacagcaaaatgttgggtgattctgtcatgccagaatcgcccacaaaaccggagtttgtcccgcgtggtggcgctacgttgaagccacttattgcaacatgctgtgatgctgatggtaattctctgaccgatgaagaagtcgctcagctggcgccggggacaatagcttatggcgagtctccggcggtggccgcaattaatggtctgcgcaggctttatcttgatggcatcagtaaacctgccgatccggataaaatcttcattgcagcagcctccggtgtaggcgggagaacagcagcgcaactgagtaagggcgcaacgccaaatctctatcagcgtaacgttgatgcgatgaatatcgtgaagggtatcgctgatactgacggcaagacatttcaggtcggggcatttaacgataagcaaggcgagaacgattacccaaacacccccaagcaacaattcaaggatattaaaaaccaatattacgatgacttgcagagcgatcggccagcgaacccagacggacgaaacacggcgatattcataacccaaacaggtgcgtcatatacccgagacgaaaatcacctgtccatcggcatggcgcagcttgaaatttcaaacgagcgcgaagatgtattcatgattggcggttactacccatacaccaacaaagtcagtgggcatctcgattctaacggtgccagaaacctgggtgataaagagtcagagattaaatatcgcgtgctcgtgctggggcaggactggaagcctatgcagccactgcatgctgtacatcatgaaagagatgccgtgattgcgttgcacacgccggttgtgccgttacagtttgccgcgccttatgttggcagtgttactcaagaatggcccgacaaaggcctgacggcattcgatgaggttggcggtgttctatccgtcatcggcattatttcggctgaacgggcagctacatcttgcgtgcatgtgaagctggaacgcgaaccggttggcaatctcgttttccgctatgccgataaaaattttcacggtggcaatgggatgatatgcgactcaagcaacgggctcagccctgtgaagtatacctatctcccaaacagcggaatgtacccggaggctgatatacccgccctggtaaacaaaccctatgaccgccgaaattggtgtgttgcattcgaaattacagcagagaaggaataa

SEQ ID NO: 441467 - DNA, 786 bp, Serratia marcescens
atgggattcacgttgatgaaccagaccgtcgcgctgacggattacgactacattgaatcaccggttaaagcggggttgatggggcataatttactcggcggatcactggcgcagtctctgaaaaatgcggtcagcgacacggctgcagatttggttgcaatcgggaaccctgagattcacccgaactgggtatcgttttccggcggcacggattattttcagtcgttcctcatgcagcaagctgagcaaacatggatttgggttggacgctcagccgatacgtttgtcgatccagcacatcagccgatgtttatgtcaacgtttaacggacaaaacaaggactatccgcagttcacgacgcatggcctatcgacgtttgttatgccatcaggttatccggctccacaggggaagctatttggtggggttggcatatatccgcaggctacgccggcaagtacctcacaaaaaacgcaaaatattgattctgtcgatttctcgcaattcaatctgtgcgtgttgcgccagtcgtcaaccgcaatcgcgatagatagcctgacgaaaggaactgcgtcgccgtgggcagaatttggtgcgggctatgtagcgggcatttctactcgtcctgtttgccttggcggcccagcaaaccccgcaacaacaaacaaaggcaagtgcgacatgggctactgggcgatttacgaccgtgttttaacgacggatgaaatcgctgttatcgccacatggctgcgccgctactaccggcagctgggtatcaatgtatga

SEQ ID NO: 441468 - DNA, 684 bp, Serratia marcescens
  misc_feature (595)..(604): n is a, c, g, or t
atgttttgtaaaatcgacaaaaaagcactttttctttattcagggattgctcttctttttatttatccgctaatccaagctggtatcttttatagggatgacctagatagagccataactggccagtatggatggagaggattgggtagacctgttgcagatattctcatgaagattttatccgccagtggccactataaccttgatttattcccctatacaatgattgcttcctgcttgtttatcggcggagcgtcgcttttacttagcgagcatttatcgaggttagaagtctcttcacacaagtttgttgctgctcttctcatttttaatccattcatgttacaaaatatcgcttacagatatgactctttaggcatgtctgttgcgtttttcctggcagttatggcttatacctataaagctaataatcctatcagacaagtttcggtgaaactgttagccggagtactatctttaaccctatatcagccatgcgctaatatatttattggtttacttgctgtggacattatgatcgcagcagttaaaaataactgcaaggctactgggattataaataaaacatttaaannnnnnnnnnttatttatctctttttacttagtttacatgttgttttttgctacaaaaagcaattcacgcgcagagatcatatcagctaa

SEQ ID NO: 441469 - DNA, 831 bp, Serratia marcescens
ttgaaagttattagcttaatcaatatgaaaggaggcgttggtaagtcaacattggctaccaatattgctaatcatctttcagataaacttgggcaaaaaatattattaatagatattgacccacaatttaacgcaacgcaatgtgtaatggatacaagtaaatatgttgcacatatgaaaagcggaggcgataacatatgtgatatattctatagttcaaaaattagactatctacaatgactggtcctttagttaacacgcctaaagaattaactgatataaaaccaattcatttaaatgataattttcacattattcctggaagccttggtctatataaaattgaaatgaaaccaggagaagggatagaaaacaagcttagacgatttcttaaaatccatgagaatgactatgattatgtcataattgataccccgccaaccccatcggtttggatgtcaagtgcattaattgcatctgattattatctcattccagctaaacccgaccctctctcgataactggtatcgatctattagatagtattataaatgagaagagagaaaatttcgatcttaaaattgaatgtgcgggcatagtttttaatatggttgaaggcaatagtactttatatgaggaaagtcttcgctacttcagcagtcaaagacgttggcgtgataagatctttaaatcatatttgagcaaacgtgctgagttagcaagaaatcaaacaagaggcttatttattaacaatttaacggatgaagatatgaagttttcgctgtctaaaattgctgacgaacttctctctagagtgggtgacttatga

SEQ ID NO: 441470 - DNA, 195 bp, Serratia marcescens
atgatcggaataatcgtgtgtgacgttcacgagaaaaactcatccgatttaggtaaagcctataatattatcaattcaatgtcaaataaccctctagttttgagtagaataaaagagaggaagaacctttctagcgctaaaaatgagatatatgactggaatgaagttataaaagatatatttaataaggactaa

SEQ ID NO: 441471 - DNA, 696 bp, Serratia marcescens
atgtcgagagaactaaacagcgatttcaatgagttagttacttatttctctgaatacaaattaaaaaatgtattcgagaatagtaactcaaaagggaaaataagtatgatacataagagatattattcttttatgtgccttgtttattgtttgtatcatttctccagggggaaaatagactccaactcattggagcgattgcaagaagcttcatctgaccttggtacaactatgtttatggttataaatggtgcatacaaaccagcaaacctaatgatgcgtagctgtattgaaaactctttaaaatcaataggttgcctaatagatctctcagtgcttgaagaaaaatcattgtataaggtaattgaacggactggggagcatcctgtcttcaaaaaaaatcctctactatatgaaactttaaaagctgaatattcttcgttatgcagtcatgtacatacagctactgtaaaagaaatggctcacataaaagctttaaatgtttttcccgatatcgacttggttaaaatagataatatttcgaaggtgattgataagatagttaagactatgatatcaactatcatattaatttttccagatgcttttttttcctttgcgcctgagtatcgagaaaaaatcctccttagtttaacacctgcacaacgagccttacttcattccttaagtgattaa

SEQ ID NO: 441472 - DNA, 738 bp, Serratia marcescens
atgaacttaccagagagaatgtattatccaattctagaggcagccaaaaaattagagtgttcacaatcggatatattacactatgcatctgtaggtgtttttaatttaagtatatatgttgattttaaatgcgatgttaatagcaggcttattcacatgaactttcctagtgaaaaagttaatgatatcgatgattttcaatgtatagacggagataagtggagtattggtaatattgattttatcgtaagtaatggaagtgatggtgtaattagtggatattattccggtcgcttgtttggttttttctatgtccatagcactgaagcccttagggcagaattcagccaagatgatgatgtacggttatctttcttaacaactaacccaagtgattatgatggcaatgacatagagattaacttattaagggatggcggggaaatatttaataaggcaaacctttgtttgatgtccagtgagtttaataaaataacttcagccgtgggcggagattacccgaagtcaatacgcacggaaactgacaagacaatagctaaaaaggctgagttgataccggcattgttaaaaatggtccctgaattatctaatgtggactttgaatcaacacctgtaacaaaaattattgagttaattgaggttgtagctgcaagtaaaggcgttttattgccagaaacccatcgacagacatggcaaaagtatcttggtcgtaagtga

SEQ ID NO: 441473 - DNA, 201 bp, Serratia marcescens
atggagtatgaagtcagcttatcgaaggcgacgcaatccgctgagcggcttacagctttgttaatggcgatgacccttgcctgtgaggatatggagagtgctgataccaaatctctcattgaattggcgcttgagctatcagaatcgccagcttgctggttgatggaagaactgagcattcgggagaaaaaagatgcgtga

SEQ ID NO: 441474 - DNA, 195 bp, Serratia marcescens
atgcgtgaacctattcctttggatttagctaaataccgcgccgagctggcttgttcgctttacgaggtcatcatggatttggcctgtaaggaaagttcaaagcaactgctcgatctgatcagccttgcttatgacataaaccaagaggttttccattcgttgcaagcctcaatggaggagcgtagccatgcataa

SEQ ID NO: 441475 - DNA, 600 bp, Serratia marcescens
atggaccaggctcaaaccacacgtcctcaagatgttattactagtctaagtgaaaatctagatatgattcttggggatataaatattatttttgatacctctcaagaatcagttagaatacaaaaaataaagagatttttagaggagaataatttgcgctcttcttatgattatatattcatagatagtccgccaactatatcaatattcacagatgcctcgcttgttgcctctgattattatttggttccagttaaaatagaccattattcaatattgggtgcaagtagtttagtaagtgtaataaggaacttgcgtcacaatcataatcctagtatcgctaatattggatttgtttatactaacactgacgatgaactaacgctgaaaacaaacagaattaaagagcagttcgaaggtcaagaacaatttgatggtttttattttttcgaaaataagttaacatatgttagagatcttatggttggccagcaaggaaatatcccttcttgttatgctaaatcaaggggggatattgatttaatttgtgctgagttcattgcgcgcattgaacatttagaggttgaaaagaatggataa

SEQ ID NO: 441476 - DNA, 534 bp, Serratia marcescens
atgactaacgagaaattcagtaaagacgcatatgaaacggctgttgaattcaacgttcagcaacgttttgcggcgatgttggttcacacaggaaactttaacgtgaatcgtcgtggcgctgacatggttgcgttcattgctgatcggaaagctgactatcaaacagcccaccctgacatgctgactgcgggacaaaccatagttaaccagcaacatttcaccgattttgtttgttccgggatttggcgtagtaccgacagccaaagcggcggggctacaaagggtaaaatgatggaattacaaagagttttaaacacagaagttattatcggtgacattgttcacgcgcatggtgcggtctttaaagtgataaaagtactcagtttccccggggcgggaactgacggaaaagatgtagcagcaaatattgctgaatgggtatccggcagaattgaaccgggctacttcggccctggcagagaatggaatttccaaggcaatgacagagtaacgcaactaattgaaccccgctaa

SEQ ID NO: 441477 - DNA, 504 bp, Serratia marcescens
atggataaattcagtgaactgaaagcggccgcaatggccgcaactccagggccgtggagctataacgggaattgcaaatttgggatttggtggcctgctgaaaattgctatgtgctatctgcaaatacgcatgacgatgccgcattcatcgccgccgctaaccctgctgtcattctcgccctgctggcagagctggaagcgaaggataagcgcatcgtggctcttgagcgtatcaaccaggcgcaggacgaccacataaatcagcagcaggacagaatcgattcgctggagaagaaaaacggaggtctaggccagggattgcaggcggcggaaaaacgtatcgctgggctggtagcaaggctggctacgccggtgcggttgcctgacacgcgccaatcagtatccggcgacagataccaatggtctgacggcgttttcaactacaagaaagacgcgatagccatgctgcgcgccgctgggttcaaagtcgagggggatgagtag

SEQ ID NO: 441478 - DNA, 234 bp, Serratia marcescens
atgcaggataacaaagagaacgacatcatttctgatactgatattgaacggataaccggttacaaaagtgcatcaaagcagtgtgaagcgcttagaaccgccggcatcttctttatcactcgcagagatgggcgccccagcactacatggggccactttaattacccagtatcgctgagaaatcaacctcaggccgaggctggcattcaacctaattttggggctttagattaa

SEQ ID NO: 441479 - DNA, 1086 bp, Serratia marcescens
atgatgaaacgatacctcattattgccgcgctgctggcggcgctcgccgtcgccgccgttgcgatgcgatccaccgcgcggcaaaacgaaggcgcgccggcctatccgccggtgaaagtggcgctggcgcccgccctgcgtgaacaggcggcgcgcagttacgccggcgtgggcgagctggaggcggccagccaggtggctgtggcggcggagaccagcggccgcatcacgcgcattctgttcgaatccggccaaacggtgcggcaggggcaactgctggtgcagctcaacgatgcggtcgagcaggctgagctggtgcgcctgcaggcgcaattgcgcaatgccgatctgctgttggcgcgcatgcgcaagctgatgaacctcaacgccaccgcgcggcaacagctggacgatgcgctggccgaacgggatatggcgctcggtgcggtgcaggaaacgcaggccaaaatcgcgcaaaaggcgatccgcgcgccgttcgccggcaccatcggcattcgccgcgtgcatgaagggcaatacctcaacgccgccgacgcggtggcgaacctggtggacgccgatacgctgcgcgtcaacttctcgctggacgaacaaagcagcgccgggctggcgctggggcaggcggtgtcggtgcaggttggggcgtatcccgatcgcgctttccctgccgccattaccgctatcgacccgatgatcggcaaatcccgcaccgtgcaggtgcaggcgacgttgaccaaccgccaggggttgctgaaggccggcatgtacgccggcattcgcgtcacgcagcagcagcgcgtggcggtgttgacggtgccggaaacggcgctgacctacacggcctacggcgataccgtgttcctggcgcagcagggtgaaaagggcatgacggtcaaacgcgtttcggtcgccgtgggtgagcgcaacgacgggcgcgtcgagatcgtcagcggcctgcaggaaggcgatcgggtggtgacctcgggccagctcaagctgagcgacggcatggcggccgagccggtggcgcaggatacgttgaacgccgcccaggctggttcttga

SEQ ID NO: 441480 - DNA, 522 bp, Serratia marcescens
atgcaagtggctattttttccgacgattactatttattttatgggatgtcgcagctcttgataccttttgagggtattgaggtcattaatctctattcacccgccggtggtagaatgcatgccgtttattgtcatgcggatatggttattgtttctttttcttctatctgccggattatgaattttttgtcgcatattatagacagacctgaccatgctatcgtgctgaccggtgtggaaacgccgcgcctgtcgaattttaattgcctaaaaaaaaacatcgggttggtcgcgttcacggaggccatcacgtcgtttgttgcaagcgccaaagggcagcgtctgtcgtcgagagagattgcggtattggccatgctgttggcgggaaaacccaatactcgtattgccaaagcattaggcatttccgagaaaaccgtcagccaacataaaatgaatgccatgcgtaagctggagattgaacgttttcatcagttcattttggctgcggatgagcgagtttaa

SEQ ID NO: 441481 - DNA, 543 bp, Serratia marcescens
atgttgaggatgaactgtatgacggaacaaatccagatcggtgttaaggtggaaaagtcgctaaaagataaggttgacgtaattcttcgcggtttggatattaaaccgacgacggcgataaatggactctatcaatatatttcgcaacacggtgaacttccttttgtcatatcaaccagtgtgaaaacaccgaaggacatcgccggaggtttgttcaaaaacctattctccttacagaacacacttcgcgtattttttgataaagtccaattaaaacaaagtataagtaggggggaggtgctgatcattctcgatatactgcacgatttcgtcgttggattccgccagaatgcgcaatatctaggtatttcgccatttggccagcgtgtcgtctggaaggatgccgtatgtgcggtagagggtattcatgaaattttagagaataatgtaaaatacagtgaagaaggtgttatgtatctggatgatttttatctttcatcgttgtccgggttgttgagctcattatgtacttctctgaagtaa

SEQ ID NO: 441482 - DNA, 240 bp, Serratia marcescens
atgaaccaaattgtaattagtttcgtctataatttgcgccaagtcaattcttcttggattcttttttttaacagaatatccgcttttattagttacctaactagccaaccgcagcagaaacatctgagagtgcaaaattctttgcagtcgcaatccatactttatccattcttatattatcccatcaatcgcctctccagcttgtttgactacaatgcatatttatttcgaaacatttaa

SEQ ID NO: 441483 - DNA, 681 bp, Serratia marcescens
ttgatttataccttaattatattgcctaactatgtttcacttgagataatactattgatatcaagaagcttgaaaatcgacggtaatttttcacacggcctaaaatatggaggtgtttctgtgaagaaaagaaaatatcttacacaaaatgaaatagatcgcttgcttgaggcatctcgtaaaggaagtttccctaagcgagatgagtgttttattcaaatgtgttttattcatggtttcagggttagtgagctctgccacttaaaattttcggatatcaatctcattgataaagtcgtgcacgtaaacaggctaaaaagcggcttaaaaacaacgcatccacttttggcttcagagataaagcttctaaaagcttggctagaggaaagagtaacatggcgtggctgcgaatcaccttggatatttctctcgcaaaaaggcggtcctctttctcgccaacaagtttataacatgatgaagaagttcggttccttggcaagtatcgccgtctctcttaatccacatatgttgaggcattcatgcggatatgctttggctaacagggggacagatacgcggctgatacaggactatttgggacatagaaacattcaacacacagtgttatatacctcgagcaatcatcgtcggtttgcagaggtttggcaaaaggaattgtag

SEQ ID NO: 441484 - DNA, 531 bp, Serratia marcescens
atgtttcatcagcctaattatgttgttgtggctatccactttctgtctgcggttctcagagtcttgttggtctggcctggcgttgtgctggctgttataggcttcatgttttttgtctcaacgctcggtgattccggcgggcagaaggctgcctcacgcatggccaacattgcgcaaaattaccgtgcagcccccgaggggatggttatggttaagccttgtccgtatccagatgcccctgacgtaaaaccgttgactgaatcgtcggcggtgccgattaaaaaacgggactgtaaaccttatccgcagtcgtttgcagaggttgctgcgaaggaacggcatctgattatcgtcatcgggagtgggttggtcgcattgggattgttggtcgaactgctttctttgctgatcaggcgccgccagatgagtcggaacgctgtttactacggatctatcaatgcaaaaggggagcgcagcatgctctttcaatatgacaaacccgcgaataataaggaaggtcgcaatgagtaa

SEQ ID NO: 441485 - DNA, 144 bp, Serratia marcescens
atgggcacgcaccagctcgaatatggtcataccggcatcggcatcggcatccagcagctgcagctgcagctgcagctgcgcgtgttcctcatcggaaagccgtacctgcagaatgcatttttcggtttcatgcggccaaactag

SEQ ID NO: 441486 - DNA, 147 bp, Serratia marcescens
atgctaaaccgcatcaacgccaacctgaacatgattgcccgctgtgtgaacacctggcgcatcagtgcgtcggcggtcgaggcagtcagtcacctgatggccatcgagcgcgccgtgttggaattgacgagggaaaacaaggagtag

SEQ ID NO: 441487 - DNA, 411 bp, Serratia marcescens
atgagaaaaatattggttttactgggactttctgtgttgctgctgtcgggctgtgtcgcttcagatggaccaaccaagagcagcccggagaagcatgccacgcgctatgcaaatggtgtagttaacgtattgcctgtgagtcgatctgatgtttacgagaatatacttcctttcctgacaagtatttatcacgagggtaaagaagatcgggttgagggaataccggagccacaggcaaaggagaaacgaaactcttactacagccccgatttttttaaagggtatgacaagcattatggtgatgtcggtattgatttggaaaataaagaaaaaggcattaattacaggctcaaagacttgcttgcccgtgaggcctcggcgacctactgggacggatacatggggcgttga

SEQ ID NO: 441488 - DNA, 1728 bp, Serratia marcescens
atggctaaatcaggattggcagacagtgacggccttgaatggaaaaaaatgcttgagcttgggtatgaatggaacggtgagtcgtggggctggccgacaacgggcgtcgatacgccgcccggcataggagatacggaaccagggatgactgtttggccttcagggagtactcccccaagcggttacaccaacctcaacggatatggcaccaactacgtcgccggacgtcctgactcattgggggttgcggccaatgccaaaaaggcagcgcagttcgaacaggatctaatattctttcagaacgtggaatccgacgcgtcacagaaactcgaggcagcgcgtcagcgcatgcgagtcctgagcgatgaggccagccgcttaaccggtgcgaataagctcaggaaggaagcagagcaggcagttgcctcggtggatgaaatggcgcaggaaattacgcttgatgaagccaaagccaacaaactgaatgccgactttgaagtctctttcgcccgctggcgggagaatccgcgtgatgttcgtctcgatggcgaccggcagaaacggctgatggacgagcgtgacgcactgcggaacggtattccggtgaaacagagtgaaaaagacctgcgcgtggcccgcctcaacaagctgatggcggacgttgcggcgctggatgcggggcaggatgtacgggaggtgaatgccgcgcgtgaactggaagacgttcgcaatcaggctaacgccctggagcaagagcggcagcgtctggagggggaggtcagcagcaaaaacgcccaagctgcccatgagcgagaagaagaagccaggaatctgacgctgaaggaaaaaattgttacgcctggcgatgcgttgagtctggagcaacgcaagtgggaagaagaccgatggaacgacgcgcagaggaacaaggcggaagccgaacggctctcgggagaagcggcagccagtcagggctcactggatgatgtgaatcgccggttgtgcgaagcacggagtcaggaaagtcagaaacagcaacagctgaacgatgttcaggcgcaaatcgcggcggaaaaggccgaagcggctcgacgtcaggaagagcaacgtcagcgtgaagaggctgcccgtaaagccaaggaagaagctgagaaattagctcgagaggcaaaagaaagggaggagaaagaaatacaagatgctgttaaatttactgcggatttttataaggaagttttcaaggtttacggagaaaaagctgaaaagcttgctaaattattagcagatcaggctaaaggaaaaaacgttcgcaatgtaaatgatgcgctgaaagcctatgataaatacaaggcaaacatcaacaaaaagatcaataaaaaagatcgcgaagccattgcaaaagctttggaatcggttgacgttaagcaagcggctaggaatataagtaaatttggtaaagggttaggctatactagccttgctatcgatgctgcagaatgggccggagctttaaaaaaggcaatagaaactgataactggcgcccattttttgtcaaaacagaagctattgctgcaggcatggccgcctctgcggttacgggttttgcgtttagtattatcctaggaggaccagtagggctattgggctatagtctaataatggcaggagttggtgcgttaatagatgatgatgcaatggaacaagtgaataaatttatcggcatttga

SEQ ID NO: 441489 - DNA, 336 bp, Serratia marcescens
atgaataagaaatactatatccgaaatatgccttttggatgctttatgtttttatgttttttttacttgtcttggggggatgagtttaattataaatatatattattgtcggtgagcactttaggattggtgttttatcctgtttcaaaatggatagtggaaagttttgtattgaccttcacgacaaaagaattttggagtagaggcttgtttatggatacgcctgggaaaatgggcgggctggcgatttactatgggaccgtttttttattatcaatgccaataataacgatatttgtttttgttatttttatgaaaaggctacttagcaagtaa

SEQ ID NO: 441490 - DNA, 276 bp, Serratia marcescens
atgctgacgtttactgaagcacaaaaccaattcatcggtctctttggccaaacggcacgctaccaacaccggtacaaggtcatttctggctttgttcagtgcagcgcgatagcaatacacaaccgcttttttccggacgacgtgctggagaagcagtacatgtggctcatcaaagggtatgaacgtgaggatgtcgaacgcctggcgcacttacttgctcttgtacaaatagcactggccgctaaaccttgtgattttttggcatggctttcatga

SEQ ID NO: 441491 - DNA, 738 bp, Serratia marcescens
  misc_feature (721)..(730): n is a, c, g, or t
atgacgatgataaagaaggtttacaataaaacatcggtgctgttcttatgtgttttatcttcatctgcggctttagcggaagagtactttgaaccatcagcattaaacagggattatcagacgactgctgacttatccaactttaatcatgcgagtcatcagttgcctggtgagtactgggttgatatttatttaaatagcacttttttcggcaaccagaaggtgacattttatcaaacagatggcattttgcagccacgccttcaccgcagagatctggacaattttggcgttcgtgccgatagactcaaaacacagagtgatgacgagatagcctctcgcccgctcaatgagatcattccaggaagtcaggtaacgtttaacttcaatcgtcaaagattagatatcagcattccgcaagcttatattgaaaaccaaccgcgtgattgggtaaatcctacgctttgggacgacggcatccgcgcctttctgatggactatagcttcagcggcaccgagtcatggcaacatgggaatgcaaaaaagggtgacaaccaatatttgaacctgcgcagcggcgcaaatttcggcgcctggcgattgagaaactacgctacctattcaagccagagcagcaccaagtggaaaagcatcaatacctatgccgaacgtagctttagagatagcaaaaaccagctggtgatgggcgacagctcgaccnnnnnnnnnngtctttga

SEQ ID NO: 441492 - DNA, 186 bp, Serratia marcescens
  misc_feature (129)..(138): n is a, c, g, or t
atgaacaagttcgtactgaatactttgctgttcgttggcgcacctttcgccatgtcaactattgctgctgctaacgctgcggatggaaccattaacttcaccggcaatgtcaccgaccagacctgtacnnnnnnnnnnctgtacggtagaaacaagcagcgccaaccaaaccattcctatgggtaa

SEQ ID NO: 441493 - DNA, 597 bp, Serratia marcescens
atgaaaagaatctttttatttgcgtttggatttactctagtattaggactgtatagtgaagcctttgctattgaaaggccaagggataaagtgaaagagtacttttccgatgcaaaaacaaagcacatagaaagacagctgtttgataactcatgcggcattgcgtcattggctttcgttctgaatagttactataacaaaagtacatcggagaaaaatctatttttctttattggcttaaagcctgagtattctttaggggatttgaagaaagccgccaacacatttaatatagaaacgattgggttgaaaatcaacctaaatgagttgaaaaaactaaaatcaccagccatcttaaaaaccagtacaaacggagggcatttcattgtgtatacgggatataaagatggatggtttcaagtagtagaccctgctaaaggcaggatgaactattttgaaaatgaactaggtaaaatatttaaaatcgaagggggtaattatggtggggcgttggtttttatctccaaggtaaaaaatagcttcgatgatacaattctctactctaactccacaaatagactctttttggaaaagtga

SEQ ID NO: 441494 - DNA, 585 bp, Serratia marcescens
atgcggctttctcaatcaattcatcaattattttatatattgtcgaatacgagattttcatttcttttgcgttttgttcagtacggtgcgatagcggtgcataaccgcttttgtccggacaaagagttggaacaacaatacatgacgatcataaaaggttatgtacgtgaggatgtcgaacgcctggcgcacttacttgctctggtacgaatagcactggccgctaaaccttgtgattttttgggcatggctttcatgaacctggagcttggtgataaacatcgcgggcacttttttacgccctggagtgtggcatccctgatggccaaactgcaatttaccggactggagcaacggttgttgactcaaccgttcgtgacgatcattgagcctgcgtgtggtgccggcgccatgatgatcgccgctgcggccgagattcaggcgttggggtatatgccttcacggcatgtgtgtgtttcctgcgttgatatcgatgtggtagcgatgtctatgccgtatatccagctgtcttcgcttggcattcctggagaagttgtgttgggtaaggggtttgacggtcaatga

SEQ ID NO: 441495 - DNA, 807 bp, Serratia marcescens
atgctggaaggccttctggagcagcagacagggctgaatccgttcgagattatgacggacacggccggggccagtgacattatttttggcctgttctggctgctgggatatcagttttctccgcggctggctgatgccggcgaagccgtattctggcggatcgacaaaaacgcccattacggcgcactggatgaactggcaagaggatgcgtggagttacccaggattgaaaaccactgggatgaaatgatgcgggcatacggttccctgaaactgggcaccatccacgcatcggagcttatccgttctctgctcagaagtacccgcccgtcagggctggcgcaggcgatcatggaggtcgggcgggtcaacaagacattgtacctgcttaattatttcgatgatgaggattatcgccgccgtattctgacgcaactgaaccggggagaaggccgtcatgctgtggccagggccatctgttacggtcagctcggcgaaatcagaaagcgctatcgtgaagggcaggaagaccagctgggcgcgctgggactggtcactaacgctgtagtgctgtggtgctgtggtgctgtggtgctgtggaactcactctacatgcaggaagcactttcgcatataagaacaaccacgggcgaaacaccggatgatgaacatattgcccggctgtcaccgctgatgcacgggcatatcaatatgctggggcattacacattcacgctgccggaggatattctgaagggagagtctcgccctttaaatattaatataaacaatgaattatcttcttaa

SEQ ID NO: 441496 - DNA, 2403 bp, Serratia marcescens
gtggccggaagtgaagcgctttcctttgttcgcaatccttatacatttttgggtgaagaggccgccagtgttattgcccctgaggaacacgaacaggcattgtttgatgccaggattttctttcatcatttcaggttgataccgcaactgagtgctgagaataagatcgcggaagttatgctgatacttgagcccgtttcacctgttccccagccagaaatcacttttgtgttctcagcgccctgggagctggaaaaattcatacagcaactcggtattagcgtcgctgcacagatgcctgccggttcatggcaaggctacgagctggaattaagtcagttcactgaacaacagtggctcgattgccaggcactactcactcgctggcagcaagaaattgaaggaaaagaatttagcgatgtgcttgatattgctaagtatggcgatcgggtgattggcattggtgagtttgaaaaaatctcttcaccctggctgaccaaagcgcagagtgaaaactggctgccagatgacatcgatttctcagcattttcaggcgaagtactgggtggttggcaacccgaaaatcttaaccatttaaacgaattacaggagagaattactcaggcagaagcagctggtgaaacgcatattgccgtaccatggaatgatagccaattaccgctggatacagccaaaaccttcagtaaaaactgggaaaaacaacagaacactgaaaatgatgctcaagacaacgttggtgataaagcggtccgagctgtactcaaaattgagcagaatattgaagaagctgcctacatcaaacagcgccgtgattcactccttagtgcgcgtcatgccgaacctgaaattcccctgagtctgaaagagcacatccgacttaaagaccaccagcgtgaaggtgtagcctggctccagcaactcttccttcgttctcctgaggaaaccgcaggttgtctgcttgcagatgatatggggctgggaaaaacgctgcaaattctgagcttcctggtatggttcattgaaaaattccctgatgaaccaccaagtctcatcgttgcccctgtctctcttttagataactgggagcgtgaactggacaatttcttctacccagctgggatttcggtgttgaaattgtatggtgacaccattaaggcggtgaaatatccgaaacagactattcctgcacatctgcagtctcagggaatcaaaaatctgctcaaacccggttggcagggtgagtcgaaaattattctgacaacctacgaaacgcttcgcgatcaggagttctcactggcgcgccaaccatggtctatcatggtgtgcgacgaagcacaaaaaataaagaaccctgctgcattaattactcatgccgccaacgcggtacaagctagatttaaagtggcatgtacaggaacgccagtcgaaaacacacttgtcgatctgtggagcttatttgattttgcccagccaggattgttaggggcgctaaatgaatttggtaaacactatgttcgtcctatcgaaaacgaagcgggccgggatacaggaaaacttgagagtttacgcgcgttgatcgagcctcagacgttgcgccgaactaaagaagaggttgcgcgtgatttaccacagaaaattgaagtggaaagctgcaagcaattgacgttgtatggcgcgcaaaaacagctctacctttcgtctgttgcaaactggcaacagcagcaggcactgagcgaagggatgcagcaggccggaaccggtatgttaggtttgttacaccggctgaaactcatttgcgcccaccctgcagtagtcaatccagagcaacgttttcgtgataactcacccaagcttaactggttgctgaaaatactctcagaaataaaaagcaccactaaagataaggttattatttttaccgagcttcgagacttacagcgcgaacttcaacatgcgatccatcaaaagtttggtttccgtcctgttattatcaatggtgacaccagcaccaaaagtcagagccagaacagccgtcagcgattgattgatgacttccaggcccaactaggctttggcgtgattattctctccacggtcgctgttggttttggggttaacgtacagaaagccaatcatgtcattcatttcactcgctgctggaacccagccaaagaagatcaggcaacggaccgggcgtaccgaattgggcaaactaaagatgtgtatgtttattacccgacggtaagggatactgaaataaccacatttgaagaaactctggatgaccttctgcagcgtcgacgtgcattggccagagatatgctctgcgctactcctgatttgagtggtgccgattttgaggtcgttttgaaaggggtatag

SEQ ID NO: 441497 - DNA, 540 bp, Serratia marcescens
atgctcaaaaccagactgggactctgcctgcttttcattgctcctctgtctatcgccggcaacaagtggaacgtcacgcttcctggaggacagatgcgctttcagggggagctcatcgctgaagcctgtacggttgaggcgggtgacaggcaactggttgttcgcatgggacaggttagcagtaaccgtttcaaggatgcaggggatgacgccgatccggtgccgttcagtttgcatctccaggattgtaatcccaatgtcagcgatcgcgtcggtatcgtctttcacggcgtagccgatggcaaaaaccctgatgttctgtcggttggcgaaggcgagggaattgcgtctggcgtcggcatcgccctgttcgatgaacaggggcaactcatacccattaattcagaacctcagtcttggaaaccgctgactaaaggaacgcgtatcttgcaatttgttgccaaatatcgggcaaccggcaatacggttatcggtggtactgcaaatgcccaggcttggttctctttgacataccaataa

SEQ ID NO: 441498 - DNA, 672 bp, Serratia marcescens
atgggttcactgctggctttggcagtcgtattttgtactccgcatgctgaagcgggcgtggctcttggggcaacacgcgttatttatccggcagaacagaaacaggtcactctgggtgtgagcaacaataatgataaagacacctttcttattcaatcctgggtcgagaacgatgatggtcaaaaagaaggccggttcgttataactccgccgctgttcctcatgcaggggaaaaaagaaaatacgctgcgtattattgatgcaaccaataacgccttgcctaaagaccgcgaaagtcttttctgggtcaacgtcaaagccattccctctctggacaaggcaaaacagaaagaaaatacgcttcaactggcgataacgagccgaatcaaattgttgtatcgcccacaaaatctcagtatggcgcctgatcaggcccccggaaaactgacgtttaaacgcgatgcgaacacactggtactgaataatccaacgccctattttctgaccgtcacggaattgaatgccggcacacgttctttagccaatgtcatggtcccgcctatgggggcggcaacggtgaaactgccgggcgatgccggcagtgcaattacatatcgcacgattaatgattacggtgcgctcacgtctgtgatgaaaggcaccttgcagtaa

SEQ ID NO: 441499 - DNA, 381 bp, Serratia marcescens
atgatgcagagccgaacggtctataactaccgcagctgccgcgatgataggtccctcacgcagcggatacgggagattgcagaaacccgcattcgttatggtgtgcagcggatccatatcctgctgcggcgcgagggctggctggttaaccacaagaaaactcatcggatttactgtctggacgggctgaatctgcggtcaaaacgcccgcggcggcacgtgaccgccaggctcaggcgtatccgcccggccgtgaccgctgtggatcagtgctggagcatggattttgttgctgataatctgttcaacggacgccggatccgtgtcctgactgtagtcgataattttagtcgtgaatgcgtggcgatcgaggtaggctag

SEQ ID NO: 441500 - DNA, 1209 bp, Serratia marcescens
gtggtgaaagctactatacgaagagaaaagtcgtggattaaaatcattgatttttataatgatatctttaccccacaggcgggggacctgatctccagacagttacttgcgggtgagagcaattcattttcgtcattagaaaaaatcgcacaaatccctgatagcagttggttgtggaaacgtattttcacggtgcttttagctcagctagacacacttgacgatccccagtttctggacaaaattagctggttgttaggtctggctgcgcagtgggtacgtttccgtgatgacatcatgagtgcgatcctgactcgttattaccattctatttatcgcgatcagtctcattcagctctgaaacaggccgcgctggaatactgggatagcccgcaactgaaaagccagcagaataaatggcaccagtacgtttctgaacccgtagcagccatggtgcgaggctggctggctaaacaagacctaatgcatttctttgaactgttgcgcggtaatggtgatgttgatcaggctcgattgcactactggttgcgttttgctaatcagatgggatttactcgtatcgtcatggggccggatgcctggcaagatcgtggtagcgattttgtgaaattccgcgaagagaataaagggcggttgagctatttacgaggcggacgcagcctcgataacgcaatgattatgcagatcaatgattatctgttcgtcgagttttccggaacaggcaatgcaatgtatgcctacaggataggacacgcgccatttaaccctgaatctcgtaccctggacatcaaccatctaaaagatcagatacgctgtgcgattcgcatgcctcatacgccacgagctgagggctataacaaggtccgtatcacgggttggatgctgaaatacgacgatgagttacgcaagttaggcattcggtggatggcggaggaacccgttaagtttgtcgataaaaatgcgtcctcccctgtttctctgtctgccatcaaaatcatcaatccgttgcgtgatacggctatacagcacttggttgatggtagctcatgtgtcgtcagcgataatagacaaaaaggtggcgtgctgtccgttcagctcagcatacctgatgacaccatagaaagagagttgttacgattaggctttgcgcctgtgactaaagaaccacatcgttactggatcaaataa

SEQ ID NO: 441501 - DNA, 198 bp, Serratia marcescens
atgctggctttgcttttgcaacatgatttgctcatgttgatattcaatctgctggcatttctcatcaatatgctgtttctgctcttcaataacgcggaaaatttcggctctaacgttattgtccagcttaacatgctccgtgatcaactcaccgatggttatccctttcatactggtcaactcgtcagctcctgctga

SEQ ID NO: 441502 - DNA, 195 bp, Serratia marcescens
atggaaaatgtcagtaacgtgctcgggaaagggtttgaagacttctctgaaggagtttcacgcagtctggataaaacgctgggcaaactggacgtcgaaatggcgaaggcctctactctactcgcgggttctgttgaacagatcggagaaagcgtcagcgagcttgatgatgtttggaaatgcatttggcgttaa

SEQ ID NO: 441503 - DNA, 594 bp, Serratia marcescens
atgacaaatctaaaacaagaggatgtttctattctcagagacgaaaaggaaagctttaaagagcgcttaaggactctaatcggggatagaagtgtaagggcagcggctagagactgggggttatcgttctcaacgctaaataactatctaacaaaggatactgaccctgctcttagcactgttcagcttattgcttataaggagcaggttagcctggattggctagtaaatggatcggtcaaggaggtaaagcagttaccttctaagacgatgccagataccaatacccaagctgtttggttctcgattttgaacgcgatggatgaaaaggatgcggcatcacttattaagctgattcatcgcaaaggtgtggagggcttactaaatgcagcgcaagagcctctagacgcagaggaagccatagataaacttcagattaggccaacactcaaacaggccatcaagatggcgctagcaggcgatgagtccactgaccaagagattttacgccgcctcggcctggctgagcatagcccctcgactggtgctgtaacagaagctaaccaggaacaaagtaagaagattgccgggtga

SEQ ID NO: 441504 - DNA, 156 bp, Serratia marcescens
atgcgtggcctctctgttgaggcgggtttaaaaccggatacgttgaaaaacgtgctttcacgcagctacccgaaaggcgagcaaatcatcgcgaaagcgttaggaacagagccagcacaaatctggcctagccgttatatccgtaaggcgtcgtga

SEQ ID NO: 441505 - DNA, 2049 bp, Serratia marcescens
atgttctttagtgtgaatgagttagtgggaatgccagggttaccaggcacggcgcaagggctgcgcatggcactcaagaaacgcgccggtaatgcgccagatttggtgcgcaagcgtgaaggcagtaaagcgtttgagtaccatatcgactgcctccccgctgatacccaagaggccgttcgccagcgtcactttaaatcggtgctggagcaaatcggctgtaagtctgtcggcctgccggtcaagcgtaattcagcggttaaaccgcgtgaagaactggagatcatgcgccagtgccccgcactggttgagcgcgaggtggccacgctgaccgacgaccagaagaaagtcgccgatgcccgtgccctgctggcgcaggaagtggagaaactgcgcgccgccggtatgtccagaatcgcggcggtgacattcatcgccgacggttcacgccagggaacgctgcccgcgcgggtcatggtggcggctggattggccaacgcccgcaaaggctccagccgtgttggcgtcagcaagagctgcctgcaggagtggctgaccatttatctgaccaccaagccaggcctggagcggttggcgttattggcacccggtcagcctaaacgcaagcgcccggaagacgtggtctggttttacggcatgttctggccgcactacagcaaccagaacggccccagcgtcaaagaggcttaccgttcgttcaagcgcgaatggttcgagacgtacagcgaccagcccgccatgctgatggcgctgccctcgtatgacgcggtgatccgtttggtggataagctgccattgcgggagcgtatgcgcgggcgagtgacggggtcggcggcaaaagcctttgaagtttatcagcagcgtgactggtcacaaatgccggttaacggttgctggatctcggatggtaagtcgctgaatctgaaagtggcgcatcctatccatggcagaccgttcacgccggagctgacgctggttattgatggtcggacacgttatatcgtcggctggagcgtttccctggcggagaacgccatcgcagtggccgatgcttaccggcacggcatgaagcaccacggcaagccgctgtttgtgtattccgataacggcggcggggaaaccaacaagatgctcgatgcggacattaccggtatttttccgcgtatgcacatcgagcacatgaccggtatccccggcaatccgcaggcgcgcggtatcatcgaacggctgaacggcgtaatgcctgaccgactggccaagcgtttcctgacctacaacggtatcggggctgatcctaacgccgtccgggttcgcgggcaacagatgctgagtctgtctaacgccttacgggatgggcgcgaactgaccgcgcagaacaaaaagacgttgaaaatactgccaacctggcggcaattgattgacgccgttcaggaggagatcgacgagtacaacaatagccacgagcacagcgaattaccgaaggttaacgggaaatggatgtcgccagcagcttaccgccagtgggtactggagcaggaaggtgacgacatcgaatacatgacggatggcgaattgcgcgaaatgtttatgccagaagttaaacgtgttgcgcagcgtggctggatagcgctggagaataaccaatatttctcgaaagaactgataaacgttgaccggcaggaagtccgggtagcctttgatattcatgatccgaatgaggtcattattcgacaattagatggcacctatgtttgtaccgccatctggaacggtaacaccgcctcgccggtgccggtggccaaagtccagaaagccctggaagaacgtgccaaacgtaagattaaactggctgagaccaaaattcaggatgcggaggacgaactgcgacccgctctggagcataaggccgacactgatttcagcaagttcattccggcggaatcagagccggagcgcataagcagcaaaccctacttattcgaatccgaatatgaagatgatttaaaaaagtacggtaatcaccgttaa

SEQ ID NO: 441506 - DNA, 924 bp, Serratia marcescens
atgaatgtaattgagaatttaaatcgcctgatggcgaggaagcgctacacccaaagcaaggtagccgcaaaaaccggattaagtgccgcgaccatttcccaatatttaaagggaacctataccggcaacattgataacgtcgaatccgctattaataactttatcacccgcgaggaagataaagagaaaagccgcgaggtaaaagcgacctttgttaaaacgcaattagccagcaaatgcctgaccttgctgcgcaatacgcaccttgatgccgatatcggcgtgatctacggcagcgccggtctgggcaaaagcatggcgctgcggcagtacgccaacagctataaagacgtgatcttgattgaggcagaccccggttataccaccaaggtgctgctgcaggagttgtgtgatcgcctgggcgtgaataaacgcggcaatatccacgaactcagcgagaactgcatcaccgcgttgcatgataccggctgggtggtactcattgacgaggccgagctgttgccttatcgcgctctggaagcgatgcgccgcattcatgaccgctcaggtgccggtgtcgttctggccgggatgccgcgtctgctgcttaacctcaagggccgccgtggcgaatatgctcagctttacagccgtgtaggcatggcgctcgatctggacaaggagaaagccaagcatgatcgcaccgatttcgaccgtattttggcgagcttattacccgccgatgatgatgaaagcaatatcgatacgcatccaggcttagccgacgccttctataaagcgtcaaaaggcaactaccgccgcttatttaaattggcacgcggcgtggtacgggccagcggcataggcgatcaaggcatatccgtcgcgctggttgaggaatattccagcatgttaatcagttga

SEQ ID NO: 441507 - DNA, 291 bp, Serratia marcescens
atgcaagccagtgattttgatagtaacgcgaatgcgtcattaatctctgcaatggtacgagctgagtccgtcattctgtctttatcggctcgcggtattacggtgcaaagcattatgtttcacggcggcaatccggttattcgcattaaccgtcatgcgtactgtgaacaactgacccgctcaggcaaagccagctacctgcattttggtaacggtcgccagggcgagtttaaacaaggtgttttcgttcaggacggatgccgggttatttggtctgaatcattacattga

SEQ ID NO: 441508 - DNA, 630 bp, Serratia marcescens
atgtccactaatatcactgagagcaccattccagcaggttactggaaagacgcgcgcggggttcttacccctgaaagcctggttaaaccggtagacaaggagcgtgatgccctggtcaaggccattattgaacgtgccaagccactgcagcaggcgctgcgcgattttaaacaggatacctttgctgatattcaggccttggttgacctgtcggcggagcagtacggggccaccattggcggcaagaaaggcaatgtcaccctatatagctatgatggccgcttcaaggttcagcgtgctatgcaagaccgtattgcctttgatgaacgtattcaggcggctaaagagctgattgatgcctgtgtggccgaatggacgaaggatgcccgcccggagctgctggccatcattgaccgggcgttctccaccgacaaagagggcgagattaaccccggccgggtgctgcaactccgccgccatgagattactgacccgcgttggctgcgtgccatggatgcgcttgccgaagctgtccaagtggtcagcagcaaaagctatattcgcctttatgagcgcgtcgatgatagcgaccaatatgtgccgatctctttggatatttccggggtttaa

SEQ ID NO: 441509 - DNA, 192 bp, Serratia marcescens
atgctagccaaacagtttaacgcctgttaccccgtagggcaggcgtttatttaccaaccctgcaaagcattgcgcggtggttcgattgttaaaacggtagatgttgcaagggatttaaaaacttccaccgttgtggaaattaatctggaaccttatttcgttaatacgaagtcattaacgcctgcgggttaa

SEQ ID NO: 441510 - DNA, 864 bp, Serratia marcescens
atgagcaacatcatgatcgatatcgaaaccttaggcaaaaaacgcggctgtcctgtgctctccatcgctgccgtacagtttgatctgcagaccggcaatgtgggcgagaccttctatgaacgaatgagctgtgatgctgctctctcctatggttggccggaaatcagcgccctgaaatggtgggagaagcaaagtgatgaagcacgtaatgccgcgtttaacggtgagcgtcaccccgtcagtgttgccgctgaactgcgagccttcttgcaacgcgcttgcggtggtcgatgcattccctggggcaatgggtcagtctttgatatcaccatcctggagggatggtttgacaaggttgatccgttggttgatgccaaaggggacgacatctacccctggaaattttgggacatcgccgacctacgcacgctggtgcgactgtcggggattaatgtcaaagctatcccattcgccggtgaaaagcacaatgcgttggccgatgccctgcatcaggtgaaaattgcgcatgctgcctatagcgcactaccttctccaaataggggggcgcagccggtggcatggcgtcacgatgatgggccgtttgctggcatggcgctcactcgctccaaaagtgttgccgagagctgggtagctaacggatggacggtcactcctttgtacgcctccccgccagcgccaacagtgccgaatgagattggtgctcaggaagccaaggaactattcaactatttgatgacagaagaagagattaacgcaacggtgaacggttataacgcctgccgcgccgcaatgctggcgcaggaacgtagcaacggggggcacgatggcaaaatcagcgactga

SEQ ID NO: 441511 - DNA, 267 bp, Serratia marcescens
atgctggagcggaaccgccagcgccgcaatccaggccgcgcgccatacagccgtaacgagtacctcagcctgctgatcttgtgtgacgatcagcggcttgatcggcaggagaccacactggggagctgccagcgttgcggtaaggcgctccccggcggctgcaacggcaattacagaggcgaagccgcctgctggtttacccgtgactgccttgcgatgaatttaaccaatgctgtgaccggtcacgccaacttgacgggggaatga

SEQ ID NO: 441512 - DNA, 618 bp, Serratia marcescens
atggcaatcgtcctgacaacgctggttaagcgcgtgcttcctggaatcatgtacagcctgtccctggctgttgtcgtgtggacaatccacaaccagggctacaacaccggctacggtaaggctgaactgcattatcaggaaaagcttagccgccaaaaatcagcctgggagacagagcgccgacaacttgccgagaaaaatcaggccgtactgcaggccgccctggccaaacaggcggagctggccgagcaggcgcgcttgttgagcctgagcctggaagcggcgcagcgccaactggccaccacccaacaacagcttaaaaagaggatcgcccatgtcgttcaaaccgatggccaacattttactggccttggccctgacagcctgcggctctaccgcgccgtccttggctaccccgacaccggtgcttcaggtgtgcccgacgccaccggcggcaatgctgagcattccaccgatgcccgcgccgccgggggaataagtcccggccccttgcttgaccatgcgaccgaatacggtgcctggtgcctgacgttacgcaacaaactggaagccttaaatgccttttacacctcagggagcgcacccaatgaccattga

SEQ ID NO: 441513 - DNA, 243 bp, Serratia marcescens
atgaccattgatatggcgttcaacatagctatcgggatcatcgcttttttgggcgggttatgggtgcgtaccctgcaggaagatattaaaggcgtgcgcggtgatttgatgaatatccggcaggactaccagcgccgcgaagatgcccagcgagatatgaacctcgccgtcggcatgatgcaggacattaaaaacagcgtacagcgcatagaaaacaaactcgaccgcaaggccgataaataa

SEQ ID NO: 441514 - DNA, 201 bp, Serratia marcescens
atggctaacaaactgattgagctgacggcggacactaccgtccgagctgacgagatcatcaaggtctgggtcagcaacaactccggggtgttcgttaagctgcgcgaaggcgctacccacacggttgatcggcagtacggcgaaaccccgttccagacgtcagcgcgtatcaaagcccagatagaggcggcgctggtatga

SEQ ID NO: 441515 - DNA, 648 bp, Serratia marcescens
atgattagcgaaaccgagctggccatgattgaacgcctgcgcgcgggactgggtgacatggtgaaagaggtgagcagctacggcggcgagctggacgacgtcggggccattgtccgggcgttaccggcagcatgggttacgttcctggggattcagagttccgccccggtcagtacccacaagaaccgctttcgcgtgacaggccgtttcgcagtgatggtcacggcgtacaacgtgcgccaggaagcggcacagcggcgcagtgggcctcggcttgacgaagtgggctgcaaccttatcgtccgttcggtgcgtcgcctgctgacccgccaggatatgggcttgccgattgatccgctgatgccgggccgggtgcgctcgctgttcagctcaaggctcaatgaaaaagcgatgtcggcctatgcctgcgagttcgacacggtctggattgaagaggcgctggagtgcggccactggcccgcaccggaaggcgacgaagaccccgaccgggtgtttgcctggtatcgcgggcggctcgacaagccgtatccaatgcatgagagcaccggactggcgtatcacctggatgtccaaggcccggcggtggcgcaagacattatttttacagaggcaaaagaccatgattaa

SEQ ID NO: 441516 - DNA, 381 bp, Serratia marcescens
atggactttacccacagcgccaccttgccgatcggcgtcttttatcaggggcagttgcaccgtgattttaccatccgcatgagcaccgtcggcgacgagatcgccgtggtggaagacggtatcccggagtccggcaccctggtcggcgtgatggcgcgctgcctcactaccctgggcagcattccggctaaggaaatcacctatcagctgttgtgtgatgcgctggtctccgaggactaccaggccctgcgcaccgcccagcaagaggcgaaaaaaaagctcagcgggctgaagagcgcctcggtgattaccgatacgccatcatccggctcggccaatacggctacagcgaagagcgagtcaaaggacttagcgctgtag

SEQ ID NO: 441517 - DNA, 2244 bp, Serratia marcescens
atggcccgtgaatttgatacccagataaaatttggggtaaaggatgaagcgacgccgcgcatccgttccctgtccgaagagttccgccgcatgagcagcgcccgcgagacgctgggcatccggtcggagcggaatattcagcgcgagatcaatcgcacgattgcctcctataaccgcctggagcgcagcggctcgttgtccgccgccgagcaatcccgcgcgtatgagaaaatgcagtccacggtggcgcgccttcgccaggaaatggcggctgtagaacgccagcagctgagcgcatcctccaacgaattccggcgcatgagcagcgcccgcgagacgctgggcatccggtctgagcgtaacattcagcgcgaaattgcccgcaccattgcctcctacaaccgcctggagcgcagcgggtcactgtctgccgccgaacaatcccgcgcgtttgaaaagatgcagaccacggtggccaagctgcgccaggaaatggccggggcggagcgtcagcagcgcagctggggaaaggcggcgtttgccatcggcagcggtatcgcggcgggcgcgatgacgctgcgcaagccgatcaatgaccaggccagctacagtatgcacctggccgagctgtccaacctcgccttcaacaaggaggatgtggccgggcgcatcgcgggcaagaaggtgttagacgccagcatccgcaaagcgctgcggctgggcggcggtacgccggagcaggcctttgccgcgctgcagtcgatgatccgctccggctcgatgaccgtgaccgaggcgcagcagtcgctgcccggcgtcatgatgaacgcctcggcgaccgcctctgatccggaagcggtggccaacctgcaggccagtgcctacaacttcggcctgtcgaaacaagatgcgctctccgcgctgagtgtgaccaccaccgccgcgcagcatggccgcgtcggcgtaccgctgctggccagggaaatgcccaaggcactggagtccgcgaaatcggccggttttaaaggccgtgcgggcttctctcaggtcgcggcgctgtttgaagcggcggccatcggtgccggtacgccggaggaagcggcgaccaacgtcactaacctgctggccgagctgacgtccagcaacctcagcaataacgccaagcacatcacgatcaagggtaaaggcgtcgattttaaagcgctctccgtgaaggatgcggccaaggggctgaccccgctcgacaccgtcaataacctggtcgataccgccctcaagtatgacaagacctatcaagggctgggtaagaagctggccaacaccaaagacgaaggcgcgcgcgcgtcgctggaggcgcagcgcgatctgattgaggggcagtacatttcgcagctgttcccgaaccagtattccaagaacgccttccaactctatcgccggcaaataccgtttttcaacaagctgcagcatgaacagatggagcagtttgatctgccggcagagaagcggtctgccgagctggacttcgacctgattaagcaggagccggagttccagatgcaccaggcgcagaacgagaagctgttcgccactaacgatgccatcgccccggtcgccaaaaccctgggcgacctggccgactatggctccaagctggcgcaagagttcccagggctgacgacggcggcagccggtgcaacggttgccattacggcgttgggtgcggcggcggcagtgaagtccggcgctgacttgttgatggggcgtggcggtggtgccacggcgggcaaggctggcgcaggcgtgctgggcaagatcaaggggcttttcggcaaaggtggcgcaggcgtcgcggaaggcgcggccactgccggtaaagcggcgggcatgttgaagtgggtgccgttcctgggcgaagccgcgatggcataccaggggtcacaggattttccattaataaaaattcagcgcggcaaagaccagatggcggaagcgttcggcaaggggggagagtctaaccctgaaatgatggcgctgatgcccaaacccgtcggggcgctggatgccctggacgagatccgcaagtggttctccggtagcgaccaggataagacggcagataaaggcgcagcagccgcacctgcgcccgccgcgccgaccgttaacctgacggtcacgctggatggccgcgagattgccaccgcaatggaacaacgactagaccgcgatgggagaagaaaataa

SEQ ID NO: 441518 - DNA, 1320 bp, Serratia marcescens
atggttgatatcgtgcatgacctggcgggcgcgctgggtatcgatacgttgctcccggcctcgttccggggcgttgagttcgactgtctctatacccgcgacaccctgtccagggacaccgtggcctatgagtacccctatcgcgacggggccgaagtagaagatcagggtatgaaggcgatgaattttcgcctgtcggcgctgttctggggcaaccgctatcaaaccgagctgaaagcctttttgaagacgctgaaagagtccgggccgggggagcttgtccacccggtctacggctctattcccagggtgcagtttttggaggcgggtgtcgagcatgaggtcgagccgctcaatgccgtcaccgttgagctggtctttatcgaagcgaccaccgagcaggcgctgtttgccacggtctacccggagaccagcaccgacagcctgctggacagtgtgaagaaagccttcagcgacaccatggggtggattaaacaggcgcaggatgcgatgggccgggtcagtaacatcattgcgtcggcggagtacgtggtgcaatcactggccaacgagatccaaagcaccatcggcagcgcgctgaactatctggactacccggcggcctttgtctccgacctgaaaaccctgctgtcggcctttaccgatcgcctggacttcaacgaggtgacacgcctgaccgactggcaggcggtacgcgccctgggcaagcaagtgatcacattgcaggacaaccgcttcaccgtctcgcaatcaacggacagtggcggtgtgtttgtgtcaacgctgcaccgcgccagcatcatgccccaggaagaccgagacctggtcaatcaggttgtccggttggcggtgataagcgagtgggtggaggttgccgccgacatcatgcaggcagaaagcgaaaccccgaccctgtccgcgacggatatcgagcgcatcaccaatgatgtccggtcactgattgtggaggccatccaggtgcagcgcagcatgatggccacgcgacagcagcaagcgcagcaggcgcttggcgtgacgcaggatatcagcaatgacgcagcgcagattgccgagctgcaggcgtttgcctacaccctgcagcagctcgccaggggcgttatcttgacgttgccgccgctggtacgtcgtgaggttaaacgcgcctgtaacctgcatctactggcgtttgaatggtatggcgatcgcctgcgtgccgccgagctggcgcggctcaacccgaccctacgtaatcccaataacctacagccgggagatgtgctttatgccttcgctaaatga

SEQ ID NO: 441519 - DNA, 1254 bp, Serratia marcescens
atgaaagaaattatttctccggtcgataccgaagacggtctgtttcatgatggcgacccatcaacaggcacagaaggcaccgtcgtgtccgccaaatggctgaacccggtacaaacggccattatcggcaaccaacaggaattggcctccgtattgaaagaggcgggaataaaaatcgacccatccaagcaagatcaattactggcggcaattaaaaaaatcaccggttcggcaacagaaggctttttaaaaattggtgattacggtcttggtggtgggcctaaacataaggctgacgcctacaataatgttggtgaaatttatcgggtgaatacagcttcaaaaaacaacccgactaatggcgttgctggtgtgattagcctgccatgcgatggtggcccttcgacagcctatgttactgtcaacaattcaggtgcagcgtgggtaggttcctcgaacacgccagagaatggcattaaatggttccgggtttatacctctgtcaatagacctacacctgctgaactcaatgtgtatagtaaatcagagtcagatgggcgttttgcatttaagtcgattactgtaaacgggaagcctttatcttcgaacgttaacttaaccgctagtgatgtcaacgcatggaacaaaacagaggcagatgggcgtttcatttccaaggctggcgacactattaatgggacgctaaaaaacagtaaggaatttcaatcaactggcattgataattttagaatggctaatagcgatattggcacattctggaggaatgacggcaatcgtttatatctactgttaacgaataaaggtgatccatcaggcacatttaacgaccttcgtccgtttacggttgatttggtttccggtactccctcatttggttcaggcattcatattgatgggaaatggcctgctatcaccacatcaacagggacaacgtggcaccctgatggaaacgtgcaaggtgcactatggggcggatacctcagtaactggttgaatagcaatatttcaaacgcacaaaatggtgcccagaattgggcatatcaaaacctagttcaaaatgtgcggctaagcggaagaattaatcaacctgataccggagggcaagtcagagtgcctgatggctgtgtttttactggtgtatcaggggctaactatgacccatcaatctgggcgtcatattcttatattcaagtcttgattaatgggacttggcgaaacattgggacttcatga

SEQ ID NO: 441520 - DNA, 552 bp, Serratia marcescens
atggttgattttaaaaacttcaccttatataaacctgaatttcaaaatggcgaagaagatgcgccggaatatcgccctgatgtcctttacgcacgggatgaaaacggacgagactggtacgattgccaggaggagtttagtaacgacacgcttaaggtaatgtatgatagcaaggggattatcgtctgcatttccaaagatgtgactgctattttccctccaggcttctcagtggctgaagttgaatcccgtaatacgccgtcagaagtttgtaacgatatgacgtgggtatatagtgagggcaaggtaattaagcgtatctacagcgttgatgataagcgcaagatgctgcagggcgagaaagagcggcgcatcacacgcgttaaccaagctacgcaaacccttaatagcaagttgctattgggtatggctaccgatgcggagaaagctaaattgcgggtatggatggactatgttaatgagatcgagaagatcagcaacgacgcagaccctgacaaaatcgtgtggccaacggtgccaaaggcacaatga

SEQ ID NO: 441521 - DNA, 741 bp, Serratia marcescens
atgccagttcaaaaagaagaaattggaaatgcggtattgtactgcggggatagcctggaattgctgcgagctggattcactgctgatgcattaatcaccgatccaccttatagcagtggcggaattaatgctggggcacgtcgttccactccacaggataagtacataggcactcatggccgccaatacgccaatttttacggtgataatcgcgacgcaagaagctggtctttatggatgacattgtggttagggcaaaccatgaggacgttgaatgatggggcttatgtgatgctattcacggattggcgacaactccccgccacaacggatgcgctccaggccggtggttatatctggcgtggcgtcgtaccttggaacaagaccgcctcaagccgagcgccgcatacaggttatttccggcatcaatgtgaatatgtggtgtggggtagcaaaggcaacctcgagaagtccttacacggaggcccttggcctggtcttgtcactcaacgcgtgatacccaaggaaaagctgcatatgacggccaagcctctgagcctaatgcaggagctggttgagcctgttatccccggagggactattcttgatccgtttatgggcagcggtacaactggggtcgctgcagtaacgtcaggacggcgctttattggcgttgaaatgagtaacttctatttcgacgttgcctgtaagcgcatcgaagaagcccagcagcaaatttaa

SEQ ID NO: 441522 - DNA, 723 bp, Serratia marcescens
atgcaattcgctcacgccgggacgcccgcgcgtaaaaaatcgaagtggtggcaaagcgacgcgctgaaatggctggtggtcggcctgttcagcctggtgacctgctacctgattgtgttgatgtatgcacagggtgaatacctgttcgccatcctgacgctgatcctggtcagcgccgggctttacgtcttcgccaaccgccgcgcctacgcctggcgctatgtgtatcccggcgtcgccggcatggggctgttcgtcctgttcccgctgatttgcaccatcgccatcgctttcaccaactacagcagcaccaaccagctgacttttgaacgcgcgcaatcggtgctgatgcagcgccagttccagagcggccaaacctttacctttggcctctacccggcggaaaaccagcagtggcgcctgcagctgacgccaccggacagtgaacagccgctgatctccgagcctttccgcctcgacgccgccgcgccgcaaaccctgaaactgacggcgcagaacgccgcgccgcagggcgaacgcgccacgctgcgggtgattacccagaaccggcaggcgctgagccagctggtggcgcaactgcccgacggcggggaattgcgcatgagctccctgcgccagttctccggcacccgcccgctgtatgcgctggacaaagacggcagcacgctgaccaacaaccagacccaggtacgctacctgtag

SEQ ID NO: 441523 - DNA, 213 bp, Serratia marcescens
atgtcgtcaatgcctatcgctactcagcccaccctgtaccggatccatccggccagtttccgtgacggaaacggggacggcgtgggcgacgcgcacggcatgctggcggcgctgccgtatctgaaagcgctgtcgatcgacggcctgttgctgccgcagacgctggcgccgggggccgacgggcgaagggctgacgctgtggtacggcgatga

SEQ ID NO: 441524 - DNA, 336 bp, Serratia marcescens
atgaaattagaaacgttcaattttccggcgcggattggcaccaccggtgatatagagccggtggtgagaacgacacaattcggagacggttatgcgcagagcaccggcgacggtatcaacgctgagaaggaaagctggccgcttgtgtttctcggcgcctgggatgagataaagcccatcgttcagtttctccgcgaacacaaaggataccgttcctttaaatggaaaaacccgatgtttgagcttggtctctatcaggctggtaaattcagcgtgcaggccagcggcgcttactattccctttccgttacgtttacccgagcctaccacccatag

SEQ ID NO: 441525 - DNA, 753 bp, Serratia marcescens
atgtcgattatcaccgatcaccagcgccttgagcctgggagtaaagtgcgcctgttcgtcgtggacggcacaaaatttaacgggccagagctgtatttccacagccatacaattccccattctgaagatgaactggaagctgccggtgatgaccccggtaagctgctggcgaagtctatttggtggcaggggcaggaatacaagccgtggcctgtgaagatagaagggcttgaggtgaccagcgacggttcagcgccaagccctacactgaccgtcagtaatatcgacggcacgatcgcgtcactttgcctgtactaccagaacatggccaaggcaaaggtgacgatccgggacacctacgcgcattatcttgatgcccgtaattttcccgagggtaacccggaagccgatccttctcaggaagatatcgacgtttggtatatcgatcacaagctgaacggcaacaacaaagaaattcagtttgcgctttcctcacctgctgaccttgaagggctaatgatcccgacgcggcaaatccacggactctgcacctggtgcatgcgaggtcagtatcgcggtgcgtcgtgtgggtacactggcaacaaatattttgatgctgacggcaatccgaccgatgacccgtctaaggatgaatgctctggcctgctctctacggggtgcgagccgcgttgggggaaaggtaatccgctgccgttcggcgggtttccaggctccgcattgctcaagaggtaa

SEQ ID NO: 441526 - DNA, 717 bp, Serratia marcescens
atgcgaaagcacattatcaatgcgatcatggcacacgctgaagcagagtatccacgggaatgctgtgggctggtggtgcagaacggcaggcgacagcgttatgtgccgtgccgtaatttggcccccgagccaacggaacaattctgcatggcacctgaggactacgccgaggcagaggatagcggcgatattgtcgctatcgttcatagccacccggatgcaacgacgcaaccaagccaccttgaccttgctcaatgtgacttgtcacagctgccgtggattatcgccagctggccggagggcgatattcggcaggtgatgcccacgaatggcataaaaccgctgttgggccgcccattcgtgcatgggttctgggactgttacgcaatagtgcgagactggtatgcactggagcgcaatatctcactccccaattttgaacgggatgatggctggtgggagcggggtgaaaacctttacatgaaacattacggcgaggccgggtttgtacctgcatccggtgaaatgcaggtcggcgacgtaatcattatgcaggtgcgcgctgatgaaccgaatcacgcggcggtttacctgggggatggtgtaatgacccaccatatgtacggacacttgagccagcgcgtgccgtatggcggttactggctggcgcggacgatcatcactctgcggtacgatggtaatctgctatcatcttga

SEQ ID NO: 441527 - DNA, 600 bp, Serratia marcescens
atgaataaagtaactcacgaatataggactgtacgtttatatggtgttctgggggcaaagtttggtcgcatacatcgtttagtgatcgacacccccagagaggcatttaaggctctgtctgtgactattccgggcttcgagcggttcttgcaaacagcaaagaatagaggtctgacatttgctgtgtttaatgggaaaaagaatattggtctggatgaaattaaatttactggccgtgacgatatcagaattgcgccaatccttataggaagtaaaaaggctggagtattccagactatcttaggtgcagtgattgtcgccgcatcggctattggctactactttgcgccaggaaacccttactcaacttatggtttccaaataggtggtgccatgatgttggggggtgttgtccaaatgctttcacccatgcaaaacggattagcccgaagggaagatccggacaataaacccagctacgcattcggcgggccagttaataccattgctcaaggaaaccccgttccaatcggctacggcaagcgccgaatcggtggggcaattatttccgctggtatctacgccgaagatcaacagtaa

SEQ ID NO: 441528 - DNA, 195 bp, Serratia marcescens
atgaaagagttacctatctctgcagctgttaaaatggcgctgtccaattataaatcgattctgctgttaaccggtagcgcgctctgtctggcggcccctgcgacgtcttgggcggagggggttgccgatagcaaaaagccggcagcaccggttgaagcgacttttaacagcagcttcctgattggggaagcgtag

SEQ ID NO: 441529 - DNA, 537 bp, Serratia marcescens
  misc_feature (455)..(464): n is a, c, g, or t
atggcagttcgaaagcaatcatccggtaagtggttatgtgagtgttaccctgctggccgagaaggtcgcagggtacgtaagcagttcgcaaccaaaggtgaagccttggcatttgagcgcttcactatggaacaggtggacaataagccgtggttaggtgaggcaattgaccgccgcaagctgagcgatatcgccaaactttggtacaacctacacggacaatccctcaccgctggtgaacgtacctacaaaaaactatgccttgtcatcgaagccctaggcgatcctcctgctaccaccttcaccgcaaaagacttcgcgcattatcgtgataagcgtctgtccggtgaaatctacttttcagagaagtggaaaaacggcgcagaacctgtgaccgtcaatcttgagcaaagctacctaagcggcatgtttagcgagttggcacggctaggcgnnnnnnnnnngaatggaaccagcccaatccgttggaaaacatgcgcaagtttaccgttgcagaaaaggaaatggcgtggctga

SEQ ID NO: 441530 - DNA, 246 bp, Serratia marcescens
atggccgcgcttgagaacaccagcattcaattgcccaaaggtcaactaacgcatgtgctacgccatacctttgcggcgcactttatgatgtctggcggcaacattctggtgttgcaacgcatcctcggccatcatgatatcaaaatgactatgcgttatgctcaccttgcaccggagcacctcgaaacagccctgcaattcaatccgctggcgactatgccaggtggcgacaaagtggcggcatag

SEQ ID NO: 441531 - DNA, 207 bp, Serratia marcescens
atgagcttgcaatgtaaaacttgcggtgaagatgtttcggacctcgattttgagcaggccgacatcaagagataccgcgatggcacctggtgtgtggaccttatcctgacctgcccgcattgcgggcagacctataacgcctttgtccctaccagtgagcttcagccgctacatcgcgatgattactcggaggggatatgtctatag

SEQ ID NO: 441532 - DNA, 240 bp, Serratia marcescens
atgggtgagaaagtaaaaataaatattacagcgtccgcaacagtacgctacagcaaaatagtagaaatggaaaatgacgattacgaagcttatctggaaatttgtcgcacgcagaataacgggagggatttagacagggatattgaggaaatagcgtttaagtatggatttgagccgtccattgataacatcgaagatgctgatgacccggaggatatcgagtttgaggtggttaaataa

SEQ ID NO: 441533 - DNA, 198 bp, Serratia marcescens
atgcaagtcaagaccccagaccaagtcaaacagcagtttcgccagaacggttggactttcacacagtgggcaaccgaaaacggttactcacccactgatgtttaccgtgtcctcaatgggttaacaaaagccaaatacggtaaaggtcacgatattgccgtcaagttagggttgaaaacccctaatacaaccgtctga

SEQ ID NO: 441534 - DNA, 843 bp, Serratia marcescens
atggatacgggatttcctacagtatttactgcagcagctaccgggcttcttgcacttattggtttagttcaggcgactgtgctcatagggcaaagacgtcaacaacgtcttgactgggttgaggtttatcgcaagcgctggggggagattacagatgactgggcaaaaaccgtttacataggaagcccccatggatcttattatcaagtaggtgaccatgaacacatagaaagacttgatgccgcaattatggaaatcaaaggcaactatagaacaatgtggtcattgaatgcggcgcgaaatgtctgtgtaattcttagtgatgcctgtcagcgtataatgcaaggtcaactgtacattcaagagatttatccggtttttggaacggaattccttcgccacagtatcgcattaagaaccattcttgaggctaactatttcaaaaatagtgatttttattgtactaacttacaagtgagtcacgatgcactgagaagagatctccaagattggtttatctatcatgatggcatcagacgaagatgcttaatttttattgatttactctgggctgaagctgcacgacttgaggatttaccttcaattgatcttgtcagcgcagcttctgcaaagcaaagaactggcaatctaaacaggaagcggttaaaaaaagaaattatccgcttaaatggattgtgcgcattgtttagagctttgcgcctagccagatttttacgtcattctgagtatcaacgtttgcctttcactatagggcttaataaaaagcgccttaactcttttgataaaaaattgacaaaacacattacgcgagactactcctaa

SEQ ID NO: 441535 - DNA, 552 bp, Serratia marcescens
atgggccgtaaatcgaccattcacaagttgccgaccgacgtccgggcacacattgagcgccgtctgcgtgaagaccagctgacgctggatgagctgctggatgatattcgccaacacttccctgatgcggacgaaaccccgagccgcagcgcactgggccgctataagcaatcgttcggcgagatggtcggccgcatgcgcgagcaggaccagatggcgcgcctgctggtgagcgagctgggtgagaacccggacgaacgtgccggggcgctgatggttcaggctgtcacgacgctcacctctcacgccacatttgctgcactggaacagccggagacggatatcgataccgtgcgccacctggcgcgggcagcgaaagacgttctgcaggcgcgtaaggagtcgctgcaggagcgccagcaaatcgaacgtgccgcgcgcgaacgtctgctgcaggagcaggaggccaatctggagaaagtcgcaaccgcacaaggtttgagcgaagaccaggtgcagttctggcgtgaaaaattcctggggatcaagtga

SEQ ID NO: 441536 - DNA, 804 bp, Serratia marcescens
atgaatgaaacgtactattatggtcagggtaaagtttatttagcgcgtagagatgaaagtggtcatcccggtgcatggcgatgggtgggtgatgtatcagcactcgaaatcacgttatcgtctgaatataaagtgaagaaaatatctcgagcaggaaaactggtttctgtacagaattttatgttttctcattcagggaagttgttatcaacgtggcatagtttttcgccagaaaacctggctattcttctgagttcagtttgcgtcaaaaacacgccagctatcgttgccaatgagtcattacctgctggcatccaagccggagaccgtgtgtcgctagcccatcagaatgtgtgggacgttgatatttctggattgaaagccggagttgagtttgtcgtcgatgcagtttggggggctattgagttcattcgtacaccaggcaatcagccgttgaatgctagttattgttatgcaaacagtgtcagcatccctatttttacatcagctaaaaatgaatttgcgtttcgatatgaaggccagaacctagctgaggacaaaagaaaaacgttagttgaactatatagagtggcgttcgaacctgtgacgtcgttcccgttgattaataatgactcatcgatagcgaaattagaaaccagtgctgaggtcatgtatgacattaatcgtgcagctgatagcaagttgggtcagtttggaaaggtagttttgattgaggaattgaacggtatcactcatgacggttcgatttatcataatggtatctacacccacgggggaaaataa

SEQ ID NO: 441537 - DNA, 1254 bp, Serratia marcescens
atgacatttgaaaataacaaaacgcttcaggattatctccctgaagaaattgaagtgattgatacggcctttgccatcgttgatgagaaggataaatatccgctcagaattaaaaatgacggtacggttgatattcaaaaattggcaatcaacgaagacaagaccgtgctttcggatggtcgcacgcttgctgatgccttatcgcaaggtggtgaagaatcgaaaggtcatttcgatattcaactcgtttcgggagcgctctatgcccgtgacctgaatacacaaaagcgctatctcattaaagacagcggcgtcacgtctgccgagattgaaggcgaacacgtcgtgttcaaagtgggtagtgatgatttttatgctgcgctgcctgacggcaaggtgttcaagcgcttcccgtctatgcgactgagctgcatcggtgactcgctgaccaatggctacatcaatggcgttgatacggatgcgtacccgttcaagctgggtgcattgctcaatatcccggtggaaaagcggggttggtctggccgagccagtggtgatatcgccctgcgcatgggggctaccgtggttaagttgacggtcatcggcaataccattccggccagtggtgccgtggtggtcacactggttgacccggcaacgggataccgctccggcatgttggacaattatcccgaaggcaccctggcaggcgtcaccggcatgctgtcccgcagtgaaagtaacgtctggacgtttacccgtaaaacggcgggcagtgccgttccgtgccccccaggcagcgaatacctgcataacggctacccaacggccaatgacggcatggtcatcacctggatgggccgcaataactacgagtccatgttcgcggaagtgatgcgcgaccaacagcaattcacccagtggatcaccacgctgaacaaacagcaaatcgtgattggcatcaccaacaccgccaacgagccacgtggcagcgccaactatgacgccatcctgcgcgttaacagcgagctggccgccgcctacccggggcgctatttcgacgccatgcgctatctgattgaccacggactgagcgatgccggtattacgccaacagcgcaggatttgacggatatcagcaaggacattatcccgtcctcgctgcgtatcgataacacacactttaacgcggtgggctatcagctgattgccaaccagctttatcaactgatccaacaactggggtggaaataa

SEQ ID NO: 441538 - DNA, 912 bp, Serratia marcescens
atgtccaaaggtttaaaaattgtgctgccgatgacgtttactgacagcagtctgcctgtgctgagtaacgatgccattttgtcaaaaggctcgctgctgctcattgacccgactcacccgctggaaacctggccgaccggcgtgccagcggataatgtcgcgctgccgaacattgcggctgagtttgccagtaagctgattagcggcaacattgggccgacactggtgacggctgccgggatgagcgggggctttgagcgcaccactaagggcggtcttcatgcacgggtcggcgctacccagaccgcccagagcgggctgaatatggtcgcacccacctcaattattgagtacatggtggcgaaccagtcgcatgagttctacgtttcgatgtggtcgtatgtgacaacaccaggaacggtgacctctaccgccgaggtacaggggcaaatccaccgcgcctacaactacggcggcgcagcgtacccgcgtggtggtgtattctcgctagggtcaatcagttcccgcatcgagccaaaagacagcaaccgctcgggtttcttcgctgataacctcaatgcgattggctcgcggctgatggctgttgccgggacacctaacgcagcgtcctctgccgcagatccaaccatgaaggcgtcggactatacagatgcacagttccggacgttggtgtcgatggggccggcgaacgccgaatcgaaatactctgcggttgaccaggcgaagcgcctgcaaagctgggtactgtaccgcctgtacattgaagacttgacggtatcaggccgcacctttgacgccgtgtccgagattgacaaacagctctataacaaagagctgaaatcgtccggcggccgatactatggcgatacctggacggctgatccagcctaa

SEQ ID NO: 441539 - DNA, 597 bp, Serratia marcescens
atgacaggtgtaactctgcagaccggaacagtcagcgctgtcgatgctgatggagtgaaagcccgcgtccggttgccggagtgcgacaatatgcgcaccaactggcttgacgttctgcagcgcaatacccagaacaacaaagactactggctcccggatgtgggggaacaggtcaaagtgctgctggacgaaaatggtgaggatggcgttattctcggcgcagtctattcagacgtcgataaaccaccgttcagcgacaagaacgttcgcggcgcaatattcagcgacggggccgagttcagctataaccgcgcttcgcacacgctcactatcctggggggtatcgaacacatggttatcgaatgcagcgctgacgtgacggtgaaaactcagaaagccacgatagatgccgctgagaccgaaatcaccggcaaccttctggtcggaggtaaactgacctatgaaggcggcatggcaggctctggcggtgaaggtgctgccgcgacaattcagggcaatgtcgagattaaagggaacgcccactcaaccggtagcatgctgtcagacggcgataactccaaccaccactcccactga

SEQ ID NO: 441540 - DNA, 909 bp, Serratia marcescens
atgggacgtacaaaatcacaatcagttgaattagttgaagatgcgccattaagtggcgaccttgatatcagcctcaatgctatgtccgaacatcgcctcgaaatcatgcagcagttcggtgatggtctgccgtatgaacgtgatcgtattgttcatgagacacggttttacatggctcagagcgctgaggccatgctggaggcgggtaagaggcttgtaattcttaaagagaatgaaccacatggtgatttcatcgagatcgtaacgggacaattgggattacccaaaagtacagcgcatcgaatgatgcaagcgtcgttgaagtatttatcaccatcccttgagtcaaaagtcccagcgctgggacttttgggtaaaacaaaactttttgagttgatgaccgaagatgatgaagaccttgccgaattagccgatggcggcacgattgccggtatgagccttgatgatattgatcgcatgaccagccgcgaattgaaggcagcactgcgcgaggctcgcgaaactaactcagcacaacagcgtgttctcgctgacaagaatgagaagattgacgcgctatccaccaaactggagaaaaaatcccgtatccagccgcccaagcctgacgaagaggtgaagaaactgcgggctgaagtaacagcattatccaccgaagcggaatcagccatcaccgttcgccttttcagcgcgtttgaaactctgtgcgcatattgcgcagaaaatcagattgatacgcccaaagattttatggcagggcttgtttgtgagctggaatatgccgcccgcagccttcgttcgacctttgaccttccagataccccgacaggcaacgctgctccagcctggctgactgagccagaacctgagattaaccggcaggaggcgtaa

SEQ ID NO: 441541 - DNA, 1038 bp, Serratia marcescens
atgagcagcgcccactccttatcaccaggaatttcatttttcacccgcaataagcgccgtatgcacaaatacggcattatcatcgcctttttcgccctgtgcctgatcgtggcgctgattggcgaatatcaggtcgctcagggggcctggagcagcaattattttctcagcaatgaaaacaccctgatcgtcctgcgccaggtctcgatcaacggcattctggcgatcggcatgaccttcgtcatcattacggccggcgtcgatctctccgtgggctcggtgctggcgctaagcgggatcgtcgccgcccgtttcgccaccaacaacagcggattagctatcggcgacaccgcgaccgccgtcatggcgccgctgattgtggcgctgggcatcggcatcgtttgcggcctggtgaacggcaccgtgttagcccgttatcggctgcagccgtttatcgtcaccatgggcatgctctccgcggcgcgcgggttaaccatgttgaccaccaacggcaatccagtatcgcaattgaacagcgatttccgctggttaggcaatggctatgtcggcggcgttccggtgcccgtcatcatcttcatcgtgctgttcgccctcgcctggctggtgctgaataaaaccctcttcgggcgttacatctacgccgtcggcggcaacccgaaaagcgcgcgcacctcggggattaacgtcacccgcatcaaaatactggtgtatacgctgtgcggcgcactggccggcatcgccggcctgatcctcaccgcacgcaccggttcggcgcagaccaacgccggcgcagggtatgagctggacgccatcgcggcggtggtgatcggtggcaccagcatggccggcggcgtcggtacgctggtcggcaccttcttcggcgtgctaattatcggggtgatgaataacggcctcgatctgctcggcgtgcaatcgtattaccaacaaattatcaaaggcgcattgatcgttcttgccgtattgctcgacccatcgcgtaagcaacagcgcgattaa

SEQ ID NO: 441542 - DNA, 579 bp, Serratia marcescens
atgacggccatcaattctcctcctctatgtcgcgatgggaggatttttacagatttcgctatgtgtaaccgcttttccaaaaaccttggtttaggggaaggctctgctttaccggttggcgttcccattccgtggccgtcagcgacaccaccaacagggtggctcaaatgcaatggggctgcgtttaccgcctccaagtacccgaagctggcacttgcctatccggcactcagactgcctgatttacgcggggagtttatccgtggctgggatgatgggcgcggggttgatgtaggacgtagtctgctgtcagcccaaaatcatgatctggggcctcatgttcaccgctatggtttctggactgcacgactgaatgattcgtcattagcggattttgcgggtacgactattttaaaacaaattactccagccacaccggtcattgactttgataactaccccttaccagcttctatgattacagaaggcggtgttgtaagtgcgtccactcagccgatgagcagcattgaaacacgcccccgtaacgtttcatttaactatattgtgagggccgcataa

SEQ ID NO: 441543 - DNA, 609 bp, Serratia marcescens
atgacgcatgctgagctggataaagaccagatcgctactacgcctggtactatcttcgtctacaactacgatggtgagacacgcgaatatctgtcttcatcagtggagtatttagctatgggggttgggattcctgccaattcctgcattgatgaaccaggcgaaaaaaaggagggttttgccatttgtcggacggctgattttaccgcgtgggaatatgtagccgatcatcgtggtgaaacagtttatagcaccaaaactggtgaagcgctttttgtctctttacctggtaactacccaaaagaaaccacgacgctggcacctgccacgccatacgatacgtggaacggtagcgagtgggttacgaataccgacgagcaacacactgcaggcgtagaggctgcagaacagcaaaaatcagctttcttagccgaagcgcaggcaactatcagcctgtggcaaacggagctgcagttaggcattatcagcgatgaagataaggccagcctgatactctggctgacctacataaaggaattgcagacggtcgttcctgacgctgcaccaggtatcaaatggcctacgcctccggttgaacaggccagttaa

SEQ ID NO: 441544 - DNA, 600 bp, Serratia marcescens
atggttaaagctgaattaaatcaggacatgatcgccactgtggccggggaaatcaccgtctataacttcgatggtgagacgcgtgaatatctgtcttcatccgttgagtatctcgccgtaggcgtgggtcttcctgcaaattcctgcactgatgcgccggggaacagtaaaaccgactttgccatttgtcgtacagcagactttgcatcatgggaatatatcactgaccacagaggccaaaccgtttatagcacagagacaatgcaacaggttgaagttatgacactgggagattatccggaaggtacaacgcctgatgcccctgcatcaccgtatgataaatgggacggagagaaatgggtcacggattctgacgcaaaatatcaaggtgatattgctgttgcagaacaacaccgacaagcacttctcgctcaggtggatgaattaacctccgactggcgggtggagttgatgcttagtgatatcagcgaagaaaacaaaaagaaactatcgtcgtggatggcttataaaacggcggttaaagccgtcgatgtttcgacggctcctgatattaactggcctgttcaaccggaggcgtag

SEQ ID NO: 441545 - DNA, 687 bp, Serratia marcescens
gtgaaaacactggctgaaagatttaaatttgcgcgcgaaagagctggcctaagccaagatgttttggctgtaaaagtgggcgttacccagcagtcgatagcgaaaattgagaatggtattactttgcaacctagaaaaatcaaagagttgtcattagcacttaatgtttctcaacaatggctacagcttggaattgaggaaaatgctgagctttctaactatgttgttcaagaatctgagagtgctgttctagaccctgatctttttgtccaggtgcctatacttgatatcgagctttcggcaggcaacggagctgaagctgaacttatagagtcttgtacagatacatttcctcttcgcagagatgatttgcgcagggcaggagtaaatgcatgtaatgtaaggattgtaaagatatggggtaacagtttgctgccagtgcttactaatggcgactatgtagctgtcgatacgacccacaagcaatctattcgcgatggcgacctatatgcaattcgtgacggggtattattacgggttaaaacgctggttggattgccagatggtggcttaatattgcgaagttttaataaagatgagtaccctgatgagatactcacctatagcgaacgacgagctagagtccatgtaattggcagagtcttttggtcatctcgttcatggtaa

SEQ ID NO: 441546 - DNA, 882 bp, Serratia marcescens
atggaagacaagctttacgtttttaactacacacagaacagagataagcttttcgctaatttaatcagcatcatagatggaatagttgctgacggtattgttaaagatgaagaaatactttacttggatacctggcttctcgaggctgaacaaataatacgtaatggtgttatcaaaagcctttcagcacgagtagctgctatcctcgcggatggagttgtcaccagtgaagagcgtgaggagctaaaacatcagctttatggtatccagaaagaaatacttgatataccggatgttgatttttactcggtggagtcagacctacatctattaaatgggctatgtaaaggtttaattagcgatagagatctaggtgagcacgagatcaaatacttagattggtggctaacacagaatggtgccttaaaaaacaattaccctggccgtgagctttacgccctcgtcaaagatattctgagcgatggtgtgattacacctgaagaaagcgcaaccttgcacaaggctcttgtagattttactgggtgtgatcttgaaagtggtgtggtggatggtttagcgacacgcctgccagtagatactgatttttcgcctgagattgatggtaaagttttttgcctcaccggggtgttcatggcaggcaaaaggtcgattgtagaagaacgtgtaaaagctgctggtggccatgtcataggaaacattacgaaaaaattagactacctggttatcggaacgctatcctcacgtgactggaaattttccagccacggtagaaaaattgaaaaagctataagttaccgggatgaggaaggtgcaaagttgaaaattatttcagaggaaaatttattcgatctcttaccatga

SEQ ID NO: 441547 - DNA, 561 bp, Serratia marcescens; identical to SEQ ID NO: 5006

SEQ ID NO: 441548 - DNA, 312 bp, Serratia marcescens
atgaacaagaaaaccaaacgaaccttcccccctgagttcaggctggaatgtgcacagctgattgttgataagggctactcatatcgacaggccagtgaagcgatgaatgtcggttcaaccacgcttgagagctgggtacgccagctcaggcgagagcgccaggggattacgccctctgccacacccattactccagaccagcaacgtatccgcgagctggaaaagcaggttcgccgtctggaggaacaaaatacaatattaaaaaaggctaccgcgctcttaatgtccgactcgctgaacggttcacgatag

SEQ ID NO: 441549 - DNA, 597 bp, Serratia marcescens
atgaatcctgattacttcggtggccgttcgctggccgataccctgtcaacactggtacatgaaatggtgcatgtgtggcagcattacgccccggttaaaaaatgccggggcggctatcatgatcgtgtatggggcgcgaagatggaggaagtcgggcttatgccatcaaataccggcttacctggcgggaaaaagaacgggcagcagatgacgcactacattatccgtggtggccgctttcagaaagccgtgtatgacctgcttaaaaatggcttctctatctcctggtatgaccgctggtctgacggagcaattgttacctcaaagattaacagcgatatcctcgatgactggctggccgtcaccgatgaaaacgatactgaccttattaatcggctatcactgaccgtcagcaaatcccgcccggaactcattccagacgatgacgatctcagcgtcatgatcaaaccgccagtaaagggtactggcacccgcatgaaatttacctgcccggaatgtgggctgaacgcatgggcgaaaccctccgctgtattgctttgcggtgagtgtcggtgtgagcttatggcgacagaataa

SEQ ID NO: 441550 - DNA, 474 bp, Serratia marcescens
atgaaatgccgatctcgtttgcttgtgtttctgcccctgcttttccccgccctttgcctggctgatttttctggccgtgttgttcgggtcgtcgatggtgatactgtccaggtactcgccgatggcaaaatgatgaaagttcgccttaacggtatcgatgccccggaatcggggcaaccgttcggccagcgctcgaagcaaaacttgttaaagctggccgtccagaaacagacggaggtcatagccaacaatacagatcgttatggccgctggctgggaacattgatgattggcggtatcaatatcaacgcagagcaggttaaagcgggtatggcgtgggcttaccgctatcatggccgtgccaacgacgaaacaatgctacgccttgaagaagaagccagacgccatagaatcgggctgtggtcgtcacctgatccagtggagccgtggaagtggcgcaaacagaataaatag

SEQ ID NO: 441551 - DNA, 462 bp, Serratia marcescens
atgttggccatccttgacgatctggatttaagagactggcaaaccatacataaccttgaaacgttggccgaacgcgccgggctggcgacgcgcagtgatgcgggtcacaagtcgatttctcgtgccagccggggatgtgatcgcctctcctggcttaatgccatcatctcggaaaaagcccctttcaacccttatgacgcccgttgcgcctgcaagcacattgaggttacagaggatttcttcgccattctcggcatcccgctaaaacaggtttaccgggaacgcgccaggctgcttaaggccaacccggaagaaatcatatcctccggggatgtccggttaatcgctatcaaggttgagaactggacgcgtaaggccgctgccgggttagccaggatgaaagcgaagcgtgaagtggctcgccagcgcaaacaggaatactactccctaacctttgcctga

SEQ ID NO: 441552 - DNA, 603 bp, Serratia marcescens
atgaccgacacgcgccgcgagcaggagaaagacgaacgccggaagctgcaagagcagtcgcgccagaatgaagcggaaaccatgcgcctgctggctttcgaggcaggccgccaattggccgaaattccgaaagaagccaaaggcaatgaacccttgcttgagaactacaagagcggactacaagagacccgcaaagagctagaaaccacgccagacgccactaagagcaccaacgccaaccggcttgagcgcgacgtagaaagggccatcatcgaggcgcaacaggtgcgcgaggcagtaggcagggagaaagcccgcgcagatgaatttcaccgccacgcagaaccgggcgaaacttaccggggccgtgtgatcggtcgcaccaatagctatgtcattcaggccgacgatagccgcccaggcacgatcattctgcatgaacgcgccgctgtttcgggcgcggagaaagtgaagatgaacgaccatgcggaaatcagttatccgcacggtcgcgccggaatcgtccgcaacccacaggccgcgcaacatcaacgacagcggcagatggaaaaaaccggcgcaggccgagagcatgggcgctaa

SEQ ID NO: 441553 - DNA, 525 bp, Serratia marcescens
atgaaaagcgcccttgccgcccttcgcgcggtcgcggccgctgtcgtcctaatcgtcagtgtgcccgcttgggccgacttccggggtgaagtcgtccgaatccttgacggtgacactatcgacgttttggtgaaccgtcagaccatccgcgtgagattggccgatattgacgcaccggaaagcggccaagccttcggctcccgtgctcgccaacggctcgccgacttgacctttcgccaagaggttcaagtgaccgaaaaagaggttgatcggtatggccgcactcttggggtcgtttacgcgccgttgcaataccccggcggccaaacacaactcaccaacatcaatgcgatcatggttcaagaaggcatggcctgggcttaccgttattacggcaaaccaaccgacgcgcagatgtacgagtatgaaaaagaggcccgccgccaacggctcggcctttggtcagacccgaatgctcaggagccttggaaatggcgtcgcgcctcgaaaaatgccacgaactga

SEQ ID NO: 441554 - DNA, 630 bp, Serratia marcescens
atggcaatcactaaacaagacatttggcgagcagccgacgaactggacgccgaaggcatccggcccactttggccgccgtgcgcaagaaactcggaagcggtagcttcacaaccatttccgatgcaatggctgaatggaaaaaccgcaagaccgccaccctgccctcatcagacccattgccggttgcagtcaacgagcatcttgccgagcttggcaatgcgctatgggctatcgccctggcgcacgccaacgcccggtttgacgaagatcggaaacagatcgaggccgacaaagcggccatcagccagcagcttgccgaagcaatcgaactagccgacaccttcacccgcgaaaacgaccagctccgcgaacgagtgaatcagctcgaacctatggaacgcgagcgcgacaagctggccgaccagcttgccgaagtgaaacgccgcagcggcgaagaactaaaccgctgcatggaaaagctcacccaacgcgataacgaggctatcgaggcccgcaaacaggccaaggaggccatcgagcgcgccgccagtctgcaaggtcaggtggaagccctcaaagagcaggtcgccaatctcacagccgtcttgaaaacaggaggcaaacaatga

SEQ ID NO: 441555 - DNA, 972 bp, Serratia marcescens
atgcctaagaacaacaaagcccccggccatcgtatcaacgagatcatcaagacgagcctcgcgctcgaaatggaggatgcccgcgaagctggcttagtcggctacatggcccgttgccttgtgcaagcgaccatgccccacaccgaccccaagaccagctactttgagcgcaccaatggcatcgtcaccttgtcgatcatgggcaagccgagcatcggcctgccctacggttctatgccgcgcaccttgcttgcttggatatgcaccgaggccgtgcgaacgaaagaccccgtgttgaaccttggccggtcgcaatcggaatttctacaaaggctcggaatgcacaccgatggccgttacacggccacccttcgcaatcaggcgcaacgcctgttttcatccatgatttcgcttgccggcgagcaaggcaatgacttcggcattgagaacgtcgtcattgccaagcgcgcttttctattctggaatcccaagcggccagaagatcgggcgctatgggatagcaccctcaccctcacaggcgatttcttcgaggaagtcacccgctcaccggttcctatccgaatcgactacctgcatgccttgcggcagtctccgcttgcgatggacatttacacgtggctgacctatcgcgtgttcctgttgcgggccaagggccgccccttcgtgcaaatcccttgggtcgccctgcaagcgcaattcggctcatcctatggcagccgcgcacgcaactcgcccgaactggacgataaggcccgagagcgggcagagcgggcagcactcgccagcttcaaatacaacttcaaaaagcgcctacgcgaagtgttgattgtctatcccgaggcaagcgactgcatcgaagatgacggcgaatgcctgcgcatcaaatccacacgcctgcatgtcacccgcgcacccggcaagggcgctcgcatcggcccccctccgacttga

SEQ ID NO: 441556 - DNA, 657 bp, Serratia marcescens; identical to SEQ ID NO: 362999

SEQ ID NO: 441557 - DNA, 288 bp, Serratia marcescens
gtgaatgacctcaagaacatgagcgccgacgagctgcgtgcacagcgtgcccagatcgacgcagaactcaagaaacgagaggccaaagagaggcaggaagcccgcaagaaaattctcgaaattgccaacacgcatggaataaacatcgccgagcttgcgagcaaggaacgtcagtatcgtaatcctgacgaccaatgggaaacatggaacggacgcgggcgcaagcccaaatgggtcaaagaatggctcgccaaggggcactcgctcgaagaactggaagtatcatga

SEQ ID NO: 441558 - DNA, 594 bp, Serratia marcescens
gtgaaccgaaaaatgaccgtcgtttcagcctctcttgtaggtgcattgtcacttttcagtcaaactgcaaaggctgatgactggggttgtcaggttctattgtgcctgtcagacccgcgtgggccaaccacggaaagcgaatgcaaaccgccaatccataagctgtgggatcacttgcgaaagggcaagccgttcccgagctgcgctatggcgaccaactcgcgcactggaaaacgcagttatgcgcagttggtatatgacccctatgacccgtgcccggacggcacgaagccagcagggggatatatcgcgcaatctcaatcggccgaccgtaaagactggcgtcggctccaatatgccttctccacgcatggccgtcgctacgatagcggcggggcatggaatatgtacgaaggtaatgggccacgtgcctgcgtcggcaatcaccttggcagctattcggtctatcggggcaatgacgacagcaacatctcggtacaagtctatgaccaagttgtgtggcaacagccacaaaacccacgagctatcgacgttttcatagacgaagcattccatcatcgggtgcggtactga

SEQ ID NO: 441559 - DNA, 699 bp, Serratia marcescens
atggcactggcagagttcgcggtgatcgctgccatgtgcgcgcccgctatccatccgacaacgctttcggcggttgtgacgcaagaatctcggggcaatatctacgccatcgggattaacggcgatcacaaattgccgcgtcagccgcaaacgcttgaagaagccattgcgaccgccgaacagctccgccgtgatgggtacaacttcgatgcgggcctcggtcagatcaacatcaaaaatctggaatggctcggcatgtctatcgccgacctgttcgacccgtgcaagaacctgaaaggggcgcaaaccgtattgctcgactgctacgaaagggcagtgccgcgatacggcgacggccagggcgcattgcaggcggctttgagctgctacaacacgggcaatttccagcgcggattctccaatggctatgtgcagaaagtggcttctcatgttggcgtaacggtgcctgcgcttgagccggtatctggtgggacacaagaaccggccaagctgcaagcggtgcccaagggtgcggcgcgtttagctccggcacaaacgaagccacgggaagggcttgcagatgccttctctcatgaggcgagcggtgtacgtgacgcatttaatgcaagcgacgccttttcggagaatgaagaagaagaaaaggaggtgaaggcaactgccgccgttgatcaaaattga

SEQ ID NO: 441560 - DNA, 306 bp, Serratia marcescens
atgaagaacctgaactacctccgggcgaaagctaacggaaagctggccgcgatttttggagcaatagcggccatgctcaccgctcaaccggcggcggctcaaggattggaaaaggcgaggagcgtcctcgaaacattgcagcaggaacttacgacgattgtgcccattgcggccgctgtcatcctgctctgcctcggcatcgcatacgcgggccgattcatcgaaaaggatacgtttgtgcggtggtctatcggcgtcatcattgccggttccgccgtccagattacggccatgctgtttacctaa

SEQ ID NO: 441561 - DNA, 315 bp, Serratia marcescens
atgaagccgccacagcagcagcacgaagcgttccccctgttcaagggggcaacgcgacttccaacgatttggggcgtgccgatgattccgctaatggcaatggtcatgggcgtggccgtcatagcgttgacggtcagcatctggtggtgggcgcttgtgccgccgctgtggttcatcatggcccaaatcacgaagaacgacgacaaggcgttccgtatctggtggttgtggattgataccaagttccgcaaccgcaacaagggcttttggggcgcatcgtcgtatagccccgctaactaccgaaaaaggagatag

SEQ ID NO: 441562 - DNA, 2472 bp, Serratia marcescens
atgggggcaattgaatcccgcaagctcctggcttcggagacgccggtaggccagttcattccatactcgcaccacgttactgacacgatcatttccacgaaaaacgcggaatacctgtcggtttggaagattgacggccgttcccatcaaagcgcctcggaggctgatgttttccagtggattcgggagctgaacaatacactgcgcggtatttcctcggcgaacctgtcgctatggacgcacatcgtgcgccgccgcgtctatgagtaccccgatgccgagtttgacaacgtgttttgccgtcaactcgatgagaaataccgggagagcttcaccggctataacctgatggtgaatgacctctatctgacggttgtttaccggcctgtgtccgacaaggtgttgtcgttctttgccaagcgggagcgcgaaacgcccgaccaaaagaagcatcggcaagagtcctgcatcaaggcattggaggacataaaccgtaccttgggccagtcattcaaacggtacggggccgagctgcttagtgtctatgaaaagggcggccatgccttttcagcgccgctagaatttctggcccgcttggtcaatggcgagcatatccccatgccgatttgccgcgaccgtttttcggattacatggccgtgaatcggcccatgttctcgaagtggggcgaagtaggggagctgcgttcccttaccggcctgcgccgcttcgggatgctggaaatccgcgagtacgacgacgcgaccgaacccggccaactcaatgtattgctggaaagtgattacgaatttgtgctgacgcatagtttctcggttctgtcgcggcctgccgcgaaggaatatttgcagcggcaccaaaagaacctgattgatgcccgtgatgtggcaaccgatcagattgaggaaattgacgaagccctgaaccagctcatcagtgggcatttcgtcatgggcgagcatcattgcaccctgacggtttacggtgagacggtgcagcaagtgcgcgataacttggcgcacgcgagcgctgccatgcttgatgtggctgtgctgcccaagccggtcgatctggctttggaagcgggatattgggcgcaactgcctgctaactggcaatggcggccgcgtccagctccgatcacgtcgcttaacttcctgtcgttttcgcccttccataatttcatgtcgggcaagccgactggaaacccttgggggcctgcggtcacgattctcaagaccgtgagcggaacgccgctctacttcaacttccacgcctccaaggaagaagaagatgcgaccgataagcgcctgctcggtaacaccatgctcatcgggcaatcaagctccggtaaaacggtgctgctcggcttcctgctggcccaagcgcaaaaattcaagccgacgattgttgcctttgacaaagatcgcggcatggaaatctcgatcagggcaatgggtggccggtatctgccgcttaaaaccggcgagccaagcgggttcaacccgtttcagctcccgccgacgcacgcaaacctgattttcctcaaacagttcgtgaagaagctcgcggctgccggtggcgaggtcacgcaccgggacgaggaagaaatcgaccaggccattacggcaatgatgagtgacagtatcgacaagtcgctacggcgcttgtcgttgctgctgcaattcctgcctaacccgcgctcggacgacatggacgctcgcccgaccgtccatgcgcgattggtgaagtggtgcgagggtggcgattatggctggctgttcgacaacccgactgatgccctcgatctatcaacgcaccaaatttacgggttcgacattaccgagttcttggacaaccccgaagcgcgtacaccggtcatgatgtacctgctgtatcgcacggaaagcatgatcgacggtcgccggttcatgtacgtgtttgacgagttctggaagcccttgcaggacgagtatttcgaggatttggcaaagaacaagcaaaagaccatccgtaagcaaaacggcatctttgtattcgccacgcaggagccgagcgacgccttggaaagcaacattgccaagacgctcattcagcaatgcgcgacctacattttcctcgctaaccccaaggcggattacgaggattacacgcaaggtttcaagctgactgactcggaatttgagcttgttcggggccttggtgagttcagccgccggttcctgataaagcagggcgaccaatcggcgcttgccgaaatgaatctcggtaagttccgcacgattgtcgatggtgagacggtcgagcgtgactttgatgatgagctgcttgtgctgtcgggcacgccagacaatgccgaaattgccgaaagcattattgccgaagtcggagacgacccggcggtgtggttgccgatcttcctagaccgtgtgaaagccgaaaggagcgacgtatga

SEQ ID NO: 441563 - DNA, 690 bp, Serratia marcescens
atgaagaagctggttatgacggcggcggtggccgccattcttggggcggcaagccctgtaatggcccagggtattcctgttttcgacggcacgcgggcactagattttgtccaacagtttgcccgcatgaaagaacagctcgacacggccaaagatcagctcgccgaagcgcagcgcatgtatgaggccgtcacgggtggccgtggtcttggggatttgatgcgcaatgcgcaactccgcgaatatctgccggatgatttgcgcactgtctatgactcggccaatggtggcgggtattcgggcatttctggctcgatcaatgacattctgcgggatgagcgccttaacggctccgtggccgatatgcgccgctctatcgaggaacgtagccgcacggcggcggcaaccgacaaggccgttggcctgcgggcctacgaaggggcacagcaacgcctcgcgcagattgaagggctgatggatgaaattagccgtacccaagaccaaaaggccattgaagaattgcaagcccgtatcgcgggcgagcaagccgctatccagaacgaaacgacgaagctgcaaatgatcgcgcaactgcggcaagcagaacaggcgttgatttcggagcaacgacgcgagcgcaacatgcgcatcctgagtagtggaaaccaaggaatgccgactatccaatga

SEQ ID NO: 441564 - DNA, 231 bp, Serratia marcescens
atgaaaaagatactcgtacccctgttgatggtgtcggctctgtccgcttgcaaggacgagccgacgcatgacgttcaatactatctcgacaaccccaaggaacgcaccgagaaaattgccgagtgcaagaacaatcccggtgaaaaagcccttgcagcaaactgcgtgaacgcaaccgaagcgcagcgcaaggccatgttccaaggcgacgggatgccaaaaatccggtag

SEQ ID NO: 441565 - DNA, 1029 bp, Serratia marcescens
gtggccttcgagctgttcacaccgcttttcaacaagattgaccagacaacggcaacgtatgtcacggacatttcctcgcgggcaatcgctgctatcacgccggttgtttcggtgggtttgacccttggcttcattacctatggctggctcattattcggggcgcggtggaaatgccggtggcggaatttctcaaccgctgcctacgaataggcatcatcgtgtcaattgccctggccggtggtttgtatcaaggcgaaatcgctaatgccattaccacggtgccggatgagctggcttcggccctgctcggaaatccgacacaaggggcgtcggcggccgcgttggttgaccagtcggcgcaacaagggtttgaccgggcaagcgaggcgtttgaggaagcggggttcttcagctctgacggcctgctctatggattgttcggcatcatcattctgctggctacgggcctgctggccgcgataggcggcgcgtttttgcttcttgcgaagattgcccttgctctgctggcagggcttgggccgctgtttatcctcgccctgatctggcagccgacgcaccgctttttcgatcaatgggcacaacaggttttgaactatggcctgctgattgtgctctttgcggctgtgttcgggctgctgatgcagatattcgggagttacatggccgatctgcggtttgatggcgcgcaaaacgtcgcctacgcgattggcggctccgtcatcctctcgattgtctccatcgtgctgctgatgcaattgccaagcattgccagcgggttagccggtggcattggccttggctatatgtgggaattgcgctcgatgcgcagcggtgcgggtgccgctatgcgtggtggccgcgctatggcccgtggggcaagagctgcgcccggtgcagcacgtggcgcggcggttggtgccgccaatatggcgaaaaccgttgctaccggcggcgccggtgtagcacgggcagccgccggttacttccggggacgcaaagcagggtag

SEQ ID NO: 441566 - DNA, 696 bp, Serratia marcescens
atgagcaagaagcaaccaaaaccggtcaaggcagaacagctcaaaagctactatgaggaaagccgtggcttggaacgggatttgattggcgagttcgtcaaatcgcgcaagaccgcttggcgggtggcaacggcgagcggccttttcggcctgcttggcatggtgtgtggaattgtcgggttctcccaaccggctcccgcgcccttggtgcttcgggtggataacgccacgggtgccgtcgatgtggtgacgacgctgcgcgagcatgagtccagctatggcgaagtggtcgatacgtactggctcaatcagtacgtgctcaatcgcgaagcctacgactacaacacaatccaaatgaactatgacacgacggcgctattgagcgccccggcggttcagcaggattactacaagctctttgacggctcgaatgcgcgtgatcgggtcttggggaacaaagcccgcattaccgttcgggtgcgctccatccaacctaatggccgcggccaagcgacggtgcgctttacgacgcaacagcacaacagcaatggcacggtcgaagctccgcaacatcagatagcgacgattggctatacctacatcggtgcgccgatgcgttcatctgatcggttgcttaaccctcttggtttccaggtcacaagctatcgcgctgacccggaaatactcaataactga

SEQ ID NO: 441567 - DNA, 801 bp, Serratia marcescens
atgaagaaactagctatcgttgcattgctggcctcgcttcatgcggtgcccgctttggccctcgatgtgccgtccagctcgcgttacgaccatcggattcgatacgtgacgtacaacccggctgatgtggtgcaggtcgataccgttcttggtgtcgcaacacacatcatgcttgaggaaggtgagcaatatctgacgcatgcctttggcgattccgaagcctatgcctttgcccggaaggggcggcatatttttatcaagccgcaggccgagctagccaataccaacctcatcgtcgtgactgaccgacgcagctacaaattccgtttgcaaatgcggaatgaccgcaatggggccatgtatgagctggctttccgttatcccgatacgcaggcccggcaaactcgggaagcgaacgcacgggccgctgtcgaggctgcattcgagcaacgtgtaggggcctattacaacctcaaatacatgatgagcggcgacaaggacattgcgccggtcaacgcttgggatgatgggcgtttcacctacttcaagttctctgccaatgccgatttgccgtcgatctactttgtggatgcggaaggcaatgaaagccttgtgccgcgcactacggttggctcgtccaacaacatcattgccgttcacaaggtcaatcccaagtggatgattcgacttggtaaccgcgccttggcgatcttcaatgaagcgtatgaccccaatggtgtgccgaatgacactggcacagcctccccggcggttcgtcgcgtcaacaaaggaggcaactaa

SEQ ID NO: 441568 - DNA, 1188 bp, Serratia marcescens
atgttcggtcgcaagaaaggagacgtaatcgacgcgggcgcggaactggaacgcgccgagcaggaacgtatcgagggcgaatatggcgcttccgagctggcttcggaacgtcgcccgcatactcccggtgctcgcacgctgcttatggtgctgctgtgcgtgattgccgtggtgctggtgacgctctcatacaaggcgtacaaagtgcgcggggttgtcgaggatgacgacgcgcagccgcaacaggtcgtgcgccaagtcattccgggttatacgccgcgtccaatccgacccgagccggaaaacgtacctgaaccgccgcaaccgactacatcggttccagcgattcagcccgcgccggtaacgcagccagtgcgcccgcaaccgaccggcccgcgtgaaaaaacgccctatgagctggcccgcgaacgcatgttgcgctctggcctgacggcgggcagcggtggcggtgaggatcttcctcggccgcaaggcggcgatgtgcctgccggtggtctgatgggtggcggtggtggcggcggtgagctggccgaaaagctgcaaccgatgcgcctttcgggttcaagtgctggccgccttggcaaccgtgacatgctgataacgcagggaacgcagctcgattgcgtgcttgaaacgcgccttgtgacgacgcaacccggcatgactacctgccatctgacgcgggacgtttactcgaccagtggccgcgtagtgctgcttgatcgtggctctaaagtcgtcgggttctatcaaggcgggctgcggcaaggccaagcgcgaatctttgtgcagtggtcgcggattgaaacgccctccggtgtcgtcatcaacctagattctcccggtactggcccgcttggcgaagctggtttgggtggctggattgatcggcatttttgggagcgtttcggcggtgccatcatgattagcttgatcggtgatttgggcgattgggcaagccgtcaaggcagtcgccaaggcgataactctatccagttttccaacactgcgaacggggtggaatcggctgctgcggaagctctgcgcaactcgatcaacattccgcccactctgtataaaaaccaaggcgagcgggtgaatatcctcgtcgcccgtgatctggatttcagcgatgtctacagtctcgaaagcatccccactaagtag

SEQ ID NO: 441569 - DNA, 1077 bp, Serratia marcescens
atgtctacagtctcgaaagcatccccactaagtagcgggaaccgcgtcgggaaagatcaggccgtggcgcaactcctgcgcccgcttgatcggtttctcgatgcgccggaggttacggaactgtccatttgccgccctggagaggtttggacaaaaacctttgaaggctggcaggtgcatgaggtgccggagcttaccgaacccttcttgcaggcgcttatcacggccatcatcgtttataacggggtggctccaaaaagcgtcaactatgttgtacttcccggcgggcagcgtggaacgatcgcgcaagcgcccgccgtgattgacggcacgctgtctttcctcatccgcaaacactcccttgtcgtcaagacactggaagaactcgatgcggaaggcgcgttcgatacctttaccgatgtgagctttaacaagccctcggccgaagaagcgaaccactatctgacggtgcaggacttcacgcgattggagccgttcgaggttgagctattgaagctcaagcgcgacggcactatccgcgaatttctcgaaaagtgcgtgctctacaagcgcaacatcatcatcgcgggcaagaccggctcgggcaaaaccacgtttgcccggtcgttgattgaaaaagtgccgcccgaggaacgcatcatcacgattgaagatgtgcacgagcttttcttgccgaaccatccgaaccgggttcacatgctctatggctacggtgcgggccgggtgtcggccgacgagtgcttggccgcgtgtatgcgccagtcacccgaccgcatctttctggccgagctgcgcggcaatgaggcttgggaatacctcaattcactgaacaccgggcatcccggctcgatcacgacgacgcacgcgaacaatgctttgcagacattcgagcggtgcgccacactcatcaagaaatccgatgtgggccgtcagctcgaaatggaaatgataaagctggtgctctacacgacaattgacgttgtgctgttcttcaaagatcggaagctggtcgaagtgttctatgacccgatcttttccaagtccaagatggcttag

SEQ ID NO: 441570 - DNA, 2901 bp, Serratia marcescens
atgctcagtcacatggtattgacccgacaggacatagggcgggctgcaagctattacgaggacggcgcggacgattactatgccaaggatggcgatgcatcagaatggcaggggaagggtgcggaagaactcggcttgagtggggaggtggacagcaaacggttccgcgagctgctggccgggaatatcggcgagggccaccgcatcatgcgctcggctactcgacaggacagcaaagagcgcatcggccttgacctcacattcagcgcgcccaagagcgtatcgcttcaagcccttgttgcgggcgatgctgaaatcatcaaagcgcacgaccgcgcagttgctcgcaccttggagcaggccgaagcccgcgcacaggcccgccaaaagatacaaggcaagacccgcatcgagacgaccgggaatttggtcatcggtaaatttcgccatgagacaagccgcgagcgcgatccgcagctacatacgcacgcggtcattctcaacatgaccaaacgtagtgacggccaatggcgggcgttgaaaaacgacgagattgtgaaggctacgcgctaccttggagccgtctataacgcggagctggcccacgaactgcaaaagctcggttatcagcttcggtacggcaaagacggtaatttcgacctagcacacatcgaccgacagcaaatcgagggattcagcaaacgcacggaacagattgccgaatggtatgccgcccgtggtcttgaccctaatagcgtatctttggaacagaaacaggcggccaaggttttgagccgtgctaagaaaacttcggtagaccgggaggcattgcgggctgaatggcaagccacggcaaaagaactcggcatagatttcagccgccgggaatggtcaggccgggagaagggcggttcagaaaaacaggcccattcattcatgccttccgacgaggcggccaagcgggccgttcgctatgccatcaaccatctgacagagcggcaatcagtcatggacgagcgcgagcttgtcgatacggccatgaagcatgccgtaggcgcagcccggttagaggacattcagaaggagcttttgcgtcagaccgaaaccggctacctcattcgagaagccccgcgctatcgcccaggcgggcagaccgggccaacggatgaacccggcaagacccgcgccgagtgggttgcagagctggccgctaagggcatgaagcaaggcgcagcacgcgagcgcgtcgataacgccatcaagaccggcgggcttgtaccgatagaaccgcgttacaccacacaaacggcgcttgagcgcgagaaacgcatcttgcagatcgaacgtgacggacgcggcgcagttgcgccggtcattgccgccgaggccgcccgcgagcggcttgccagcacgaatctaaaccaaggccagcgcgaagcggccgagttgatcgtttcggctgccaaccgggttgtcggtgtgcagggttttgcgggaaccggcaagagccacatgcttgataccgccaagcaaatgatcgagggcgagggttatcacgttcgcgcactggcgccctatggcagtcaggtcaaagcattgcgcgagttgaacgttgaggcgaacaccttggcatcgtttctccgggccaaggataagaacatcgacagccgcaccgtgcttgtcattgacgaggcgggcgttgttccaacgcgcttgatggagcaaacgctaaagctggcagagaaggccggggcgcgtgttgtgcttatgggtgataccgcgcaaaccaaggccatcgaggcgggccgacctttcgaccagctacaggccgccgggatgcagaccgcgcacatgcgggagattcagcgccagaagaaccccgagctgaaaatcgccgtcgagctggccgcagcaggcaaggcaagcagctcgctagagcgcatcaaagacgtaacggaaatcaaaaaccatcatgaacgtagggcggccgtggccgaggcatatatcgcgctcaagccagacgagcgcgaccggacgctgattgtatcgggcaccaacgaggcacgccgtgaaatcaatcagatcgtgcgcgagggcttgggaacggcagggaagggcatcgagttcgatacccttgtgcgcgtggacacgacgcaggccgagcgccgccactcgaaaaactaccaagtcgggcatgtcatccagccagagcgggactatgccaaaaccggcttgcagcgtggcgagttgtaccgcgtagtcgaaaccgggccgggaaaccggctaaccgttatcggcgagcatgacggccaacgaatccagttcagccccatgacacacacaaagatttcggtctatcagccggagcgggccgagctggccgttggcgacacaatacgcatcacgcgaaacgacaaacaccttgacctggctaacggcgaccgaatgaaagttgtcgcggttgaagatcggaaagtcaccgtgacggacggaaagcgaaacgtcgagctgcccaccgataagccgctgcacgtcgatcatgcctatgcgacgactgttcacagcagccaagggctaacgtctgatcgggtgttgatcgacgcccatgccgagagccgtaccacggccaaggacgtttactatgtggcgatttcccgcgcccgttttgaggcacgggttttcacgaacgaccggggcaagctgcccgccgccattgcgcgggaaaacatcaagagcgccgcgcatgacctcgcccgcgaccggggaggccgtagcgccgcagcagagcgccagagggagcaacagcgcgaagcagagcgcaaccggcagacgcaacagcccgcgcatgatcggcagaaggccgccagagaagccgagcgcggcatggaggccggaaggtaa

SEQ ID NO: 441571 - DNA, 1524 bp, Serratia marcescens
atgcatccagacgatcaaagaaaggtcagcgccggaatcgttattgtcctgccgcttatcttttggattaccgccgttcagaaaacggaggtactcggttcgccgaaacttttggcgctttgggagctaatgaagctcaccccacagaagccaattttgttgctttctgcgcttggaggtttggccgttggagtgttgtttgtctggctattgaatagcgtcggacaaggcgaatttggcggcgctccattcaagcgatttttgcgcggaactcgcatcgtcagtgggggaaaactcaaacgcatgacacgcgaaaaagccaagcaagttaccgttgctggtgtaccaatgccgcgtgatgcagagccgcgccatttgctggtaaatggtgccactggtacgggtaaatcggtgttgcttcgtgagcttgcttataccggacttttgcgcggcgaccgcatggtaattgttgacccgaatggcgatatgttgtcgaaattcggcagggataaagacattatcttgaacccctacgatcagcgtacaaagggttggtctttcttcaacgaaatccgaaatgactacgactggcagcgttatgcgttgtcggttgttccacgcggaaagacagatgaggccgaggaatgggccagctacgggcgcttgctgttacgtgaaacagctaaaaaattggcgcttattggtacgccttccatgcgcgaattgttccactggacaaccatcgccacgtttgacgatttgcgggggtttctggaaggaactttggccgaatctttgtttgctgggtcgaatgaagcgagcaaggcgctgacctcagcgcgctttgttctttccgacaaattaccggagcatgtcaccatgccggacggtgatttcagcattcgtagttggctggaagacccgaacggcggcaatctgttcattacgtggcgcgaggacatggggccagccttgcgtccgttgatctccgcatgggttgacgtggtgtgcacgtctattctgtcactaccggaagaacccaagcgccgcttgtggctgttcatcgacgagttggcttcgctggaaaagctggcgagcttggccgacgcactcaccaaaggccgaaaggcagggcttcgggttgtggcgggcctgcaatcgacctcgcagcttgatgacgtgtacggcgtgaaagaggcgcagaccctgcgggccagcttccgctcgcttgttgtcctgggcggctcgcgcaccgacccgaaaaccaatgaggacatgagtttgagcttgggcgagcatgaagtcgaacgcgaccgctacagcaagaacacaggcaaacaccacagcaccgggcgggcgcttgagcgcgtgcgcgagcgcgtcgtgatgccggcggaaatcgccaacttgcccgacctcaccgcctatgtcggctttgccggtaatcggccaattgccaaggttccgcttgaaatcaagcagtttgcaaaccggcaaccggcctttgttgaggggactatctaa

SEQ ID NO: 441572 - DNA, 366 bp, Serratia marcescens
atggcactaggcgaccccatccaagtacggctaagcccggaaaagcaggcacttttggaggacgaggcggcccgcaagggcaagcggctcgctacctatctgcgggagctactagagagcgagaacgacttgcaaggcgagctggccgcgcttcggcgcgaggttgtcagtctgcatcacgtgatcgaagacttggccgacacaggcttgcgttccgaccagtccgggccggggcagaatgcggttcagatcgaaacacttttgctattgcgggccatcgcagggccggagcgtatgaagcccgtgaagggcgaattgaagcgccttggcattgaggtttggacaccggaggggaaggaggattga

SEQ ID NO: 441573 - DNA, 426 bp, Serratia marcescens
gtgaatgaaacggacgccctgaaagatcggattgaaaacatccgacctagaatgaccctcgccgcgaagctccgggaattgatgccggagattgatcggcaggtacgcgcaggcgtccagcacgacgatattgtcgaaacgctgaacgccaacgggttcgatgtgaacctgaatacttttcggagttacctctaccgttatcgcaagaaagcgcgagcgagtgaggggcaaccggaaccggcacaagcgacacccaaggcggacggcaattcgcctgtcgtgagtgaaggccccggcgacgtgtcgcctgactttgacgcggattctttggctgacgcattggacgccagaaagcgcgatgaattgggcgataaataccttggccttaaacggcctattttttccaagcggagtgacaacaaatga

SEQ ID NO: 441574 - DNA, 696 bp, Serratia marcescens
atgaaagtagctgtgatcaatttttcgggcaacgtgggtaagtccaccgtggcgcaacatctgcttgctccccggatgccaaacgctgaatttgtagcggtcgaatccatcaacgccgatgagggcacgggcgaggttgttcgtggcaaacaattcggccaattgcaggaacaattgctgatggtcgatgaggccgttatcgacattggtgcgtccaacgtcgaggatttcgtaaagctcatgcagcagtatcgtggttcgcatgaggacttcgattatttcgttgttcctgccgtcaaggaaagcaagcaaatcaaggacacaattgcgacgatcaacgcgctttccaagatgggtgttcccgcgaaaaagattcgcgtcgtgttcaacaagttggaatctgacgaaacggtcgaagaagccttctatccgctgttcgcctatcacgatgacagcaaggcgttcacgatcaagccgaaagccgcaatccagtttagcgagctgtatcacaagctacgcacttatcgggtgactatcgagcaacttctgaccgatgaaacggactacaaagcaaagctgcgcgaagccaaaaacccggaagaaaaggcgcaagctgccgcaatgatttcgatgcgccgcctcgccttttccgccaaagaaaatctcgatgcggtctatgccgctatctccaagtaa

SEQ ID NO: 441575 - DNA, 387 bp, Serratia marcescens
atggctggcccgcaaacgacacgggaagccctgattgccgaattgctcggcgatgtgggcgtgcttattgataaaaccgacgagctgcgggcctccttccctgccgccgctgatgaggcggcggcaaaggtgaaggcggcgggccaacgggccaccgaggacgtcgccacggcggccacgcaactgacccgcgacctcgccactcaaaccgaaaagctccttcaaggcgtccagcaggccgccagagaggcacaagcggcggcaagggtggttgacaggtctgcacggcgtttcgcgctcctagcgaccgctatgggccttgcagcgggcattgtcggcggggtgttggccggtcttgccttgtcgggttacttcttcggcgcttga

SEQ ID NO: 441576 - DNA, 252 bp, Serratia marcescens
atgaccaacgaacacaccgcgccggttctgttttatttcgacaaggcggaaaccttgcgcgagtttgaagccttccgggtcgaggccagccagatcacccgaccgcatcagatccccgcacaggtcgaggtttggaacgtgatcggcaagcgccgtttcatcgaccggcaagaagtcatcgccgagtttcccaacgagctgtacgcgcagattttcgcggacatggccgacaagaccgccgcgcacatttga

SEQ ID NO: 441577 - DNA, 654 bp, Serratia marcescens
gtgagcagaaagcaccaacccaagaccgaaaggcaggaaaaggcggcagtcattgccgcctcactgcccgaagatcggggcgagctgatggacgccgcggccgaggccatccggcagtatgacgcggctatcgtcggttgtgacgacgacgccgcgcacgccgcccgcgatcggtacgaggccgttatatggaagttgaacggcaacagctttttcggcaccaaggcggatgcagactcacccggttatcaggtcgagcggcattgtgccgcgacacccggcaccgtgccgctttggggtcagaagggcgaatttctaatgacagtcgagggcatccgggccgttgtcgagtttggcaacggctacggttccatgtatgcccatttcgcctttcatgccgttgacctcgatttgccgtttatcagcgaaaccggctatcggtcgcatttcaccccggtaatgggcggtatgacagttgacgaagccgccgaagccatcatgcgggcaatccttgccgaaaagggccgggtcttgattaagccggactcgcgccagttctacgagggccgggaggcccgcgcatggctggattacacccgaccggcacaaaccatctaccaagaaggaaacgggcaaatagcattcggattttga

SEQ ID NO: 441578 - DNA, 273 bp, Serratia marcescens
atgaagcgcaaatttcgtttggggcaaatgttggcaactatcggcgtgctggagctgtgcaagcacaagcatatcgacctggggccgctgatcgaccgccacgtttccggggactggggcgacgtggacgatgcgcagcgcgaggccaacgaggaagccgtgaaggagtgcggcaccatcgtgtcggtttaccacccgcacggtgtgcgagtgctgatcgtgaccgatggcgaccgttcgcacacggtagccatgctgccccacgagtattga

SEQ ID NO: 441579 - DNA, 324 bp, Serratia marcescens
atggacgaaaacaaaatgacggccgccgcgtttgatgatctaaggccgcgacttggccgattgaccgaggaaacaatcgacattgcccgtgaggttctagtcgagggcaagagtcaaagcgatgttgcgcgtgaacgcggcttgtcgcggcagcgtgtcagttcgatggtgaaaagcgtagtctcggctgcgaacgagattccgcgcgaatggcaacgggtcgaggtttggttgccgccaaacttggccgaaaaggtgcggcagatggaagccgacgccaaggcagatgttgcccgcaagaaccaatcgaccgacgcggcataa

SEQ ID NO: 441580 - DNA, 354 bp, Serratia marcescens
atgagcaatcgttttgaagccgaaggcaacctgggcaacgtatccgagctgcgcaccgtgaacgtgggcggcaaagaacgcgaggtgttggatttttccatttacatcgaacggcgcgtgccagacggaagcggcggctttaccgataaaggcggtttttggctaaatggttcgctttggggcggccgtgcgcgtgttacccatgaacacttgaaaaagggtatgcgtgtgcgcaccgctggcgagctgcgcatggaaacatgggagcaagacggcgagcagcgttccgggctgaaactggacgccgaatatgtcgtcatcgaccccatcacttacgccagacgcgaccgctaa

SEQ ID NO: 441581 - DNA, 777 bp, Serratia marcescens
gtgaacagctacgaacagaagcaacaagcccgccgcgcccgttacgaggcccgcgccgaccaagccagccaagaggccgacgcgacctatagcaaggctcgcacaatggccgaggctatccccttcggccagcccatcctaatcggccatcactcggaaggccgcgaccggcgctatcgcgcccggattcatgacaccttcggcaaatcctttgccctgcaagacaaggccaagcactacgcggccaaggccgccgcagtgggaaccggcggcatatcgagcgacgaccccgacgcaatcgagaagctacgcgccgagctggcgagcgtgcgcgaagcgcaagaccggatgaaagccgcaaatcgtctcattcgcaagaatgaccgccccggtttggctgaacttggatttacccccgacgagatcgaggcgctttttacccccgatttttgcggccgcgtcggctttccggcttacgccttgagcaacaacaacgcgaacgcccgccgcatcgagaagcgcattaaagagctggaagccatgcgcgaacgtccggacgtagagcacgaaggcaacggctacacctaccgcgaggacacgacagaaaaccgcgtcatgttcattttcaccggcaagcccgatgcggagacgcggcagcttttgaaacgtcacgccttcaaatggtcgccctcgcgtaatgcttgggtgcgtcagctcaccaacgccggaatttttgcggcgaaacaggttcgcgccacactggacgccaccgcgtaa

SEQ ID NO: 441582 - DNA, 165 bp, Serratia marcescens
atgcagctacccaaaacgatcatttggaaaggcaacgagtacgaagtgcccgacatggccgaaattgagaactttgtttttgacagcgtttgcgaaacgccagacggcgaaaccgtcgagccagatcaccccgattcctggctttcgcttattggcctgatctaa

SEQ ID NO: 441583 - DNA, 201 bp, Serratia marcescens
atgcaagtccgagtcatcgtaggcgcacaggcagcctatgcctgcatcagccacgaaagcggcacgcttgatgttcggctcaatccgggccgttcggcccgcaagagcatgaaggaaagcgccgccgagctgcgcgagaaggccgcagaactgacccgccgcgccgccctcatcgagaatgcggccgagctggtcgattag

SEQ ID NO: 441584 - DNA, 894 bp, Serratia marcescens
atgaacgcaaaaaccaagtttgacctttaccaacacgttaccgaccgcatcattgccagcattgaggcaggcaccccggcatggcgcaagccgtggactggtgaagccgccacaatgcaaatgccgctgcgctccaatggcgaagcctaccggggcatcaatgttgtgatgctttggcttaccgccgccgaaaaaggctaccgcagcgcctattggttcacctatcgccaagctaaagaacttggggggcaggtacgcaaaggcgagaaaggctcaaccgttgttaaattcggcaccatcgagcgcgaggacgagcaaaccggcgaagaaaagaaaattccctatttgaagggttacaccgttttcaacgccgaccagatcgacggcttgcccgagcagtaccacgccgcaccggcagaagccgcccgcgatcttggcaccgccgccgatcccgagcttgacgccttttttgccgcgaccggcgcagacattcgcaccagcagcgaaccccgcgcctactacaacccgaccggcgactatatccacatgccgccgattgcgacctttcacagcgccgcaggctattacgccacgctggcccatgaggcgacccactggacaggccacaaatcgcgccttgatcgttttagccgattcagcgaccgcaagagctacgctttcgaggaactaattgcagaaatcggcaattgcatgctttgcgcaagccttggcttgatacccgattttgaccaatccgccgcatacgttcaaagctggctgcgtgctttgaaggacgacaagcggctgattttcaaagccgccaccgaggcacagaaagccgccgacctcctgcaagagaacgcggccaacttccaaaggaaagaagccgcataa

SEQ ID NO: 441585 - DNA, 837 bp, Serratia marcescens; identical to SEQ ID NO: 22759

SEQ ID NO: 441586 - DNA, 558 bp, Serratia marcescens
atgattcctttagcgacgcaacaagagatcggcgccttaatcatcggcattttcgggcgtttgccgacgacggcggaaatcgattactacgacagcgcatttgatatcggcagccagccgcccgcctatatggccagtattctaatgagccaacccgatgctgggtggatgagcggccaaagcgaatacgacattctcagccaggtttatttctccgtttacaatagcgctcccgatccggattacatcaatgccttactgcaacaggggcatttcaacagcgctgtcgccagcgtcgtcatcgacctctttaactatctgggggacgatccggtgatgttggcgcagcgtgatgcgctcgatcagcgcattgcagaaggtttgtatcccggcacggccgccgatgccgccggcggaagcggcgacgcgcaggcgatgttttatctgctgcgagcaccctggcagaccgatgaaattgcgcatgacggcaagctgctcaatcagggggggcgatctggctgcgttggcgcagagcaagattgccaccctgccgcttaa

SEQ ID NO: 441587 - DNA, 273 bp, Serratia marcescens
atgcagccggaggtgattttgttcgatgagccgacgtcggcgcttgatcccgagctggtgggggaagtgctcaataccatgcgttcactggcggaagagaaacgcaccatggtgatcgtcacccatgaaatgagcttcgcccgcgacgtggccgatcgggttatctttatggatcacggccgcatcgtcgaacagggcccggccaaagcgctgttcgccaatccgcagcatcagcgtacccagcaattcctcgataagttccggaatcaataa

SEQ ID NO: 441588 - DNA, 303 bp, Serratia marcescens
atggtgctgaccggcgaagccatcgacgcccgcaccgcgctgcaggccggcctgatcagcgaagtatgtgtcgatgccctgacgctggagcgcacgcagcagattgccgatcgcatcagccgtcaggcgccgctggcgctgcgcgccgccaaacaggcgctgaaacaggccgaggaaatcggccttagccaggggctggcgatggagcgtcagcaatttgtcaccctggccgccaccgacgatcgccgcgaaggcatcgccgcctttttcgaaaaacgtacgccaaactatcaggggcgctga

SEQ ID NO: 441589 - DNA, 759 bp, Serratia marcescens
atgacacggacactaacgactgagcagttgagagcgcgcgctgaatcgctgggactggatttcttcatcgaaaagcgtgcaggaatctgggtgaaggaatggaataccggcgcatgtgtcactgccaatgcccaagaagttgaaatgtggctgttactggctaaccgggaggcgcagccggtggcatggcgctatcgatacagaagaggcccacacaaaggaacatggatttatgttgctaatgaaagtgaatgcgccacaaggccgttacatgaaaagcaggcgctctacaccgcccctccagcgccagcagtgccggggattgacgagctgcgacagacgtttgagcgtgcggagagggaatccgacgatgggttcaatctgcacaaatacggcattggttacgctgatgagtccacgcaggcacgctgggaatcatggccagcctgccgcgccgcaatgctggaaaatatcgacaaacccgcgccgcaactggattcagtcgtgacgcgccatgccgaacaacctgtaagtggcggttacaagttgccggagagctggatagcgtgcagcgaacagacccctgttgccgacggcgcttattggtgctggttcgggaaagataaacctagcgttattcagcagcgagtttgcatctggaacgatagaaaccatgagtggtgtgacagcgctgtaacccactggatgccattacctgcagcgccggagggtgggaatgatcacgatacccgacgataa

SEQ ID NO: 441590 - DNA, 531 bp, Serratia marcescens
atggacaataagctgagtgaactgagcaagccggtggcgtgggaagttaaaggcatcctgtgccactcagaagaagcgcggatttatgtcggtgagccggagccgctctactcgcaagagtacgtctccgccctgctggcagagcgcgattcaaaccaacagaactaccagaacgccatggaagaactgaggattgaacgctcacaacggcaggcagcagatcagcgcatcgccgagctggaaacccaggtgaatgtttgggagtcggcagcgatgaagcatctggcacgggcagaggaagcagaaaaacgcctgcccatcttggagcaggacaaattgcgcctcaacgaaatcatcaacagcgaagctaatcgcgctgatgcggcagaaaagctgctggctacgccggtgcggttgccatcagaacatgagttgcgccaagtggcgtgcagcgaatgcgcaggtaattgcctggaactggttgaaggcaccgttcgcgccgctggcttcaccgtagcgggggatgagtag

SEQ ID NO: 441591 - DNA, 327 bp, Serratia marcescens
atgccagcaaatgaactgaagccaacccttggcgattggctggaaagtggagaataccttcccgagttcatgcgtgacttccatgaccaaaaggatgtgttcaaggccatgcaccacattatcgaaaacgccgacacaaatggcaacgcgcgtgatgggcacatttatgttgtcgataccttcctgtggtacatggcccgctgcggatacaccctgcagcgcagtcgtaaacaggtcgagtttcgcgacatggaagtcgatatcgacaaaatgaaaaaggatgtttattcagcattttcaaaactggtggaggcccagcatggctaa

SEQ ID NO: 441592 - DNA, 567 bp, Serratia marcescens
atgagtgaagagataaatcttaacgatttgcttgtttaccaccatgaaaccggaactctgacctggaaagaaagaggaatggagtggttctcatccagcaggtctcgagctgtatggaatgcaaaatatgcagggaaaaaagccgggtcagtccatacagataatacgggcaggaagtgcattcacgtaagcattaataacagaaagtacaaaggtcatcgtatctgctgggagctaattaacggacctattcctgatggaatgacgatagaccatatcgaccacaatcctctcaataataaaatctctaatttaaggctcgcttcacaagtggagcaaaaaaggaacatgccaattcagaaaaataactccagtggcgttgttggtgtcggttggagcaaaaaggccaagcggtggagagcgagaattggggtgaatggacggggcattgagataggaacaagcgacagccttggtgaagcaatagagatgagaaaaagagccgaagtcgagtacggattccacaaaaaccacggagcgacacatgagcataaagaaaaccgttga

SEQ ID NO: 441593 - DNA, 330 bp, Serratia marcescens
atgaaagatcaatacgccgatatcgtggcgggatgcctagcggcttttgacgccctaaagcgcggagaaactcacgaacgagccaacaagatgatgatcaatacagccgcaaaaaacgcggcttttttattgcctgaattcagcataagcgaagtgaaatcaatggaaaaacgcaatgaaatttgccctgtcgtgcgtcttgtcggtatctgttgggagttccctgacggagaacgtattcccgactttttgaaagccgaccggaaagcaaaatcgctcggaatggttcttgagcgtcaccagaaatggcgctttagcgaaactgaataa

SEQ ID NO: 441594 - DNA, 210 bp, Serratia marcescens
atggccagcacggcaggcgcattcatcagctataacctgtaccaggatgccgcacgcaccaccgcctggggcagcggcgccaacgcgcggaccggtaccggcaccggtgccgccgttccgctgatcgtgtatggccgcgtaccggcggccggctctaccccggcggcggacacctataacgacaccgtcacaatgacggtcacctggtaa

SEQ ID NO: 441595 - DNA, 267 bp, Serratia marcescens
atgaatcggatggcaattattgatctggctaagagttttataagaaaagaggtcggggcattggagttctccgaaaaaatatgtgtagaaaggcgtatgctctatggggttaaggatcaggatagaaacgttatgaattgtggggaagagctgtttatgatagctgaagtttacaatcctgattcagaacgtgctgattatgaacttgatgatgccggattgcgtgccgcagttataacgacactggaaaaattcaattttatctga

SEQ ID NO: 441596 - DNA, 630 bp, Serratia marcescens
atgatccgtagaaacaaaccatttaatactctttcccgccgtcggcgtcgtgcccggacacaacacgtcaagaatctgatccaccgcgagcgtcaccgctgcggagggctgcattatgatgatttcgattctgaaaatgcagaggccattgctgcgggttggatgtggacctggagcgatgttttgttcttgggtaattcgccagatgtgtactggaatgcggagatcattaccattgaggtagcgcgtgcggatattgtggaaaatctggtgtttgaagaggctcatgccatgttgagccaaaaccagcaggaagatgaagcccgcatggatacaacacaaaactacaatgcgaaagggaaggtggctagccatacggtggtagaacgtacccgcgtttcttatcctcaattcggtggattaacctatttcgactacattgataaacgcttggccgaagtcatgcgcgacaatccgcctgtaattactcctggctatcgcattcaatatggctatcgtagcggcattggtttgcaagtcatcgtggaagagtcggtgctcactcgcgagataatcgacagtgcgatccgctcatttttggctggggatatgcccctggtccccaagtaa

SEQ ID NO: 441597 - DNA, 153 bp, Serratia marcescens
atggatctggaactcggtcgatcttcatactatgccgaagacagcatctatataactgtcgatgggaaaaccgtaataatggatcgggaaacggcgaagaaatttgttgatgctgtagtttctgtcggttcctatcatggtctagtggagtaa

SEQ ID NO: 441598 - DNA, 858 bp, Serratia marcescens
atgcgtacagtacagcacataatagatactcggtcgattaaacgtgttctaaatattctccctgaccactgggtgattcgggagttaaccgagcgtgattatggaattgatcttattatagaaatttttgaaaaaaacaacaaagataagaatgatcgtgacgtattcgtctcaacaggggcaatatttcatgcgcaggttaaaggtacaaactcagcattaaaagtagatgaaaataataatatatccttttcattagataagggggggttactctacacagaaagattcagtacacctttcttgctattcagagttgatgtttcgtcagacaatgcggactcatattttgtatggattcaacgctatgtaagggatgttctcgacttaacaacgccgggatggagaactagtggacaaaattcattcacaataaaaatccctgagcataacaatatatcttcaagtttcgaaaaaatagaacgaattgcatcatggccacgcttaatacaagagatgatggaattccacgagagctactttcatctttcatcacagttaaaaaacgcagcgttaggggattataatattaacaaggattccctggcacacatggtaaccttggcaaggagaataaaaaacctgcaaaccatatataaatacaatcactgttgcattactaaatcatgtgcagaggaattattatcatttgtccaatcacttaatgtcagtagtgttccatccaatttttcaaatatacctcaccaacagaatcttgaccttttagctagcagcatctatagccttctagatagtgagggttttatagcggaaaatgagtgcaatacagtttattaa

SEQ ID NO: 441599 - DNA, 555 bp, Serratia marcescens
  misc_feature (506)..(515): n is a, c, g, or t
atgagttgggataatgattcattgtgctcaaaaagtaaggtttattttcaaagagcatttaatgatgacagagattcagagatttttgggctatggtgcgcaatggggcttgagttactttcacggtcaactatctcacactttagtccgtgcttacttgctgagcctgataaagatcaaaaaaatctccttgcagctttaggtcttaacgcgaatatctcgcaggctaagtctatatctacatctcaggtattgaaactttgcaaagatttgattccagatttcaatgaggaggagatcacgatagctttggctttggccggacgtagaaatgaagaggttcactcaggcaccgccgcttttgttgaatataaacctcaacaatggattggggcattttataaatgttgtagagtgttatcacaagcgcaagataaaaatctagaagagctgtttggtgaagatgaagcaaaagcggctcatgaaattattactgaacttgatannnnnnnnnngtttttaatgataaatcattggaagagaaagaggcaataa

SEQ ID NO: 441600 - DNA, 633 bp, Serratia marcescens
atgtgtttttatatgaataaatataatattgtagaagaatgcgattcagtagagagctttctatcgttggctaagagtttaggtgaaataattcctcaccctaatggcgaagtatacgatgtgattatagcaaatgacggtgttaatgccaaaataggttctttcagtcaaaatttcggttttgccgaattcccattacacaccgatactgccttttgggcaataccagcaagatttttaataatgtggtcacccgaggctagcacaacatcaacaaccatcttgtcgtggagagatatagtagacgttttctctgaaagcgaaaagaaaatcattaatgatgctatatttaaagttcatacatatgaaagtgtgaactatcgaggtttaaaattttcttctccattaggaaatggattcagattcgacccgaatataatgacacccgcaaacgaacaaggtaggaagtttatagagatatttcatgaggtagtccgaggaatgaatttaattaattttaattggtcgggttcaaatgctttggttcttaataactggaacatgcttcatggaaggagtaaggtcgagaacaagcatgaaatccgaaaaatatttagagcttacgtgaggtga

SEQ ID NO: 441601 - DNA, 183 bp, Serratia marcescens
atgcttgcgagtcattcgcatcagaatgaagttgaattagtgctgcataaacatacgagtagctgttacaaggatgcagggctggcggcaattatccttatctatttgctctcagaactgactctgctaacgggaaatgagttcaccgacggcgaaccgtgcagaatgcatttcatactctag

SEQ ID NO: 441602 - DNA, 1146 bp, Serratia marcescens
atgagtaaggaatttagcaagaaacatatttacccctcaccaaaggactcattctgctttgtattagagaccatatctgatattaaacatgaggcactagtagtgttggatgcaaatgtactccttttgccttttacaactaatattaagaacgtacaagcaatcaaagggctttacactaggctatctacaagtgatcagttgtttctccctgcgcaagcagtgagagaatatttggataatagagctgtgaaaattgcagatataaacgaagcccttcaaaaaaagtcgagtcaaaccttcaactgtgtagggattcacccactacttgaaagtttggaagagtataaagaactaattgagctagaaggacctctaaaaactgctataaagaattatcaaactaagattcgagatactctttcagcggttcaggcttggggttggaatgaccctgtaagcaaaatgtaccatgaggtcttggctgatagaattatggatgatgacgcgttagatttcgaaaaaatagaagaagatctaaaaagaagaaataatttcaatatcccacccggttataaggataggagtaaagatcagaatcaggcgggagatttagtaatttggcacgagattctaaacttggcgaaaaccaaagacaaacatctcatttttgtttcggttgatgagaaaacggattggtggcatcaaagtggaaaagctccactttatcctaggtttgagttggttgatgaatttagagaagcaacaaaaggaaagtcatttcatatcgtcagtctttccaaactactagagatatttgatacagactctgaagtggtaaagtctgtaaaacttactgaagaagaggttaaatccactgcaaactctgaaagcaaagattcagaaaaacagccaaaagcttcttttgaccccaacaatgaatatcgtaaatacctcaatatacctattgaacatggtctagtaataaatcatattagatggaatgtaaaaggtggctacgatacagatacatatctaattacggaagtagataaagacggaaatatcattaataaatatcattttttcgatagtacgaaaacctcgccaccatttaatcgtgaatttgatgcagaaaaaatataa

SEQ ID NO: 441603 - DNA, 2436 bp, Serratia marcescens
atgtggattaattttaggtgtttttttatggttatcggtggtggcctaatccattactctatatctatggcaatatctatttacttcataataacatacatgagaatgtattatgaactatattcagtaacagaagacaaaaatgctataaatgagatattgttcgatgagttaaaatatcatggggattcttatcatgaatctaaaatcgaaagcgaaaaaataaacaaaaacttcaaaaaattcatagatacaaagaacaacatccttacagactataaatatgactacatcactgaagaaataactcaattaagtatttttccaaaatcaaactcactagtaatagattcttttcacgaaagtaacctcgacgctttagataactatttagcatccattgataaaaatataaggctctatctaagaatttcattcctacatcctactattaattatgatacgtacatcacaacaacaaaaggcattaggctgacagaaactgagattgatgtgctatcaataaaagtggcccaatgctttaatataaaaaataaaaatgtcacctacgaatcattcaaaatgttggaatcatctgttgtcgaaaatatttaccatacactaatcactggcaatgaaagatccttagactttggtgcgttagcattatcgttactatcatcaaaatccaatcacattgaaataataaaacatttagaccaccttgtgacctccagcggaagaaataatcatatagaaatatcaatcttagaggagtttttcaagaaactatatcatataaaacttggtgaaggaacaataaaggatgatatatttgtcataagttcaataattgacatgtcaatttacatatatgaaaaagataagtatgaaactttcttcaaaaaagtaaaccgtttgatatctcacagagcgaagtatggtgatgacgagtttaacaatccttacttggaatactatatcgcattaaccattagacatatttccaatatgtattataaagcatttgaagaaaacacacgctatctgaccaatgagttaaagtatcttagcaaaaccagaatggataaaaaattaaatgacaggcaaaaaaagctaatatcttgcatgagagaatgcatcgctttattaactgtcaggtttgattttttaatgagcaaagacagtaatgaaaactataagatcgaattagaaaaaataacatcattaattaaacagtggtcaaccccttcatttattgaagaaatctatttcctccaagaaacctacgacacattatttagtatacctagtgatttttcaagcctccgtgctgaaatgagcctcagagaaacaccagatggtgttgctacatgggtgggggcaaatcatagcttttataaatcaattgctattttactttaccagttccctataaataaaaatcaccttggtttgacttttatatcagacaaaaatcaattcattcagagtacaggaataacaacacaaatgcttggcagtattattgattatgtaagaacgagagatttcttcctgatggtaaatgctataggagaaaacaaggaattagagcagaacattaagtcgaaaacagagagattagctgaatcacttgaaaaaataaaaagtgaaacaacaaccataataacaaaaaatatcgaacatgcagaacttgatatggagctaatctcacaatatcaaaatgaggtcaaagacagagcaacagagcaaataaatgaattcatcaacattgagaaagcagaaaaaacaatgaaaattaagggtggcgttgattactgcggtcttattgacaagcgcgagctcttgccatctatagatggagttcatttctcaatgaatacagaaaaccatgctatacgtgccgtgttcagcctgataagaaaatccctaaattatattaataatgatagtgtcgtcattgaaacaatccacgacacagatagattagaaaacaacaattatataaccattgagtatatggttaaagacagagtaaatacatataaattctctaaaggactacgtatgtatgacaatgacgggcaccttggttttgaaaagtctggtatgtattatctgaatttggataaagaacttgacgtaaaattaaatcccgacgagccagtgtcaactaaaataacatcgataaacaataaaaacattgatggtttatatgaaaaatttgcacttaacaaagatgatgaaaaccttctgcttcgctcagaaatagagataaccttcaatatattcatcaataaaaaagaaagtaccacgctacttttcctttctgaagaaaaatgtaaggaattaaatgaaaaagaagagcgtcaataccaacaattgataaaaacaaacagagattcgattgataatacactacaaagccagtag

SEQ ID NO: 441604 - DNA, 843 bp, Serratia marcescens
atggcactgactactgacgcaatcgacaaggccaaatcactgctgggtagcggcgccagcacgttcaccgattaccaggcggagctgtcgcgcgtgccagcgttcagcgtgctgcttggcggtaaggagctgaccaggctggatgagcgcgtcttgtcgttggagatgaccgacaaccgcggctttgaggccgacgagctgacgatcaccgtggacgatactgacggccagctgcagttgccgccgcgcggcgccgaggtgtccgcgtcgatgggctggcacggtgaagcgctagtttacaaaggcatttttatcgtcgatgaagtggcgcacgccgggccgcctgacacgctgacgatcaccgccagaagtgccgattttcgcgacgagttcaacgtcaagcgcgaagtgtcctggtatgacgtcaccgtagagcgggtggtgtcagcgatcgcccgtcgctacaacctgaaggccatcatctcgcagcagcttatggaggtggagatcgatcatgctgaccagacacaagaaagcgacatgtcattcctgacgcgcatggccgaaatgctgggcgccattgccacggtgaaaaatggcagtctgctgtttatcctgcccggtggtggcgtcagcgccaacggtaaggcgctgccctccttcgccatcacacgcagcagcggcgatcgtcacgccttccgcattgccgatcgtgatgcctataccggcgtgcgcgcgtactggctcgatttggaattcgggaaaaagaaaaaggtcacggtgaaggcccgcaagccggcgaaaaagaaagtgcagcgcagcagcagccgcgagggtgattaa

SEQ ID NO: 441605 - DNA, 513 bp, Serratia marcescens
atgaacaaggcatccgttgtattttccggcctgctgatggccgtttccgccggcgctatggcggcgacctctggcgatgacgctgacatgagcaaacagccgttggaaaaagtcgcgccttacccgaaagccgagaagggcatgaatcgccaggtgatctacctgccgaagcaagagcacgaagagaactacaaggtcgaactgctgatcggcaagacgctggaagtggactgcaaccgccatatgatcggcggcacgctggagaccaaaaccctgtccggctggggttacgactacctggtgctggagaagctgtctgaaccggcctcgaccatgatggcctgcccggacaacaccaagaccaagcaattcatcgccgccaacctgggcgacgccgcgatgcagcgttacaacagccgcctgccgatcgtggtgtatgcgccgaaagacgcggaagtgaaataccgcatctggaaagccgaagataccgtaagccaggctgaatcaaagtaa

SEQ ID NO: 441606 - DNA, 369 bp, Serratia marcescens
atgcagcaagacgctaaaactctggagttagaagagctggaaacagatgtgacccaggcccgaaaaagggagcaagtcaggctatcggatagcccttctgatctcctatcgaaagaaggttttgcgctgtatatcggcaagaccccggcagcagtaaccagcatggcgaaggccgggaagctgcccgcgttttacatggctgacccgatgaaccccggcggacacgcggagttgtggatcaaccggaaggaatgggataagtacgcggcccagttggcggaggatgcgccggaagagtggcacggatggaaagaccgcctgagcgcgggcaggccgagaaaaggccgcaagggtagggcagcagcatga

SEQ ID NO: 441607 - DNA, 255 bp, Serratia marcescens
atgagccagccattctatgaagcagccaacaaggtgctgaccatgtacgccttgcgccaggaacgggacagcgctctggctccggcgcattcagattctgagattttttgggcatgtgcaattcttgagggcctctctttggctgctgcctacgccggtagcaaagaagccgccgcgattcgtaatgcggtagatagctggatcgcaaacgagaaaatccccgagctgttcattttagaggaagccgagcaatga

SEQ ID NO: 441608 - DNA, 558 bp, Serratia marcescens
atgtggaacgaaaagttcgaccgtaatcttcaaaacatcatgctgacgctgatgatggaaagttaccccgagggggtaaagttcatcagtaaaagtttcgcatcctcttggggcacacacacagaagcagaaatttcccctgatgttgctgaaaagataaaagaccactccgaagaaaaaatagctgctaatctgcattatttgttttctcataatgttatcgaagcggctaaaatccatcgcccccaagtcactctatctcgttttgacttcaaactaactgaaaaaggcatcgacctaatgttagatgacggtggtctgtctgccattttaggtgtcgtcaccattaagtttcacgatgataccatcaataaacttattgcttatattcatgactcctcagccagccctcaggataagaagaaatggagttcgatactgaaggatcttcccgatgttgccaaagcacggctctcagagaaaatagtcgatgcgggtttgggcaagatgcctgacttacttcagtggctaggaactcaaataagccatcttggctag

SEQ ID NO: 441609 - DNA, 213 bp, Serratia marcescens
atgctcagcaacataaaggtagcgcctcatatgctgaaaagcaagtataaggaggctatcatgccgcaaaagttagctgtcaccgccctgatcgtcgtgtgtatcaccgtactggtgtttacgtggatgaccaggaaaacgctctgtgaaatccgcatccgaagcgggcaaacagaggttgcggccatgatggcttacgaatccgtgaggtaa

SEQ ID NO: 441610 - DNA, 531 bp, Serratia marcescens
atgcaaatatgccggatggactataacgacttatcggccgataggaaaaaagcaaagtttcactgctatggcctaggcacctttgaggttttctcaggtcaagcacctagaataaatatgccccgttgttcatttatcgaaaatgcagcactcccgccagggcaatactggatcgtcgaccgccctttaggtgggataaaaaacagaatcctgaccttcggaaaagatacttggtttggtacaaatcatgatgagtggtttggactctataattttaagacaatgagcgataccacttttgtgaatggaataagtagaggcgcatttcgtttacatcctttgcgtcccgatggaacaggggagtcatggggatgcatcacatttttccgaaattcagactttcagcaggttaggcgtgcgatcttgagccggaaaaagtttaaggtaccaggttcacgaaatggtcttatggcatatggtcgcgttgatgtaacagggagtacggattatgaccgatgcgaaattaagtaa

SEQ ID NO: 441611 - DNA, 288 bp, Serratia marcescens
atgaaatcagtgaaactcagcgtgttaaccctcttgttgaccggcgtcagcgcttcggcgctggcgctgcccaacatcaccctgctggcgaccggcggcaccatcgccggcggcggcgattcggcgacgaaatccaactataccgcgggcaagctgggcgtcgaggcgctggtcgatgcggtgccggcgttgaaaaacatcgccaacgtgcgggggggagcaggtggtgaacatcggctcgcaggacatgaacgatcaggtctggctgacgctggtgaagaaaattga

SEQ ID NO: 441612 - DNA, 330 bp, Serratia marcescens
atggaaatcagaacggcgcgtctgagcgaccggcacgctatcgctgaattaatgacggcgctggattatcccggcaccgaggcatttctgacgcagcggatgcagcaactgttggcgcatccggatgaggcgctgctggtggcggcggacggggagcaggtgttgggcgtgttatcgttgcattttctgccgcagctggcgttggccggcgacattggccgcatcagctatttttgcgtcgacgatcgggcgcgcggcgcgggcgcatgcgttttaccggcgcgaaggctttgtcgaagcgccgaagtattttgccaagttattaagtaa

SEQ ID NO: 441613 - DNA, 1008 bp, Serratia marcescens
atgggcaaggaacacactggaattaactcactgcgagtttttgcatcttttttagttgtatttatacacgtatcccctgaagtgtttagcgttgctagtgatgattggttaggagtgaatatcgccgcatctttctcaagggtttcagttcctttgtttttcatggcgtcaggctatttcgcccttagatttagagatgaagatagtttgaaatcattctttaaaaagaagattttgagattgtttaccccattaactgcgtggtcaatcctttacattatttataataaaaccacaattaacccatcaacaatatgggggctgctaacgatcacaccagctcattaccacttatggtttttttacactttaattccaatgattcttatttcgcctatactttccattattgttagaggctctagtaagaggcatgtaatttacttgtcattactatggttgtcattatctttgctgccttcgttggtgcaggcactgcaatacttcattcatgacgagaatcctctgttgaaggttggtaaagcacagcttttccttgcgatgattggatattttctgctcggtgggttacttagaaacataaagtttgacattagtacaaaattgctttcagttattatattcttgtctacaaccgctacagttgtggctacatgtatcttttcaaatataaaagggcagccatcgcaggcgttttttgtctactactctccatttattgccacttcctcaatttcactatttatgctttttgaaaggctaactgtgaaaaataacgctttttcaaaagcaataaattcaacagcaaaactatcccttggcatctatctaatacaccctgtattcatagatatattcaaaccaatgattttagaatcaacatcactccatctacttttatttataaccatgattatctttgtaatatctggctccattacctttttactgtcaaaaataccgattatcaaaaaaacagttttatga

SEQ ID NO: 441614 - DNA, 966 bp, Serratia marcescens
atgtctaagaatgagtttttacccttcggtacggcagcaaatgccaacgttttacccaatgctgactaccttgcgctgcccgcgcgatcttctggtttcagctccggcgtggcaaagtcagaggagctaaatactgtatggcgacaggcgtcagtgatcgccagcgccatcgcgcaattcatcgctgacagcagcggaaatgatgtgcttgatgatggcgatttacagactctgcaagacagcctgaaactggcattgaataaacaggctggcggcagactactgcgcacctcgatttatacaaaggttggcggcattcaatatgtctccgtcgatggaggcactgcaacacagacaaagtcaacacaatttacagcgctcagtggtactgcttttgttgagatcgaatgtcagggcggcggtgctggcggtggcggtgtatcggctgatggagtaaacccagctgtcgccggtggtggaggcgctggtgcctacggtcttgcgcgattcactactggattctcgacacttgcaataaccgtcggggatggtggggctggtggcgcagtgggaaataattttggcgctgcaggcggagcttcgagcgttggaacgctgatgtcgtcccctggtggtgtcgcaggaaagggcggcgaacctacaatagcccccttctttaatggaggaaccgcctactcggacgatgctacagggggtaacttattaaaagttaacggcggaaatggcagttatggcatcgctataggtgggcaaaacgcggctggtggcggcggtgggataagtaagttcggcgctggttcccctccaacttcgaatagaccaggtttctcagcaaaaaactttggatcgggtggttctggggctggggcgtattctacaagtagttctggatttggtggcggtgccggtgctgctggtgttgttattattaaagaatatgcgtga

SEQ ID NO: 441615 - DNA, 2052 bp, Serratia marcescens
atgaacgctgaaaccatcaaggacttcctgatctcgctggggttcgacatcgacgaggccggtgggcgcaagttcgaatcggtggtttccggcgtcacgatgaatgcgatcaagatgggcgctgcagtcgaagcggccgcgttgaccgtcgtcgggttcacgaccaagatcgccaatagcctcgatcatctctattggcaatctcagcgcaccggcgcgacggcgaacaatatcagggctatcggttatgcattcagccaggctggcggcagcgtggaggggttcaacggcacgctggacaacatggctcgcttcctgcgttcgacgccaggcgcagaggggttcttgcgcaatctgggtattcagacgcgagacgcggccggtaatctgcgtgacactgcccaactggtgacactggtcggcgataagctggcgaaaatgccgtactaccgcgctaaccagtatgcgcagatcctcggcattgacgaaagcacgttgctggcaatgcggcggggtgtgaagggattcacctctgattatcagagcatgctgcaggcgacagggttcgattcgcagaaagcggcggagcagtcgaacaagttcatgacccaaatgcgcgggcttgcgaatttgttcggcatcatgcgcgacaaaatcggcggtaaccttgccggcggcctggccgggaatctcgaaagcttccgcaaaaatatcctcctcaattttcccaaaatagaggggacgatcaccgccgtgctgaaaaaggtgctttcactggctgatagcatcatgacgttggtttatcggggcgtgcagggcgttggcgatctcatgaggtggtgggatcgactggatgaaaagaccaaagggctgattaaggtgctgggtggcctgctgctggcctggcgtgtgcttaatagcgcgtttctcaaatcgcccattggaatgataactgccctgatcgccgcactggtgctgctgtatgacgactaccaaacatggaaggaaggtggcgacagcctgattgattgggcgaagtggcaaccaagcattgagaaagcgatcactgcgataaaagatgttgtttactggttcgacaaaggggctacagctataggcggctgggacaaggcgttaatggctgtcgcagcttatatgggcggccgctgggcgcttagcatgctatctgcggttgctagagttacacgcggtttcggcccgctgttggccgcaatcgcggcagtcgaaaccttccgcaaggtaaccgatatacaggaagaggccaaaaagcgtggcgtatctccggctgacatcatcagggaaaaaatggcggccaatgataaagaaggcgagagtttcacaaataaccttctgggcaaggttggatcgtggtgggatgccgcaaggggggcattgcatgccgggaatgaaggcgtgttaccttcgcgtgggttaataggccgttcatctactccgcgcggtattcgtaacaacaaccccggcaacctgaactacgtcggccagaacggcgctacgctggaagagcacgccaccccccgatttgctcgcttcaattctgcttttgaagggttcgcggctctgggtaagcagatcaaggcgtactataacggcacgtcaaaggccgcagggtatcagaagctgcaatctgtcgaggacatcatcagccgctttgcgccggccagcgagaataacacccaggcctacatcaacaagctgagcaaaatgctcggcgttggtcgtggagactcgctgaatattcaggatccgaaggtactggcaacgctgatgaatggcatcacgcagattgaaaacggcaaaaacccatacgcccctgagatggtactgaaagccgcacaatcaacgctaacgacgaatgataaccgtaccagcaataccagcagcaataacccggtatacaacatcaccgtgcagggtggcggagatccacacgaaacggcgcgactcactggtgatgcggtagagggcgtctatcgccggcagacacgcaacatgcaaacgcaggtgggctag

SEQ ID NO: 441616 - DNA, 612 bp, Serratia marcescens
gtgaccggtcataccgtccagcgtcggcgggttgtgccagtacacgaatttatcccgcatttttttatgcgatggtcgcgtgccggcaccctcaatgcgccaccaatacccctcagaaccaaccgccagagcgcgggcctgcgtcagtgcgccagtagcgcgccctatctccgtgcgtgcaatcatccttgccctgccggcggcaacatcaccggactgcatgatcatctcgtacagcgcatcagggcgctcaccgttaatggtggcttgtatggcgcgctgctggatttctcggacacgatcggcggcttccagcggcagggacttcatcagctggatttgccggtagacgatatcctgtgtcacctgcccgatcggtgtgttgccgaccacatcgcgaagcccctcagaaatctgctgagataccgatttccactggttccactcctcacgctctacctgcaggaacattttctggcctaccattgccgcccagtcgtccagcacctgggagtagtcgatgaggtgatcggctaccgtgtcagcgcttgcctgggaaccatcgtaggagccagttacgatctgatttatctgactgactatccccagtag

SEQ ID NO: 441617 - DNA, 831 bp, Serratia marcescens
atgaacttagacagcgttgttaaataccactttgccaagtcaactcagataaacgactcccctcgcgccaccgcatccgatactttgaccggcacggatgtgatggcggcgatggggatgtgtcaaagtcgcgctcctctcggatattctgcatttctcggtaaaatggagatcagcatcaccgagaaaaaaaaggcaattcagctactaacccaatatggcatgaagcgttgcgacaaggtggccgccttacgcaagctaagttcgaatattaaagtgaaggttgtgcaaaagctcgcaactttcgcatacatggattactgcagatcagccgcgagcgtcgttgagtgcccagcgtgtaaaggaaagagatttacttcaagaaaagggaagacggtcaagtctcactacacgatgcgtcttcctgattgggctaaagagctggggcaaagtccttctgattttgactccaagcgggaaattgaagatgtgcaccacgacctttgtataaagtgtgacggtaaaggcgttatcagcacctcatgctgtaagtgcaatggtcgaggggaggcagttgaccgcaaggaaagcgaaaggcaaggcgttcctgtgaagcgtacctgcaagcagtgctctggaagaggttacgagagattgccagctgctgaggcatatcgagcgataactatctttacacaaggaataacccctaccgtctgggacaaagcagtaaaaccattttacgagggactaataaccgagctgcataaagcagaggaagaggctaatcgtcagttaacaaaagttaccagcaattttgagaaaagttga

SEQ ID NO: 441618 - DNA, 600 bp, Serratia marcescens
atggctaagcaaccgcggcggcgatgcaagatttgccgagaatggttccatcctcgcagctttaacgagtggtggtgcggtccagagcacggagcagtattcggcatacaggaaagggataagcagcgacagaaggccatacagaaagcagagcagcaacgaaaagcagaagtccacgcagaacgccaaagtctcaaaatccgcaagttatcagtaaaacccctcagttacttcgccaaacaagcccagcaagccttcaacgcctacatccgggaacgcgatgccggattgccatgcatcagctgtgggcggtatcacgagggccagtatcacgctggtcattatcgaacggtcggcgctcacccggagctacggttcaacgaggataattgtcatgggcagtgcgccccctgtaataaccatctatccggcaacatagccaactacacacccaatctgatagcgaaaattgggcgtgagcgttacgaggcgttgatatctcaccatgagccatgtcgatacaccagggtggactttgaacgcgtcagagatgcgtacagggcaaaattgaaagacttgaaaggaggccaggccgcatga

SEQ ID NO: 441619 - DNA, 555 bp, Serratia marcescens
atgaattctactgagttacgcaagattcttgatgagcacaagctgtgggtgacgtctttacgcgaaagcggatccagagccaacctgcgcggtgccaacctgtgcggtgccaacctgtgcgatgccaacctgcgcggtgccaacctgcgcggtgccgacctgtgcggtgccgacctgcgcgatgccgacctgcgcgatgccaacctgtgcggtgccgacctgcgcggtgccaacctgcgcggtgccaacctgcgcgatgccgacctgcgcgatgccaacctgtgcggtgccgacctgcctgatcacacattcgtaattatgggccatgactacccagtaaccataactaacggagaatatgtccgcgctggctgccaaaaccacaccgttgagcaatggcgaaaattcaccaaacgagaaatcgcagaaatggatggaaagaaggcgctgaaattctatcctcgactgttgaagattatcgatttttaccttggtgctggcgagcatcctgattgggttaatgagccagaaactgataccgaagaggctgcgtaa

SEQ ID NO: 441620 - DNA, 225 bp, Serratia marcescens
atggaagaattagtcagagacatcatgaaaatttatatggacgccgataacgcattttcgtactgcgccatgaatttcgacaaaagaatggaagcgattaatgaatggaacaggcttctatgtccagaaaacgtgatgattctgttgaattcgatagaagaaaaggatggcgaaatcgaaaaattgatggaagaaaacaatttactacaagagcaagttaattag

SEQ ID NO: 441621 - DNA, 207 bp, Serratia marcescens
atgaacatcgaaatcacctgttcacgattaagcactatgccaccgcagcgcatcggagagtatcgcgtcaacatcatcaacgccaccatcgacgcgcctgacgaagccgcacaacgcgaaatgctctccctggtcgatgagtcagtcttgcgccagtggatggctgagaacggcctcacgctcgttgaagccaaggcggtggcatga

SEQ ID NO: 441622 - DNA, 600 bp, Serratia marcescens
atgaccaaggcattctacgcgaagctggcgcatatccagttgcacctcaacgcaccgaagaatcaatacaattcgttcggtaactacaaataccgcagttgcgaggacatcctggagggcgttaagccgctgcttggtgatctctttctctccattagcgatgagatagttcagatcggcgaccgattctatgtgaaagcgacggcaacaatcacagatggtgagcatacccattctgcttccgcaatggcccgtgaggccctcacaaagaaaggcatggatgacgcacaggtaactggagcaacaagctcctacgcccgcaaatactgcctaaacggcttattcggcattgacgacgcgaaggatgcagacactgacgagcaccgaaagcaagaggatgccgctaaacccgagcagaaaaagcacacgccgcagcaactgctggagagattcacagcctcagcgccgaatcttgatattgccgggcttgaggaggcattcgagtggacgaagaaaaggcttgcaggaaacaaggagcttcttagcaaagccactgaggtctacaacatccaaaaaactgacttggagttacctatttaa

SEQ ID NO: 441623 - DNA, 318 bp, Serratia marcescens
atgcacagcatcactgtacggctaaacaaatccgccagagagtttcaagctggaaatagcatcggctttaacatccgcgcgggcgttcagtactacgaccggcagaaaaagcagaaggaatggacgaattacagcgctgctgtatttgccaagccgggcccgcaagctgattactatcgtaacgttctggttgagggggcagtcgttgaaatcagcggtgaaactatccgcgttgatgtgtacgacgggcaaaatggacaaaccatcacgcttgagcttcaaaatgccaggattggctttgctagactggccccatga

SEQ ID NO: 441624 - DNA, 627 bp, Serratia marcescens
atgaatagtcacgaatatattgtaatttgcggtctaaatcgtagtaaagttggtagatacattgcaattgtagcatcagttttttctttcgttttaatattattagcactgaaggtagttgagttactgaatagttaccatattaacagtcatatccctgcctctatgttctcgcttcttagcgccggggggatctacgtggggctatatgcatggtttgataaaaacctttggcataattctcacctaggtaaatttttgtgcgtacctaaccttgcaggatgctggcgtgttgatggtcatactcattctgaaggaggaaaagcctgggagggagagctgaaaattgtgcagtcatgggacaaggtgagaattcatctgaaaacgaaaacctctcactcagatagtgtgactgcatctattattcatgatgaaggtattggatatcagttgctctataactaccgaaatcagcccaaaactggtgaagaacatttactctcacatgtcggatttgctgagttccgttttgatgagggacttaaatcagctgaaggtcactattttaacggcaaaggccgggccacttatggcaccatgacaattacaaggatcgaacatgtctag

SEQ ID NO: 441625 - DNA, 1140 bp, Serratia marcescens
atgtctagtccatcatatagcgctcgtattgagcgtatgaagtcacgtcgcaaaggctcgtcagagcagataaatatagcaacagagtccatcagtaatcaacgatatgatggcctcgaacattatgcgctacttgaaaatgctttgaatcttccagaaaactgggagtccagaggcctaagagattcagccacacgatatgtcatcggggctatgcaatcggttgactcgcggtatacgcaaatctctttcgaaacggcggagcggatacaaaagcagttaaccaagaggttggaacataccttagattttcgtgtacagggctctgtgccgttagatattcacatcaaaggtttcagcgatgtggatcttttaatcattgaccaacaaatgcttatgtatgctcctgatggagttggcaattataacccaacaacgaaagatagccgggacgtcattgttgcactgcgagaggctgcctgcgatgcgttgaaaggtgcgtttcctactgcttatgtcgatgatagcaacaacaagtcattgagaataacgggaggatctctgcaaagagaagtcgacgtggtgcctggtatttggtgggacaccgtagagtaccagaagactagaaatgaagaagatcgtggtgtgacaattattaacaaaagcaccagagagcgtatatacaacgctccttttctccacattaaacgtatcaaggacagatgtacccagtgcaatggtggattacgtaaatcgatacgattactaaaaaccctgaaagcagatagtaaagaggagggtaaggatatcgatttaagcagctacgacattgcttcactgatgtatcatgctgatatcagaaatctaagtcatagcgcatattatgaattagccgtcttggtcgagacacatcgctggctgaattatttatgccagaatccagataatgcaatgcagcttgaagttccaaacgagacaagaaaaatttttgaaaagccagagtcgttaaatgaacttggaaaattgactgtgattatcaatgaggtggtaacggaagtgctgagagagatcaccggtaccatgaatgagttgtactcatatgataagcgtgatgtgctaataaataaaatggtgttatag

SEQ ID NO: 441626 - DNA, 228 bp, Serratia marcescens
atggccatagagctgacagatatgatggataacatcttgatcgttttttccgaacagatacatgggattttgcagatcaacattgttgtgaaccaggtggatggtgtaacgcgaaataatgcatcgtgtgtgaaaggttctgtcggcattactgtctctttcttcgcgggaaaatactttgcagtgtcggagttaaggcttagggcggcgaagagcgcgttcaggtag

SEQ ID NO: 441627 - DNA, 183 bp, Serratia marcescens
atgatggaggccgattcggaaacgccgaaatctttggcgatcaccggcaatgccacgttggcgatggtactgtcgagcatggcgatgaccgtgcttaacgagaccgcgagaacggcgaatatatttagtgtctctttttcctggtgtttaaaagtcatgttaacgctccaaaaacgtgagtag

SEQ ID NO: 441628 - DNA, 300 bp, Serratia marcescens
atggacggcccggcggcggcggaaaccgacaccaccatcacattgatccccaggccgcgccccagcagcctttccgggtatatctccttgattagcgccgcattgacgctgagcaccgccgccgcaccgaagccctgtatcaccctgaatgccgtcagcatcgacagcgtcgtggacagcgcgcagcccaaggatgaaaaagcgaacagcaccaccccggctataaagatctttttattgcccaccgcgcggcccagcgccgcgaagggcatcaaagaggcgacaacggcaaactggtag

SEQ ID NO: 441629 - DNA, 219 bp, Serratia marcescens
atgccttcttcttaccaggcaccgaagcaacggcgctggacgctctttttttcctggcaaaccctgtgccgcatttttcgaacgctcggtacgctgctaaccctggctatacgtctgtggctgatgttgcaacccggcggcccaccgtttccaccgcccccaaaatcgtcctcttccacccggtccgacgtacacggacctgacaaacacaaggggtga

SEQ ID NO: 441630 - DNA, 1434 bp, Serratia marcescens
atgaatcactttccattagattcgtttccgctgcttttgcgtgaaactattgtagatgtgcatgagtgcactcaggcacccgttccattaattgcatcatcggtgatgagtgctttgtcattatcttgccagggcctaattgatatcaaagtgaatgacactgtggtatctccgacatcactttttttattggtgatagcgaactcgggggagagaaaaacaacggtggaccgaatggtgctcaaacctttataccaacatgatgcacgttcaatcagtcaatctgaagataagggaaaagactatgaaattgagcagcaagtctggaatgaaaaacaaaaggcgatttcaagccttttcaggaagaaaaccattaaagggcaatgtactgacgagttgtcacagtgtttacggaagttactggccgaaaaacccgtgccaccgaaaacccgtaaacgtatttataataatgttacgcctgaagcattacagactgcgatgcatagccattcagcacatatagggctgattgctgatgaaggtgctaatgttctggacaggaaggtaatgaatgatttgagttttattaactcaatgtgggatggtgtcagctttcatgttgaccgtaaaacgacacaaagctttacgatagaaaatgggcgtatcacgctgtcagttatggtgcagaaaaaaccgtttgatctgtatttaaaacgacagggggaacgagcgcgtggaagtggtttttttgcgcgttgcttaccggtattgattgatgaacgtctcaccacgcagggtgagcgttttattaaagagtattccagcgaaagaagatttttagagggtttttatcagcgtataaatgaaatattagcagaggatgtggaaagtgatgcattattcaaacgggggtgtttatcgtttgagccttcagctcagtatgcatgggaggacatttacaatcaaatagagagccgtatcggtcccgatgaagagtatgccaatatgaatgattttgcgtctaagttggcgaataacgttgctcgactcgctgccctattaagttatttttcggagggcgaatgcccagtaaaaaggcattatgtggagagtgcatggtcgctatgtgagtggtacatgcaacaggctgtaaatattttcggtaatgaagggggctattatgaagccttgttattggcctggttgcatcgtgagtattcccgaacgggacgaaatcatgtcaggtataatgatatacggcgctttggacctaacgcgttacgaaaaggaaagttgttggacagagtgattgatagccttgaaagggaggaagcaatagaaattgactattcacgcaatggtgcaagagttgtgtgtgaatatcgccgattccataacaattcgtttacaaaaaatccggttttcatgcgctga

SEQ ID NO: 441631 - DNA, 579 bp, Serratia marcescens
atgtattcctataattctaaatatcaacaggcattttatgatgttattcaggatgctgtaagtgagtttcctcgcactttagctttgcgagttgacttgcgctatcctcaaggttatcgatatggactatcgaataaagaggttacccgatttatcgaatcgttgaaggctaaaattaaagtggattgtaaaaagaagaatcgacgctggaggcgtaactgggttaacagattgcgctatgcgtgggtgcgggaggtcggtgagcgtaatcgccgtaagcattatcacgttttactcctgctgaataaagacttctattacggtgccggaaaatttgattcaaatgacagtttagccgcattagtccagcaggcgtggtgcagtgcgttaaacgtggacagggagcaatattcggcattggtgaatctgactaaaaacgggatgtattatttgaatagtaattcatctaattatatacaacaggttaccgatttactgaatcgtatggattacctggcaaaagaccatacaaagtgttacgacgacggatatcgctccattgggacgagtcgtggatag

SEQ ID NO: 441632 - DNA, 483 bp, Serratia marcescens
gtgctgcttttggttataaccaccatcctgtgggcgttttctttcagcctgatcggcgagtacctggcgggccatgtcgacagcgggttctcggcgctggtgcgcatcgggctggcggcgctggtgttcctgccgttcctgcgctggcgcaatatcaagcccagggtgatcctgctgtatatgctggtgggcgccttccagctgggcatcatgtacctgttcagcttccgcgcctatctctacctgacggtgccggaattcctgctgttcaccgtgttgacgccgctgtacatcacgctgatctacgacttactgagcggccgccgtctgcgctggggctatgtgttcagcgcgctgttggcggtgctgggcgcggcgatcattcgctatcaccaactgagcgaacacttctggtggggctgctgttggtgcaggcggcgaacatcagcttcgccatcggcatggtcggctataagcgcctga

SEQ ID NO: 441633 - DNA, 468 bp, Serratia marcescens
atgcagcagggttttggcctcaacgttacggcgttcggcgccctggggctggtgatcggcgtcgcctacttcagcggggcgctgacggtgaaccgtacggtggcacgtctcggcgggaaaaaactgatgcaggccggcagcggcatcgtggcgctggcgacggcggcgatcctgctgctgtggtggagcggcgtcctggccggcctttccggtatggcgctgttcatcgcgctgtattgcctgaccatttttggccaggcggtgctgtttcccaacagcatggcgatggcggtcagcgacgccaaagagtacggtgcctatgcgatggcgctgtgcggctttctgcagcagtgtctggcgggcgtcgccgcggccggtgcggtgttgttggaacaccatggcctgtgggcgctggcgatagcgctgctcggtttgggcggctggttaatggttaagctgcggatgtaa

SEQ ID NO: 441634 - DNA, 132 bp, Serratia marcescens
atgcaaacgactaacgccgcctgtctggggctgtatgaaaaggcgctgcccgccgatctgagctggccgcagcggctggtcaccgccgccgagctgggctttgaatttgtggagatgtcgatcgacgagtag

SEQ ID NO: 441635 - DNA, 156 bp, Serratia marcescens
atgcgcgcccccctctccccgctcatcgacgatctgcgccaaagcggcggcggtgagttgcactgcggtgagctcaccgctagccagcccggcggtggcctgcatcaaagtcagctttttcattacgccaccaccggcagttcgatgctgcggtag

SEQ ID NO: 441636 - DNA, 438 bp, Serratia marcescens
atgataagcagaaatccatttttatccgcagtagccgctgtcggaatgatcttctcaacaaccgttttggcgcagggcgctgaaccacaggggcaaggcgagacggttaaaccgaatttttcgcatgcgatccccaacattccgggtaaatcgcttactgccgtcgaagtcctttatcctgcgggcgctgcatcggcatctcatacgcatgctccttcttcatttatctacgcctatgtcgtggaaggcgagattatcagtcaggtcgaaggtcaacctgaacggacttatcgggcaggcgaaagctggtatgaagatcctggcgcgcaccatgttgtcagccgtaacgccagcaaaaccaaaccggcgaaactactggcggtatttgtcgtggacaccaaagatactcagctcaccacgccagacagtaagccgtaa

SEQ ID NO: 441637 - DNA, 1134 bp, Serratia marcescens
atgaatcttgaagatttaatgaaacatataactataatccctgattatcgccaatcatggaaagttgagcataaattatctgatattcttcttctgactatatgtgcagttatagcaggagctgagggctgggaggatatagaagattttggccatgttcatctggattttttgaagttatatggtgaatttgaaaatggaattccagtacatgatacaatcgccagagtagtgagttgcgtcagtcctaaaaaattccatgagtgctttattaactggatgaaagaatgccacgcagtagatgaagatgtcattgcaatagatggaaaaacattgcgcggctcttacgataaaagcagacggcgcggtgctattcatgtaatcagcgcattttcaacgatgagtggagttgtgctcggccagctcaaaaccgatgaaaagagcaatgagataacggcaatgcctcagttgatggatttacttgatctaaaagggaaaatcgtcactaccgatgcaatgggatgccagaaggatattgctgaaaagatcagaactcgtgaaggcgattacctgcttgcggttaaagggaatcagggaaagttatatcgtgcaatagaggaagcctttccggtgaaacgaattaatgatccggagttggaaagttttgtgacagaagaaaaaagtcatggacgtaaggaaacaagattacacgttgtcagtgatatcccggacgaactgattgattatacattcgcctggaaggacctaaaaaaaattggtatggccgtgtcctttcgttctgaattaagtaaagataagagggaaccggaaatgcaagtgcgttattacatcagttcggctgatttatctgctgagaagtttgcctcagcaatgcgaggtcactggtcgatcgagaataaattgcactggcgtttagatgtggcaatgaatgaagatgattgtcgtatcagaagaggtgatgccgctgaattattttcggggataagacatattgcggtgaatatattgtcagcaaacaaagaattcaaagccgggttgcgtagaaagatgcgacgcgcggcgatggaccggaagtacctcgcttcagtccttgcgggcagcgggggttcgtaa

SEQ ID NO: 441638 - DNA, 351 bp, Serratia marcescens
  misc_feature (9)..(18): n is a, c, g, or t
atgctagcnnnnnnnnnnggcaagggcagggttgttattggtgataatttccattgtggttttggctgtgtgctaattacagaaaatcataatcatcatggaaacgctattccctacgataatacttatgtgctgaaggacacgcacataggagataatgtgtggttaggaatcaatgtcattgttcttcctggcgtcagcattggtgagggggcgattatccaagccggtagcgtggtggttaaaaatatagagccttacgctatagccggtggccatcctgccaaacccttttcgcaacgtgatgttgctcattatctgcagcttaaagctgaaggcaaattccattga

SEQ ID NO: 441639 - DNA, 1227 bp, Serratia marcescens
atgggggctgcggctttgtcgataggggatattctcggcaaagtcatcggcttcatcatattgccttatttgacagcacaccttggcgcgtcggggtacggcgcgctgactctgtatttgtccgttattcagatcttgatcattttcatttcgttcagtggtcaaggtctgttgccggtcaaatatatgcaggagggggaagggagctccctggtgttccgcagagataacatcaccttggctgtcgcgtcgagcgtgctattggtggctatattctacatagtcacacttgtcaccaagatctcagtttctttcagtgatggttttctggttgttttagcttctctggcacaagcgctgaactttatcaatttatcgcatttgcgcattagtcagacttataaagttgcggctatcggtcaatttttgctttccgcattcaatgttttgttcacgatcgccctttttgaaatgatagcggcgacgccaggacaacgtttgatagcgatcgcggcatcatttttcagcattcagttagcctatgagttctttgtctaccggaagagagcggttaaacgcagcgagctcgagccgtcgcgtaaacgttataaggaaatcattagctatggggtatccttattaccgcatcacggtagttattggattaagtcatcggtagatcgtttctttatcgctcattacatgagcactgctgttgtgggggtttatggcttggcattccagctaacctccatcgttatgcttttttttggtgtaatcaatcaggcgttccagccatttatttaccgcaaacttaaagcgaacgattttcgaggcgtggagcttattcaatatggatacacggctctggttattgtctcatgtgttatttatttctttattctgccgtttgcttttccatatttatttaatgctgaattcaatagcgcaatttattacttcaacatacttttgcctggaactgcatttttatcgatttattatatttttacgcactcactgttttactatcgtaaaaataaattaatatcgattattactatgggctcgatgattacgcatttgattggtatctttgtcatcaccatgacggaaataaaagttgagtatttctgcctggtatatgcaatttccagtttttatgcatgtgcagtgactttttattgtggcaagcgacagatcagcattgagaggaaaagatgctag

SEQ ID NO: 441640 - DNA, 558 bp, Serratia marcescens
atgatatcattttcaaacgctgttggtgctcagtacgattccgcaaaaggccagagcactgagccatcaaaaagagttcaaatggacgtgaaaattcccgttcaaccgtcaaattttgacgctctgcagaagggggccctgctgggggccttattatttatagaacacaataaaatccatatgcatcaatatacctacaaatctaaattcattccgagtccgggcaccatattcagaagaacccgcctatggcgggtttttcgctttctggggtacggactctccatcgaactacgttcgattatgcggtctgaagacctcaccctgcgggccagcgctcaagcgctgttcaacacggcgccagcgccggttgtccgagtccgggcaccctatttagaagaacccgcctatggcgggttcttcgctttctggggtacggactctccatcgaactgcgttcgattatgcggtctgaagacctcaccctgcgggccagcgctcaagcgctgttcaacacggcgccagcgccggttgtccgagtccgggcaccctatttag

SEQ ID NO: 441641 - DNA, 846 bp, Serratia marcescens
atgtcagaccttactctcaccgaacccgaagtattaaccggccacgcagacgtgatttgctccaccagcattgagcgtattgtcacgggacgtaatgccgcgctgacacaaattgaaacgttgatacagcaacttgatgatatttctgcattaaccgacagtattggcgggggcaaagcgaatgaatggggagtgcggcaataccgttatgactgctggctgatggagagctccgaaaccgcgatgaaggcgatcacccgcaatattgatcgcagtatctggaaagatctgatgaagaaatcggggatgctgagcctgatggatgctcaggcccgtgacgagtggtacaaaaaccttgaaggggaggatattcctgccgtcagtgaagccaatattctgagcacctttgagcaactgcatctgaacaagggggaggtgtttgagcgcggagtgataaatgtgttcaaagggctgagctggaattataagaccaatagcccctgcaaatttggcgcaaaaatcattgtgacgggactggtcaaatatgaccgctggggatttgggcttaactggggctggcagcgtgaccgcctggctgaccttgagcgtatgctgatgcttctggatggtaagccggttcccgacaaccgcgctgacgttacccgtcgtctcggcgaccatatccatgagaacaggcacagcacccgctatgaggatgagatgtttgcgataaaatactttcagaaaggaacggcgcatatcagcttcaaacgaccagagttggtcgataagctgaatgacattatcgcccggcactatccgggggcgttgcccactcaacagtaa

SEQ ID NO: 441642 - DNA, 747 bp, Serratia marcescens
atggcagcattcaactatgggcttaaagcggataacgatccggccaaccaccagcagaacgtgatgtttggacttgagatgaacccggtgagcgtcatccctaagcagtcggctacagagaaagcgggaaccaactggctgaagttgaatgagctgcaacagctgatgggtgactttcccaaaacgccaagcgttggcagcacggtgagcttgctgcttaatttatgtgtttacgctggtggtcggcgcccgcatgaactggcttccagtcggtgggatgccgtgaactgggaagagaaaacactgttgatagttgctgacgtctcaaagaacaagcgcgaccatttggtgccattaacggattcagctatagaaattctggaaaggctgaagagcgagaacgttaatgatagcccgtatatcttcccgctgcggttggatgcaggtaagcatctacgaactgacagctttgcgcaggcaatcatctattatcgcgagcatttttctgacaatccggtgtttgttgcgagggatttgcggcggacctgcaaaacgctgatgggcgaaatcggtgtctcgaaagagctgcgcgaccgtattcaaaatcatgctttgcaggatgtcagttcgaaacactatgacctttatgattatcttagcgagaaacgtaaggcgctggagttatgggagcggcgtgtcaataagcttgaacaaaccaccagcaatgtggttaatctatttagatga

SEQ ID NO: 441643 - DNA, 576 bp, Serratia marcescens
atggggttttgcatgattcagccaagcatgacttgtttgccgtatcctatccgggaaaaccgcttagctcgcgactcggcttatcaggtttgggacaaaagtggtgagcgcggagccgggcgactgggcgtgaaagttgagccatccgggcagcgggttttctactatcgatactactgggatgctaagcgccactttattcagttaggtcgttaccctgaaatgtcgctagctcaggctcgtcagcttgctaaaggttatgccggtacgctgaaggaagggaagaaccctaaggtcgaaaaggctgaacaagaagtcgcgctggaaaagcaaaagcgagccgaacagttaaagggcagcatcgagcagcttattcagggctacaccaacaaaatgcgggaagatggaaagcggacatggcagcaggtgctataccgccttgagaaggaaacctattccttattgccaaagatgccaaagcaaacgaagtcacgccgctacatatcaaacagattctgcctgccattattcaacgcggcgcgagcgttgaagcgaaccgtgtccgttcttatctga

SEQ ID NO: 441644 - DNA, 564 bp, Serratia marcescens
atgtctgtaaaaaatgagaatgccgtcagtggcgaaagtatcgtgttggaacggtcgcaagccggaggcgtatatacctccctgtttgaaaaaatcaacctgaacccggtctctgagctgagtgcgctggatatctggcaggatgcacaggcgatgtcggatgcgacggcagatgaacgtttaacggccggcatgcaggtgttcctggagtgcctgaaaaaatcgggcgcaaaagttgaaaaactcgacaaaaacctgattgaccatcatatcgcggagttggatcaccagattagctgccagctggatgcggtgatgcaccatgaggactttcaggcggtagaaagtctgtggcgtggcctgaagtctttggtcgataaaaccgattttcgtcagaatgtcaaaatcgagctgcttgacctttcaaaagaggacctgcgtcaggactttgaagacgcgcctgagattattcagagtgggttataccagcacacatataccgcagaatacgattctccgggggggcgagccgattgctgcgctgatttccgcttacgaatttga

SEQ ID NO: 441645 - DNA, 690 bp, Serratia marcescens
atgagtgagcgtaaacgcggcaccgctgcgtccattgatattgatgcgctgttgcaggacacctggctgcaggtgatcagcttgcgccacggcccacagttccaggaaggtgaagggcggatcctgtgggagcgctgtatcgccgatgtggagcgcgtgcagcgtgaactgaaagcgaacgagttcgatgaggtcagttgcctgtacatcatgaccgcgcagtgtgccctgctagatgaggtggttaaaggtcgcggtgtggaggatgacgcctgtgtgcagtggtatgacattccgttgcaggggcatttcctgggcactatggatgccggcgacacgctgtgcgagcggatgcgcgatgtgctgcatgagccggcaccggacaaggcggtgctgacctgttttcagcgggtgatgatgctcggcttcctgggaagcttccactccctgaactccccggaacgtcagaaactcgttgctgccctgagcgaacaggtggcgccgttcagctatccgcagacccatcccgtaatggcagaaagccgtacagggcgaggcaagggtggctggctggtgtcgtggcctgcacgccttggactgagtgtgatcgttgtcgtcggcctgtggtgggggctgaaccactggctcgatctgacgttgcggacgctgttgccggaggcagtgaaatga

SEQ ID NO: 441646 - DNA, 1713 bp, Serratia marcescens
atgagtcctgcacgacagcgtgggctggcggtgtgggccgctctgctgagtgctgtggtatgcctggcttttttgccggtatcccggttggtttctgttttcgccctgttggcgatgttggggctcatcatggcgttctggttcgtcgccagccgtcgtggggaacatgatgctaacctgtgcctggctgccctcccggaggccacgtaccgtcaacccgtggtgttggtctgtggcgatctgccgctggcctggccacagcagtcaccggtgcttacggtcactcaggggtgctggatccgcgtggaagatcatcaggatctggagcaggcagcccgccaggtactgtggttgcgacctgactggggtcgccagctgtcggtgatggtcagtgtctgtccacagaaacacgccgacagcgagcggcttaccagccttatgctggccctgcgttggcaagtcagccggttgcgtaaggaaaccgggcactctgtgccgctggttctgaatggtcagattggcagcgcgataacgaatgacatgctgtggcaggccgttcttccgggggaagcggtgagggtctggcgtgcgtcttcagcgccgggctcaatcgctgcctgggtgaccaccggcggaatgcctgcgatgcagcaacaggtactgatgaatagcctgatgggctggttccatcagcacgtcaacgctgtctttatggatgagaaccctgacgttccggccgttgcacctgttgcggtgctgtggggaatggggccgatcctggccggaagcctggccacatcggcctggacggtatggctttcccgccttaccgcgatgcagcaggtgactggttggcagccggtaggcaccgacagtacggttatatcccccttcccggattttattctgccgctgctgcccgaagggcgaggcctgacgccgcgtggacgtacctggcgttgtgcgctcgggattttcacgctggcagccattgctgcgctgctcagtagtggctggaacaatcgtcagttgctgcaacgtgtgggcttcgatattgcccgttatgagcgtatcccgatgcatgatttcggccccaaagccgatgccgttactgtcctgcgtgacgatgcggcagagctggatgactgggcgcgcaatggcgtaccggcgcgtatgggctttggtctgtatcagggggagcgtctgcgaatgcctgtgctggatgcgatccgttcgtatgtgcctccaccgccgccacctaaaccacagccgaaacctaaaccggtaccgaaaattgtccgcctcgacagcatgtcgctgttcgattccggcaaatccgtgctgaaggctggctccaccaaaatgctggtgaattcactggtcggcatcaaagcgaagccgggttggctgattgtcgtgtctggccataccgataacaccggcaatccgcaactgaaccagatgctttcccagaagcgtgctgaagcggtgcgcaactggatgcgtgataccggcgacgtgccggaaagctgttttgcggtgcagggttatggcgaaagccgccctgtcgcaaccaatgacaccccggagggccgtgcgcttaaccgccgtgtcgaaatcagtctggtgccgcaggccaatgcctgccaggtacccggcaaacacccggcgccatctcaggatgatggcgcatcacaacacaatggagagtaa

SEQ ID NO: 441647 - DNA, 765 bp, Serratia marcescens
gtgaccacacaatggattgaggaagtcgccgttacctgccgggcatccgggactgattatctggatatcatcgttgatcaggtagggctcgatttcagcgtgatcccggcattgaacgcgctgtcgatagagtggcagtcgctttatcatgggctaccggaagcgttcatcgtcgatgatgctcctctgatggctcgcattattcttgatgatcttcagcaaatgcagtggctgcaggacattagccggcaggtcgtcgctcagacgccgttgctgctgttgtgttcgtcctggcctttttctgctctgtcaggttggctctcacagtgtgtggatattctgcaggaagggcggagcgggattttacgattttacgatacgcggattttccctctgctttttacgcatgttctcagtgaggatcaacggagacctttgctgcgcccggccctgttctgggcgtggcaggatatggacggtaacgcaagaggcataaaagggacaggagcacctctgacacgcgaggaaaaaccgcacaaaatcgacctcagcgatcgccaactggagtctctgatgtgtgtatgtgatgtcatgctcctcctgtcgcacagtgcaccgcccgcaggcgtttatacatcgcggcaggcgctgttttctgattgttatcagggcatgctggaagccacccgacagggcattattctggatgatgcgcgtgaggcttgggtaatgaaaagatggtcttccacaggagcaacagcctga

SEQ ID NO: 441648 - DNA, 234 bp, Serratia marcescens
atgctcctcagaatctgtgttcttgctggtgggctgctgctaaccggctgctcacagcctgccgctcaggcagggggcggaggtggcaccattaaagccatcaaccacaccaaatgggcgattaaccatttcagcgtggataaccagtcgggtatcgacattattggcccgttccaggggggggcggtggcggctgctgctacagtgtgcccgcccgctggacgccgggtatga

SEQ ID NO: 441649 - DNA, 294 bp, Serratia marcescens
atgacggtgcgtattgactgggaaaccggggtgggggatatggatggatttcccggctatcaggaccgagaaaaatatctagcatgggctaagaaaatgagagcccagaaccgtcagcacagcaaaaccgtcccggtacccgactataccggccaggatgtctgcggcatcacggtgcactttttgccctgcgatgacgtaaaagtcacgaccagttgctggtcaccgagaaatgccaactacccgattaaagagtccatcaggatgaaggagcccaaagactgtccgagatag

SEQ ID NO: 441650 - DNA, 258 bp, Serratia marcescens
atgagtaaagtcatccggaaaggggaccgcctgcgggaacatggcggtgaggtgttaggggggcattatcagtgctttggccaagggtttgcctgcaagggcgatccggtgagctgcaataaacacggtatgaccaccatttccgaaggtagcacacggaccacggttgatggccagccggtcgcgctgcatggccatcgctgcgcttgcggctgtacgctggtcagttcttttcctgactgcggtattgaccagtga

SEQ ID NO: 441651 - DNA, 1131 bp, Serratia marcescens
gtgaggcccgttcctgactatccggggtataaaacggcccgcccgccaggcactgcccgctggctgtcggcggcggcgttgctggtgctgttcagcggcgccgtcagcgtactgctgccgtctgctgaaggaaaaagctcgctggttgccgccgggatcctgctgtcactgctgctggcgggcacgggctggttggtacggctgctgtactaccgcgtcagtgcgcataacgccgctttctaccaccaactggtggcctacgaacagcagttgtggtggtcgcaacatcggcagccgttctgctttaaggaaggcgtattgttggggccggcgggccgatgtgctaccgactgggtgcgcgtgcttaatcgtgaacagcgaccaccggaggaaagtaaggaggggagcggcagtgcgctgaggctgccacagatttccaccacagacgttgtcgcgcgtgaaaaacggctggtggaactgctggttatcgagtggcaaaagcagcgtggcgaaaaggggctcacaccaccactgcgttgctactggcagggaacggacatgacctggctggtattccgcgcgcagatggccgccactttgccggagatagcgttacccgcgcggcctgagccctggcaaggagaggccagcctggctgagataacgagctgtctcgcgcacgccaaacctgaagatacggtgctgatcgccggctgccaagtggttgcggcacggcccggtacagcatttcccgccggggagtccgccgtactgtggctggccgggcaagacgggccggtaaaactgacacgcggtgaaactttctcgccagagaaaggggatacattacccagcgtgttcgcccgtgcgctggagcagagcgaactgaaagccccccctgaggcttgcccgttgtttttcaagccaggccttgagtcgctggcgggcagtggctgggatatcggccgacatctgcaggacgcctactggggggataccggcgatatggaggcgctgatcgtactatcgctggcggctatctccgccgcgcactaccaacaaccgtgtggctggattgcccgcgacccaatgaacaccctcgcaatgggaattgtaaaacctgatggataa

SEQ ID NO: 441652 - DNA, 3417 bp, Serratia marcescens
atggataacgtcaataaacctgctgccgtttctgtggcagccacggcaacagtctgtattgctgtgaccacgctactggtactgctgggcggactggcatggtggctgtgggcgaccgaacgttcaacggaatgggaggcgctgcgaccgcttatcgccgccggctttatcgtctggggcgtggtgctcagtctgttggtgctgggttttatggccttccggttgttgattaaggataaggtgagtccgtcgacatcccgcaaacataaatccgcaaaggtgagcgggcgtgaaacggcttatacaccgttgaaagcacacctccgctcgcgctatagcctcttctggcatcgcaaagttcgtctgctgctggtcactggtgataatgcggcaatcgaacagttggtacctggcttgccacagcagcaatggctcgaaggcaaccgcaccgtgctgatctacggtggcagcctggcaacggagcccgacagcgaaaaatacgccgcactgcgcaaactgcgccggggccgcccgctggatgggattgtccgggtgatgccagctgcgttaaacctgacaccgcagataagcgataacgatttacgcaggctcgaaaaaatcagcgagctgttgtgttactctgcgccggtttggctgtggcaactgtgcgacagtgactggtcgcagactaaacgcactgagcaggcggtaggggctcacttcccgttgtgcgcaaatgaagaggatgtcacccgccagcttgagcggatgttgccgactctgcggacgcagggcatgagccagatcgctgagaacaacagccacgacttcctgctgcgtctgggccagcacctgcaagacggcggtattacccgctgggctcagcaactgatgccatggctgtccgtttctcagcgacgcgttccgctgcgtggcctgatgttcggtctggtggcgaataagtccgccgatgcgtcagggggcgtcattgctcctgcatttgcagatgcagaacaatatgccccaagctcacagcgccatgccctgaccctaccggtaacctggcagggcatcgtcgatgactgtacccgtgtacgtggccgtcgcgtgggtctggcgtgggagcaggcgctcgtctgggcgctgatggccattaccggcatctggggaacggggctgttgctctcgtttgtgctgaactacggacaaatatcttctgtagcggcaaaagcccgcgcgttggtcgaacatcctgccgtttcggatagacaactgacagcgttgcacgatttgcgcaacgatgccggccgcctgctgcgccatgttcaggaaagggctccctggtacctgcgttttggtcttgaccataaccggcaactgctcgacgcgatgctgccttggtatggcgtggcgaataatcgtctgattcgcgatccggcacataccgccctgacgcagacgctcagtgcgctggccaattcggcgccaaacagcgagcagcgcacaaagctggccaagccgggctatgaccagcttaaggcctggctgatgatggcccgtccggataaagccgacggcacgttttacgcacagaccatgaaaacggtgcagccgacgcatcggggtatctcaaccggcctttggcaaagtctggcgcctgatttatgggccttctacctctccgaactgccgaagcagccacagtggaaaatcaccccggatgcgcagctggtcagccagagccgccaggtcctgttgcagcaaattggccgccgcaacgcggaaagcacgctgtatgagaacatgctcaaatccgtgcgtcgtaattttgccgatgtctctctggaagatatgaccaacggcactgatgcccgtcgcctgttcaccaccgatgaggtggtgccgggcatgttcacccgtcaggcgtgggagggggggattcagcaggccatcgagaaggcggccagtgcgaggcgggacgaaatcgactgggtgctgagtgattcccgtcaggccgtatcgactcacctgtcgccggaagcgctgaaagcgcgcctgactcagcgttacttcgctgattttgccggtagctggctgagttttctcaacagtcttcgctgggggccggcgaacaatattgccgacgtcaccgaccagttgatgctgatgagcgatgtgcgccagtcaccgatgattgccctgatgaatacgctggcctggcagggacaaacgggccggcagagcgaggcactgtcagattcaatcattaagtcggcgaaagaactggtcggcagcaaggataaaccggctatcgatcagcgtgcagtcggtccccagggaccactggacgacagctttgggcccctgcttcagctcctggggaaaaacactgccggcagcgtgatgtcggctgagggctcgctaagcctgcagacttacctgacccgtatcacccgtgtgcgcctgcgcctgcaacagatagcgagcgcctccaacccgcaggagatgatgcagacccttgcccaaacggttttccagggcaagagcgtggatctgaccgacactcagcagtacggcagcctcatggcggccagtctgggggaagagtggagtggctttggtaatacgatgtttgtgcagccactgacccaggcctgggaaacggtgttgcagccgtcagccgccagcctgaacggccgctggagtcgctcggtggtagcgaactggcgcaccgcctttgagggacgcttcccgtttgcggcgagtaagagcgacatctctctgccgatgctggctgagttcatccgcaaagacagtggtcgcatcgaccaattcctgaccatggaactcaacggggtgcttcacaaggagggcaatcagtgggtgccggacaaggcacacagccagggcctgatatttaatccggccttccttaaagctgttaaccaattgagccagctgtcggacattctgtttaccgatggcagtcagggaataagttttgagttgcaagcccgcccggcaccgcaggtggtggagactcaactgaccattgatgggcaaaaactgcactacttcaatcagattgctgactggcggtctttccgttggccgggggagacctataagccgggaaccatgctgacctggacgtcaacgagtgcaggtgcgcgcctgttcggagattacagcgggagctggggctttatccgctggctggagcagggcaagcgtcaacagttggatcgcagccagtggatgatgagttttaccgcgccagatggtcgcacgctgcagtgggtgttgagagcgcagcttggcaaagggccgttggcgttgctggatttacgcggttttagtctgccggaaaacatattcagcgtggaagcttcagcagccgctgacccgtacgaatga

SEQ ID NO: 441653 - DNA, 1596 bp, Serratia marcescens
atgaccacattacagaatttacttcacacctgtggcgtggatgaaaacatcctggtgagccaggcccgggggcgttgtactgactgggaacactggctgacgccggtggaggagcatcggccaaccggggaggatccgggctacgacgacgatttccagcgcattcgcgaagaggtcaacaagctctccggcattgataccggattgatttgccaactggcggaaaagttgctgaccgacaggtgtaaggacttgcgcgtcatcactttctatatctgggcgcgcctgcatcaggacggcgaagccgggcttgcgcagggggttgagctgctggccgccatgcttgaacggtttggcaacggcctgcatcctctgcgcgcccgtagccgtaaatcggctctggagtggctgggtagtagccgtgtgatggacagcctttcgttgtatccggaagtggacatgcccgtcatgcagcgtatcaccggcgccctgctgctggtggaacaggcttttctgacgtttgatgacgatgcgcgtccggaacttggcgggctgtatcaggctctggaccatcgcctggtgcagaatggcggcgccggcagcctggtgccgcagaccagccgggaagagggaagcgcggccgcggcaaccctttctgcgccattgatgaatgcggttacgtcagggcgcgatctgctcgatcaggccaaggtgttggcgaaatacctgcgtgaccagcccggcggttggctggccgggcatcatttgttgaaaagcgtccgctgggacacgctgacggaacttccgccgctggatgccgccggtcgcacccgcctggcgccgcccaaacccgacaacaaagcgcatctcaagcgcttgtttctgcagaaaagctggttagaactgttggagcatacggatactctgttggctcaaggcgttaaccatctgtggctggatctgcagtggtacacctggcaggcgctggtgaaacaggatcacgacagcgtgcgtgccgatatcgtctgtcgtgatttgaaaggcctgctggcccgccttcctaggctggaagcgctggcatttaacgacggcacacctttcgccgacgaagtgacgctgaactggattaacgaagttgtactgtatgacccgacgggatggaaaaatgagcctgtgatggcggcaactgagggcggcgatggtgatgtgctggcgctggagcctgaagtgatagctaaagcagacggtgaaggtatcgaagttgcgctcggttggctgcaggttcaaccgggttacacctctgcccgcgatcggtggctgatgcggctgttgatggccagagtcagcgagcagtacggtaaaaacgacatggcgttgcatctattgggagagctcgacggcagtgcccgggttctcacgctcgagcagtggacgccagagctgatatttgaagtcaaagcccgcaggttaaaactgttgcggggcaaagcagggcgcaatgaagctgataaagcgcgcctgcagcctgagatggatacattgcttgccggcttgattgcactggatccagcccgagccgcggtactgtgcagctga

SEQ ID NO: 441654 - DNA, 1086 bp, Serratia marcescens
atgggaagagaagcacaaccgccgtattcccggctaacccagcgcctggaagccgaccttcagcgcattaacttttaccgtttctgccaactgctggagaagcgtaatccgggcaggccgctgatgggctcgaccagccatcccgccgatgacccggtgcgctttgctcctcatccaggaatgggatttcccgtcagtgaactaaaagccgtcgaatatgacgaggacgacgacagcaaaccgccggtgattcgcaccacctttatgggaatgtacggcgtcgattcaccgctgccgaccgcctatctcgattacatcacccaacgccgggaagggcatgaggcgctgcagggctttctggatatcttcaaccatcgcatcctgacgcagttttaccgcatctggcgtaagtactcttacccggccacgtttgagcctggcggtgcagacagcatctcgcagtccttgctgggactggtggggctgggtattcccggtaccgccgaacacatagcgactccggtatcacgtttcctctcgctgctcggtgtactgcggcagcccgggaaaacccaggagggggtgcaggcgctggtgaccctgctggcgccggataccacagtgcaggtgagtccgtactgcctgcgtccggtggcggtcagtcagccgctgggtttttacggcgatgatgattttcttttggacggtaatacgccactgggcgacgaagcgatggatgccggcagccaactgcgggttgcactcacgacggataacgaacaggaagtgcagggctggaagccggatggcctgctatatcaggactttctggtgatgctgcgggtgtatctgggttggcgttttaaggccagaattaccctgaccacctcgacccgactgttggccgccccgccgctcggcgaaggttctttctggttgggcatgaacggtgtgctgggcgcggaagagggggagtctgtagaggatattcctcagacctttacgacggaactgggctgttacaccgggctggagccagcacaaccacaacaaggaagccgatgtgttacatacatgtttaactaa

SEQ ID NO: 441655 - DNA, 498 bp, Serratia marcescens
atggcattcagtctggtgggatgcggggtgacgcagagcgtcaccgatggcacgaagtctgccttcagtgccctcttttataagaagattaaggtcctgcacctggatttcacggcacgtgaagcgctgaataccgacgcccgcgagagcaactcgttgtctgagccggtcgtggttcgcgtttaccaactgaaagaccgcaagaccttcgataaaacggtctatcagcaactgcttcaggatgacggcatcattttgaaggccgatctgcttgccagccgtgatgtggtactgaaaccgggcggggatattaaccttaacatgccgatggaagaagaggcgcagtttgtggctttggtggggctgttccgccatccggatatggacaaaaacacctggaagctgacgatgggtcgtgaagagctcgatccggacaaggcccgggtgattgaggcagggaataatcatctgacgctgctgcccttaaaggataagtga

SEQ ID NO: 441656 - DNA, 444 bp, Serratia marcescens
atgcctcatactcacaaatcaccttctctgtatgagatacttgccggcaacttcaccggtggtctggcgctacatcaggtcagcgaagaaaaccagctcatcctgtccgtgctggacaatatgcagcgcattctcaactgtcgtaccggcacgctgtcacacctgccggactatgggctgccggatatgacaaaaattctgcagggtatgccgggaagtgcgcatcagctaatgagcacgctttcggatgtgttgctaaaatatgagccgcgactgagatgcctccaggttgttctgcttgagcagagacagccgggtgagctgcgctatgccattgatgctgagatgaaaggtctcggcttggtgcgttacggtaccgagtttatgccggatgggcgcgtgctgttacgtcatttaaagcagcaacactatctggggcattag

SEQ ID NO: 441657 - DNA, 1245 bp, Serratia marcescens
atggcaagaaaaaataaaggtgataatgcggcgggcgctatcctcgtcattcttggtgtcataggttggggtatttatgttgcggttaaggcgctgattaatgttaatgagcgttttatcgattcagtctcaacgcctgagggtattgtaggtgtgttttttggcctgctgcttatggcttcgctactgatcagagtatttatctaccgtggcttcaggcaaaaaacggcagcgttgaaacagaaagaaactgaccttgagcaaaaagaacaggcctttgaagaccgagtgagtgtcgccgtatcgcggtctcttgagagagagcggaatcgacttgccagccactgggaggagtttcgtgaggccaaaaataaagcgagccgggcgctgcagcgcattgtggattcggcatacaagtttaaggtcaagacgctgctggcggggacgacggtaaataactggcaaaccaagtatgaccagctacggaaggaacaagaggcgtatgctgccatcagcgagaaaatcacctttctggaacttgaagataacgccgactggaagggcgtaaaacagcagttcctggataaggtcgccctgctggaaaaggcgcaggaagaaaaagagtatcaggccgaacttaagcgccagatgcgggaagaaaaacagcgccaagatgaactggacaggcagcaacaggaggcggaagaagaagaacgacgccttgctgagcaacggaaaatgcttgaggaagcgctgcttgccgctgaaggcgcgcacagggaagagctggagaaacaacgtcaggagctggagcaaaaaatccaggatgtgcatcagcagtatgaacgcgccaaatctatggctcaactcacgaagcaggggcatgtgtatgtgatctcgaacattggctcttttggtgaaaatgtcttcaagatcggtatgacccggcggttggagccgatggaaagggtgaaggaattaagcggggcagccgtacctttcgattttgacgttcacgcgatgatttcctgtgatgacgcacccgcgctggaaaaaacgctgcatgatcacctggaacactaccggattaacagaattaacctgcgcaaggagtttttccgggtagacctcagcaaaataattagtaccgtagaacgtcatcatggccgaattgactatattgctgatccggtggcgctacagtatctgcaaagccaggaatatgcagacagccaggttgcctag

SEQ ID NO: 441658 - DNA, 378 bp, Serratia marcescens
atggcaaaattaatgacctccctggcgctttgttcggggagaatgacccacggggaacggcgtgttgctcagcgtctggagtcgcatctggatgagaattgcctggtttggtatgacatcccggtggggcgacagtaccggcatccggactttgtgatcattgatcccacccttgggctgatttttttggaagtgaaggattggcggctgagcacttttcgtcacgccgatccgcaaatggttattctggagacagagcaagggaaaaaaaagaacgccatccgttggtacaggtcagagagtatgcctgcgccaccgccgaaatgttatcgcaagatcctcgcctgcaacagagtggcttatataaggggaaattga

SEQ ID NO: 441659 - DNA, 138 bp, Serratia marcescens
atgcccttcgccaagattacgggcaagtacttcttgctggatatccatccctttcagaaagcgtttatctttattttttaccgggatagctatttcaggaaaaaggtggcgccgcacaatatccctgatcgtcggtga

SEQ ID NO: 441660 - DNA, 507 bp, Serratia marcescens
gtgctaccggaggcctgtggtgacgaaggtaaagtgccggatctggtgcaatgtggctctgccgaagaagaagccaggtgtgtcgtttcctggctgacgcaaaagtacgccctgactggacggtggggagatatggcggtgttatgcccgacgcagttttctgcgcagcgtcttattgatgttttggataagcaggggataccaaagagcgtcagctttacctccgtggataagaaacgctattcgcatcgggaaaacgtggtgcatctactgaccttacagagcagtaaaggcctcgaatttccttttgtggcggtcattgatgcttcttttgtgcataaaggtgcagaggatgaatcggcggggatcccggcgctgtatgtggccttcacccgtgcgactcgcgagttgttggtgacctgctatcggcagaacagcatcagtcgccacctggcgcgttttgcagaaatggatcttcaggagctgaaatacagtgagcagcaataa

SEQ ID NO: 441661 - DNA, 1224 bp, Serratia marcescens
gtgagcagcaataatacgctaaaaacgggcggtgacccgcgtgcactaccggattatgccaccctgcgtgatgaactggcgaagctctcgcacccggcgcgcccggatgtggattggtgtcggatagaacatctgagcctgtcgttgtttcgtcaaaatggtgtagagctacagacagctgcttggtatacgctggcgcgaattcgtctggctggaatggcggggcttaatgaaggtcttgcgatgcttgagaccctactgacccaccagtggggagtgttatggcctcagcctattcatgcccggatggaaatactggccggcttcagtcaacgcctgcaatcggtgttgcgtacgctaaatttgcgctatgtcgagttgccgttagtttaccaggcagagcggcacctgaatgctatgtgcgatgtgcttcagaggctggagttgagaaatgccagtcagatggcggagttgagcacctttatgcataattcggcgacgaggttggagaatataaatggagaatacagcgataatcctgccgttgttctgcctgtctcttctgccagccccatgacgtcgcaagttgagcctccggtttatttttcccgcgaagagtcgacaattccaggagtggtcaccgttgctgtggtggcgggcagtcggcatccatggagggcgtttgctgccggtatggcgactatgctggttgtcggtacggttggtctgtggggatggcaaaaaatatatccggaaccgagcagcccggtgccgttgagcgccgatgcgtcttctttgaaggtgcttggccaactttcaccgctatggcggcaggagtatggctttatgctggccgccagtgcagagcctgcagagacagacaaattaaaattgcaatggcagcagtatatcgacgaaaacgcactgccatccgaagcgctttcagggtggcatcagggaatggaagggcttaaggaactgacccgtcgcctgaatgagttggatgaacgtaaaggtaaatatctgacaggctctgaattgaaatcgatggtgtttgcaatcacccagagttttggtcacacggtacctattgaggagcaattgtatcgattggaacgagatattactggggaatcattgccttcagccatactgctgcagacggatatttaccttaaccagttgatgaatcgttatgtattgataaagcagctggggaaataa

SEQ ID NO: 441662 - DNA, 1809 bp, Serratia marcescens
atgagattacacagttttaaagtaaatggattcaaacgcatccagtccgcggaaataaaatttggcgatgctacgttcttgattggctccaataatgcgggtaaaagttctgttctaaaggctgttgagtggttactttcagataagaagaaaatggataatgattgtttttattctgaaatagacggtgatactcgtgagaataaaatagcaacagagtccgttatacttgaagcagaattcagaaatgtgccggaagaagctttgaaatggagggggtttagaggtcgaatatttgattatgacgtgggggatagcggcgaaacaggaaaatcactggtttataggaaaacatatgaaccgggctgtgatgttgttattgaactgaagtctttttccagggatctgaatcagcgatttaaggctgcggttaaagtttctgacttggttgatgctggtgccgatgtggcggttgtttccgagattttccctgatcttgataaaaaactaaatgctgctgacaaagaaaaaatgaaactcattgatgaactctgggatatttcagatgatgtagaggtttgggataagaacccaggtggcatcgccgggattgtcctttcacgcctacctgcatttttattaatcccagcggaatcggcctctcatgagattgatacaaaagcaggggcattacagaaaacactgaatgaactgtttaaagatgtacgaagcaactctgataattatagacgggcccaagagtcgcttaacgcacttgctagagagctgaaccctgcagatgaaacatctgaattcggtgtgatgatgggggagctgaatggggttttgagtggcgtgtttcctgagtcaaaaatttatgccacagctgatttatctgatccggacaatgtgcttgttccttcattctcaattgaaatgtcgagtaatatcagaacgtgtgtatcaaatcagggaaccgggatggtccgtgcggctgtattcgggttgttacggttccggcagcaatggctgagaaaaaaaggcaaagatgaaggcgcgatgcggagccttattattggattcgaagaacccgaaatctatctacatcctagtgccgctaaccagatgcgggatttgatctacgagctgtcggatggtcagtctcaaatcatcgcgacaacacattctccttacctgattgacttgtcaagaaagccaaggcaggtacttaatcgttttcactatgatgatgcacatacgacggtatatccactttctgtgacagagaagtttcaggctcttcaggataatgataaagatcaagttaagatgcttattaagcttgatgaccatgtctcgaggattttcttcacccgcaaagtcattgttgtcgagggagacactgaagaggttatcattaaggaggctattcgcagaatgcctcaggcgatgcggtgcaaattgcttgcatcaacagagttggttaaagcgcgtggcaaggctgctattatcggtctggtgaaatatcttagggcgttggatgttgatttttttgttatccatgatcgtgatggcggtacagcaggtgctgaggtttttaacggcccgattgctgctgctgttggggaagcagataaagtcattatgctggaggagtgtgtggaggacttattaggttatcctgcccccgggagtgagaagccatttaaggcatatcaggaaacacagcgatggggagataattggaatgatgtgcctgaacctttaaggcaagtacttacaaaggcattttcaccttttattccctga

SEQ ID NO: 441663 - DNA, 894 bp, Serratia marcescens
ttgggggtattaaaggttgctagtcattccatggtcgtgaaaaatgaatggtttttaaatatggacgatatgaaagaattaacgttgtggcgatatttgtcgcatgaaaaatggctgcttcttttggaagataatggtctgtttttttctaaggcttcgaaattcgaagacaaaaatgaagggtattatgatgttgaggggaaatattccatcctgcaggaattacatcctgagtcaattgacgtgatagataaggccagatgcattgctcagtcgatcagagataaagctcctgagcacacttatatatcttgctggcagaatatgtcggatgagtctttgaggatgtggaaagagtatgtaagcgatgagcgggaaggcgtactcgtcagaagtgatattatttcactcttgttgaatattccgaaaagcttgagtgaagttataaccggtaaaaattgtaaatactttgcgaatgacagtgagaatttaaattttaacaatccgtttgaatataaaagagatttgtattcgtttgagagtgaatatagacttgttttagatagtatgcaaatgagcattatgacaggtttcaatcctgatgaatttggcgaagttttaacagaaaatgagaatggtgagctgctcccatttcatgaaactctaccactgaaaaatgcttcagatgatgtacagataaaaccagaggcaggatatgttatcaaatatccgttagatagaattattcatgaggtaagggtacatcctttagcttctgatatttatttgtcgcgtattcgagatgatctgaaaaaagcaggggtaaattgtcctgttaatcgctcggccattacccatgcagaatttttcaataatagttttagtaaaatgtga

SEQ ID NO: 441664 - DNA, 213 bp, Serratia marcescens
atgacatcaccaacggtaaaaatcctgcgtctgccagccgttgaggccaaaacgggcatcgcccgctccaccctatacgactggctcaacccgaagtcaaagcgctacgatgcgacgtttccaaagcagcggcgattagggcaacagtctgttggctggcttgaagccgagatcgaccagtggctgctggcacgtaacgttactaaagcataa

SEQ ID NO: 441665 - DNA, 714 bp, Serratia marcescens
atggatgattttaatctcgatttttttgttgatgagccaaaagagtcattcaacatcaagaaagctcgtctggcgctcgctctacatgcggttggctgggaaaccgatattgcctggttgaatggggacgatcctgatattgatgaaatagtggaaggtgttgtgcaaagcgccgcgaagcgtcgggacttcgagcagaagcaggatctgatgctgtttgaagaggccgatactatacaaacgttagtaaatgatcggatctttctggcggcaataaactggtatgcagggctgcgtttattggcgtcggattggcgcgatgggtttaggttgttacttaaatcgactgagcttatcgatatgtgccgaggtatccttgaacacgttatcttgcaacagaatgaagcagagaaaaaagaacgggcgactcatggaggtaaagcgaaagctgccctattttccccgctcaaggccgaagttattcgtttgttacaggacaaacagccgaaggatggctggaaaagcaaaaatgcggctctgaatgcgattgataacgatgtatatgcgtttatcgaacagtatgacttccccggtctctctgggaagcagagtacggaaattatccctgtaacagaacctcgtgacaaaattcctcgtttggtcatagactggccccatgaatctccagacagttggtatcacttaaataagtga

SEQ ID NO: 441666 - DNA, 1200 bp, Serratia marcescens
atggatatatttgaatcttttaaagctaaaaaaacaaaggttagcaatgtagataatttttttaccccttcgaagcctattaaggcgccaactcatttgaagggaagggataatgaagttcatcacatattgcaaactctgaccactgttggcaaacatggcatgatctatggagatagaggtattggtaaaagctcgttagctctatctactttggagggaggcaagaaaaacgatatattacccgataccatttttattgttaggtgtgatcaacggactaagttcaaagatataattagacagcctgcagtatttatcgatgaagaatatgctgcagataaaagagagcggacaaaaaaacttggcggcggattaaaaatattagatatatttagagcagatgttggatttgaagagaagttaacaattgaaaaagaagagttaactccgagtaaagcagcttttgctttagaagacttggaggctgtgctacttattgatgagtttgatgttgttgctgatgaagtgaagcgtgaagttgctgagtttataaaacagttaagtgatgccaatagtaaactaaaaacattgcttgtaggaatcgctagtgatggtgccactcttattgctggacatcagtcggttaatcggtgcttacatgagataaagctatcaaggattgaaaataaatatatttctgaaattattgaaactggcgaggaagggcttggtattaaatttgagaggcagataaaagattcaattgttgatatcagcaatggctttccttacttcactcatttaatagcaaaggaagctgcggatatagtgttggaggaaggtaagacagttgttgatagagatatactagagcttgccttaaaaaaggcagtggtgaataccgaagggcagcttaagagagcttatgacttagctgtgacatcttcgcgcactgatgtttatccaagcatcctttactctgcatcaaagttcgatgaaaataaatttactatccaagagtggattgggcagataaaagatgacacagggaaggttttgagtaattaccatatgagtaactacattggtagatttactcgaattgataaaggtggggttatcactaaagctgctaggggtgtttacaaaataactgatcctagaatgccaagctacataaaaatgattaattcatag

SEQ ID NO: 441667 - DNA, 1023 bp, Serratia marcescens
atgggaagagatataactttatatcctaagaaggcaaccagagatgagcttaaaaattatcttgaaaacttgggatttaagaagtgtaaacatctttgggaatggccaaaaggaactttgaattactattggtttgaccatacagacttcaaatcaattgatggagtttcagctgatatatatcctgtttcagatgaaaaatcacacacatatagtaataaatgggcattacatgtgcgtaatttatatagcgccagctggtatgatgtaaaaatgcttaacgatgttctaaaaggcgcaagaagtctttttggcggaactattgaaggtgattacgggaaaaatagatacgctactctatgggaggattctagcacgccgatcagtagggggatatcttcaatatacaatcatgttcgccaagaaattttttgcgttaaacatgccttaccagaacctacaattaaattaaccccaccggaagatggcgaatcatcagaattttttgaactcatgcaaagcatggatccgagtagagtcatatataatggattagtgccttttgcggttgcaatgtttgaatacttcttctcccaagcttttcaggtgctaataaaatatgacccttttgcaataaaaaagagagtatcgcataggcaaaaaattgatttcgacgttttacttgaaatagaaaaaggaagcatatcaatagaaaatgtcattgctagaaatttcactttccaaaacttagaccaacttaacaaagcttataaagaatggctagatatagatgtgagagcaattcttttcaagaaaaaacgaatcggaaagtcaattagtttccttgagaatcgaatctctgaaatcatacaatacaggcatgggatagttcatcactttgaattagacagaactttgaacagggatggatatattcatatattagaagcaattgaaaaaagtataattgaatttattcatttcatggaaggtaaatacaaatttaaattagatgattattaa

SEQ ID NO: 441668 - DNA, 303 bp, Serratia marcescens
atgaaaagaagaaatttcagcgcagagtttaaacgcgaatcagctcaactggtccttgaccagaactacaccgttgcagctgcggccagtgctatggatgttggtctttccaccatgacgcgatgggtaaagcagttgcgggatgaacgacagggcaaaatgccaaaaatctcccccataaccccggaacagatcgaaatacgcgagctgaagaaaaatccacaacgcattgaaatggaaaacgaaatattaaaaaaggctaccgagctcttgatgtcagactccctgaacagttctcgttaa

SEQ ID NO: 441669 - DNA, 186 bp, Serratia marcescens
atgtcgttctcaccggacagcagactgaccatcaaagcactggaaatggcgtgggaaatccgcggtaaaccagccggggtgatgttccatagcgaccagggcagccattacgcaagcagaccgttccggcagttactgtggcattaccggatcaagcagagcatgagccgacgcggaaactgttga

SEQ ID NO: 441670 - DNA, 582 bp, Serratia marcescens
atgtctgacaataatttttcgcaaactgctgcctttatctggtcggtagccgatctgctgcgcggtgattttaaacagtctcagtacgggcgcgtaatcctaccttttacgctgttgcgccgtcttgagtgcgtgttggcggaaactaaagacgcggtggtggcgaagtacgatgaattaaaaaccaactcactgccggaagatgccaaagcgaagtttttactgcgcgccagcgggctttccttcttcaatacctcgaagatggatctgggcaagatgggacagaacgatatcaaaaccaacctggaaagctacgtacaggctttttccccggacgtgcgtgaaatcttcgaacacttcaaattcagcgagtttgtcggtcagcttgaagatgccaacctgctgttcaatgtagtgaagaaattcgccaccaccgatttaagcccaaaagcgattcccaaccatgatatgggcctggtgtttgaagagcttatccgtcgttttgcggaaagctccaacgagaccgccggtgagcacttcacccctcgtgatatcgtgcgtctgactgtagtggtcaactaa

SEQ ID NO: 441671 - DNA, 1206 bp, Serratia marcescens
atggattcgctgctgcttcccggcgtgctggtacgtaatggcattttgtctatcgcttcagttttaaaaaatgatgctgccccaggatttgtaaccatcttgttagttgccacgctttgctttgccgttgtccgctggcgcaggctggtaaaaagccgccgtactgctctaagcagtatccacaacattatcgcaaacacgcctgaagatcagttcagccagcatgttactgaaattgacgccagcattgcggcagccgataaaactgaagaacaaaagaatgttgctgaagcctggtatgaatatcgcgaaacccacgtgatcgacgatcagaacggtgcacttgtcgtgcgcaatgcagtccgtcccagccaattttttaacctggatgacctgcactttacgcaaggattctggcgcatcgttccggggctatttgtgactatagggctatccctcaccttcctgggactgatttctgcgcttaactcaatgagtacctcgctggatgatggcggtagcgcagcattagaaggtttacttactatcgcttcagcaaagttcatcatgtccctgaccggtctgtgctgttcgattgtctttaccgtagctttaagacgcggtacatcacatttagaaaaagcggttcatggccttaatagcctgattgaaaaacgtctgacgtttatcagcctcgaagatctttctattcgccagttgaaagccacaattgagagccgcgaacatttccgcaaactgggactagagatggctgctgagattggtcgtccgttgcgcgaagaccttccaagagcgatctctgagtctattagtacggctattacgccggttatcgaacaagtaagcaggttgggcaacgatggtgtgggagagatggtacaaagcctctcttcacgtttttctgaagatgttggtcgggctctggcacaagccagcgaacgtatttccctggcaggagaccagattaaattgctggctgagcgtatggatcaaagctccggaaaaatgggcaacgaaatggaaggcgcaattggacgcttaggccaggcggtggaaacattgcgtgatggtatgcagcaaacggcagatacagcaacatcagcatttaatcaaggtgccgaaaacctgctggcgaccatgaattcaaccctgcaaggcatcaaagacaatagactggccccatga

SEQ ID NO: 441672 - DNA, 1182 bp, Serratia marcescens
atggcactgacagcccgacaggtcgagaccgcgaagcctaaagagaaggactataaactttctgacgaacgtggcctttttctcctggttaccactaccggaaaacgatactggcggatgaaataccgtatcgccggcaaagagaaaaagttatctatcggcgtttatcctgagatttccctggctgatgcgcgcgtaaaacgcgacgaagcgagaaaggtgattgcggacggtggtgacccgagtgagaaaaagcagctcgaaaaactcgccaaaaaaatatcagtcgtcaataccttcagggcgctcgccatggaatggcataagcacaagtgtatctcatggtcggaaagctacgcagaaagcgttctggaggctctggagaaggatatcttcccgcatgtgggcaagcgccctgtcgcggagatccttcctctggagatgctggaggttttacgtctgattgaaaagcgtggctcactggaaaaattacgcaaggtcaggcagtactgcaatcagatcttccgctatgccatcgcaacaggacgtgcaacgattaatccggcagctgaactcaccgggacgctgactgcaccaaaaacagaacactttcctcaccttcaggcatccgaattacacgcgttcctttccagtctggctgattaccacggtagctgcattacacgtatggcaaccaatttgttgttactgacgggggtccgtacgattgagctacgagcagccgaatggcatgagtttgatctggataacgcgttatggacgatcccagaaagtcgtatgaagaaacgccgcaaacatctggtaccgttgtcaaatcaggttctggcgatcctgcaggaactccgtgcctacactggtcagtaccaactggtatttccagggcgctgcaatatcaacaaaccgatgagtgaggccagtatcaacatggtgatcaaacgcatcggttatgatggcaaggctaccggccacggcttcaggcacaccatgagtactattttgcatgagcaagggttcaactctgcatggatcgaaatgcagcttgctcacgtggataagaacagtatccgtggaacctacaatcatgcccaataccttgataaccgacgtgaaatgatgcagtggtatgctgaccatatcgatagtctgagccgtggtaaataa

SEQ ID NO: 441673 - DNA, 957 bp, Serratia marcescens
atgcgcatttacatcgacgacggttcgactcacatcaaaatgctgtgggagcagcacggcaaaacgtttacccacatcagccctaacagcttcagacgcggatggtcagccacatttggcagcggtaagccgtttaactacactgcgggcaaggagaagtactcgtttgacctcatttctcccgatacactcaccaccagcaacattgaatggcagtacagcccgctcaatgcggtggctgtgcatcatgcgctaaggaccagtggccttacgccacaatgcgtggatatcgtggtgacgctgccgctggcggagttctacgacgaagacgctcagtaccggcttgataacatcgagcgcaagaagcagagcctgctgcaacctgtgatactgaataacggtcacgtctttaccatcacccgcgtcaccgtgcgcccggagtctattcctgccgggattgcgctgtgcgatcaactctcgtcctccaactcagtgctgattgttgatcttggcggaaccacgctggatatctcgcaggtggcaggtcagatgtcttcggtatcgcgtatctatggcgatccggctcttggcgtatcacttgtgaccgacgaggtacaacaggcattacgtaaagccggtatggcgctgtcccgctacaacgtggaccggttgattatcaagcgtttcgacgacacgtacctggcgaacaacatcaacgatccgagggctgttgatagcataaagcaggcaatccacagtggtatctcgcgttatcgtgcacgggtactggaagcgattgatcgctttaaagggtatacccatgttgcagtcgtgggtggcggagcctgcctgctggctgatgacattcgtactcatgttaacctgcgcgaagagcgtttctttgtggctcaggatccacagtttgcgctggtacacggcctgaaagcactgggttaa

SEQ ID NO: 441674 - DNA, 456 bp, Serratia marcescens
atggacaataatcttagcgaactgagcaagccgatcggtgtttcttttaaatctgacatcgacctgatgaagtctgggcgaatgatccacgggcaaatgacggtgtggaaatcaactgtgggtattccagaatctcaagaaggggtctactcgcaagagtacgtatccgccctgctggcagataacgagcaccttgcccgtgaacttgtcgctaggaatggcgagaatgaatggttacgaaagagagcggcagagctggaagcagaaatcacgaacatcgtagatagccatgctgaaacggttgcagaattacgcgccaagctggctacgccggtgcggttgccatcagaacatgagttgcaccaagtggcgtgcagcgaatgcgcaggtaattgcctggagctggttgaaggcaccgttcgcgccgctggcttcaccgtagagggggatgagtag

SEQ ID NO: 441675 - DNA, 387 bp, Serratia marcescens
atgagcggctggatcgcaaaactggccggcgggggaatgttgctcctgctggtgacggccatatgtctgggtggttacagctcgctgttgtcacaccggttggagctggcacgccagcaggttgcagaacagcagaagacgcttgcacaacaggccgggctgatagccacgctgcagacgcaagatgcgcagaatcgcgcgctgatggcggcccagcaacaacgcgagcagcagctgcgccagcagggcgaaaactaccagaggaaatatcgtgaagcaatccagaatgacgagtgtagccagcgcgctgctcctcccgctgttcttggcctcctgcgcggaacggacaccaccgccgccggcgccgctcgtgctgtttccccctga

SEQ ID NO: 441676 - DNA, 342 bp, Serratia marcescens
atgactgattatgagattaacggtagagttgctaaggctacacagaaaattggcgatttcactcaggccagaggaaagacattcattcatgagcatgaagatgtcggtgattttaaaaatatctgtattggctggaaagaatacgacccctgcaacaaccctgcagacgcatggccgattattgtcgaaaataaaatatctattatctccatgcactccggcggtgatggctggcagattgactcaggtgaagacgaggaatttgttttacatcagcagtcaaatccactccgagcggccatgattgtcttcctcatgatgaaggatgccgaaaaatgctaa

SEQ ID NO: 441677 - DNA, 351 bp, Serratia marcescens
atggataagttatgccatattgcaaacacgattttcggcatgtaccaacatccattctgcccaagatgggatgaaatgctgaataaaatcatgagcgaatgcgaagtaacagagatttctgagcacacgataaccttcagcactaagcgtggtcaggtttgtgtctggtgcgcgaacaagtggtattcattcggccacttatatcgagttaatgatagatgggtcggcgatgaaaatgagcggcggccacgattctcgacaatgcaaagactccatcgcattcactcccgcctgtggcaggaaaaattaaaaacagactacagcagtatcatggagaaaatcagtgactaa

SEQ ID NO: 441678 - DNA, 267 bp, Serratia marcescens
gtgaacaagcgccagataaaaatactggaagatgcgtgggagttggacataggccacgcgttgaaggagtacccgatcccattactgcaaactaaatccaaggtagcaaggcagcttgccgatgatgggtatctggaattggtaacactgcgaagtaatggaaaccttggtgaaattattttcgaaggataccagatcacccatgcaggcattttcgcctactgcatgagcctgaaagatgagccaatggagcctaaccatggataa

SEQ ID NO: 441679 - DNA, 711 bp, Serratia marcescens
atgaacggtattgctgagagaattagatacttaatggcatcggaagggctaaagcagaagtcattagctgaagcgatcaacgcatcgcctcagacggtgaataactggttgaagcgagatgccattagccgtgaggcagcgcagcagatatgcgaaaaatacgggtattcgctcgattggttacttaatggaattggtcagccaaaggttgtccaggcaggtcaaggttcaaccattaatccagatcaggaaggggtgggcgtcgaggtgtgggatgaagatacccccatgggtgaggatgatgtttatattccctacttcaagagcatcgaactagccgcaggggctggtagctcgaacaatgaagactataacgattacaaacttcggttttcaaaagcgactctaaggcgctatggcgcagagccttgcaacgtggtcagcttccctgttcatggtccaagcatggatccagtaattcctcataaatctacggttacagtggataccggaaacaaaaaaatagtcgatggtggtatttatgccatagaacaagacgagctttttcgggtcaagctcctttatcgccttcccggtaggcgcttaagcatcaggagctacaacaaggaagaattccctgacgaagaagatagcttggataacgtaaaaattattggccgcgtgattaactggtcagttatggcttggtag

SEQ ID NO: 441680 - DNA, 543 bp, Serratia marcescens
atgaaagcaaacaaaaacaaagaattgccgtttgattacctaagggaatgctttgattacaatgaaagcagcgggttaattacatggaagattaggcctcaatcccatttcccaacacagaaagggtgcagggtattcaactctcgcctttctggcaaggttgcaggatacgcccacaacagaggatatttggcagtaaatgtgaatggatatacatatcttgttcacagggtttgttgggcgctctctactggggaatggcctgctgaggacgttgaccatattaatggcataaaagatgacaaccggcttgtaaaccttagagtagttaccagaggcgttaactcacgcaaccaaaaactaaggtcaaacaattcaacagattgcatgggtgtaacgagggataataactcttttagggtgcgagtaggaaccgaaggaaagagagtgagcttgggcaacttcaaaacactcgatgaggctgtcgaagttagaaagaatgcagaatccagctatggttttcatgaaaatcatggcaggtaa

SEQ ID NO: 441681 - DNA, 759 bp, Serratia marcescens
atggctacctgccagaatgataattctaaactctttggccgcgccattgttttggaagtggctgacggctgtgctgataccgtgccaggagaggcggagtggaaatctctcgcagcaggcactactaagtccttcgatctctcaccaaacactgttacttctgatgcagatgataccaaaggtttcgtcgaaaacttggtgactaactctgatttcaccatcagctttgagggggaggttcgcaaaaacgataagcttgatcagtacggagttggccgtcttatcaagtattacaccggcgaagttcaggcaatgcgccagcctgggatctgggttcgcatggaatttgggccagtaaccttccaaggctacatggttatcactgcgctgagttcagatgggggcaccaacgacatcgttactttctctacagagttcaaggtcgctgactccgacaccatttctatcgccgataccgtcgaagatattccagtcactgggatcaccctgaccccaaccagcggcacggtcgccgccggcgcgacaaccacttttaacgtgaccattgcgcctgctaacgcgacagataagacattcactctggtttcgtctgtaccgacgcgggcaactgcaacggctaacggtttggttgtcaccgtatcagcaccttctggtgccacagcaggcacagcaaacatcactgtaaaaaccaacgacggggcttttacggctgtatacgcagctactgtcaccgcgtga

SEQ ID NO: 441682 - DNA, 654 bp, Serratia marcescens
atggacaacatatacatcgcaagttttggcaatatcgacgttcgatttgtgaacgttgaggatgatgtgtttgtgtctcaaggtgatttcattcgtgcgatggaaacttgccttactgatgacatgaagcacattgcagaacttttcgtcagtggtggagttaagatcgtcggagatgctagcgatagccgatctgcaatacttggtgatagtgtgattggcccagccatccatttccatgcggtgggaaatattcttacttcattggtggaaatgaacaatgagaaaaacccttcgctcagagaaagctgtttccgaatgaatagcttgctgcagtggtactcaatagctttatcagatgctgatgaatattttggtcgaggcgtagctgatttgctttcgtccgttaagcggcgactggatcgccttagtgcgccctatacagttcatgtactccacgacaaagatgtctgggtcgcctcgtgtgatgagttagggttggttactgaagcccctgactatgagtctttgactgaacgagtttgggaggtcgcagaagaactactggttgataatgatattgaccaaccatttgaaacgctacgcctttcttttgttcagaatcaagtatctgacgacaggatggctttataa

SEQ ID NO: 441683 - DNA, 387 bp, Serratia marcescens
atgaccgaagaagagtggttggatggcttgcgtcatttaagcccaaacatgatcataaagacccatttcgcgctgcaggaaaaaataaaaaagcattataagcttaggggtacgggtaaaaatctggaaaaagctattcagttatgcatccagcaaattgcattagctccactgacagcagaagccatgagaaagaagcatgaagatcagtgggaagaactaaacgctctaaagcggcggcatgggcttagcgagcgaaaatggcctttcgtcttacctgcccatcatggctaccgccagtatgcagttatactgcgcagacaaaaagactttgataagcttgcagaaatcgaagaaaagagaaaacgtgaagggtgggcaaattaa

SEQ ID NO: 441684 - DNA, 387 bp, Serratia marcescens
gtgcaaaacggtttctacctgcagccgacgctgattaccggcaacaacagcatgcgtttcttccgcgaggagatcttcgggccggtgattggcgtcaccaccttcaaggatgaggccgaagctctggcgctggccaacgacaccgagttcgggctgggcgccgggctgtggacccgcgacatcaaccgcgcttaccgcatgggccgcgcgatcaaggccgggcgcgtatggaccaactgctaccacctgtacccggcgcacgccgcgttcggcggctacaaaaactccggcatcgggcgcgagacccacaaggcggcgctgtcgcactatcaacaggtgaaaaacctgctggtcagctacgacgccaagccgctgggcctgttctga

SEQ ID NO: 441685 - DNA, 606 bp, Serratia marcescens
atggaatctgctcgtgataaacgcaccggtgaaattgttgaggccgaagacctgtggttacttgaggatgtcgataccagcagctatgtatgctggggatgtgggattgaaatgtacccctcaacatggcaaaaaggaagtaagaaaagaccttcgtttaataaaatgccggggaaagaacacattaactgcgatgctaatgctgaaagcatggttgttaaacagggtcagaagaaaagcgttcgccacctgctggactgcgcaccgggtttgatgcccgcagggttaaagttgattgaaaaacgccccgttgttgatcctagcactactagcggtgaaaacaattccagctcaacacgttctgcattatcaacatccagtgaaggtcatcctccggcacggcaatcccgccgtccggttaactctattcgccagatttgtagagcgtttattcgcttcccgtatgatcgtagtatgtcattaaaaatactgggcattgatgccgatacttacatgactgtttttaaaaaacttaaagatccgattcagtcctatcctgatcggcgagttttctattcacagttgttgtggcagaattttgaatag

SEQ ID NO: 441686 - DNA, 1785 bp, Serratia marcescens
atgtggtcagataaggaatcatcagaggactacctaaattttggtgaagtatctcagctagccgtagatgtgctcgccaccgaaggtatgttaccagtatcgataggcatttttggtaattggggggctggcaaatcctcacttttgaaattgatagagcaaaaacttgagcaagaaaaccaagattggattgttatcaactttgactcttggctctatcagggttatgacgacgctcgagctgcgcttcttgaggtcatagcaacagcattgacaaaagctgcggaaggaaatgccacccttacctcaaaagcgaagagactccttagtcgggttgatgggcttagggcaatgggccttctggctgaaggagcagctttatttgcaggagttcctactggcggtttactttccagaggcattggtgcattaaaaaatattactgatggcatccagagccaagaagagtataaggccttgggctccctggcgaaagagggtaaagaaaaggctggtggtttgattaagccagaggctaaaaaaagtcctcctcagcagattgatgctttccgtaaggaatatggggaaattttagaagaacttggtaagccactcatcgtggtaatagataacctcgatcgctgcctccctaccaatgctattcatacgcttgaagctatcaggttattccttttcttaactaatactgcctttatcattgcagcagatgaggacatgattcgttcttctgtggctgattacttcaagggggcatcacagcgccatcaaatagactatctagataagctaattcaggttcctattcgggtgccaaaggctggggtacgtgagatccgttcatatctgttcatgctttatgctattgagcatggcctaaaaggcgaaaaacttaccacgctccgtgatggtttagaaaaggcattacagcaatcctggaaagatgaaccaatagcacgtcaggatgccttgaaaatgactggtgaatcggaggatagcgatctcgctttggcatttgcacgtgctgaccgtattgctccagtattagccaattctccaattatccatggtaaccccaggattgttaagcgcttgttgaatgttgtgaaaatgcgatctcaaattgcgaagcggcgatttatgcctttggatgaagccatcatcactaagctagtgatctttgagcgatgtgtcggagtagatgctaccgctgatttatatcatcttgtagatattgaacaaggcatgccccagttactaaaacagcttgaagatgctaatggtgaaataccttctgaagcgccaaagacatggactgataacccaacgactacagctttcattagtcaatgggcccaacttgaaccgcgccttggcggaatcgacttgagagctgccatatacctatcccgagaaactatgccagtaggtgcatatgtggttggtttatcgccatccggccgggaagtactgaatgcacttattgaactgaaaaatacaagctctcctacagctgatacttttttaaaaatacttcctcgtgaggagcaagtacctgttatggaaggtttaattagtcagttaaggcaagtgtcagattgggcgcgtaaacctaaaggtttttccggcgcatgtctgttggctcgccactcgccagatgcggctagtatattgattcgttatttgcaggaattgcaactgggtatgaaacgacctgcttggatgactgcagcactgaaagatgagcaatggaataaggaagcttaa

SEQ ID NO: 441687 - DNA, 753 bp, Serratia marcescens
atgggaacttcacaatcaagtaaaggtccaggaggtggttctccactggttccaccctgggctgatgaccagccacagcaaccgttaccttcgccacaggaaagaagatttgcgccatttcgagaatcgctgggaaatgcggtttcaaacggtaatagaggagatttcaggaaggccatagggcattacgcgcgaaaagcctctggagggagcagtagtgccgctcgacgattagggagtgtcacacaggctgggggcggattgtttggggctctggcgggagtgcaagcggctccaggagaaccaagcattgatttgggaagtttggctggccttccatgcgaaatggcaatatcggctattgctcaagctttaacgtcacaggatggtgattcagaaaagatttgtgcagccatgaatcatgccttagtggaagctctcgatggtgtggcaattttcgatcctcaaaaaataactgatagtgtgatcgttgacacaatgatttgttatttagctgaaagcatttttctgcaaatggtcatggattctaacaaggcatggaataaagcggacactccttcaaaggccattcatgcagaaactgaacttcgagaattgatcaaagttgttgttgataagcatatggctccaaaacttgtcggtaacattaggacttttacgaaaaatcaaatggttaaaatcgagcgtcaggtaattactgaggcttggcaagaatgggaggcctatcaatga

SEQ ID NO: 441688 - DNA, 873 bp, Serratia marcescens
  misc_feature (822)..(831): n is a, c, g, or t
atgacacgcttagtttttcatcatgatcatcgtttcttaccgccagcaagtgagaacttgttgcccgtacagctttatggattaagtgggcaggggaggggtgatatatccattattgggaatcctgcgattgatcgaattaagcgcttgggagtcaaaattccagctcaggtcatggattttttgagcatcgcactagcggttacagcggctgataccttcgttcagcgtgaaagctctgaggatggttggactcgtcaattctcgctacgacttccccttcatgagccatctcgatggattgctctaaagaaggaacttgaaagcgctttgcatttcctaagtggagacatctgggatttcgagttttgcactggtggttatgcaccgccagaaccctatagtcaacattcaaggtttcacctaatcaagctcaaagaactggattgtgtcagcttgttttcgggaggattagattctgctattggcgcaatagatcttctgacagtggggcgcgctccgcttttagttagtcatgcttataaaggagataagtcacgccaagatcaaattgctgaaagattgaatggtcgatattcacggtttgaaattaatgctgatccgcatcactatcaaggtgtgactgacattacgatgcgaacgcggagcctcaattttcttgcttttgcggcagtgggcgcttgtgctgtacaagaagtatctcaacaaaaaaaggtcgatctttttgtgcccgaaaatgggtttatctcgttaaatgctccactaactccacgccggataggtacgttgagcacacgaacnnnnnnnnnntccaacagctgtttgatgcggtcggaattccttgccaaataa

SEQ ID NO: 441689 - DNA, 714 bp, Serratia marcescens
atgcactgtcatcttgacctatatcctcagccagaacaagtggctgaggagtgcagacgtcgagggacttatatactgtcggttacaacgacacccagagcatggcatggggcttctttactggctaaaggaagccaacgaatccgaactgctcttgggctccatccccaaattgcgcatcaaagatctcatgagttagagctgtttgattcgctactttcgaagaccaggtatgttggcgaaatagggcttgatggtggcaagggatttaaagagcattgggatgtccaactgaaggtatttcgacacatactcaatagtgtgcatcgtgctggaggtaagattatgactattcatagtcggggaagtgcatcagctacccttgatgagattgaaaatattgatgggattgcgatattgcattggttcactgggacaccaaagcaactagaaagagcaatagatttagggtgttggttctctgtggggcctgctatgctcgatacaattaaggggaaggcgttggctttgaaaattcctaaatcacgcattcttacagaaaccgatgggccatttggtaagtatcgtaatgatccactaatgccatgggactgtgagattgcagagacgcagttagccgcattatggggtatgagcccgatggaggttaaagctcagctttccgataattttagagagttatgcagatcttaa

SEQ ID NO: 441690 - DNA, 1203 bp, Serratia marcescens
atggcaatactgacagatacaaaagcccggcacattaagcccggagatccccctttaccccatggtggaattacagggttgactctccattcatctccaacaaaaggcctgggcaagtgggtttttcgttacaccagcccaattactggcaagagacgtaatgctggcttggggtcttatcctgatattgggatagcccaagcgggcaagcttgcacttccaatgcgagaacaaatagctaatgggatagatccgttagatgcccgcaaagcagagtcggaaaaagaggctattccaacgttcgaaaaggcagcacgaaaagttcatgcggaattactgccaggctggaaaaatgaaaaacatgggaaacaatggatttccactctggagcgatacattttcccacaggcaggaaaactccctcttgataacatgacgccgtctattatcgcagagatgcttcgcccgatctggctttcacaccctgaaacagccagccgagtaaagcaacgtattcataccgttatgcagtgggcatgggctcatggatattgtactgcaaaccctgtcgatgtcgttggacacctgctccctcagcaggtaagcgctaatatacgcgtcgagcaccaaccagcaatgccatggcgagaaatccccgcattcatcgcaaccaacgtatacaccgaagaacgctataacgtaacccgagcattgctattgttcgttgttctgacagcttgtcgctccggggaagcaagggctatgcgctggtctgagatcgattatgaacgcaaaatttggactgtgcccgagaacagaatgaaatctggcgttattcaccgggttcccctgtctgaagaagtcgtcgtggttcttgaccgaataaagggacttcacgacgaactggtcttcccatcaccaaggaagcaaaccattctttccgatacagtactgactatgtttttacgtaagaaaaacgctatcagtgacactcccgggcggtgtgcagttgctcatggttttcgctcaagcttcagagactggtgcagtgaaaatggatatccccgagatcttgcagaacgagcactggctcataccgtacagaataaagtagaggcggcctaccatcgcacagatctgttggagcagcgtcgcccgatgatgcaggcatgggctgattatgtctattcagccgtgaaataa

SEQ ID NO: 441691 - DNA, 1200 bp, Serratia marcescens
atggtgaagttaggggatgttttatcgatcatccgaggagtaacgtttaagccaaatgatcaggttgagccattgagtgaaggttcaacaattgtcatgagaacaaaaaacgttcaaaggggtgggttagatatttcggatttaatcgccattcccgatagttttatcaagcgggatgagcaatatttacgttctgaagatatgcttatttccagtgcaaatagttgggagcttgttgggaaaattagttttattgataaattaccggcgagatctactgctggtggttttatatcaatcattagagcaaaaaaagaaaaagtcattccaaaatatttatactattggctgacacttgaacacactcaagtaataataagaaattgtggacaaaaaactactaacatatcaaacttaaatcttgaaagatttaaagaattgtttatacctctaccatccttatacgatcagagacgtatagttgctattcttgataaagcagcgaacatacgccaaaaacgcgaacaagccatcaaactggctgatgattttttgcgtgctacgtttttagcgatgtttggtgatcctgttgaaaacccgaagagatgggatgtggcttctttgttagaatatggttcatttaaaaatggaatgaattttacgaaaggtgagtcaggctctgtactgaaatgcctgggagttggcaatttcaaatcactagcaacgattacctgtatggacaatatcggtgaaattgaattaaatactctcccttcagatgattatcttttgaaagatggtgatatcgtctttgtccgttctaatggtaataaagccttggtcggaagatgtcttactatttatccaaataaagagaaagtcacatttagtggattttgcattcgatacagaatagaaaagtctgcaatcacggcagaatatcttaactttctcttccgtacaccttcaatgaaacggcaaatgttaagcggaggccagggggctaatattcagaatattagccagggtaccttatctgcactcaggatacctgtacctccattggataaacaacttgcttttgccagattggttgatttccatgcatctattgtgaaaaaacaatatgataaaatggctgaatccgaaaatctattcgatgccttgaccgataattttttcacatttaatgatttatag

SEQ ID NO: 441692 - DNA, 360 bp, Serratia marcescens
atgcaaaaagtaactgagctgtatcctcctgaaattgctcgccataagctccagaatcacttcgccggtaataccgttatgctggagttaatccagaaactaaataaaaccagcttgtgtacttttgcggcgctctgtgacggcaacgtcgtgaccacttccggctataacattacggccgatctgtgtgttaaccgtgcgtcagccgttgcccattcgcttaagcaaaaatatctgccggttacggccagaacgatttcgactaaggccgatgtaggtggtgcggtaaagcaggcggctttctatcttgacgagagcgatcttgcaagactgaagtctgaacctgaaaagatgatgtag

SEQ ID NO: 441693 - DNA, 216 bp, Serratia marcescens
atggaaaaacagcccggggggctgtggccttttcccgcttttctgtatggctctcactctgtcatctttccctttttatccccaccgctcgccgcagtgttgactagcgtagtctgtcaacgcgaggaagcggaagtgcatcttaagctgatgtgtcgcacggtcatcgtggcgcttttgttgacgatgcaagataggcaacgtgttcccgtttga

SEQ ID NO: 441694 - DNA, 168 bp, Serratia marcescens
atgatgaaagagtgcgaacgtaacctgaatagccagaagcgctccaatgctcagaaggaaatgattaggctatacaaagagtttggtgagtcaggtgttttggaacttttacgtaatgtttctggtgctaatgattcaccgccgtccgatgaaaagaaagcaagttga

SEQ ID NO: 441695 - DNA, 351 bp, Serratia marcescens
atgtggaccgtactttttagccaacgatttgatgattggctaagcgaacaggatgacgcgcttcaggaaaaagtgctggcagatttgggcaagttacaggtgtatggccccgagctgccaaggccctatgcggatacgctcaaaggctcgcgatacaagaatatgaaggagctgcgtattcagttttccgggcagccgatacgcgcattttatgcctttgatccgattcgccgggcgattgtgctttgtgccggatataagagcaatgacaaacgattttatgaaaaactgatccgtattgctgaagatgaatttgccgcgcacctgcaaaatctggagataaaccaatga

SEQ ID NO: 441696 - DNA, 300 bp, Serratia marcescens
atgagaacactcgacgatgtgattgccgcacgctctcctgaaagccaggccagaatcaaagagatgtctgatgaaatgatccttgaggtcggcttacagatgatgcgtgaagagcttcagctttcgcagaagtatgtggcggaaatgatgggcgttagccagccagccatcacccagctggagcagcggggtaatgacctgaaactggccacactgaagcgctatattgaagcaatgggcggcaagcttagcttggatgtcgaactacccactgggaagcgcatcgcgtttcatatctga

SEQ ID NO: 441697 - DNA, 579 bp, Serratia marcescens
atgatggataaaaaaattgattttatatttcaccctcaaataaatgaatcctattcctccagtgatatttttgatgatgaaattattggtttggaaatatcagtggaatattacgattttagtcttgataacttccaacgggaaattctgcactggtttaagccatgctttgcggcagggaaattattagcgggtatacagcagttagtgaaaaagcagatccctgagattaagccacattctattgaagtgaatgtgatacctgaggttttgccgtttgatgacgaaaatgacgatatactgagcctgctgcaaatctgcggtttaaggatgactgactggcagcgcattcatgcggatgtagaagtcaccacgctgccgctctggcatggtgaggaagaagagattgtgcttaatttttcccccaaggttccggcggaggtgatgcagtatgtgaaacgcctgcatggctggacagcctataccggcattacggtaagtgagatagacccaggcattatcgcccatcacggacttttaccgtatatcgctgaacggcgacaatcagaaaatctataa

SEQ ID NO: 441698 - DNA, 1347 bp, Serratia marcescens
atgtgtgaggaacatattgttccgaatgaattctttccccaccatggttcccttgccaaggaattacgtgaggcgcttgaagctcgtcttcagaaaggaaatttgcccacaacagctgtttgtacaatgacgctcgagttgggcattgatatcggtaaggttaagtcggttatacaagttacgcctccgcattctgtttccagtctgcgtcagcgtctgggacgttctgggcgacgcgactccccatcagttctaagaatgctaattacagaaaatgagcttactgtgacgagcagtatcgttgaccacctacggttacagttggtccagtcgatggcaatgatcagattgatgatctctaaacaatggtttgaaccagctgatgctcaacagatgcattactctacgctgctacaccagattcttgctattacggcacaatggggcggagttcgtgccgatcagctctggtcacaactatgccaaacagggccgtttagaaatgtagatttaaacgacttcaaaagcctgcttaaacatatgggaacgtgtggcctgctcactcaacttgctagcggcgaaatggttgttggggtagagggggagaaactgactaaccattacactttttatgccgtgttcaatacaccagaagagttccgtattgtcaccggaaacagaacccttggaacaatacctgtggactccccactgctaccagaccaacacatcatcttcggtgggcggcgctggaaagttacagagatcgagacagagaaaaaggttatctatgttgaggcgaccaaaggcggtcagccaccacaatttagtgggggaggaatgtctattcatgatgccgttcgtcaggaaatgctcgctatctatagggaaagtgattaccgcatagcgataggtagcaagagagtagattatgccgattctgccgccagaaacctatttgcggaaggctgtagtaactttcagcgttataacctgcaaaatgagcattttattatgagtgggcaacactgttacgtaattccctggatgggggataaagttgtgaatacggttacagccttgctcctgcgctgtggttttaaagcaaattcatttgctggtgttatagaaatcgataattcaagtgtagcttccgttcagcacgtgctcaaagaaatgctgttatcaggcttaccatctgcattcgatcttgccacagatgttccagaaaagtacttggataaatatgacgagtatttaccagagtcccttcttgcgaaagggtttggggaaaaagcgtatgacattgaaggcacttgtgtttggttggagcggcatcttaagtaa

SEQ ID NO: 441699 - DNA, 228 bp, Serratia marcescens
atgacatttgctttcaatcataatgcagaagcgattaccctcaatattgctgaagaaaaacagactctcattaatcgtctgtttaaaagacagcgacccgcgactttatctggcctgacacataacgatcgcaccttagctttcgctatcgccgatctgaaagcgctagcagaagaatttagtgaactggattggcccctatatttccagacactttttatcgcttaa

SEQ ID NO: 441700 - DNA, 1326 bp, Serratia marcescens
atgaaattaagcgatatcttcctgaaacccgtggcccttttcaagccagcaattgctgtatcgaaaggtttaacggtaaagatccaggccattcatgagcgctggcccgatgtcgtcaaggagattgcggagcgcgatcgtgaaaaggtgttacgcaagctgcttgattatgtagagcgctgggaatggaatgatgtaaagatgtcctttatctgttcaggcgcacagattgtttttgataaagaattcagaaatcaggacgagtttgctgtgctgcaagcgttttatctgcgggaaaccattgttacggattcagcgccctttatttctgcaatgatatcggcctatattcgtagttatgaaccgggttcaacacacacaaacaaaatcaaaaattgtctggatatcgccagagaacatatgagcgataagtggaaagatattgtcgagcaactacccgaattctttgacgctagccaggcgcatcaggccttggcaaaaagaatggttgaaatggattcaccgtggggagagcttaaaaaatttggtattacacgcccgcacgatccggggttaatgtcgcatgctcatctggcctatataacatttctggcacctggattgaatgatagacccgctattgagaagctgttttcctggttaaaacctgatggcagaggtggtgctttgatgaatggcgcagcggaagccatcaatgcactgttatcacactggttgtataaacaacccgatgaagagctttctcgctatctgaccgaaacactggtggccttttatgatgacccgcgtctgagccgcggtggtgtatggggaagcgtagatgaagcctgtcgaaacctgattataaactggcttacacgcgaaaatattctgttctttttggatgtagtttctgacgttgaagacagccatatgtgggagcctcgacgcaagttctggcttaatttataccatcaggacaaaattgactcagcatgggtggctttcagtgctgaagccgatatgcgggctagatcgataaaaaagactatgcgagaaagtgcgaccttaaccttcggacggcaagttgctggcagccgaaaaaacacctcattgctaattttaaaaattggacgctgcattgtggtcgaaggatcacataattataaagtgcatatctttagcagcgataacaaaaaagcgcctgaactcttccgattgacatatgactgcgaacatattcgcatgttacctaatccggtcgctattccacacctcggtggctggcaggaaaaagtgtgtgaacaaattgagtatctgtcatga

SEQ ID NO: 441701 - DNA, 864 bp, Serratia marcescens
atgagagccaacgccagtcgtaagcgttcacatgaagaggaagaagagtccgtttttgtctcaatgacagatatgacggtcagctttctttttattgttatggtactgctcgctttttttgccagccgctataacgatacaaacactgtaccgcgtgatgagtatgaacaggcggtacaaacacgcgataaaaccatcgtggatttgcgtgctcagattgcgttgttagagcaagttgatccgctggagcaatatatgtcgcaggcagcgactgcccggctcaacttactccgtaaattgcgcaataatctgaagcaggcgtttcctgaattgccggttgatgtcgttcctgaagaaggcacgctgcgctttcagggtgaaggtttgtttaacagtaacagctatacgttgaatgaagataaaagaaagattgttgaggcactggcgaaaacgctcaattccttattgccctgctataccttcagccaaaacgtcgggtgggataaaaactgtaacccttcgtttgccattattgaagcggtacagattgaaggtcacaccgactccaaaggcgaagatgtttataacctgaatctttcgactaaccgagccatcaccacgtttaccagtatgcttgccgcagcgccagacctggtcgcacattttaatatgcgcagccaacccgttctttctgtggcgggctacggtaaaatgcgtccggttaagccgaatgatacaccgcaaaatatggcgatgaatcgccgtatcgatctccgcatcattatgcataccccggccaatgcagcggaaattgaagatatccgcaagcacctgatcgcccccctgaagaagaggccgctatga

SEQ ID NO: 441702 - DNA, 825 bp, Serratia marcescens
atgagcgaagcggctgcagatatgaaagctgccgctctgggtattcgtaccgaactcgaagttgcagcgaaacagggggctgaagcagcgcaggcgcggatgtctgaatcagcgtctaaggccagcgacgcgattggccaggccgcaacacaagtgctgggtgcttttggcaataccgcaggtgaaatcaccaaagcaactgaggcgatgacccagaaagccagcagcgaattgctttctcctctttctgttatcgctgaaaaactggaagacgtgatgggcatgctgaccgaaaccagcactgcattacgacgagcttctgatgggattaaagaaggtgctgtcgcctcggagaacgcttcaggaagcttccgcacatccgcccaatcattggccagcgccgccgatccgattcgggcaatgatggagcgtattgaagtcagcacacgccagctgcgtgagagcagtgagaatagcctatcggctatcgcccaagccgcaaaaaccaatgctgaacaatctgcaatgacgctttcagctgcacaagaaacattgggcgggcagcatcgggcggttgaatctacgctaaataatcttcagtctttgattgcggctttacgcagtcaaggcgaacgtctggatagcattgacgaaaaacttggcaaggcattcgacagttatcaacagcaagttgctacgtcggttgaaacgctcttcgatcatgtcaaaaccatgcagaacgaactcatgccagcgctggacacaatgcagagcattgtcgatcaggctgaaaacttcgcaccgaaacaagggcgaatctcatga

SEQ ID NO: 441703 - DNA, 2583 bp, Serratia marcescens
atgggccatgaaatcaatgccgttcgtgtctcgctgaccgactttatgcaaggtttagaagttcgcattgccgatcgtttttctatttccaccagctcaaagggtactgatgatttcgaaatcgtccctttttccggtaagagtatagaagaactggaaagcagcggagaggcagttagcgagtctgcaggtgagctaagtgaacaaacgttacgtcggttccaacaacgtgtcagaactcaaggagcgctttctgcttaccgtgttggcgaaggcaattatctggtcattgaccgcagcgctcggcccatccttgatgtcatggtggagaagcaaaagtcttcacctgaagaaagatgcgcttttattgaaaacccacgacctgcaattaccagtgctgttgaaaaatacttaagacaatcaggcaggctggatggtctcgacgatgtgggtgaagaagaagccattgaagctgcagcaggtcctgcatttgttgaaacccttgaatattccgagcgtgttaaaggaattttgcattaccgaaaaggtgctgtttctacgcctatgaccggagaaacgatctggttgcctgaagtaatccctgatgccctgaccaacattatcgctgcgatggatagccaggctctggcaagcgtctgcgatcggttgcgtaatgctatagatgcatctcagaatgaagttgagatcgcgtctcatcctgttaaagccacagaagagacattgcacgcgctagaaaagcgtttagctgatctaaaagagatagaaggttcagcggaaacaacagaaattgaagatacgtctgcggttaatggtctacctcccgctacggtgatcctggataccaaagacaactttgaggagctgttctggcagcctgaccttaaagagcgttccgtatttattgatgaacaacttcccgcaggcattaaaacagttttgcggccgcatcagctggagagctttagcttgcagctttcatcatggaagtcaggcatgccaggcattttgaacgcagatgagcaaggcttaggtaagacacttcaaaccatcgcatttctacgctggttgaaagagaacaataacgtcagcaccgccagcaataaagagcgcggaccaatacttattgttgctcctacctcattgctggaaaactggaatgctgaggtcaggcagcatactgatagtgacggacttggccatttgctgcgcctctatggttcatcgctaagccagtataaaaatttcgatgctaaaggtgtcgagacaaaagatggtaataccttactgaattttcagcagttgcatgagtcaatcagggcaggaaaaggccatcgtttctggatattaacgacctatacaacgctgactaactaccagcactcttttgcgaagatccatttctcggccgtgatatttgatgaaatacaggcggtcaaaaatcctgactcgctacgggctcgcgccgcccgcgccgttaatgctgactatcgaattggtctgacaggcacaccgattgaaaataccacgaccgatctatgggcggtcatggaccaactggcccccggttctctggatacgttgcgtaatttcaacagcctgtatagcgaacctgatgaaaagaatatgcttcagttgtatcagcgagtctttgaacctcgcaatcagctgccacctttagcattccgccgtttaaaagaagatgttgcgaaagagctgcctgcaaaaacacgctttcttcatccgcgccttatgcctgaagggcaagctattgcctacgaaacagcccgattaaaattatctcagggaggtcccggcgctgcacttaaaatgctgcagcatatccgcggcgtttcagtacatccggccatggaaatgagcggcgacaatcagagctttatcgatgcatctgctcgtctgaatgcatgctttgagattctgcatcgtattaaagcaaaaggtgagcgcgttctggttttcatcgaacaccgcaagatgcaattccggtttatggaactggctcgccaggaattcgggcttgagcatattgatcatatcaacggcgatacgcccattcataagcgtcaggctatcgtgcaccgattccagcgccatcttgagcaagatggaggcttcgacttactagtgctcggccctaaagcggccggaacgggtttaacgttgactgccgcaacacatgttattcacctgtctcgctggtggaaccccgctgttgaagagcaatgtaatgaccgtgtacatcgtatcggccaacagtatccagtccagatccatatgccaatggccatacacactggctatcaggaacactctttcgactgtttactccaggggcttatgtcacgcaagcgaagtttagcgcgagcggccctctggccaatgggtgacagtgctagtgacatctcacagctacaggcagctttaagaaaagacaagtctgaggcgagtggagatattttagaaacaagcatccgaatgatgtttgaaagagatgttgaaactgatggtacacgaatggatgacggttcatatcgaatcagttag

SEQ ID NO: 441704 - DNA, 852 bp, Serratia marcescens
atgagactacagcagtttaacgttaagaattacaaatctataaaagatgaaatagaagtatatatcgatgacatagttgttttaataggcccaaataattccgggaaatcaacaatattggatgcatatgaaaaatttgcatcattaggctcttcaaaaggtctgacggcccatgatttttataattcagacacatcaataccaattgaaatgtgcggaattttcacggatattactgaggctgatattcgtacactagggggcgaaaagtggttttataacgatgatgctctggatagaaggaatatggctaggaagtatggaggggattgggaggtaaaacaaatacctctggaaattaaaccttattattgcgttaaatggatttggttcgaccctgaaaaatcagcacaaaaacaatcttatgggcttgatgaagattcggggaaacgtgtgttttctgatggtggctccggtggcttagatactttgctacaaagtcgagttcctcagccaataagaataagtccagataaatccatggatgaaacaaaaaaaataatcataagtttcttaaaggaagatgcgaaagatgaattattaaaaacaggggaaagcaaagcagaaataatacaaaaaatacaagatttgaccgatactctcatgaaggattctaaatcaaaaatagatggccttctaaaacaagtctctgaatcgtcatcatcggtttttcctgggctcgaactggagttaaacatactgtccaaagaccccgtagatgcagctctcttctggagaaccaaggtcacggcgttcgtcgctctgttttatggtctgctttgcaaatattga

SEQ ID NO: 441705 - DNA, 903 bp, Serratia marcescens
atgactagattttcagctaaaaaaccggaccgtgaaattgcaaaacgtcaggctgctaacgtaatgaaatatatgcaggggcatattttccagtctgtcggtacagtcagaaattatcagtccgcactcacacgtattgctctttatttcagaataaatggtggagtgaacctacaggacatcacgcctgaaatggcgagccgctatttcgatattcgggctgctgatgtggggcaaaaaagcctggatttggagcgtcaggccttacaggcgatgatgatacacctgactcaagttttatccgatggacaaaaattggtagtcgtccgttctctgcaagaacagtcgttatcatccaggtcttatacaccagaacagattgaaatcattgcatcccacctgtctgacaaaaaccgcttagcaacacgtatcgcctataacgcagggctacgcagtcacgagctattttctctgcgggaattgaggtctcgcgaacccagccctagacctgcttcaggtaagaaatttatggggcgggtcggcacatcatacacagtgcagggaaaaggcggattagtccgcgagatcaaattggcagtcgaattagcagaaatattggagagcaggagattagcagaaccggtaacagtgacggaccgaggtattcattatcagcaattctatgcgatctctgcgggccaggcttggagtagagcattcagcaatgccagcaccagagcattaggatggtcagcagggagtcatggaacgcggcacagctatgcccaggagcgcatggcggagctacaggattatggatgttcctatggcgagtcactggaagtggtgagtcaggaattgggccattttagggcagaaatcacaaaaatatacctgagatga

SEQ ID NO: 441706 - DNA, 1269 bp, Serratia marcescens
atgttgctgacagatgcatttataaaaaaacagctcagagaaataaacgctaaaaaatttgctggagagagtatcgaaaaggaaattcgcttgtccgatggtggaggattatatctactaatcaaatccagcggcagcgcttattggaggctacgttatcgctttcaaggtgaagatcgtttgacctcatttggtgagtataagtatattcccctagctctggcgcgtgaaaagcgagaagagtataaaaccaatattgcaagaggaattgaccctcgcggaataaagggccaggaaaatatattaaccttccgagaagtggccatgcagtggcacgatagtaataggcagtggtcaccagagcatggtcggcgtattttaaaatccctgatggatgaggtttttcctcacttaggtgaaagcagtattaaatcccttaatgcgcaggagctattacatcctgtgaaagtcgttcagacatcagggcgtttagaattagcctcgcgtatttatcagcgtattaattctattatgacgctggcggtcgataatggattattagaatttaatccaattgcccataaatctggcgcattaattaagaaaaattcagtgcatcgcccggcgttagagttagaacagattcccgagttactgagacgaattgatgaatataagggtagggagttgacgaaactgacaattcaattcctgctgcatacttttgtcagatcgagtgaaatgcggttttctcgatgggatgagtttgatctggaaaatgccgtatggactattccctcgattagggagaaaatacccgatgtgaaattttcttatcgtggttcgaaaatgaaaacacctcatatagtaccattaagcgatcaggcccttacattccttaaaggtattaaagaaattactggtaaccgactattcgtttttactagtgatcattttccgaaaaaaccgatgagtgaaaatacaattaaccatgcattacaaacgatggggtataacaccaaaaaagaagtctgctctcatggattccggactatggcttgtagcgcacttattgagtcaggaaaatggagtcgggatgcaattgaacggcagatgagtcatcaggaaagaaataatgttcgtgcggcttatatccataaagctgagcttataccggaaagaagaagaatgatgcagtggtggtctgattatctagaaaaaatcagccatgaatatcaccacccatactcttttgaaactaacaagtag

SEQ ID NO: 441707 - DNA, 186 bp, Serratia marcescens
atggataagttattgacgtttgatgaagttattaatagaactggttattcacgaccgcgtatttacgaattgattaagctgggtttattcccaaggaaaataaaaataggagcaaggaaggtcgcttttattgagagtgaggttaatgactggattcaaaataagataacagcctctttaagataa

SEQ ID NO: 441708 - DNA, 807 bp, Serratia marcescens
gtgaagggtgaaaaaagccaacgtgatgcaggcatctatctgactgcgcagcaactggttggcccggtaacgctggaaggcgcggttcgaggtgacgatcattccgagtttggctggcatggcacctggcaaaccagcgcggcatgggaattcgtcgagggataccgttttatcgcgtcgtatggcactgcgttcaaagcaccgaatatgagccagctatacggcaacttcggtaacaacaccgatctgaaaccggaagaaagcaagcagtgggaaggtggctttgaagggctgaccggcccggtgacctggcgcatctccggttatcgcaacgacatcgacaatttgatcgattccacgggggaaaccaactacgtctattacaacgtgggtaaggcgaccatcaaagggattgaagctacggcctcgtttgataccggcccgttgacgcatcagattggttatgactatgtcgatcctcgcaacgccaagaccaatgaagtgctgctgcggcgcgccaagcagcaggtgaaatatgagctggactggcagctgtatgactttgactgggcggtgacttatcaatatctgggtcaacgttatgacaaggattacagtacctatccggaacaaagcgttaaacttggcggcgtgagtctgtgggatctcgcagtttcgtatccggtcacatctcatctgacagttcgtggtagaattgccaacctgtttgataaagattatgagacggcctatggctacgctactccaggaagagaatactacctcactggaagctataccttctaa

SEQ ID NO: 441709 - DNA, 225 bp, Serratia marcescens
atggaatttccagaagacgcggaggatagggtgcatgcagagatgtgccgggtggtaggggatgtcgttctggctctgcatgcgcttgggttaaccgtcactgtcccgctcatcatagaaacaatgaagaagagaaatcagcatcggatcgaaactagcgatgaggttgctgcggctacagaagatgctatcgagtggctatcaaaggatatgggttggaagtag

SEQ ID NO: 441710 - DNA, 978 bp, Serratia marcescens
atgtccaccagaaacaagccggatggtaatgcgttacttagcgttgttgaaaggttcgttacggaggcaagaaaggaagctgacacggacggctccgaggtttcatcagttattcataaacgcctggcagctctgtctgatatggtgggtggatatgactttgcgaaggtcattgatgcattctggcgggggcatgagcaggataacgaaacactaaaatccaatgctattcgctggttgcggggagagtacaccaccaaaactgatgcccgtaacgatctcgacgttcggactattatctcagacgcttcattctatgattctttgaagctgatgagcctttttgtccgccaggcaggctatgccggtcttttggtcagtctcgacgaaatggtgaacctctttaagctgaataatacgcaagcaagaacagcgaactacgaacagattttgcggatcctgaatgactgcctgcaaggctcagccgagaacattggttttatcctcggggggacgccagagttccttttcgatccgcgcaaaggtctttacagttatgaggcgctccagtcacgtctggcggaaaaccggttcgcgcaaaaagcaggagtgattgactattcgtctcccactttgcaccttgccagcctcacccctgaggaactgtatattttactgagaaatcttcgccatgtttatgcaggcggagagccagagaattatctggtaccagatgaggcactgactggatttctgcatcactgtagtaaaatcattggagacgcttacttccgtaccccccgtaataccataaaaggtttcctggatatgctggccgtgctggaacaaaacagaacgatgaactggcaaacattaatcgagggtgtggcgattgaagaggacaggcccagcgatatggatgacgctattatggaggaaagcgatgacgacgacggactggcgaacttcaagctatga

SEQ ID NO: 441711 - DNA, 369 bp, Serratia marcescens
atgaaggtcaccgaaaccaaagttttgagcatcgaaatcactgaggttgaacgcctcgaccctatccgtgtaatggctgaaaactacgagccagggcaaggccgtataactatcacctgctacggcaaggaatggacatcggcatggtttgcgatgaacggcgatagcgttcagcagttcttcattcgcgtatcgaacgactatctgatcggaaatttcgccccgcagctaaacagcgagatagatgacgacaacgaagcaaacctagagtttgtgaaggcggaaatctgcaagctacgtcgcgatgacgaattgtcactagactggccccatgaatctccagacagttggtatcacttaaataagtga

SEQ ID NO: 441712 - DNA, 636 bp, Serratia marcescens
ttgaccttgacatcccttatacgtccgaccaaagaactcgcccacctggcctggtgcatcctggtggccgttggttttgccagacaggaaggcaaagcgctttcttccttgcagacgcacatgtttatcatgcagtggctgctgacagcccaaaaacgcaagttgtttccccgaacgttagctcaggacatcatctggctacaggaacagggtaagcgttacgggtcttcagcgcggctttacagcaaagtggagtatatctggttcgccagttcaggcgaacttactcagcagagtacgctgtttcgttttacgtatatgattgacacgcttcggacaatgggctggatagactggctgatgtcggcaatggaatgggccgcaggtggaaaactagcgggtaatgtgtgtgcgatctatacgccaaaagacgagttgcatcaggtgttcaccgacaagggtgaactcatcaaaccgatggagctgcggctaactggcgatatcagcggcatccctgcattactggcgcaatgtaatctgcacgctgaacggttgcctgatgacgacggatatgtcgtttatcaactagactggccccatgaatctccagacagttggtatcacttaaataagtga

SEQ ID NO: 441713 - DNA, 1491 bp, Serratia marcescens
atgagggtttcaaatcccccccaagcaagagacctgatggtaactgctcggagttttggcaactatgatcttgcagcagctcttgctgatctgattgataacagtatcaaggctaaggctactcgggtagatatcaattttgaactagagaaaaccggtaaagaagtggttgttaggattcgggataacgggctggggatgactctggatgctctaaaagtggctatgcgtcccgcaagtaccaacccagaagatgacagggaaccggacgatcttggaagatttggttgggggttaaaatctgcatctctttcgcaagctcgaatgctcacagttgtttcttggcgtgatggggttattagtgctgcgcgatgggatatcgatgatattgatgattggggaatggaagtcatggaaggagcagaagcagaaagtcttttgtctgttccatgcaaatctcaatcgggaactgaagtaatatggactcgttgcgatcgagtacttaatagtgaaatcaactcctcttttgatgactctcttacttttgctattgcacattcaaatcaacagctttcattgatctttcaccgatatcttgctggggaagcagataggcgtttgacaatcgtggttaatagtcgccagttacgcccaatcgatccattcatgatatctcataatgctacacagaccttagatgctgaacttattaagacagcgaatggagctgtaattagtattcagccctatattttgccgcatttctcaaagttaactgttgaggaacagaaagtacttggtggttctgaagggatggtccgtaatcaaggattttatgtatatcgaaacaagcgattaatcatctatgggacctggttccggttgattccgcatggtgaactttctcagttgactaggatcagagtcgatattccaaatagtgctgatgctgaatggagaatcactgtagataaatcggatgcacaactcccggttgctcttaaacgccgtctccaagacgttgtcaaacgtttcaatctgcgttcattctcggtacatcgtaaaaaaggaatttctctagatgttccgaaagtccattctgtatggctccgccatataaaacatggtcagatctattatagagtaaatcgagagcatcctatcgtagcgagcctattagatatggagtgtgtctcaaataatgctgatgccgtgcttcggttactggagtcttattttccaacagacagatttattgctgatgctaacggttctggtgtcagtcaatgttcgacatcaactgaagagtttgaatctattgtcgaccaatgtgttataaatttccttcaaagtaatgatggatcctttgaagttgatacctttttagattttataagagatgtagaacctttttccagtcaatggatatacacggagagttatgttcgaaaaaatacagccgaaaagtggggtatgaaaagtggattttga

SEQ ID NO: 441714 - DNA, 504 bp, Serratia marcescens
gtgcggctcgcgctttgctgcggcggattatgggcgtgcagcctgttggcgcaggccgacagtaaaacggcgaccctcggcgtcagcgcgaccttgctcagcgcctgtgaagccggcagcagctcaggcggcaacgtcagcttcggcacgctgaatttcggcacgctgtattttctcagcaccgccaccagcgtcgccgggcagcaaaacgccggcgccattcgggtgaaatgcaccaacggcaccagctacagcgttctgcttggcggcgggcaaagcggcaataccgcggcccgctacctgcaaagcgcggccggccaacgggtgaattacaacctgtacaccaacgccgcccacagcaccatttgggacaatctgacgggcgtgtcacaaaccgccaacggttcggacaactggctgccggtctatggcatgattccggcgcagtccacgcccccgacaggcagctacaccgatacggtacaggtcacgatcaattggtaa

SEQ ID NO: 441715 - DNA, 834 bp, Serratia marcescens
atgctccgctgggcgcgccagcagggcattgaagtcggtatcttctgtgcgctccatacctacggccggcagctcaatcagcacccgcatatccatgtctccgtcacccgcggcggcctcgacatcaaacacagcacctggcggcagttgttctttaaaaagaaagaggtagagcaaatctggcgcaatgccgtggtttacctgcttcgcgacaactacgcgcaaatcaaccccggcgcccagccgggcctgggccatatccgtaacgaggaccggtggcaccgttatctgcatgcccaatatcgccgcgcctggaaagtgcattttgccaaaaagacccgcggcgcctggcgcagcgtgaaatacctcggccgttatctgaagcgcccaccggtggcagcctctcagctccgacattaccgtggcggcgccgtggtccatcagtattacgatcaccgaacgcagcagcacaaacgccagaaaatcagccaggaggaaatgctgcagcgctacgtcagccatattccggcgcggcattttaaaatggtgcgctactacggcttcctggccaaccgcaagcgcggttcgctgttgccgaaggtctacgacgcactggcgatgacggtacgggaaaagcctaaacggcccgggtttgcggtgctgatgaaaggtttcctgggcaccgatccgtaccagtgtatcctgtgcaaaggtcggttgcgttttgccggcgcggtggcaggtgagcacgctaccaaactgctctcagacaggctgcatcggatggcgaaaaaacgatggcttcagactctgatgttggataagtgcgcctga

SEQ ID NO: 441716 - DNA, 1191 bp, Serratia marcescens
atgtatattccgcgtcccgcaaagctgctgttccagcatgacgacggctggagccgctatctcgacaaacacggtgacaccctcagcgactggaccaaactcgccgtcgagcgcatgctcgcctgcggtacctgtgccatgggcgtacgccgctactgctgcgcctcaccggactgcacccatgcccgcttcttctgccagagctgcaaatcaaaagcctgcagcagctgcggcctcaaggccaccgagcaatggattgccgagcagcagcacatcctgcccgactgcgactggcaacatatcaccttcaccatgccgcacctgctgtggccgttcttcaataacaactggcccctgctcaatgacctgtttcgctgcgccacccgcgccatgctccgctgggcgcgccaacaggggatcgaagtcggtatcttctgtgcgctccatacctacggccgccagctcaatcagcacccgcatatccacgtctccgtcacccgtggcggcctcgacatcaaacacggcacctggcggccgctgttctttaaaaagaaagaggtcgagcaaatctggcgcaacgccgtggtttacctgctgcgcgacaactacgcgcaaatcaaccccgatggcctgccaggcctcggtcatatccgtaatgaagaccggtggcaccgttatctgcatgcccaatatcgccggtcctggaaagtgcacttcgccaaaaagacgcgcggcgcctggcgcagcgtgaaatacctgggccgttatttgaagcgccccccggtagccgcttctcagctgcgccactaccgcggcggcgccgtggtgcatcagtattacgatcaccgcacgcagcaacacaaacgccagaaaatcagccaggaggagatgctgcagcgttacgtcagccatatcccggcccgacactttaaaatggtgcgctactacggctttctggccaaccgcaagcgcggttcactgctgccgaaggtctacgacgcgttggcgatgacggtacgggaaaaaccgaagcgccccggatttgcagtgctgatgaaaggcttcctgggtaccgatccgtaccagtgcatcctgtgcaagggccggttgcgttttaccggtgccgtggcgggcgagcacgccaccaaactgctctctgacaggctgcatcagattaaatgctgcatatga

SEQ ID NO: 441717 - DNA, 504 bp, Serratia marcescens
atgttaaacaactcacaagttgccgcagcggggaaagcggtggctttgcaaggtaagggggtcgctgcattcccgagctataacagccccccatgtcccaataaaaattctgtggtacactgcatcaatagcaatggatataaccatatgaaaaaagggatatgttggatgactttaaaatattacttaaagcatattctatgggggcttgttatcactgctgtcgcttactatgcatggagtaaaaatcctgaagatagccgattaacgttaattctctcgctttctgttgccagctgcgttctctatccttttgcaaaatttgctatcgagaaaacagcactacgttattcccataagaaattttggcagcatgacttttttgtcagctctgtgggtggcagcattcaagtggtttatgaattattttgtttcgcattcgccattcccgtatcagttatttatttttctttatctattttaaaagccctaaaaagaaattag

SEQ ID NO: 441718 - DNA, 717 bp, Serratia marcescens
atgcttggattttttaaagccttactcaagaaaaaggaaaacaaaaaggaaacagtgagtgcgaacgaacctgttaaagctgttatccaaccccgcaattttgtttatcaagatagtttagaagttgataagtacgcatatactctagaggatgatagatatgttttatgggcaggttcacccttgcctgttgaactgtctttttatggcgacaatgataaacaagagagggttaagggtaatttgctttccctatacctttcagataaaggtgagttttattttaatattgcggcatttgataaagctgaacaaaaatcaattcccgaaagatttatttctacaaagattctatctggtagtaagcggctcgattttgtagacttttgccgagaaaagcttaagttagacggtgaaatcttctcatttgctaaagcggtaagaagtgaagcagaagcgatgaagtcaataaaaagaatcactcctataaaaatggctttcacttatgttgttaacaaaaaaagagaaaagatctcattattcgcagatgaactgcttaagaataaacatgatagcttttctatctcaggcattctaagcgaaacccaaaggaaagcatcattccacatttattatgttgacactaagtataccgttgaaggttttggaaagttaacctttgatgaagtgaaggaaaaagtttttaaatgcctgtaa

SEQ ID NO: 441719 - DNA, 582 bp, Serratia marcescens
atggcacgttttcgaatcaaccccgacactgatagcgcccccgtccttgatcgaatcattgaggcgtatgggtttacgcagaagctgcaacttgctgaacacctagacatcgcagcaagctcgttgtcttctcgttacaaacgagggggactaccagccgacataatgattaaatgcatggccgaaactggtgttagccttgagtggttggctactggcgatggcaaaatgttcgaaagcgatgaaattgatatcttgaagatgccgcgtcgcaagatcgtagatggtcaactgtatgaggccggttcatacatgctagataaagttaccttcataaatggcaagcctattcctcagcaacccgcatgtattatcgattcagaaaaccaatacgttattgaacagatgtttggggaagtttatgacgggcaatggcttgttgaaattgagggtaaagtcagcattcggactctaactcggattccgataaaaaaaattcgtgttagtggtgttggcatggcttttgactgctcaattgacgatattaatattttggggcgagttcatctttgtatgcactaa

SEQ ID NO: 441720 - DNA, 204 bp, Serratia marcescens
atgaaagtatttgcgcatttcctgaaacaacaatcacccagcccgcaactgccaagttatggccacggctggctggaattaccgaacggccaacgctggcagccatgcgccagccgagtggtgttttcacgtggttgcgtattgcagccgatacaggcccgccgccgcccttggtggttccgcctgatggggctgagggggtaa

SEQ ID NO: 441721 - DNA, 516 bp, Serratia marcescens
atgattagcactgaacagctacgcaaaaccattgaagaatgtacgcaaaagcgtccgtcagaacaaagtgtggtctttaccagcaaatttgttgaggcattggcccgcgaactgctggttaaccgggagacgcagaatacggctaagcacttgaacgccaataacaatgaggacaaaaagcgcatcactgagttggaaataagcgagacccaattgattgaagaacgtgatgttgctcacgatgcgattgacgctatgtatgaggctgcaaccggtgagcgcccggagtggagtaactggtttacatttgctgacgcggtagaggaggtcgcggaattgcgtgaataccagtctgcgctggggtcagtggtgccggagggttttcttctgatgccgattgaaatgactgatgaaatcggtgaggccatagcgaaagaagctaattgctgcggtggtattgctctgtgcatttatgacgcagcattaaaagcggcgccggaggtgtccggtgaataa

SEQ ID NO: 441722 - DNA, 906 bp, Serratia marcescens
gtgaataaaaccgtattgaaatgggcgggcagtaaggcccgtctgtcggcgaaattgcgcgaatgcctgccggaaggcgatcgcctggttgaaccgttcggcggttcctgcgccgtgatgatgaataccgattacccggaatacctgatagcggacgtcaaccctgacctgatcaacctgtacaaggtgatcgccgccgaacctgagtcgttcattaatcatgcgcgttattatttcgagcacggcaacggcgaggtggaatactacggcatccggcacgcatttaatttctgcgctcccgagcctgcttaccgcgcgagtatgttcctctacctgaaccgccattgctttaacgggttatgccgttacaaccgtgccggcgatttcaatgtgccttatggcaaatacaaagcgccttatttccccgaagaagagatccgcgccttcgcagaaaaagcgaaacgtgcaacgtttatctgcgccgactttcacgaaaccctgcgcctggtgcgttctggtgacgtggtgtactgcgatccgccctatctgccggagaagggcaaagacgcgttcacaaattaccactctggggagtttggaaagcgcgagcacttgagtttggccgttaacgcccgccgcattggtcagtcaggcataccggttgtgatctcgaatagcatccgggcggccgagattaatctatatcacgggttcgatgtggccgaaattgacgcgccacgcagtattagcgccagtggcgatagcgccaaaacggcaagggaagttttggcgtcaattacgcctatggaagccttacctcctgggcattcgatccgagtcagttacccggcatggtgcggaatagaccttgctgccgaagcggtgccggaggtgaccagtgaatga

SEQ ID NO: 441723 - DNA, 2400 bp, Serratia marcescens
atgaaacagctagattttactctgagcctgatcgacaagctgacgcggccattaaaacaggcgcaggcgtcggtgaccggcttcgcggaaaaatcacaggcggcctttggcaagattgccgtaggcggtgcggccctggtgggcgtcggcttgtcaatcaagggagcactcggcccggccattgaaatgaccgacgcgctcaactcggccgccaccaagggaattgacgacaaaaccctgcaaaaggtggccggcgatgcgctggcgttcagtgcccggtacggcaaatccgcgaccgagtttatcggctccacggaggctattcgcagccaggtggcgcggctgagcaatgacgagctgccggccttcgcggtggcgaccaacaccctggccgccgccgtcaagggcagcgccgccgaggcggcggagtacatgggcagcatgtacaacaaattcgacagctacgccgagaagattgggcgggtggagtttgccgagcaggtggccggcaaaacggcctatatggcgcaggcgttcggcaccagtatgcagacgatctccgatctgatggaaggcgccaagggcgtcggctccaactacggtgtggggctggatgaacagtttgcggtgctggggcaactggagaagacgttgggcaccgaggccagcggcagctatgaatccttttacaaggtggcgcagcagggggccaagcagctgggcctgagctttgtgaatgcgtccgggcaaatgctgaccatgccgcaaatgctggagaagctacaggcaaaatatggcgccagcattgagggcaatctcaaggcgcaggccgagctggataaagcctttggcgatggcgcgaacgttatcaagcagctgtacggcaacgttgacatcttgaatcgccatatcaacaccctcggcagcagcgacggcatgaagcgggccacggaaatggcgcacaagatggccaatccgtgggaacgcctaacggcgatctggtattccatccgcgcggcgatgggcttaaccctgctgccggtgctgtacccgctgatcaacaagatggcggatgccggccaaacgctggttcgctggttgaagctgtttcccaatctggcccgtgccattggcctggccgtgatcgccttcatgagcctggcggctgccggcgccattgccaacattgcgatcggcgttcatgccttcctgatgttggggcttaaaaacctgctggggccggtggccaaattgctgggactaaaccgcctggccatgcttgccggcggcgccgcgactaccgtttttaatcgggggctgaaaggtgtgcgggccgccctgctggcgaccagtatcgccgcacgtaccggggccgcctcgttcctgttaatggcctggccgatagcgttggtggttgcagcgatcggcgcggcagtggcggcggtttacatcttctggcagcccatcaaggcgtttgtgaaagggtttatcagcgggtttaaacaggccgccggcacgctggcgccgttcgccgggctgttcagtccgatttcgcgggcgattggcgccgtgtggggcgcggtcaaaaccttgttcgggtggttcatgaatctgttggccccggtgcagtggacggccggcgaactccagggcgtgaccagtgccggcgaagcctgcgggcagattgtggcgggtgcgctcgggttgctgttggctccgctcgagctggtgatcaacatggtcggtcacctgttcgatgcgattggcattgtttaccagggctggctggatgtaatcgccgcctttgatccggcgcggcctgtcgagtcgttcaagaaaatcggccaggtggtgagcagcgtgttttccaacctgtggaaggtgctcaaggcctcgtttgccgacacctacaattggatcgtggacaagctgaatatgctgccgggcatcgatattgacgccatgacggtagatgtggtgcccgccgtggctgatgtgccggccctgccgggggctgcggcggcggtgtcgggtgaagtcctgccggcgccctccgcattaccggtggggcaggcgctgccgaccgcggccgcgtcggttgccgggacggtgcagagaacgccggcgcccgttgcacttgccattccacaaccgccggcgccgcaggttaaagcgatggcggccgcacagcccgacaaggccaaaccggcagcgctaaccggtaatacgcttatcaccggcggcaagctaaaagggattgggccgggcggattaagcaaggacatcaccaataacacgcgcaccgtcaccgataacagtaagcaaatacgcattgaaaatatcaacgtcaagcaaggcatgacgccagagcaattaatggaatggcaggaattaaactga

SEQ ID NO: 441724 - DNA, 258 bp, Serratia marcescens
atgaaaaaagtaatagtcatcaccgataaaaaacagattgaggaatggactgtagaggaatggctcacagacttgtccatgccgaaatcagttaattcatgggagtggaaaccggattcagaaccaaaacttgagacaatctatcacgcccctattgaaacgatctccatcgacggcaaaagctacctaatcgcagttttccccggcgcagctgatgagcatgaaacaatcaatatcattcgcagtcattattactaa

SEQ ID NO: 441725 - DNA, 828 bp, Serratia marcescens
atggaaaagcaaattcctcagccaatcatttctgtagtagctgagtacatttctgataaagaaactcatgcgactttggacagtctatttgcttacgctgacgctccaggtgaaccacctgatggctcgaaagcagccaaatcactcgcatggctaagacgtatcaataaagagagtgacaagcctttgcagattttaggaaagcttcttgaaggttatatggaggctgaattaaaacccaatccttattatgattgggataaggctccggcaatttttgtagaaaagatgaatactttattagggaaatatggcctcaggtatttaactggtgggcatattactgatggatcatctattacatccatttccctgcaagaagctattaagaagagaaatcttcctgctgtagaaatggagttttcaagagcactagaaaacttacattccaatccgcgcgaggccgtttctgctgcttgtaacataattgaatccacttttaaaatttatattgcggacgaaggtttaaatccaccggctaaacaagatttgcaagggttatggaaggttgtccgtgactcattaggtatggatgcaaaatcaatagaagatgaagatctaaagagaatattaagtggcctgtactcaataactgatggcataggagcgttaagaacacatgcaagctcggcgcatggcgcaggtcgtaaaatttacactttgaaaccgcgacatgctagattagcgataaactctgctcatacattgactatgtttataattgagtcatgggaagaaaagaaatccacatgtcataaacctgaataa

SEQ ID NO: 441726 - DNA, 981 bp, Serratia marcescens
atgacgatcagcaaacttgatagcggcaactacctggtcgatgttcgcccgcaaggcagaaacggcaaacgcattcgtaagcgctttgcaaccaagggggaggcacaacaatttgagcgttggattatcgcgactcaaaacaacaaggaatgggtggataagccttcagatcgtcggacactaaccgaatttattgatctatggtggcattataaaggtcagtctctcaaaaccggcgcacaggccaaactacacctactcaacatagccgattcgtttggtaacccacatgcatcaaaagtaactaaggcgatgtttttagaatatagagctgcccagctaaaacgcgggcttaaaccggcaactatcaataaatatcaaaagttgctgagtggagttttcaccactctcataaaagcaggccagcacaaaggtgataaccctgtaaaggggattgatttgctgagtaaaaatcaatctgaaatgatgttcttgtcacaagcacaaattcacttgtttttgaatgagctcagcggggatgatctaaaagcatcgcgattgtgtattgccaccggcgcacgttggaatgaggcagcatcgctcagccgttccgcagtgataaaacataaagtgacatttctaaacacgaaaaatggcaaaaatagaaccgtgccaatatcgcaatcactctatgatgaaattaccgaaggcgatggaaaacgattgtttcccaatgtcaattactcgaatgtccgccgcatccttaaaaaattcatccccgacttgccggacggccaagcaacacacgttatgcggcataccttcgccagccacttcatcatgagtggcggcaacatactgacgcttcagaaaatattggggcattcttctattgtgcaaacgatggtttacgcccatttagcaccagattatctcaatgatgcggtgcgcctaaaccctctggagaacagcccaatgtga

SEQ ID NO: 441727 - DNA, 309 bp, Serratia marcescens
atgggtatttcgtcaagcaactatagtgaaaaacttaagcaaataagaaaagcagaggggctaacacaagcaactttcgctaaagagctagaactcgggttgagcactgttaggaattacgagtctggacaaaagaatgcagggctaaccatcgttgacaaggtgaccaaccacccgaggtttgagaaatacacaatgtggttaatgaatgggaaaacgtccgaagcagcggggcaaatctccccgactctctcccctgatgggcacgacaacatatccgatccccaaagaggccagaaggctggctaa

SEQ ID NO: 441728 - DNA, 261 bp, Serratia marcescens
atgcgaacacgcaaaccaaagccgttgatggtgaaaatgccggattgtcctgtggttttttgtctgccatcgccaaaattaaccctctccgcatatgcagaagttacaggtcaaacgcttcgaactgtgcagcaggccgcaaatgaaaaccggctcactatttccaagaaaaaaagaggcaaagaacgtgaagtaaacatggtttacgagttcttggtcgcttatgaagaggcgcaggaaacgctgcggatgaaggtttag

SEQ ID NO: 441729 - DNA, 240 bp, Serratia marcescens
atgattgagcgctataaatcgctggatgcggcagtgagggaattgaagccacacgcgataataaagatcagcacgcataccagcatttaccggggcttcagtatcaccaaattaccaaggaagaaaatgaacccggtcactcgctatcgcgtcagccagggtgatcagtcttacggtaaatttgatgctcaagctgaggcgacggcatatatcgattatctccacctctcaaaactttga

SEQ ID NO: 441730 - DNA, 276 bp, Serratia marcescens
atgaaacaagcctatagcattctcatcaatgatttattgaaacagtaccactttaaaagcgacaacatgcgagccgcttcggctgttgccgaggaagtccgccaattttcccaaaacgattatgctttccgcctgagcgttggccttgaagggctgcttagcaccgcacaggctgccggtgatctggagtcggccgcggatttggaggcgctggtttaccgttgcagcgctggcgatgtacctcaaccattttgcgcagatcggttcgcagcttaa

SEQ ID NO: 441731 - DNA, 294 bp, Serratia marcescens
atgatgcgtaaaacacagctcgcttttaccattgcagccctctatagccgccacgagcacatagacgattttcatgtgctgtcgcatctcaatcgactgcgtgccttcacctggagtgaccgtcgttgcgggaaaacctacgcagcccgccaacaggagctaatccgcgcagcgttcaagctttccgcaggcgcaacgctgcgacttcttcatatcagtagaaaaccgccttttatggcgcggattgactgggtgaattacccggagtggattaaagaggtgccggtagcatga

SEQ ID NO: 441732 - DNA, 618 bp, Serratia marcescens
atgagcatttcgaaacgagaaaggccatgcacagcacccacttatttaagtgcgaagcgctacattgagtgtgcagatgtcattaactctgcgtcgcttttattcatcgtcccaatcatcgtaaaagtctgtttcgggctttggcggtggtggcgggtttcgcggaatatcagcaagcttgaattctccttttgccaattggcttttgacttccggtgtcgcgaaaacagcatcgtaaccgcgaaatgtttggaaatcagtcagaagattggtaagcccgagttttttgagaaattcacaaatactgacgtagtctcccaatccggaacctgtaatcgctcggtaaatgaagccattgtggtaaatggcgacgggataatcagcagccccccagagatcctccgcctgactttcaagccaggcgctgattttgtcgtcatattgcggacgttcgcactcacgcgtgtagcgatgctccattttttaccctccctctttattgaactgttcagcgagtgggaaattatgagcgcagacaaaaaattaacgcaagtgcggttgttggaggctgatgtcctgacagggctagtaagcaaatggcagggggaagatgaataa

SEQ ID NO: 441733 - DNA, 2574 bp, Serratia marcescens
atgaataaagatacccgtggtcgttatcagccttcaccgccgctaccctatccgggcagcggcgcagttgcttctgactggccctatccctggaatgcaccgaaacaggggatcaacccgtacaccgaagacgccgaaaaagagctgaaactcaccgccgcgcaacggcgccggcagcgctggattgaggtcaccgcggatcaggagcgcgatcgcgattcgcagctttccattctggcggaacagcgtcgcggggaaggcaaggtgcagctggtgctgggcgccctgatggcgcagcccgattttatccgttcaccattgctggcgcgcatcaacgccattcgtaagagcaagaaaggcaacagcgaaaagctctcccgtaattacattttgcggacggtcaagacggtactcacccgcgttgagaagatgcaggacaagcagctaacctttggcctccaattggttgcccgtcgtgagcggctcgacgatctgttacgtctacctgagctggacaaacgcgcggtcaaattgctggcaactttcacggctgcgcattttgaaacgctgctcgaccagcagtgcaggagcaggcttcccaccgacgccatgccagaagaaatacttcgtgtgtatgtttcgctgggcaccgaggccgaacgcttcaacgtgacgccgccctgctggcattctctgaacccatacctgcgccgccgcggggagccgccttacgacaagatccccggcgcaatcgccagaatgtgctgcgctaactggtggtttaccaatctgtgggcgttgcgctgtcgctggcgtgaagagctgctgcgcgccgcggggctggtacgtaaacaggattccgcctacatcagcgccgacgcgctgacacacttccgcgagcaacgccgccgcacccgcgaatttctcaaggctttcgagctgaccaacgatgacggcttttccatcgatctcgaagatgcttattacgctggccccagcaacccgcgccaccgtcgcatagagatgatgactaccgtcaaaggcatgcaggacatcgccgagatgcgcggtgattgcgccgtttggtgcaccatcacttgcccatcgaaatatcatgcaacgttgcaaggtagcggtgcacctaacccgaaatggaacacgtacactgttcgcgaaagcaatgattatttggtcaatcgctttttcgccagcgttcgaaaaaaactgaatcgtctcgggctccgctggtacgggatccgagttgccgaacctcaccacgacggcacggttcattggcacatgatggtgttttgccgaccagatgaacgcgacgacattgtcggcatcctgcaagagtttgctatccgtgacgaccgcgccgaacttggcaatgacataagcccgcgctttgaaactgaactgatcaccgcagagaaaggatcgccgatcagttatatcgcgacctacatcggcaagaacctggacgccgagcctttacgcaaaccgaacaaagataccggcgagccgccaatcgaccacgaaagcggcaaaagcatggccgatacggtcgagcatgcgctcggctgggccagtctgcaccgtgtgcaccaattccagtttttcggcataccctcccgtcaggtttatcgcgaattgcgccggctggcgacccagcttgaccgccagggcattagcgccaagaaaacccagcggctgagcgataaagccatggatgacgtgatgaatgccgcggatgccggctgcatcgcaacgtacatcttgaaacaaggtggcgttttgacgccgcgtagcgatcacatcgtccacaccgcctaccttcaggcggaaaagcccaacgattacggcgaactcggtattcagatcttcggtgtttggtcaccgatgctcggtgaggcatcgcgtatttgcacccaccccgacacctggacactgaagcgcaaacgtaaaccggcgggcggcgaagccgcgcgcctgggtgttgacgttgagggctgcggcaaggccgccgccccttggactcgtggcaataactgtccgcctgagcaaaatccaatcaatgaaggcggaagtataggtgctagtgatccgcatcgagtacagccaccgacgactgtgccagctgatgaaccagttaactttgaaaacctgagccgcaaagaaaggcgggaactgttccggcggttaaaagcaacatcgaacaccagcgataaagtggcgccggctgtattgcctggacttgatctacgggtggcagaagaaatacagcgtaaggccatgctgcataagcagcggcaggaaggcctggtgcctcgcgctgagcgaatcgccgattcagcattcagtattgggattgaattgacccatcaagaagcgatggcgctggctgccggtgccacgttcgaagtcggtagccagagattcagggcaggccgagaaggcgagctattgataatgaaacaaaaatcacaacgccctacaccggaagggacgcagcgcaaagcacaggagttaatgcagcggctgaaccatgtgcgtcacctcgcttcagcatag

SEQ ID NO: 441734 - DNA, 234 bp, Serratia marcescens
atgacagacaaaaccgtaaatcaaccgacctttatcggcctcgatctagctgctggagttatcgaccattaccgcctctctgcgcgtatcgccttgctggaacagctggatcgctgtctcgacgagctggagctgcacggcgaccagcgcgagcaaatcctgatcagcctgcgcaattgggttgcatcacgcaaggcgatgaccgactccaccgcgcaggacgtcacgccatga

SEQ ID NO: 441735 - DNA, 150 bp, Serratia marcescens
atgatgttccctttcgctatcgccgccactgcattcaccggcgttgtgtgggtttgcctgctgatctggattgcttaccgctggtgcaaattctgccgtgccttcaatcgcgcggcatccgttccacctgaattgcgtaattacgattaa

SEQ ID NO: 441736 - DNA, 1020 bp, Serratia marcescens
atggaaaacattagatctgatattgagaaagctgttaaagagagagcagccgggccacttgggtatgtaaccttatccttcattgtttataattggtcgtggttctacttcgttttatttagttcaaaaagtgctgaagttaaaatagcaagtgtcattagcggttttcaaaagttaccgggattcggatggcccattctcgcaggactggtgcttcaagtagggacgccatatttaaagatgttaatagcctttctaacttcactcgctaaaaaccatgaaataaggatggagcattactctgacaactatttggaacttcttaaagaagagactaagcaattactaattgataaaagattggaaataaccgcggcaggtacaaaaatagataacctgatacaagagcgagatggattaaatgacgaaatcaaaaggattcaggaaaaaataaacaacctaagaaaagaagaaatggacgcggcagaagcaattgagaaggcgagtagagagcgtcacaaccttgaaatatttttagcaacaaataatacaacaaaagagagatttgaaggtctcactaaggaaatacaaaaaaagagcatagaaaatacaaacattaaaaacgcgattataagtacgcgaacctgcgcggataaattatcaaaaatcgcgataaaaatggaaacatccccagagtcaataaccgaaggggataatatagaattggcaacagtaatgaatgtgttacatgaagttgcatctttgattgaaggggaactcattgcaagagatggcgctcactttaacgatgagaaaaatgaaatgctcattccacaatctgtttcagaagataagattaaagcatttttatatcttatacagagcaaggggtttaatgcatcacttggcatagcagaatctgatggaacaaaagtcgttaaattctccagaacgcttgaacctagagagaaaaaaggcgttatcagttattacgaagaagctactggttctattggttga

SEQ ID NO: 441737 - DNA, 828 bp, Serratia marcescens
atgttggtattactcagtgatatttcagccgacaacgacaacgcccctcgctgggttatcagtgacgaggaaagagatattctccgcctgaaaccgtcggcctggttggaatcaaccagcggcgtggtttcaagcggcggcaaggtttccgctgtgcgtgacaaaacggggaaaacgacctggaagcataccgcgaccaacccgccgatgattaagatgtacaacgatatcccggtgctaaacttcgggcgcgcggtgtcgaactccggcgccttgcttgcggagggtggctaccaggcaatcccggcagatggcatctattcgttgtttatcctgtaccgtatcccagccgaaaacactgaaggttacacgggggtaggcggcaatattgccgggaataatgaagcggctggcgaatggctgcgggtgcgcttcggtagcgacagctatcaggggaacgcgattttcttaaatcatggtggcgttgctgtcaccggcacggataactacccgatcaatacctcccttgctggctggcgtgatgcgaaatggcatatcagcacgatccaggcgggcgccgattttcaccgctgggaaattgacggcgcgttgttgcaggaaaccaccttccccgcgaagccgttcccgacggaggccagccgccaggtggtgatcggcggtgcgtgtaatccactttcgaatggtttccagggggatattgccgcggtgctgttgctgcctggtgaactgcgggacggtgccaagactctgatttatgatcgcctcaatacgatgaaagccgcgctcaccggcagcagcggtgcgtaa

SEQ ID NO: 441738 - DNA, 1821 bp, Serratia marcescens
atggctgacgaatcgctgccaaccaaacgcatttccgaactgacgcaaacggaaaagctcacgcagaaagacgtgctcccgctctcggtcaacaatgatcgtgatagcggggtatttgaaacaaaatcggtgacattcggcacgctaaaagatgccgttgtcggtgaaaccgccgataacgtggatctgcttaatagcctggtgtcgcatgtgcctaaccagctgtcggccttagctgaggtttttgccggtgttcgcagcgacgataactttttcttcccgttcatgctgcgcaacggtcgcgggtgcttcattgatatggacggtaaattacagatgaacgcggccagcaccgatattccggcgcgatcgttcatcgagtgcgaagcgttcgaactgccggacggggcgatctgttcgcaaatcattgttgacccacagggccgtgtaaaagaagcctggacgactgacggcggctattacattttgacgccgaacggactgaagaacgttgcgggcaatgccaaggtagccgcaaaaaatatcacttacgcctcggcaaaagccagcgtcacggggatgtcgccgacgcggctttcggtcaaccctgatccgcgtatctgctacatcattgtgaccggcgggcagtcgctggcgcagggctggaacacgctacctggcgacgttctgatcgcgacagacccgctttatcctgacgcgtgttttatgttcaagtcatctcgcggcgctggcaaagaaaacccgaaccggggcagcgcgccaatcacagatttggaatctctgcgcgaaacgataaacggcaactggaaagagtctgcggccagctccctagcggcgcacatcgttcacgaggtcgaaaaacacaccgggcaccggatcaggacgctgtcctacatcgctgcgactggcggcaagccttatatggaactcattcgcgggacaccggcctgggatgcgctggtgcaaggtctgattgatgcgcgggacatctgcgagcgcgagggctggatacctgttgtcctggggctggattggatggcaggcgaaagcgacatggatcaagttgcctatatgaccaaagaacgggaaaagcgccagctgatgcagcttgaccgtgattttaatgccgaggtcaagcgcattttccctgatcacgccggggacgcgatcatctctgtctgccagtctgcttttacacctaacggcacttggaaccagcatgtaaggcaagcgcaatatgaaagcgacggtatcggcaacattcggctggccgggccggtttatcctttcccgtcaggcgatactattcatatcaatagcttaggacaaaaccgccgcgggcagatggtagcgcgggtgtttatctgggaaaaattcgggacaggctggcgcacgataaagtgcaccggctatatctggttgtcggatacaaagattcgccttcctttcgacacccctcgcgaactggtgcttgacgtttccggcggaattatcagcccggatggactgggcgctgggctggggtttgtttgcgacgatcgcaccagcagccctccgaccgtgatcgatgccgttgtcagtagcacgtcgtcgattgatttgaccttatctaaaccattcgcaaatcgcagtggccggattggttatgccatcaaacgcaacgacggcaacaacaatcaggacggcccgctggtcggtgcccgtggttgcctgcgcgacagcaccgcgcatgaatccctttatgagaccggcatctcccatcctaattggtgcccggcctttatcatcgaaatagcgtaa

SEQ ID NO: 441739 - DNA, 1914 bp, Serratia marcescens
atgaaacagctggaagtgatgctatcgctggtcgacaagttctcgcgccctctcaagatggccggcggcgagttgacaaatttcgccggcaaatcacgcgcagccttcgggcagatggtcgccggcggcgctaccttgtggggcgtcgcgcaatcgatcatgggcattctcggccctgctgacgaaatgcagcgcgcgctcgccgaggtaaaatccatcggtgtggccgacaccgcactgaagaacctcagtaacaccgcgatcctgttcagtatgaaatacggcgaatccgccgccgggttcgtggcgtcggctgcatctatcgcgggcgcgatcgatggcctggcagataaagagctgcgcaccttcaccaccgcgggatcgatcctggcaaaaggcacccgtgccgacgctgacaccattaccaactatatcggcaccatgtacggcgttttccagaaaacggccgacgcgatgggccgatccagctgggtggaggtgatgaccgggcagacggccgaagcggtgaagatttttaaatcggacggtaaacagatgtccgatgcgttcacctcgatcggcgctaacgccaccgccgccgggatcggcatggcggaacaattcgccgtgctcggccaactacaggccaccatgagcggcagcgaggccggtacaaaatacaaagccttcctgcagggcgtcggcaacgcccaaaaggtgttggggcttaacttcgtcaagcaagacggctccatgaagggcatcgccgacatcatgggcctgatccaagaaaaatacggcgatatcaagaaagttgccgactcggacatgattaagaaggcatttggctccgatgaggcggtttccctgattaagctgctggcgcagaacgtcgacggcctgaaaaacaacatcgaccaaatcggcaaaatcaagggcatggacaacgccaaaaagatggctgctgacatgaccaaccagtttgaccggctgctgcaggtctggaaaggcatgcgcatcgccgtgggcggcgcgctgctgcctgtcatcaatccgctgctcgaacgtatgtcggacatgggaacccaagtcgccgattggctgctgaaatttaagaatatcgcgcgctggataggctacgtcgctatcgcgctcacgtcgctggttgccgtctttgccctggcaaacatcgccgtcgccgccggtaaattcctgtggatgggcttcctgatcattctcaagctgctgcgcccggtgctgttgatgctgcgcctggccttcttcctgactggcctcgccgccaacttcatgggcctgccgatcacgctggtgatcgggctgattgcgctgctggtcgctgctgtctgggccgtcgtcgcctattgggatgaactgaaagccgccatcatggacaccgccgcatttcagtggttgatggggatcgtgatggtggtcggcgccattttccgcgtcacctgggcgatgattaaggcgggctggcaggatgtgatcaacttcttcaccggcctgtcgcccgtgcaggcgtttaccgactttaaaaacaccatcaccgacgtattcaaggggctgtgggactatctgaaaaacagcttcgcgcaaacctacaactggatcgtggaaaaactgaacatgatccccggcgtcgacatcgagatgaaaagcgtagcgccagaagcgaccccagccggaagccaacccggcagcgccccgcttctgaccggcgcgaataccgtttcaaccgggcgcggcggcatcatgggccaggtgagccagtcaaccaacaacagcaacagcgccaaaacgcagaacatcagcacggttaactttaacgtgtcgcagccgctaaccccgcaggcgctgcaagaaaacatggagctatacgggcatggctga

SEQ ID NO: 441740 - DNA, 906 bp, Serratia marcescens
gtggatagcgcacgcgtccttattgcccggggatggggagtaagcttcgtcagccgttgtctccgggtgtcgcgtgcgcagttgcacgtcattctcagacgaaccgatgactggaaggacggccgccgcagccgtcacacggatgatacggatgtgcttcgccgtatacaccatgttatcggagagctgcccacatatggttatcgtcgggtatgggcgctgcttcgcagacaaacagaacttgatggtatgcctgcgatcaatgccaaacgtgtttaccggatcatgcgccagaatgcgctgttgcttgagcgaaaacccgctgtaccgccatcgaaacgggcacataccggcagagtggctgtgaaagaaagtaatcagcgatggtgctctgacgggtttgagttccgctgtgataacggagaaaaactgcgggtcacgttcgcgctggactgctgtgaccgtgaggcactgcactgggcggtcacaacgggtggcttcgacagtgaaacagtacaggacgtcatgctgggagcagtggaacgccgctttggcagcgagcttccggcgtctccagtggagtggctgacggataatggttcatgctaccgggcgaatgaaacacgtcagttcgccaggatgttgggacttgaaccgaagaacacggcagtgcggagtccggagagtaacggaatagcagagagcttcgtgaaaacgataaagcgtgactacataaatatcatgcccaaaccagacgggttaacggcagcaaagaaccttgcagaggcgttcgagcattataacgaatggcatccgcatagtgcgctgggttatcgctcgccacgagaatatctgcggcagcgggccagtaatgggttaagtgataacaggtgtctggaaatatag

SEQ ID NO: 441741 - DNA, 264 bp, Serratia marcescens; identical to SEQ ID NO: 180796

SEQ ID NO: 441742 - DNA, 213 bp, Serratia marcescens
atgttcctgcatttcatccagagcgatttcagtcacaaaatggatttgcccctatattaccgggacacctcagtaatagaaaaaaataaatattctctgtcagatgatgagcttgagcatttcaatgccgcggttgatcaccggctggcggagatgatgatgggaaagttgtatgaccgggtaccgtcaggtgtctggaaatttgtgaaatag

SEQ ID NO: 441743 - DNA, 231 bp, Serratia marcescens; identical to SEQ ID NO: 101136

SEQ ID NO: 441744 - DNA, 681 bp, Serratia marcescens
atgagtacgcaagagccaacatttagtcaggtagtaaaaaacaggtactcggcaagagcctttcttccatctcctatccccagcgatatcctcaaagacattttgctcgaagcgcaatgcgcaccatccaactgcaatactcaaccctggtccctgcatattgttgcaggagataaacttcgtgaattaagccacgcactgacggaagatctgagggcggggaactacagtcttgattttacctttgataaagaagcttatcccgagccattcaggcaacgggcttcggagcaggggcgctcgtactatcaggcactgggcgttgcgcggggggataacttaagtcgctcagaagtggtcgagcgtaatgtgagatttttcggcgcgcctcatgttgctctgctgttcattcctgctgtaggggacaacgttcgcgtagcctctgacgccggtatgtatgcgcagacattcctgctttccctggcagctcgcggttacgcaggcgttccacaggcagtgctgagttattttgccaaaacggtgcgtcgaatattaaaagttcctgaggttttcaggctgctttacggtatttcttttgggatcccagataaaacgcatccctccctgagttacagggaagggcgggtatctctggacgaaagtgtcgtctggcatcaataa

SEQ ID NO: 441745 - DNA, 861 bp, Serratia marcescens
gtgccgataacaatactaaagggtcttggaatatttctgtttgcatcaggttcagcttttgctggattaactgtaagaacgcaagagaataaccaacaggtatatgttaactcgttgggaatgcgctttgtcacaataccagcaggacaatttctgatgggttcatcggatacaacggccgacagtcgggagaaaccccaacattcagtgatattttctaacgatttttttatagggcaatttgaagtcacacaagcagactggttggctgtgatgggggaaaacccttatgtgcgagatcgctccaatccctactatcttcttcctggcatggcagagcgcattacgcacccggatcatcccgcgacggtatcctggcaggatgcaatggaatttgttgaaaaactcaatcaacgagaaggtacaaccggctaccgattaccgacagaagctgaatgggaatatgccgctcgcgcaggtagtacaacacgttatttttttggtgatgatgcttttgcgctagataagtatgcctggcacggagaaaactttatttctggtggcacacatcccgttggtatgaaaaaaccgaatccatggggattgtatgatgtttacggtaatgcccgggaatgggttagcgattattacagtacccgctactatgctcaaagcccggaacacaatccgcaaggacccgacggtggtacagaacgtaccgtgcgtggcggtagctggcatagtacagcgaatggctggcatagcgcatggcgaaaaccctaccccgaagattaccgtgggataagcattggattcagaatggtttacatctacttaccagaatcatcacttagtcattag

SEQ ID NO: 441746 - DNA, 255 bp, Serratia marcescens
atgaaaagtaccgtattaattctctccgcacttttgtctctgtttaccattaacagtgcattttccgcacaggcaatctcaagtgatgctggcaaagaaaaaattggcgttgtttccgccagtggtgccactacgcttgatgaattagtggccaaacttgctgaccaggcagataaagaaggcgcatcatcatttaaagtcctttccacaacgggcaaaaataaactacatggcgtagcagagatttacaaataa

SEQ ID NO: 441747 - DNA, 1170 bp, Serratia marcescens
atgaaatgttcggtggcttattcgcctctggctatgctatgcatttttgctacgactacagggctggccgggtgcgacagtaaggacgcatctaccgcaagcaaagttattcctcctgatgtagttgtcgagactgtaaaagcaacgccccttaccctgaccagcgatctcccggcaagaacagtggcatcccgtattgcggaaatccgcccgcaggtttcagggattgtgctatcccgtgattttacagaaggcagcgaggttaaagccggtcagccgctctaccatatcgacccggagaccttccgcgcttcggtggataatgcccgggcggcagttaaccaagcgaaggcccagtcccagctagcccagtcgacgctttcccgctaccgggcactgagtgggaaaaattatatcagtcgtcaggatctcgatcaggctcaggccactgctcaccagacgcgtgcggctatcgatgcggccagcgcagccctgcgatctgccgaaatcgatctggcccacagcacggtgacctcaccactcaatggccgcatcgggttatcgagcgtgacagagggggccctggtacagaacggacaaagcactgcgctggccaccgtgcaacagttagacccaatgtacgttgatatcacccagccgggcgaggcgtggttgcggctacagagtgcgctggcaagcggccagattaagcaggaaaatggcaaagtacctgtccatgtgctcatgcaggacggaagcccatatccgctgagcggcacgctggcgttctctgatgtcacggtggatcagaccacgggcgcaattaccctacgcgccattattcctaacccaaatcatcaactgctcccaggtatgtttgttcgcgcccgtcttgaagaaggtgtcgcgcctgaagcactgctggttgcccagcaggctgtcacccgtacaccacgcggtgacgccaccacgctcgttgtcgataagcaaaaccgggtgcagccccgcgcgataaccgtgacgggaacgtctggcgatcgctggcaggtcatcgagggtcttcaggcgggtgaacgggtcattgtttcaggcagtcagcgcgttaaacctggcgacgttgtgaccccacatgaacgcgccacgctctccggttcgtctgcacaggaataa

SEQ ID NO: 441748 - DNA, 3135 bp, Serratia marcescens
atgtctaaattttttattaaccgccctattttcgcctgggtattggctattatcgttatgattgccgggggtattgcgattttggggttacccgtggagcaatacccggacgtcgcgccaacggcggtacagatccgcgtgagctatcctggtgccgatgccaccacactgcaaaacagcgtcacgcaggtgattgaacagaacatgacgggcctggatggcctgatgtacatgtcctcaaccagcgactcctccgggacactgcaactgaccctctcctttaaaaacggcaccgatccggatatcgcacaggttcaggtgcagaataagcttcaggtcgccacccctcttctgccgcaggaagtgcagcaacagggaataacggtgatgaaatcctccagtaccttcttcctggtacccggctttgttgatgaaaccgggcacatgagcatggaagacatcgccgacttcgtggcatcgaccattaaagatccaatcagtcgtattgacggcgtgggcgacacgacgctgtttggttcacagtacgcgatgcgcatctggctggaccctaacaagctcaacaactatcagctgacccccgttgatgtcagcaatgccctaaaagtgcagaacgcgcaaattgccgcaggtcaactgggtggtgcgccagcgatgaagggccagcagttgaatgcgtctatcattgcgcagacccgcctcacctcccctgaagagttcggtaacattttactgaaggtcaacagcgatggctcacaggtggcattgcatgatgtggcgcgaatcgaacgcggcggtgagaactatcaatttgtggtgaaaataaacggtaaaccggcttccgcactggggatccagcttgccagcggtgcaaatgctatggataccgccaaagccatccgggcgaaactggctgaactggagccttactacccgcaggggctgaaggtcgtttacccttatgacaccacgccgtttatcagcatctcgattcatgaggtggtgaagacgctgtttgaagcgattatccttgtcttcctcgtgatgtaccttttcctgcaaagcttccgcgcgacgcttattccgactatcgcggtgccggtcgtgctgctggggacatttggcatcctgagcgcgctgggctattccatcaataccctgacgatgtttgggatggtgctggccatcggcctgctggttgatgatgccattgtggtggtagagaacgttgagcgcgtgatggccgaggaaggactcaagccccgtgcggcaacgcgaaaatcgatggatcagatccagggcgcactggtggggattgcgctggtcctatcagcagtatttattccgatggccttttttggcggcagtacgggcgtcatttatcgccagttctccatcactatcgtctcggcgatggttctgtcagttctggttgcactcaccctgacgcccgcactttgcgccaccatcctgaaaccggtcaaacccggtgaacatgctaaagatcgtggtttttttggctggtttaaccgccgcttcgatgccagtagctcacactattcacgagccattgcccgtatgctgaacggtaccgggcgctatttaatcgtctacggcgtgatcgtactcggtatggcctggctgtttgcccgtctgccaaccgcctttctcccgtcagaagatcagggcgtcctggcaactcaggcggttctgcctgctggcgccacgcaggaacgttcgcagcagattctggatcaaattaacgactggtatctgagtgatgagaagcacaacgttgccaacgtgctgaccgttaacggctttggttttgccgggcgcgggcagaacattggtatcgcctttatcggtctgaaagattggtctgagcgtgacggcagcgaaaacagcgttgatgccatcgcagcccgtgctaatcaggcgttttcaaagttgattgatgcacaaatagcggcgtttaacctgccgcctatcattgcactgggtaacgccaccggctttgattttgagctgatcgatcaggcaggtctggggcatgaaaaattgatggaagcgcgtaatacattgctacagatggcgcagcagcatcctgacgtgctgatggccgtgcgtccaaacggcatggaagatacgccccagtatcgtgtcaatgtcgatcaacataaggcatccgcgctgggtgtatcgctggatgatatcaacaccacgctcagcaccgcctgggcaggcagttacgtcaatgacttcatggacagaggcagggttaaaaaagtctatgtcatgagcgatgcggcatggcgcatgatgcctgacgatctcaataactggtacgttcgcgccggtaacggaaagatggtccccttcgcaagcttcgctgacgcgcagtggatttatggctcgccgcgacttgagcgtttcaatggtctgtcatcagttgaaatcctcggccaacccgctcctggtcgaagctcaggcgaagcaatggcactgatggaacaactggcctcgcagttaccgaaagggattgggtacgactggaccgggatgtcgtaccaggaacgcctgagcggccagcaggctccggctctttatgccctgtcgttgattatcgttttcctgtgcctggcggcgctgtatgaaagctggtccattccgttcgccgtgatgttggttgtaccgcttggcgtcatcggtgcgctgctcgcgacaaccatgcgtggactcaataacgatgtctatttcgttgtcggactgctgacaacaatcggtttatcggcgaagaacgcgatcctgatcgttgaatttgccaacgacataatggtgaaggaaggtaaaggcttaattgaagcgacgcttgaggcggcacatatgcgtctgcgcccgatattaatgacctcactggcctttattcttggggtcctgcctctggcattaagccgcggtgcggggtcaggcgcgcagaatgccgtcggcactggtgtcattggtgggatggtcgcggccacgctgctggctatctactttgtgccagtgttcttcgtcgtggtacgccgccgctttaccggcaagcgtgtcactgatgacgaggatgatgagtaa

SEQ ID NO: 441749 - DNA, 780 bp, Serratia marcescens
atgaaggcgctggaggccaggctcaacatccgtctgcttacccgcaccacgcgcagcgtggcacccacggaggctggggagaggctcattgcctgtctggagcctcgtctgacagaactggaacaagagcttgagcaagtggtgcagcttaatggcattgcagccgggaatatccgtatttcggctggagagcatgcggcaaagagtctggtatggccaaagctcaaacctttcctgcgcgaatatcctgaaatcaatgttgaactggttgttgataatggctttgtgaatatcgttgaaggccgttttgatgcgggcgttcgtctgggagaaagtctcgataaagatatggttgcggtacgcatcgggcctgacctgcggctgaccgtggcgggttcagccgattattttacccgttatggtattcctgattctccgcatgatcttcggcaccaccgttgtattaatatgcggcttccgacgctgggcgggttatatcagtgggagtttgaaaaggacggaaaaccgcttcaggtgaaagtagacggccagcttacctttaatcatctctctgaaagaatcgatgcggcagaagcaggcttcgggctttcgtttgtccctgaagatatgattcagcagcagcttgaatcgggtgcattgattgaggtattgcaggagtggagtacggtatttcccggctattacctttactatcccagccgaaagcagcatccacctgcctttgcgttgatgattgatgccttacgttatagcgtgtaa

SEQ ID NO: 441750 - DNA, 771 bp, Serratia marcescens
atgaaagttttaattgtcggtgcgaccggcagtgttggtcgttttgttgtagaaatgtcgatagaaatgggacatcaaccgaaagccctggtccgctcccagcaaaaaagcaaaatgctcccacggggagttgagattgtgtatggcgacgtctctgtcccggaaacattgaccggcattggtgatgatatagatgccgttattttcacccttgggtctgatggattaggccgtattggcgcgcgggcagttgactacggcggggtgagaaatattctgcaacgactaaaacatcggccagtcagagtcgtactgatgacagctattggcgtgacagaaagagaaggttcgtataaccgccagacgcaagcgcatgactggaagcgacgcgcggaacgcctggtacgcgcaagcggccatccctataccatcgtcaggcccggttggtttgattacaacaaaccgaatgaacaacacatcgtcatgctacagggagacagacgtcactcaggtacaccggctgatggcgtgatttcccgtaaacaaattgccagggtactggtttgtgcattaacagacgacgctgccaggaataaaacactggaactgattgccgaaaaagggaaagagcagcagagcctcacttcgcttttttcgtgcctgcaacaggacagcgcaggtaacaatgacggtgttcaggatttaaacaatatgcccctggactcagagcctgagtgcgttattcgcgatcttagtgctatgacgcaataa

SEQ ID NO: 441751 - DNA, 1056 bp, Serratia marcescens
atgaccttaaatgtgaaaggttatgccgcttttgccgcaaaagaggatttagtgccgcacagctttgtccgccgcgatccgcgcgataacgatgtggttatcgagattttatacagtggcgtttgtcattcagacatccataatgcgtttaatgactggggcggtgcaaagtatccaatggtgccggggcatgaaatcattggccgtgttactcaggttggcaaggcggttaccaaatttagcgtgggtgactatgctggtgtgggctgtatggtggactcctgccagcattgcaagccctgtgagcaggggctggagcagtactgtgaagagggtaataccttaacctataacgatactgacaggcatgaccatatgccaacctatggcggctattctgacaagattgtcgtcaccgaaaaattcgttatcaaagtacctgagacgctggatttaaaaggcgcagcaccgctgctgtgcgcgggtatcaccacttggtcaccgcttcgtcactggaatgttggcccgggtagcaaagttgcggtcgttgggttgggtggtctggggcatatggcgataaaattagccaaagcgctgggtgcggaagtcacgttattcagtcgttcgccgaataaagaggccgatgcccgccgtctgggggccacgcatattgttatttcaaccgatgaaaaacagatgcaaggcgcgcataatcagtttgatttgattatcgatacggtgccttatgttcatgatctgaatccctatattccgacgctggcgctgagcggaacactggtgcttgtagggtatctgggggatttggatcctatgctgaacagcgcaccgctcattttagggcgaaaatcggtggccggttcggtcattggcgggattgcggagacacaggaaatgatcgatttctgtgcggagcatcagataacatctgatattgaattaattaatattcaggatattaacgcggcatggcagcgaatgctgaagagtgatgtgaaatatcgattcgtgattgatatgtcttcactgaaggcgtga

SEQ ID NO: 441752 - DNA, 831 bp, Serratia marcescens
atgaaagatgtgattgttgttattggtagtggctctatcgcacaggccattgcgcgacgcgtcagcgtcgggaaacatattctactgggtgatattaatccagaaaatgcccaacaggcagaaaatacgctctctcgtgcgggttttgaggtcagcacaacgactgtcgatgtccgctctcgccagtctattcaggcactggttaagtcagcctgtgcgttgggtgagattaaaggcgttattcatacggcagggctttccccttcacaggccaaagcacaggatcttcttcgggtcgatttgtacggtaccgccgtgctttttgaggagtttggcgacgtgattgcacgcgggggctcctgcgtggtgattggctcgcagtccagccaccgcttagccgttgatgcgctgacccaggcacaggcagatgcattggccacattgccgccggaagagctacttgagatgccgttggtgaaagacattgaagacagcttatacgcttaccagatttccaagcgttgtaatgcgctgcgtgtaatgtctgaagcggtgaagtggggcaagcgtggggcgcgaattaattgcatcagcgccgggatcatctttacgccgctagcctatgatgagcttaatagcgcagagcgtggcacattttatcgcaatatgctggaaaaatcgccggcaggccggggtggcacaccggatgaaattgccgcgctggcagaatttctctttggccctaatggcacctatgtcaccggaagcgatctgttaattgatggcgatgcaacggcgtcttacaagtatggcgaattacgcccgcaataa

SEQ ID NO: 441753 - DNA, 516 bp, Serratia marcescens
atgcggtctccagaataccgtgaagctattcaggatatgagccagtcatggtcaattaatgcgtctattaatcgtgcagaatatgcatttttggacggttctttacatcctttgtttaccgcactttttggtcgggaaatgaagagtaccagtcagattttaccgcctgtctatatcgattttggtcgtcaggtccaggtcgggaaaaatgtattcatcaaccataattgcaccatgatgtctgctggcgggattgtcatcgaagatgatgtccagattggcccgcaggttacgctgacaaccaccaatcatgatttcgacgatcgttttaccctgctgtgcaaaccgattcatatcaaacgtaatgtatggatcggcgctcgggcgcttattctgcctggcgtaaccgtaggtgaaaatgcagttattgctggcggcgcggtggtcacaaaagatgtggaaccaaatgttgttgtcggcggctctccagcccgagtcctgaagcgtttggattaa

SEQ ID NO: 441754 - DNA, 906 bp, Serratia marcescens
atgttagataaactcgatgcattaaagattttctgtactgcggcagaaacattgaaatttcgagaaactgcgaatcgacttgggcttgcgcctcagatggtgacaagggctattgctgagcttgaacaacagttaggggaagtactgttcatgcgcaacacccggcaaatggcgttaacccccttcggacagcaactctggccaaaagccgaattacttctttcggaaagtgagtctttgttcgctggagggagaaaacaaaacagccaggatatgaccgggcgcgtgcgcgttacattaccgccgctgttcgaaaatcaggatattgtgcgtcacttgctccgttcgcttgaaccttaccctgatctaactattgaatggctccctgctgatgcacatctcaatattattgatgagcaaatcgatattgggattcgaataggtgcaattccggataatcgatttatcgtaaaaacaattcgacctgttggcatcagtatcgttgccgcaccagatttagttatgcgaatgggaatgcctgattctttgaaaacattgcagtatgaatatccccttagcgctttgagtaacagtaactccggccgtgtatggccctggcagtttgctgatggcaactcattttttcctgcaaagcccaaatttatcgccagtgatattggcagcgagctggctgctgcactagcgggaagaacatgtagccaattgccggatatcaccgttcgcccttatttacagcgcggagaactggtgaatattttccctgagctgaattattccccctatcagctatacatattccgaccgcaccagcccttgattcctgtgcgtattcgggttgtctttgataatctgactaaaatccttcatgaactgttcagagaatag

SEQ ID NO: 441755 - DNA, 990 bp, Serratia marcescens
atgcaaaaacgttatctgggtaaatccggactcgaagtatccgcgcttgggctcggttgcatgggcttaagccacggctacggcccggctaccgatactcgtcaggctatcgagctcattcgcgcagcggttgaacgtggcgtcaccttcttcgataccgctgaagtgtatggccccttcctcaatgaagaagttgtcggcgaagccttaaaaccgtttcgtgaccgtgtggtcattgccactaagtttggttttacttttggcgacgacaacaagcagcagattttaaacagccgtccggagcatatccgtgaagctgtggaaggatcattacgccgtcttaagactgatgtcattgacctgctgtatcaacaccgtgtcgatccggatgtcccgattgaagatgttgcgggtacggtaaaagacctgatagctgaaggcaaagttaaacatttcggtttgtccgaagcgggtgcgcaaaccattcgtcgtgcgcatgccgtacaaccggtcacggccctacaaagcgaatactccatgtggtggcgcgagcctgagcaggagatcctgccggtactggaggaactgggtattggttttgtgcccttcagcccattaggcaaaggattcctgacgggatcgattaagccaggaaccacttttggcaaggatgattaccgcagcaccgtgccgcgtttcgccgggcaggcgattgaagccaatgaaaagctggtctccttgctgggtgaactggcggcagagaaaggcgtgacgtctgcacaaatcgcgctggcatggctgctggcacaaaagccgtggattgttcctatccctggtaccacgaaactgcaccggctggaggaaaacctgggggccgccgacatcatcctttctcaggatgactcgcaacagataacccaggcgcttgaaacgattaaaatcgtcggcgaacgttactctcctgagcaccaggcccgcgtaggccgttaa

SEQ ID NO: 441756 - DNA, 792 bp, Serratia marcescens
atgagaatacttgttgcaggggcgacaggaagtataggcctttatgtcgtcaataccgctatcaaaatgggccatcagcctgtagcgctggtcagaaataagcgcaaagtgaaattgcttccccggggaactgatgttttttacggcgatgtttcattgcctgaaacactcaccgaattaccgaaagatattgatgccatcatcttcactctcggttccgatggtcagggtcgtattggtgccagggcgatagattatggcggagtgcgcaatattttacgaatattcagggatgtatttgttcgtatcagcctgatgaccacgattggcgtgactgaacgactcagcacctggaatcaacgcactgaggttcatgactggaaaagacgtgccgagcgtctggtcagggccactggttacccctataccatcgtcaggcccggctggtttgattacaacaatgatgatgaacaccgaatcgttatgcttcagggggatcgtcgccacgcaggaacaccggaagatggcgtgatatcccgggaacaaatcgcccaggttctggtcagtgccctgaccaacgacgaggcaaaaaataaaacttttgagctggtggccgagcgaggcgaagcacagcatgatcttaccccactgtttgcagatctgctgactgatgatccacaaaaaaatgatggggttttagacatagacaatatgcctctcagggaagaaccggagtgcattgttaacgagctgaatttgtattcaaaaaaattaactaatctacaaccctga

SEQ ID NO: 441757 - DNA, 252 bp, Serratia marcescens; identical to SEQ ID NO: 198799

SEQ ID NO: 441758 - DNA, 579 bp, Serratia marcescens
atgactggtcgctacaacgtcgccccgggaaccagggtattactgctgagcgaacgcgacgaacagctgcagctcgatccggttcactggggttacgcgccagcctggtgggataagacaccgctgattaatgccagggtggaaacagcggcatcgagcagaatgttcaaaccactgtggcagcatggccgggctatctgttttgctgatggatggtttgagtggaaaaaggaaggcgaaaagaagcagccttacttcatccaccgtaaagacggtcagccgatcttcatggccgccattggaagcaccccgtttgagcgtggtgatgaggcggaagggtttgtgattgtcaccgccgcggctgataaaggtctcgttgatatccatgaccggcgcccgcttgtcctggtaccggacgccgcccgggagtggatgaaacaggacgtttcgggtaaggaggctgaagaaattgctgctgatggagctgtgtcagctgatcatttcatatggcatcctgtaacgcgcgctgttggtaatgtgaagaatcagggaccagagctcatcgagcctgttggctga

SEQ ID NO: 441759 - DNA, 915 bp, Serratia marcescens
atgagaacacactatgataacctcaaagtgtcgaaagatgctcctgtggaggtaatacaagctgcttaccggacgctggcaaagaaatatcacccggatataaacaaaaataatcccgaagctgtcaggataatgcaaataattaatggctcatacgaagtattaattgaccctttgaaaagaaaagaacatgatctctggattattaaagaaacctggagagaaaaggctgaagccacaatagcacgaaattcggaagcaaatgttaatatccaggcatcagttaaaacaacagcagaaagaaaaaagaaatcattaatgacaatattagatgtcgttttttaccctttgttttctatgctgaaaactgtttccggcctgtgtgtgatagggattattgcgtacgcaattattcataatatcaatgaaagagatgcctctttaaataaaacagatacaggaagcaactcatctccattaaaatcagaacgtgtaaattacaataacggaatttgtgattcatctgtgcaacaactactatggcctactatcccaactgttttatctgaaaaagacaggcgaaatggtttgtcctcgcttaggttagataacactcaaaataacgaagggttacgagtccggttaaccctcgataatgcatacatcaaaactgattttgtacgtgaagtattcgttcctgcaggtagtcaaattactctggaacaagtcccatcaggaacctatcgggtaaaaacacaaagtgttaaaaatggatgtgtacaagtttctgaaccaatcaatatgattgaaagacaaacttcaacgggagcagagtacagtgataattctttaactttctatccagtaataaatggtaatacacatttcttatctttgccggcttcacagttttaa

SEQ ID NO: 441760 - DNA, 549 bp, Serratia marcescens
atgcgcttttgtattaaaacattaactgcaggcatttttatggtagccagcttcagcaacggtgtttcagcggctccggcctcagatgtaacgccacagatggcctatgaagatatatcccgctccttagctgagctggagcccgttaccttccaggcaaaagctgaaaaacataaattattagtttttgttgataatcagtgtgtttattgcagctatgttgtgaaaaatatcaaaaagtacacggatgcagggctcactatgtcatttgtgactgtggtgccgtcatccatcaaagactctgtcatcgaagatatggggagagtctggtgtgcacccgatcgccagaaaagttttcaaaatgcgatggccggttttttgccagacaacaccagttcagaaaaatgtaaaaatctggtgattaaacagtctgagcttgcagaccgtctcggggttaccgccacgcctgcgatggttgtgctggagccgtctgtccatactttccttggtagtgtttctccggaaaaaattctcgcagaactccggtaa

SEQ ID NO: 441761 - DNA, 1014 bp, Serratia marcescens
atgagtaacgcgcacaatccgcaacactggagtctgctggatacggaagaacagatccgtttctggcagggggtagaggacggccatgtggcatcttttctggtttccccggagaagaaatctacccgtcgccggcgcggcgagcactccacaaaacccaaatgtgaaaacccgacctggtttcgaccggagcattacaaaaaaatgggtggccagctggggcacgcctataaccgtcttgttcaaaaagatcgcaccactggtgaggtgcgactgcgtatgcacgtatcgcttcatccgctgtacgtcagggaacgccgtcgggctggccgccggtatggcttccggccggaaaagcaacgtctgctggatgctatctggccagtgctgatcagtttctgtgatgccggcaagctgacggtcggtatgtgtatttctcgtctggcaaaagaactcagccagaaagacagtcatggaaaagttattccggtaacagaggtaacagtctcacgtctgtcccggttgattgacgaacaggtccgttttggtgtcctggctgtatctgaagaaaatagctgggacagggaatcccgtacctggcttcctaaatacgtctatatcaccgcgttagggtttcagatgctgggagtggatctggaaaaacttgatgcggaacaacaaaaaaagctccggcaaagcgaagagcgtcgtcgtcttatcgaggaggggattctgcgtgaagatgaggagatctccccgcgtgcagcacgtgagcgctggtaccgtcaaaaaactctcgatgcattgaagttccgtcggcagcgtggcgccgaacgtaaacgagctaaccgcctggccagatattctcgtgagcgccagattcacgaaatgtcgcttcatatcctgaagacaatgccggcagacgaggcttactggtgtacaacggagcggctgcagcagctggccattcagaacctgtatcagctggagctggccctggctccgccgtcctga

SEQ ID NO: 441762 - DNA, 270 bp, Serratia marcescens; identical to SEQ ID NO: 221992

SEQ ID NO: 441763 - DNA, 309 bp, Serratia marcescens
atgattatcgccgccgaagtgaaacgtgatgaacaggggtactggacacatcctgcgctggtacgaagtggctgtgaaacttccgcagaattaagttactggctcagaacccataaactccagtgctttgtgatgacaatgcgcgatgaagcgcctgaagctttcgctgccggatttacggatgaagccccggatgcccgtggctggataccggagccaccggatgatgatggctggtttctgggctctgtccacgataccggcgacggacccgtctgctactggtttcgtcataccacaaaatcctga

SEQ ID NO: 441764 - DNA, 606 bp, Serratia marcescens; identical to SEQ ID NO: 235972

SEQ ID NO: 441765 - DNA, 1446 bp, Serratia marcescens
gtgacgttaatggttgccgctgcactgagtggttgtacggtaggccccgattttcagaatcaaaaaccggatgcgcctgctgactggactacctggcgcagcggggatgcagcactgcacacgatgaatggtgccggtgtgatggcggacagccagtggtggaaacgctacaacgatccggttcttaacgagctggttaaccgggctctttcagccagtcccgatatcaaaaccgccgcattacgtttttcaggtgcacgagcgcaataccgcattacggcttcatcgcagactccagacattaacgctaccgggaaagtcacccgcgaacagctcagcgaaaacagcccatccacgcgcgcactgaaagaagtgttgccgcagccggatgaactgattgatttaatgtccgaaccgtataactggtatcaggccgggctggatttctcatgggaaatagacttgtgggggcatgtcagacgtgctgttgaagcctccgatgccgacctctctgctcagggggcgatgctggagcttgcgaggctcagcatcgtcggtgacgtggtgaataattactacgctctgcggggtatccagcagcaaatcgtactggcaaaagaggatgtgcaggcgatgaatgagcgcctttcgctgatccgggcccgtactgaagggggagaactggactacaccgacgttgaacgccagcagagtgagctgtcggccacccgggcaaacctcatcgatctgcaacagcaggaaggcatcgcgatgaatcagctgttattactgctgggcgaacacccaggcgcattacaacagcagttgacttataaaccagatactaatcaggcaacattgccaccgttgagtctgggtatcccgtccgaagtggcgctgacgcgtccggatatccgcgccgctgaagcacacctgcatgccgctaccgccaggattggtgtcgcccaagcggagctctacccgagtattacgctgggggcacggattggttttgactcctacagtgaaagtaactttgccgaatgggggagccgtacctggtcagtgggtccgagcctgaacctgcctttgtttgaccgtgggaggcgtaaggcgacggtggtattacgtgaaaccgatcagcagcaggcggctgttgatttccacaaaaccgtgctgaaagcctggcaggaaattgatgatgcactcagccgttacgctgctgcgcaacaaaaactggttgagcaggaacagcgtgagaagagcgcaggagaggcacaatctcttatacaggcccgttatgacggtgggttgaccagctttatcaacgtgctcgacagccagcgaagctacatccaggcgcggcagtcgctggcaatgtgtcagcgggatgtgaaaactgcatgggccgcagtgaaccgcgcagtgggcaattacccgcgctag

SEQ ID NO: 441766 - DNA, 1116 bp, Serratia marcescens
atgaatagtttaaccacctggctgcaccacatcagctttttgatccgcaaagaggttctcgccattctgaaggaaccggctaaccgggtaatattgttcgcccctgcgtttatgcaggcgctgctgtttggctatgccgcgacctacgatgtgaaccatgtatcatacgccgtgctcgatcagagccggggacaggcctcgacagaactgttaacacatctggacgggacgggcgtgttcaaccgcacggccacgctcacggcagcgtcacagattcaggatgtcgtgcttgccggagatgcgttgctggttttgacatttcccgccgactttgaagacaagctcaataatggcgatacctcgccccttcaggtgatccttgatggccgtaattcctccacagccggtgctgcggccagttatatcagtgccgtggtgactgattttaatcagcgcagaagcggcagcaagccagcgatttccgtcgaaacccgtgcctggtacaacccgaatctggaatcccgctgggggctaatgccaacccttatcgccgcgttaagcatgatgcagacgctgatgctgtccgccctgtcggtagcccgggagcgggaacagggaactttcgaccagctgctggtcacgcctttcacgccaatgcagctcctgattggtaaggctttaccttcagtgatggtcggcctggtccagtcaacaatcatcctgctgataatcctgttctggttccagatacccatgaacggttctgtcacgctgctttattttggcctattgagctttaacatcgcggcggtggggattggcctgtctatctctgctgtctccatcaatatgcagcaggcgatgctctacaccttcctgttgatgatgccgctgatgctgctgtccggcctgcttactcccgtgcagaccatgcctgccatcctcgataccctgacgtatgctaatccgctgcggtttgctattgacctggtcagaagggtgtatctggaaggggctggctttactgatgtggcctttaattttattcccatgctggttatggcggcgatcaccttaccgcttgctgcatggctgttccgcaatcgactttactaa

SEQ ID NO: 441767 - DNA, 1128 bp, Serratia marcescens
atgaaaaactccactttccgcagccgtcttatctccctgacacgcaaagaaacgcgtcagcttttacgggacaaaagtaaccttgcggtcgggttgctcctgccagttgtgctgatcctgctgtttggttacggactctcgtttgatttaagcaatgccaggatcggcgtggttcaggagcagcggaccccgcagtcctggcagattgtcacggcattacaaggcagtcggtacttatcggttcaggaatataccagctttaatgccgcacaggatgcgctgcgtaaggggaaaacggatgcgatattgcgtattccatccgacttcgcgcaacgtctgacagcgggtaacgcacagctccagctcattgttaatggcgcatcaaccagtgtcgccagcgctgctcagggttacgttaccggggcactggctacgcagtctgctgtaattgcagatcggggcgggaataagccttccgggggcagcgtcaccgttgaacagcgtatgtggcttaacgaatccggtaacagtacctggttcattgttcctggcctggtcgtcctgatcctgacgctgataggcgcatttctcaccgggctattaattgcccgggagcgggagcgtggcacgcttgaagcgctctttgttaccccggtgcggcctcttgaactggtactggcgaagctcgcgccctatatggtgatcggcactatagacctggtggtctgcctgctggcttcacattatctgttcgacgtgccaattcgcggttccctgtgggcaattattgtttcgtctctgcttcatctgctggtttcactggggcttgggctcaccatttcaggctttgcacctgggcagttcctggcaagccaggtggcgctgatagccagctttatgcccgccatgatgctgtcagggtttgtctttgatacccgcaacctgccggtcgtcattcaggtcataagtcagatcctgcctgccactcactttatgtcgcttatcaaaacgctctttctgggcggtgatgactggaagatgtttttcaaagagtgcgggatcttatcgctttatgcgctggtcctgataaacgcttcgcgcatttctctgcgcaaaagactgagataa

SEQ ID NO: 441768 - DNA, 1671 bp, Serratia marcescens
atgaacattcgggcgggggagctcaccgcgctcgtcgggcctgacggtgcagggaaaaccactttccagcgtcttatcgccggtctgtatgcaccctcttccggcagccttaccgtgctggggacggacgtcagcaccgaccctcaggcggtacagaaccgcatcagctatatgcctcagcgctttggtttgtatgacgatttaagcgttcaggaaaacctggatctgtacgccgatttacatggtgttgaccagcagacccgaaaggaacgttttgaacgtctgctgacaataaccgatctcacccggtttacagaccgaccggctggcaagctgtccggagggatgaaacaaaaactcggcctggcctgcaccctggtgcgttcgcctgacttattgctgttagatgagcccagtgtgggggttgatccattgtcgcgccgcgatttgtggaaaatcatcgaacagctggttcaggatgaacagctgagcgtgataatcagcacggcttacatggatgaagctgagcgttgtgctcaggtctatgtcatgtatcagggacgcattctggcacagggaacgccggacgaattgcgtaaaaaagccgatggtctgacgtggcaggccacaccgccagacggcatgaaagcgcgtagcctacaggcccgattgcttgagaatcgccaacacgttatcgacgccgttccgaaaggcgataccgtacgttttatctgccagtctgacagtgacgagtcccttgcccggggacatcatgccactcgccgtgatgccgaactggaagatggctttatggttctgcttcatcaggcacagcatcaggatgaacaggtcgcttccaggccggtaaaagccgatatggtctccgctcaggaaagcgcagaaactgagaacaaacccgttatcgttgttcgggatcttgtgcgcaagtttggtgattttacagccgttgccagtacctccttcgaggtcagacgtggcgaaatatttggtctactcggaccgaatggtgccggaaagacaacaaccttcagaatgctctgtggactgttaccggcaaccagtggtcatcttgaggtagcgggaatgaatctgcggacagctcgggcaaaagcccgcgcccgtattggctacgtttctcagaaatttgccttatacggcaacctgacggtgcgtgaaaatctgacgtttttcggcggggcctatggtttgtccggtaaacatctggcgcagcaaatagagacctcccttgctcaattcagcctggatcccgatgctatcagcggggagctgccaggcggattcaagcaacgtttatcgatggcggcagcactactgcatgaacccgaaattgtctttctggatgaaccgaccagcggtattgatccgctggcgcgccgcgctttctggtacaccattggtgaactggccaacaaaggtatcacggtcatcgtgaccacccactttatggaagaagcggagtactgcgaccgtatagcgattcaggacgcggggaaaatgctggcgctgggtacgccgagagaagtgcggcagaaagcgggtctggagcatgctgctgatatgaacaccgcgtttattgccattgtggaaaatgcccgggcgaaggaacacaagaaggaggcgaaggcatga

SEQ ID NO: 441769 - DNA, 1014 bp, Serratia marcescens
atgaataaaaaaataatagcaggcgtggtggtgattgcgcttgtagcagtggccgctgtagcctggctttatagtcgaaataatgatgatgaaaatcggctgactttacatggcaacgtggatatccgtcaggtatcactggcgtttgaagagagcggccggatagccgcattaatggctgaggaaggcgataaggttgaggcaggacaagtggttgccacactcgatacccgtgcgctgaagatacaggagaaacaggctcaggcgcgtctggatgctgaaaagcaaacggtgcgggagcaacagtccggcgcacgccctgaagaaattgcccaggcaaaagcgcagctggcatcagccgtggcgcaacaaaccaaagcccgggaggatctctcccgcattcagcgtattgccttaaacactagcggcaaaggtatcagcaggcaggaaatggatacggccagaaataacctgagtattgctcaggccagcgtgaaagaacgccaggcaagcctggacctgatggtgaaaggcgtgcgcaaagagcagcgggaagccaccgtcgcacaggtcaaagcgcttgaagccgatctggaattactgcaataccggctttcacaggctgctttacgtgcgccggttaatgcggtgataagagcacgcttgcaggaagcgggtgatatgaccagtgcccagaaagcggtgtataccctggctctgagcgaaccaaaatgggtacgagtctgggtcaatgaaagcgatctgggacgcatcaaatcaggtatgaatgctgatatcgtcactgactctttcccggataaaccggtcaccggcaggattggttatatctcctcagtggctgagttcacgccaaaatctgtgcagactgaagagctgcgaaccaatctggtttacgaggtgcgtatcgtggtcaaagaccctgataacgtgctgcgcatggggcagccagccaccgtcaccatcaatacgccttctgcggacagtggcaaataa

SEQ ID NO: 441770 - DNA, 642 bp, Serratia marcescens
atgagccgagcacgtcgcagtgatggtgagttaacccgggaaaaaattctggaagccgctggtgaactgatagccgaacaggggcttgccagaacgacgaacaagtcgatagccagtgccgctgaggttgacctggcggccatcaactatcacttcggtggcagagatggtctgtatctggcggttttgtcacgggcacaccgccactatctggacggtgaaaagctgacagccctggcaacaggcgcacttcctccggaggaaaagctcggtcggtttctggaaatgttcatctcaaaactgaatgaaggaaatggctggcacgggcgggtatttgcgcgggaattgctggcaccttcagttcaactcaccgattttgtgaacagcgaaggaatggggaaaatacaggcggtgcggaaaattgtcagtgaagctgccgggatcagcgaagacgatcctgcattactgccctgcatgttaagtgtggtcgcaccctgcatgatgttgatcgtggcaggtaacagaatacccggaccggtgagagaaattgcggcgatgcagactcaggcactgaccgaccactttaagcgtttttcactggcggggctgaaggcagtcagagacgttaatcacagcatttga

SEQ ID NO: 441771 - DNA, 2988 bp, Serratia marcescens
atggcaaggaggcagattctttctctgtcggaaagagaatcattactggcattaccggacgatgagttaacgctgacccgaatggcatatttcagtgagcaggatctggcatttattaatgcccaccgtaaacctgcaagccgatttggttttgccgttcttctctgttatctgaaaaatgtcggctttgccccggataaaaaatcatccccacccgcagaattactcaaaatcatcggtgcccgacttaaactttcagcagcgctctggcaggaatatatttccggccgtggtaccacccggcgcgagcacctgggggaactgtatcggtatctggagctgaaggcctttaatggggcacttcagaaagaatgcatccagcatctactccctctgtctaccaggaccgatcggggcatacttatcgccgaggaattactgaagcatctgcatcaacagcgaattattattcctggtattgatgttgtggaacgtacctgtgctgaagcaatgacactgggtgataaagcagtttacaccacattgaatgcgcatcttggcatcacgcataaatcagtgcttgatgcgctactggtgacaactgacaaacaaatctcccgtttgacgtggttgcttcagcctccgggaaagatcaatggaaagaatgtgctgcaacatatagatcgccttaacgccattgaagctctggcgctaccggaaggcgtggagagaactgttcaccagaatcggttgctgaaactcgcgcgtgaaggccgcaaaatgagcagccgtgatctggctgattttgcccctgcacgtcggtatgcaacgatggtctgtgtactgactgaggcaagagccacaatcattgatgaaattatagaactgcatgaacgtatactgggcagtatgttcagtcgggcaaaacgtcagcaggccgaacgccttcagaaaacaggcaagctgatacagcagaaattacgtcagtatgtttccgttggacaggctattctggatgcacgcaacgcaggcgaagatcctctgtctgctgttgaacggatattaccgtgggaagattttgcctccagcctggaggaaacccgacttcttgctcgcaaagataatttcgaaccgcttcatcttgttaccgaaaaattcagcacgctgcgcaaatattcttcccggttgttatcggccctgcaactgagggccaatccggccgccttaccgcttaatgatgcccttgatactatccgtgagatgtaccgtaaacagctacgaaaggttccttcatcggctccgctggatttcatccctgagagctggaaaaagatggtgatcacccccgcaggcattgaccggcaatactatgaaatttgcgccatgaatgagctgaagggagctctgcgggccggtgatatctgggttcagggctcccgacgctacaagaattttgatgactatcttatgccacgcagcgatttcgaaaaactattaaataataataagttaaatgtacctgtcgaaactgaatgcagagcttaccttaaggtcaggctaacgctgctggcttcccggctggaggaagttaacgcaatggcggtcaccggagaacttcctgatgtggacattacagataaaggtgtaaagatcacgccactggataacagcgttccttccacaatctcacccctggctgacctgatttacaacatgttgccgcacccaaaaattacagaaatactggatgaagttgaacgatggactgtcttcacgcgacattttacccatctgaagaatccactcacccgaccacaggataaccgtttgctgctcaccaccatcctggcggacggcattaatttggggctgaccaaaatggctgagtcttgtccgggaaccactcgagcttcgctggaaaacatgcaggcatggtatatccgcgatgaaacctacgctgccgccctgtctgagctggttaatgcccagaaatcgcgtccgctggctgcattatggggagacggttcaacctcatcttctgacggccagaattttcgggttggcagccatggccgctatgcgggtcaggtcaacctgaagtacggtcaggaaccgggagttcagttttatacgcacatttctgatcagtacagcccgttttataccaaagtgatcagccgtgttcgtgactccacccacgtacttgatggccttctttatcacgaaagtgatcttgaaataacggagcattacaccgatacggcaggtttcacggagcatgtttttgcgctgatgcatttgttgggattcgcttttgcaccaaggatccgggatcttcacgataagcggttgtttatacgggggaaagctaatgaataccccgcactacaatcaattatttccacaacaccactgaatatcaaagagatagaaacacactggaatgaaattctgaggctggcgacctcaataaagcagggaacagtgacagcctctctgatgctgaaaaaactggccagttatccgaaacagaatgggcttgctaaggcgctgagggaaataggtcgcattgagcgaacactgtttatgctggactggtttcgcgatcctgcactgcgtcgcagagttcaggcaggtctgaacaaaggagaagcccggaatgcgcttgccagagccgttttcatgcatcgtctgggggaaataagggatcgtggtctggaaaaccagagttaccgcgccagtgggcttacgctgatcaccgcagcgatcacattgtggaataccgtatatatagaaaacgccattaatctgctgaaaaataaagggatacatatcaatgatcagttgctgtcacacttgtctccgctgggctgggagcacattaatctgacgggagactatatctggcgaaacaataaaaaactgactgaagggaagtatcgtcctttgcggccagttgatgtcagtcagtacaaaaaattatcttaa

SEQ ID NO: 441772 - DNA, 660 bp, Serratia marcescens
atggcaaagatattaatgatggcaggcagcattattgttgtgctgagtctgctggggtttctggtgctgcttctgaaaggacgcgcagtaacgcagacttccccggttctgatgtcactgaaagccctgggtattcgcccctcagaggctgagcaacggttgtgtcgccagcgggtctgggtgggtaatgacacactgttgacgccacgggaacaacattttttcagggcattactgaggcataccagccgaaagcgctggctgttgtgtcctcaggtccgggtggcagatattgccacactctctccccatatcaggccacgttcccggacctggtggcaactcttccggatggcatcactgtggcactgcgatgtggtcatcgttgacatccataccttcgctatcatcggcgcagttgaactggatgatgcctcacacctgaaaaaacaccgtatccggcgcgatattctgctggaagaggttctgaggcaggccggtattccactactacgcgatcgggattcagagaggctggtaagaaggggcggagagtttctgaaataccgggaagccggtgctgaagaaaaatccataaccgttatgaaatcaacgacaaagcagggctccgtttgggaaacggaaaatattgtacgttaa

SEQ ID NO: 441773 - DNA, 222 bp, Serratia marcescens; identical to SEQ ID NO: 239159

SEQ ID NO: 441774 - DNA, 690 bp, Serratia marcescens
atgacaatatctgtgcctgtcaggtctcttgatacacatgaactgatgcctggcgatatttacccacatcctgcagcggggggaatttattccctgtcacatcgcgaggtctgttctctcttcagtgaccacatcatgtatatctgcagcgcgttagttattcttctacttgttttcatcgcaggtgtctttttccgaaaaataatgacgtcttccgtggagcgtaagcgaaacacggcgtcagttatttccgatgcaaagccagaagtacagagcaaaccggaatacttccatctttccatatgtgtggaaggcccggccagcacggatgactccgccttgtcctctcttgcctcccgtgttgtccgcgaagcagaaaatctgtatatccccggcgtcaatcgccgcgacagcgctgacgacgtgtttgcctggtccgtgcagactcagtttccttctgacaggctcttcggcacacggattttcccgtcaaccggctggtttgaacgtccggatatgattaaacatccggtgaaatgctactgcgtctgcctgcagtacacgactgaaacattgccatccacactgtatgccctggtcgatgaggccggacggcaggtggcgaagtcgtatattaaaggcgggcactgccctggctcagagggctataccttctgcataacctcttaa

SEQ ID NO: 441775 - DNA, 393 bp, Serratia marcescens
atgatgctgtttcttcgaaagtatggatttttgtttacccctccagtctactggctcatctatctgggagccagactgacttacaatggactggcaggagacttttctgctgatttccttcagggtattcgacatgaaggcgtctatattatctgtagtttgtgtgtattttattttttctgcttagaggtggaagttggtgatggcgagttctcagcgaacattctgttcctgattgttttctttcatgtggttttattatttattactctgcttatttgtttgtggcaaggggaggtgttgttggattcgatctttatgggtcagattatcgcctccatgtgtttattgtttttcattcctgtgctttccattataaggaggagtttctag

SEQ ID NO: 441776 - DNA, 312 bp, Serratia marcescens
atggctgaataccagttaagttttgatggttttgttcggcttttttttgcaatggcaatcattatctgcggttacggctatgtaattattggtgtttttataagagatacgcttgcctatattttaatgttgtttgggcttacaggtctcagtgctttattttctttaatggtattcatggataaaaatatgtgggccggttctcctgatttgacgctgtcagtaataacgggatttttttcagccacagtgatcttttatatgttttatgtcttgatttattactttgatcggatgggggcgggtgaatag

SEQ ID NO: 441777 - DNA, 219 bp, Serratia marcescens; identical to SEQ ID NO: 246685

SEQ ID NO: 441778 - DNA, 306 bp, Serratia marcescens
atgggtagcaaaatcgcaggtgtgattttcttatacttcgctgtctggggaatggcttcagtgattgaattgcagtactggcgtaacgctgacacctatcctgtctggctgacaaaacatctccggatctctcctgaaaataacgacaagagcctgataaggatagaaatggaaatctttgacaaggtatgtggtgataaaaggggcctccttgccgtcacccaaaaacaaaacggtatgtttatgcgctgtgatgattcccccgattttttttcatggttcagcggcgtttacaaagtcaattaa

SEQ ID NO: 441779 - DNA, 615 bp, Serratia marcescens
atggagggtattaagcaggcttcggatatgtgctttgcagatgcaccatcaagagccagacggaaagcatcttcaggtgatgtgatcatctccaccgttcggacatatctgaaggccgttgcagctgttacagatgaatatgctgattgtgtatttcctactgggtttgctgtattgcgagcacgccatcttgatcgttcctttgtaaagtggatggttctgaatgagcttctgattcaagctattgaagctcattcagaaggattgagttatccagcgattaatgcttctgcattagtgaagctcaaaagcgtcattcccccaccagaagaacaagccagcatcgccgccaccctcgaccgcgaaaccgcccgtattgatgcgcttgtcgagaagaaaacccgctttatcgagctactgaaggaaaagcgccaggcgctgattacccatgcggtcaccaaggggctagaccccaacgtgaagatgaaggattccggcgttgagtggattgggcaggtgccggagcactgggaggcgacaaaactaaagcatgttgctgcattctctggtggtggtacgccatcaaaagaaaatccagactattggaacggctga

SEQ ID NO: 441780 - DNA, 786 bp, Serratia marcescens
atgtcatcagaagccttatccgggccaaaggccctcggcgcgtttctgcgcgcacaccgcgaacgcatcacgccggaaatgctcggcctgcccagttcctcacgccgccgcaccagcggcctgcggcgcgaagagctggcgcaaatcagcggcatcagcgccacctggtatacctggatcgaacaggggcgcgaggtgtccatttcccccttcacgctggcgcgcatcgccaaggcgctgcggctcggccccgccgaacgccactacctgtttaccctggcgcgcgtcgccgaccctgagcaggaaactcaccgcgaaaccgccaacgacgcggtgctgcaaagcgtgcaccagatgacggtgccctgttacctgctggacgtgacctggaacatcgtcgcctggaacccgcaggcggcggcgctgttcagcggctggctggatgtggccaacagccccaacctgctgcacttcatgttcttccacccgctggcgaaaacgctggtcagcgattgggaagaacgtgcccgccgcgtggtggccgaattccgcgccgaaaccagccaccatcaaaacaccgaagagatgcgcgccttcgtgcgcaacatgacgcacaacagcgcggactttaatcactggtggaaacagcatgacgtgatggcgcgcgaaggcggcgagcgcgcgttcgagcaccctcagcaaggtacgctgcgctatcgccagctcaccttccacccggcggagcacggcggcctgaagctggtgatgctgatcccgctgccgtaa

SEQ ID NO: 441781 - DNA, 180 bp, Serratia marcescens; identical to SEQ ID NO: 181145

SEQ ID NO: 441782 - DNA, 582 bp, Serratia marcescens; identical to SEQ ID NO: 140885

SEQ ID NO: 441783 - DNA, 1002 bp, Serratia marcescens
atgcagctggaagactatatctcggccgggcggctgaacatttacactgacgtgctgaagctgaaacctggtgaagaactgggcgggtataactggaacaaagccgtttccgccgccatgcagccgctgatgcactgccttgaggtgacgctgcgtaacgccatcgattacagtattcgccatgcccggctgcccggcgctgccggacactggcgaaccgataccaactggatctttgatttaccccgctatatcggtgacaagacctggatacgccagaacaagcgctacaaaaccgatgcccgtggccagaagctcatgcatcacgggaaaccggtgtatgaccggacagcctgggaagaagactgtatccgtaaggtgtcaaaacgtatccgtgctgcgggcaaggcgccgacggcagagcgggtgatctccggtctggactttggtttctggaccaattttctcacgaaaaactacgatgaaccgcggaaccgctcgctcctgtggccccagttgcttccgtcggtgttccccggcgccccggccggcaccccccgtcacgtgctggaaaagaaatttacccgtatccgtgacttgcgtaaccgcctgtcgcaccatgaagcagtctggaaattccaggaggaagatccggttaccggtgcgccggattacaaccgcccggtatatggtcttcaggcgtccctgcagctgttgcgtcgggcatggaaagatatgctggaggctctcagctggctcagtcctgcaaggcatgctgcgtttctggcagaaggtcatcatctgcgtttcgaggcactggccacgcacgatggtttgctgagtttcaccggacgggcacagctgatgcacgacctgaacgtgcggcgcagtaaagagatcagaaaattattgcgggggctcggacagcaaaaaatcatccgcctgaccagccgtacccggatcattgccattattggtcccgattttatccgtaccctctga

SEQ ID NO: 441784 - DNA, 579 bp, Serratia marcescens; identical to SEQ ID NO: 181141

SEQ ID NO: 441785 - DNA, 264 bp, Serratia marcescens; identical to SEQ ID NO: 181140

SEQ ID NO: 441786 - DNA, 369 bp, Serratia marcescens
atgaaaacagcggtatgggtggtggtgtatttcgcgatgtgttttctgcttttcacaggatggatgttcgcctttgcgcagtatgcgccctataacgggcaggaacacgcgttttctctgacgtatctgcttaatttattttttcttcatgttgtgatggtaccttactacgagtttattcagactgaaacatacagcaatgcattaatgagtatggcagatgaatccggtcagatgatacgttttcatcacgtagtgcctgttctctggatatatagtctgtccgcactcttaacttttgtggtctacattacatatgcaaaatggttcactcataaccgactgaaagaaaagcatcttccagaatga

SEQ ID NO: 441787 - DNA, 255 bp, Serratia marcescens
atgacgggaagaggcattaacacagtacgtatcggtgatgaagtgaagcacatcaccgagctcgatgcactaacactcatgcatgaatggtcaaagcttaaaaaagaaaatgcagacctgtatgactataaccgtcaggttaaccgggggtggcgcggctttattcttcgcctgatgggtatccatttgcctgaaaaaaaccgtgtttgtctttatggcattaatgccagaaaagaatccatctatcccgactga

SEQ ID NO: 441788 - DNA, 729 bp, Serratia marcescens; identical to SEQ ID NO: 180182

SEQ ID NO: 441789 - DNA, 966 bp, Serratia marcescens
atgaagcagggaattatatttggcgccctggctggcgcatgctggggattcatcttcctgccaccggtactgctacccgagatctcaccactgctgttaacctgcggtcgctttgctacctatggaatactggcggcaatattacttatacctcaatggcgcaacattgcccgcgtctggcatcatcgcgatctgctgacgctgatccgtctttcgctgatgagcaatgtcctctattttctgctcgtcgcggtggccgtaaagcaggtcggtattgccgcgacatcgttagtgataggtttaattccggtgatggttccggtgcttggtcgcagggaccagcatgcgccgcccttcaggcaattattgctgccgatggcggctatcattgccggagtggtgctgattaatctgcatgcgctacaaacatcctcgcaccaagttacagaaggaaaacggcagatgctggggatgctttgtgccttcgctgcattactgtgctggagccgttacgctgtcgagaactcccgctgtctgaaaaacctcccttacaacagcaaccagtggtcgctcctgataggcctgtgtacgggatgtatttcggtactgctgtggctcatcgccagtatattcaggttttctgcagttgacttgtcgttaccggaacacactcaaacgctcttttggataacgaacatgatgttagccgtggtctcctcatggctgggatatctggcgtggaatctctgttcccggcgtcttccggtatcactgacagggcagatggtggtttttgaaacccttttcgcgctgctatatggttttatctattcacagcgcattccggatctgcaggaaactgccgccattttactgttgctgggcggggttctggtcacggtacattaccatcagctcagccgtcgcggctacgcaggtaatagtccggaagtcaagggtagctga

SEQ ID NO: 441790 - DNA, 819 bp, Serratia marcescens
atgcgtgattatgctattgagattaacagcctcaataaatattatggcgaaaaccatgttttacgtggcatcaatgtcagcattactcccggagaagtcatttgcgtgattggcggctcagggtcgggtaaatccacgctgttacgctgcattaactttttggaggattacagctccggcagcattgtggtgaatggcgagtgcgtcggctatgaaccactcagcggcgaaaaacgccggcgtttaagcgacaaggaaaaccgtaaggcgttacgcgacgtctgtatggtctttcagcagtttaatctgtggccgcatatgacggtactcgataacgtagccacgccgttgcgacgggttaaaaaggtctcccgtgaagcagcctacgccgaagcgaaaaagcagctggcgcgggttggtctggcagacaaagccgatagctggcccgcgatgctatccggtggtcagcagcagcgcgttgccatcgcccgggcattgaccatgaaacccgccattatgttgttcgatgaaccgacttcagcgcttgatccggagctggtcggggaggtgctaaaggtcatccgaaatcttgccgatgatggtatgaccatgatgattgtgacccatgagatggggtttgccgcaaaagtctccgatcgtgtgctgtttcttgccgatggctgcattgaagagcagggaccgccggcgcaactgttccatcggccgaaaagcccgcggctgcagtattttttgtcgtcgtggagtgagcgtcagtcggggacgagattacctgaaacggcatttcaggagtcagcatga

SEQ ID NO: 441791 - DNA, 663 bp, Serratia marcescens
atgaatgttgagatactttttacctataaagatgccatcgccgccggtattttaatgaccctaaaaatgagcctcggcggtatcctgctggggctggcgatcggtctgtgtttttttctcctcgaaagacaaaaaccagcgctacttaatgtgatataccatacatggattaatgtttttcgcggcacgccgttactggtacagctatttttagtcttttatggtgggccctatattggtattaacctcgaggcccaacaggtcggagtactgtgcctgggctgttatggttccgcttatttttcggaaatattccgtgcaggtcgcaatgctgtctctggcggacaaagcgaagcggcggcagaccttggtttaagtccgtggcaaatatttactttcattgtctggccgcaaatgttcgctagaattatccagccactgattggtcagagcgttattctggtaaaagagtcgtcggtgctgtcgattattacggttggtgaactcaccaataccgccatggccattgccaaccagacctatgcgatggttgaaatctactccttaatggccattgtctattggggaatcgcgatcggtatctcccgtttgggtaataaaatagagcgtcattattcttattttcaattaagccgaggttaa

SEQ ID NO: 441792 - DNA, 672 bp, Serratia marcescens
atgtttgatatttcggtggtgtttccctatttccctcagctattaatcggcgtgctcagtactctggctgtatcactgagcgcaattgtcacaggattgatcctcggttggttaatttgtctggggttaaattctccgcagcgtctcgtgcgctgtttttgcaaaatctatgtcagtttttaccgtggcacgccgttactggtccagttgatattaatattttatgctttgccggccgtggggatcacgctttcgccattgctggcggcggttgttgccctctcattaaataccgcggcctttcagggggagattcttcgggccggttttaacatgttacccaaaggccagttggaggcagcacgagattttggcttttcagcggcgcaaaccctgttttatattcagatgccgcaggtgttgcgtaccatgatgccggcattgattaatgaaaccattgatattatcaaaaattcggcactggtctcggtggtggcggtccatgagttgatgagagtgacgcaaacgttggcctcaaccacctatcggccgctggagttttatacggcatgtgggctcctttatttcctgacctcatgggggctgagtatcgctggcgtcaggttagagaaaaaccgctcatcttcggctaaaagggtattagcaaaatga

SEQ ID NO: 441793 - DNA, 849 bp, Serratia marcescens
atgaaaaataaactgtggctgttactgtcaatgtctgtcatacaactttcaccattaatgatacccactgcccaggctgatttgctggatgatattaagcaaaaaaaagaaatagtgattgccacagaagcgcgctatgccccttttgaaatgcttgaagatggcaaaatagtcggtctgggaaaagatattctcacggaagtcatgaagggattacccggggtgaaagtggttcagctggatattccatttcaggggattttacccggactggaaagcaaacgattcgactttgtggcaacctctttaaccatcacccgcgatcgtgaagctaaattcgcctttaccgctcccttttctgacgccagcgtagccattctgaaacgcaaaggggatagccgtattaacagcgccaaagatctccagggcatgattgtcgccagtcaggccggggcgccgcagattgctgtgctaaaagagtatgaagcatcggtacttaaacccaccaccggtcacggcgttaaagaaataaaagcctttattgattataacgaagcttacgcggcattggcggcacatcgtgttgacgcggttgtgcaatcgctgccgaacctcgcgccgttggtgaagacacgtggtgatacgtttgaaattgtacgcccgccgtttggcccggtcacctggtatgcatgggtcggaagaaaagatgcggatagcgcctcactggtcaaatttgtcagcgacggcattgtgcagttgaataaatcgggaaaactggcgcagctacaaaccaaatggctgggtttttctatggccgttccagagcaagttccaaccccggcaaactaa

SEQ ID NO: 441794 - DNA, 951 bp, Serratia marcescens
atgcaacctaaaccaggtttgccgtccctggacggtttgcgctactttgatgccgcggcgcgtaatcttagttttacccgtgccgcgcaggaactttttcttactcagagtgcggtaagccagaaaattcaattacttgaacaacatcttggctatcttgtctttcaccggactcccgcagggttacgcttaaccccgcagggtgaacagctgtttatcggggtgcgtcaggcattttccatccttgaaaccacgctgcaccaaaccggtgaagaaactcttgagggcaccataaagattcgggttatgccgtcctttgcaaccaaatggctgcttccccgattacatcagttttatgagcagtaccctgtcagtctggaaattgatgccgatatgacacccgccaattttaaatctgacgcagtcgatatcgccattactcctttttgggttgacgataaaaatttaattcaacgacacctgttcaatgatgtgatctatcctgtgatcagcccggatttgatgaaaaaccgacctctgaaaaattacagcgatctctgcggtttacgcttactacatgattccatgccgcaaaatacctatagcacccactggcgatcttattttgcccgcctcgggctctatgacctggatgttgaggctggaaccggcttttcccgtgccgacctcgtgctccaggccgcctgcgccggacaagggatcgccttaagtcgtcactctttgtgtgcaacggaggttcgcaatggcgcactgatacgcccttttacagatatcgtcgaagacggacaggtgtggttaacctgtccgcgtaataatgagaaacggccacgcgttcaggcgttgatcaactggctgacagaggaaaccgcgcgtcatattgcagaacgcaagcaaatcctcagtgaatatacactgcataaggccagctaa

SEQ ID NO: 441795 - DNA, 1218 bp, Serratia marcescens
atgagcatgccagatattattgaattagctaatggacaaaaagtaaaaggaacgttcagcacccatgaaatgcagcgccgactgtcaggattacgcgccatcatggaggcagatagtattgatgcagttattttaacctcggttcataatattaattattacggcgattttttatattgtagctttggacgccagtatgccctggtggtgacgccgagccagtcatttttaattaccaccaatatcgatggcggccagggatggcgtcgtagctacggtgcaaatatcgtttacacggactggcagcgtgataactattaccgggcagtgcgcaaagtggttcctgatgatagccggcggattgcccttgaaggcgaccatgtgacgatcgaacagcgtgctaaattttgtcattacttaacccagacagggtttgttgatattgccccggcgacgatgcgtatgcgcatgattaagtctgccgaagagatcgcgcttattaaatttggtgcccaggtcgccgacctcgggggtgcggcatgtatcgaggcgattgccgaaaatgttcccgagtatgaaatcgcactggcggccacgtcagcgatgacccgggaaatcgcgaaacgcctgccgcatgttgaattgcgtgatacctggacgtggtttcagtctggcttgaatactgatggagcacaccatccggtgacatcccgtcgtctcaaggcaggcgatattttatcgctgaactgttttccaatgattgccggctactataccgcgctggaacgaacactgttcttcggtcagcccagcgatgagcaactacgttgctgggagatcaactgcgaagtgcaccgccgtgggcaggagttaatccgtccaggcacacgttgttgcgacattgccgcctcgcttaatgaaatttatcgcgagcatggtcttctgcagtaccggacctttggttatggtcattcgttcggcgtactgagtcactattatggtcgtgaagccggtttagaattgcgcgaggatattgagaccgttttggcaccaggaatggttgtctcgatggagccgatgatcatgctgccggagagcatgccggggcacggtggttaccgcgaacacgatatcctggtcgtaaccgaaatggcagcagagaacataactcatttcccctatggtcctgagcataatattattgcagctaatatataa

SEQ ID NO: 441796 - DNA, 159 bp, Serratia marcescens; identical to SEQ ID NO: 95958

SEQ ID NO: 441797 - DNA, 546 bp, Serratia marcescens; identical to SEQ ID NO: 95960

SEQ ID NO: 441798 - DNA, 1359 bp, Serratia marcescens
atgagaacatcagaaccaacgatcgatttcagcgaaggctttacctcacaggccgatatattcggccgtaaacgactatatgaattgatgatgagatttgtcagaaactcacctaacacaggtttggtaatggcgattgatgataaatggggtaatggcaaaacatcatttctaaaaatgctgtcttctgaaataaaaaacaatgatgaacttggagttaacgtcatttattatgatgcttttgaaaatgactatcacacagatcctttcgtatctctatcagctgagatttaccaaaccttaaatgggaaagaaagcaaacttgatagcattaaagaatccttcgtcaacacaggtaaaaaagtcggcgcaaaccttttaaaaggaggggtaagttacgcaattaccgccatgactggcaatcttgtttcaggcacagcactagaagggatgaaagaaacctttgcaaactcaatctctgaccccatagaaaaatatgttgaagaaaaaataaaatcaagtgaaagagacaaaacagagcttattaacttcaagaatgtattacatgagatttacactaaaagtggaagaaaaactctccttataatagatgaattagatcgggcgaggcctgatttttcccttgatctacttgaaagaattaagcatatattttccgtggagggtttcatatttttgctttccgtcaatcgtgaacagtttgaaaaaagcatcgagcaaagatacggaatgatagactcaagaacatatttaaacaagtttgttcacttttggtttactttgccgaaaaacaacgtactttctaaaggctgtatcaatggaacaaccccatcaacaatgtcattacaatttagtcagttagataatggagtgaactttctgtctagaaacggaacaattataaaaacgctatcatatctccttgacgttaatggctgctcactacgtgaagctgaaagatgctattcattaatgaatgcaattgataacaaagaagccgtcggtaactttagcagttacgtgtatcactctttaatggccctcgtcgtatatctaaaggttgtaaacccaaaactattaaacgatataaaagaacgtaacttaaccaaaaatgacgttattgtcggccttggcattagggaaactgatgcaatggaggagctagaagtcatgcagttaatccatcttcttgattatcactttgcgacactagaggaattatcaatcgccagaaccgagaaaagatttagcgatatagaaatgtttaactatggaaatcaaaaaagggatttatttgaacaaatgaatgatgttattgaacatttacatatcgggtaa

SEQ ID NO: 441799 - DNA, 474 bp, Serratia marcescens; identical to SEQ ID NO: 196120

SEQ ID NO: 441800 - DNA, 630 bp, Serratia marcescens; identical to SEQ ID NO: 196038

SEQ ID NO: 441801 - DNA, 447 bp, Serratia marcescens; identical to SEQ ID NO: 52336

SEQ ID NO: 441802 - DNA, 663 bp, Serratia marcescens; identical to SEQ ID NO: 52334

SEQ ID NO: 441803 - DNA, 351 bp, Serratia marcescens; identical to SEQ ID NO: 196086

SEQ ID NO: 441804 - DNA, 393 bp, Serratia marcescens; identical to SEQ ID NO: 52353

SEQ ID NO: 441805 - DNA, 576 bp, Serratia marcescens; identical to SEQ ID NO: 161815

SEQ ID NO: 441806 - DNA, 1329 bp, Serratia marcescens
atgagccgcagggagttgttcagcgaatttcttgaaaatttgaatcttgaccttaaacaggcaaaaaagatcagctatcactatcgaaaaataaccaagtcattaaatcttgcgttcagaggaactagttcccgggtagcaaatcgcttgaaagtggggtcagtaggtagacataccgcaataaaaggcatatccgatctggatatgctttatattatgccccccaatcagtatgaatattataaccataaggataatggtcagtctgcattgctcacagatgtcagaaacattctggcggaagaatatcctgaccagacggtgaaaaaggacaggctggtcgttcaggtcgtctttaaaaactttcatgtcgaggttcaaccagtattcagacaggatgatggcagctttaaattccctgaaagctataatgggggagcatggcgcattacaaaacctcttcacgaaaaggcggctatgaccgcattttcgcgagataaatccaacaatctgcgcaagctgtgtaaaatgatcagagcctggaagaacctgcatggcgtcaatatgggtggcttactgatagacacactggcgtatcgctttctttcatcaacatcagattatgacaataccggaaatggcagtctgggagtcctcgccagagacttttttgaatatctgtcaaatgaggagagaagggaaaggtatctcgcgttaggcagtaatcaatatgtacgtgttaaatccccttggtttggtcgggcagcgaaacacgcgtatgaactatgttgtgatgccttagacgctgagggtgctgccagtgaaaatgaccgctggcgcaaagtgttcggacgagccttccccagacgtaaggtggatattatggaagcccgcctcgctctggaatcgcatgcggctgatgctgctccctgggccgataccgaagagtttatagaggaaaaatatccggtggatatcaagtactcactcaaccttgactgtaccgtaacccaggatggtttccctcccagaagcctgagggagatgcttaccagaagatttcgcctctccgcccgaaaatctctccttttccaggcagacctgacagaaatggaggcagaggaaccctacaccgttatgtggaaggtactgaacgtgggtgacgaagcacgcagaagaaatatgatccggggacaaatcgttccggacggcggctactatacgaagaaagagactaccgacttccgtggagatcacgtggtagaatgctatgtgataaaaaatgaggttgtggttgcccgggcacagattgaagttcccataagctga

SEQ ID NO: 441807 - DNA, 627 bp, Serratia marcescens
  misc_feature (581)..(590): n is a, c, g, or t
atggctaatttaatacgaaaagaggttacctttgagtcctcaatagccgcgataggggcggctatgtctgacatttcacgagttaaaatactcagtgctttgatggatgggcgagcttggacggccactgagctaagttctgtggcgaatatatcagcttcaacggcgagcagtcatttatctaaattattagattgccagctaatcacagtagtagctcaaggcaagcatcgttattttcggctagcaggaaaagatattgctgaattgatggaaagtatgatggggatctccttaaaccatggcgtacatgccaaagtttccacgccagtgcatttacgaaaagcacgtacttgctatgatcatttagctggcgaagttgccgttaagatctatgattccctttgtcaacagcaatggatcactgaaaatggttcaatgatcacattaagtggtattcaatattttcatgaaatgggaattgacgttccttccaaacattcacgtaaaatctgttgtgcgtgtttagattggagtgaacgccgtttccatttaggtgggtacgttggagccgcattatnnnnnnnnnngcattattttcgctttatgaatctaaagggtggttaa

SEQ ID NO: 441808 - DNA, 624 bp, Serratia marcescens; identical to SEQ ID NO: 10352

SEQ ID NO: 441809 - DNA, 1206 bp, Serratia marcescens; identical to SEQ ID NO: 19666

SEQ ID NO: 441810 - DNA, 384 bp, Serratia marcescens
atgattgatgcctacatcacaacaaaaactgatttaacaaatggttggtctgccttagaaagtatatttgaacattatcttgattatattattgataataataaaaaccttatccctatccaagaagtgatgcctatcattggttggaatgaacttgaaaaaattagccttgaatacattactggtaaggtaaacgccattgtcagcaaattgatccaagagaaccaacttaaagcttatgatgatgatgtgcttaaaaacttactcaatggctggtttatgcatatcgcaatacatgcgaaaaacctaaaagagcttgccgataaaaaaggccaatttattgctatttaccgcggctttttattgagcttgaaagataaataa

SEQ ID NO: 441811 - DNA, 681 bp, Serratia marcescens
atgttttggttccgtgaaaccaaaaatacacgtgataatacagataccgaagtaggggttgagacgcaatcgaattcggtatacatcactttatttaaaacgatgcccattttgttgattatttatttttcagcgcaattgataggccaaattcccgcaacggtgtgggtgctatttaccgaaaatcgttttggatggaatagcatgatggttggcttttcattagcgggtcttggtcttttacactcagtattccaagcctttgtggcaggaagaatagccactaaatggggcgaaaaaacggcagtactgctcggatttattgcagatagtagtgcatttgcctttttagcgtttatatctgaaggttggttagttttccctgttttaattttattggctggtggtgggatcgctttacctgcattacagggagtgatgtctatccaaacaaagagtcatcagcaaggtgctttacagggattattggtgagccttaccaatgcaaccggtgttattggcccattactgtttgctgttatttataatcattcactaccaatttgggatggctggatttggattattggtttagcgttttactgtattattatcctgctatcgatgaccttcatgttaacccctcaagctcaggggagtaaacaggagacaagtgcttag

SEQ ID NO: 441812 - DNA, 294 bp, Serratia marcescens
atgaaagattataaaagcaatttaggcactaaatttctgctgctgttaagcctggcgctttacatgttgttgccaccgttgttgacggcgggcgtcttcagccggttcaatcttaaccctttcgctatcgttaaatttttgcactttaacccgtttatggccgatcggggcatacccggttatcaaactttcctctatttgctgatgttgtgggcggggctgaatatttttctatggctagtggtatgggggacagggcggctgtatcaacgctggagaacggttcgcggctga

SEQ ID NO: 441813 - DNA, 345 bp, Serratia marcescens
atgcataagcacaccccaggcccgtgggtagttgatgaagacgagcactcgactgctggcggtctgatcggcatctacatctcgcagaatggcgacggccgaataggtcaagtcttcggcaactgcctggtaaccacagatgacgaattacgcgcaaatgcagcactcttcgccgcggcgcccgatcttctgacagcgctcgagggcatcatgtcgcagatgcatggcagcagatgcaccgacggctgttaccgccccgcaatccacggtactgatatagaacgcgcgataacggcgttgcgtaaagcccatcgcgcgttagaccaccaactgcgtaacgactga

SEQ ID NO: 441814 - DNA, 294 bp, Serratia marcescens
atggataaatttcaaagagttcacatgccttacggcattcgagaagtaaaagcgggcctttgggagctcttcaaccgggattataacgccctcggggagccgttcaaattcgcaagaaagctctcagcagcaacgattaaggcgctatcggcggacggtagtgcaccaggggagggcggggggctgcaaactatttggttctatgccgacggcagtgtgcctacagacaaagccgagcattggcaggcgtacagcgccaaattgcaaaaattagcaagtttgaacattgagtaa

SEQ ID NO: 441815 - DNA, 330 bp, Serratia marcescens
atgcctgagaagaaccccgatttgtgggcgcaactgatcacatggctggctgcgcacaaagagggtggcggctacgcagcgactgctgcgctgatggcattgctgcgtagcgcctacgttggccgcgatggctggccgcgacggttgatcgatgcggccatgtgtgcgttagcagcgtatttcatcaaagactgtttggacgccgtggggtgggatgtgaaatacgccactctcgggagcatattcatcggttccgctggcgtggactacttcggcagcctactgcgccgcgttgtggactcacgcaccggcgcatcgtcacgggaataa

SEQ ID NO: 441816 - DNA, 237 bp, Serratia marcescens
atggcgattatcgaaatgactgaactgcaggcgatgaacctggaaattttccgcatggttcaaaacgataccgccgcagcggagaaggcgatcaccttcatcagcggcgacaagctgaaatacgagcttttcaaagacggctacgtccgcgcacagaacgaaggcgcgccggtatctcgggtggataaagcgatccgcactgcggaagaagcgctggatctgttcaaaaacgcatag

SEQ ID NO: 441817 - DNA, 2019 bp, Serratia marcescens
atgacggataatatcatacctaatgtggtagtgagtatgccttcgcaactatttacgctcgcgcgctcgttcaaggcggcggctaacggccggatctacatcggtaaaatcgacaccgatccgacaatccccgagaaccaaatccaggtctatctgcagaatgaagacggtagcactgttcccatctcgcaacctattatgctcaacaccggcggctatccggtgtacggcggtcagatcgccaaatttgtgacggtacagggccactcaatggccgtttatgacgcgttcggcgtgcagcaattctatttccacaacgtactgaaatacgatcctgatcagcttcgtcaggagttggccggcgggggcggggcggagcttatcggctatcaggcgaatccatcgtcacgcatccgttcagtggcaaatagattacgtgatatagttagccttcatgattattattttgatacggatatggatgattggtctccggcattgaatagggcgctatctgcatcaaatagcgtatttgtacccgttgggcggcatgaattaaaaacgcaagtgacgatcccatctaataaggaaattttcggaaatgggctatccagcattttagcgtcccccgcagccaaatcacctggcggtgtggagcttattaccgcactggtagcaaataacgcaaccaatataacgttgcgtgacttttattatgacggagggtgcagtgatatagtaactactaagcgccctacgcgaggtatacgttttcgcaactgctcgtatatctgtgttttaaattgcgaagtgagcaaaaccgcagactgggcactgtcatttgaattttgcaataacgtaatagttaaaaactacaagcacaggaaaagcacggggacgttgtatggcggccgagacggtttgcacttcctagattgcgttgattattccgttgacggcgccgatatcgaatctggcgacgatatggtagggtgtaccacagaaacacgcgaccaacgcaatgcaacaatcaggaatgtgtcagggtattctatgattgcgtctggggtaatattcaacgaagaaggtgcgactacgttttcaacagtaaacgtcttagtggatggtgttaatatcacattcggtaaaaatgtgcgtaatgttgtccgcgttcagtcaataaacccagaaactaacaccaccggtgttattgtaaaaaacgtgcgaggagtatcgtattcacatggcttattcattgctgggcaaaagctgacaaaggttacattttcagatattgatgttagctctaccggggggcatgggatatatattaacagtgcgcaggatattaaaggctcagggcgcgctgctagccaggcctctagttttgacgggtggaatctaactgcatgcaagtattttaatatcgagccatcatctttggggtctgccgggtggggttgtcaaattcttaactgttccgcattcactatgaatgggaatatatttaactgcggtgctggacttttcgcaagcagccgaggagggaattgtcggatttctaatagtacaaactattacgtaactggagtgtttttcggagatgatacgacatcctattatggtctatctagtaacgaggtgcccaccggtaggatcgccgattctgttgtagcaggcggtgcggtccctaaaacacagcccaggaactttaacgcactccaaatacctgttgcgagctgcgcattcggtcaatcgacatccggcagtattaatgtgcttgtggctgttggctgttccgttgctcttgagtctgatggtcgctatcgcgtcacgttcaatgcgccattctcatcaacgttctaccgccctgatgttatagcaaacagaaacggcgccaggttaatgattgagcagaactctcgggatgtaaacggctttacgttcagcgttaaagacacaagcggagccatacagatggccaacttcattaactgcaactttacacccgttccgtaa

SEQ ID NO: 441818 - DNA, 717 bp, Serratia marcescens
atgaaaaaagccgtcgccattcgacacgtcaattttgaaaacctgggcatcctcggctccctgctctcgctgcgcggctatcagatcgactattacgacgccggccgcgatgatattcgtgctatcaataatgaagagaccgatctgttggtggtgctcggcgggccgatcagcgctgcccagcacttttccggtgcgctgcgctatgattttctcgaccatgaattggcgctggttaaacaacgcctggcgcagcggcggccgaccctcggggtatgtctcggcgctcaggtgatcgcccaggcgctgggcgccaacgtgatctcgctcggcgtcaaagagatcggcttcgccccgttgaccacgctagcagcggaagacgactcgccgctggcgccgctggccgatacgccggtgctgcattggcacggcgatatgttcacgatcccggagggcgcccgcagcctggccggcacggcggtttgtccgcatcaggcctttgactatcagggttttgcgctcggtctgcagttccatctggaggcggatcatcgcgatatcgaacgctggttgattggccatgcctgcgagctggaactggccggcgtcgcgccccaaagcctgcgcgaacaggcggcgcgccacggcacacagctggaacagcgtgcgcggcaggtgttcgcccgctggctggataataacgaaccaaggatgtaa

SEQ ID NO: 441819 - DNA, 1272 bp, Serratia marcescens
atgggtggaaagcaaaccgatccagtgatgccgcgtggcgttgccgtgcacggaaaatctttgcgcctgtctttttcatacaaagggcagcgattccgggaatccctgggcctgcccccgacaaagaccaacgtcaaatttgccgctgggaaactggcggcgatccggcacgaaataaaaacgggcgcattcgtatactcagcgcattttcctgaatcaaaaaacggcctgctattctcggcgcgcagccaacgtaccggcgtgcgggttggcgatctctgcgatgagtttaaggcactgaaatacatctcgatcaaaaaggcgacccggcgccgttacaacgtcggctatacccagtgcctgaacatcctcggcagagaacggctgatcgatgcaatttatccagaggacattatgcggatccgtgccgagttaatgagcacgcgtgccgccagcacgtgcaatcattacatgtccgtttttcgggagtttttggagttcgctcagcagaacgactacaccaaccgcccactggccgctgaactaaaacccgtccggagaaacagtaaagatcccgacccgctgctgctggaagaatttcagcgcgcggccgatgcctgcctgcaggagcagcacagaaatataatcactgtgttggtctataccggattgcggcctggcgaactcgcagcgctggcgtgggaagatgtcgattttaagcgggccgaaatcacagttcggcgggcattgtctgacggcaatttcaaattaccgaaaaccaacaaatcgcgggttattctgttgccgccgccggccgtcgcagcattgaaaaatcagcagcaatatactgctatgcaggaaccgctcgagatcgtggtaaacatcaacaacaaggagcgggagttttcgttcattcgtcccgttttcacccctggaacaacggcgaacggccgccggcacggcgattttctgcattcgaattcgctgccgaaaatttgggaacagatctgccggcgcgcgggtattcgtcatcgcactgtctaccagctccgccatacgttcgcctgctggaacctcaccgctcacggcaatgtggcattcatcgccaggcagatggggcatgctgattacactatgctcgtgaaggtctacggcaggtggatggaggacgaaagcgcggccgaaaacgcccggatatgggacgcattaaagagcaagggccatgacgaaaacgccccaatgctgccccagccattgaagataatagggtaa

SEQ ID NO: 441820 - DNA, 189 bp, Serratia marcescens
atgatgaataaatgggtgagagtcaaaagagctgcggagttgacggggtacagcgaaaccgcgttatacgacaagatgcaaaaaggagtgtggccagaggggaagctttggcggtacgcacctgataaccggaagctgatcaatatggaggagtacgacagatgggtggaaagcaaaccgatccagtga

SEQ ID NO: 441821 - DNA, 3240 bp, Serratia marcescens
atgcaaaatgttgcagcctatctttacagggcaaaacagaaatctgggaaaaaccatctttttacgtactttgaggcgaagtctgacgatcacgcggagacaaagcgtgattttctcttcatggaagctggccattcaaaagccgactacttcacgccggtacgcatcgattttccagtcgtggacgaactgcccgccgagggcgaattcagcgaaacattctggcttacctgggcgctggaaagcgacgccagcaaaacctgtgtgccgcgcgacacgctcgatccatccgtggcattcccgaaactgtacccctacatgacaaaacctgcaggtggtgcaggagcagcagaaaacagcaggagcaccgaaaaaacgcaggtggtgcaggagcagcagaaacctgcaggcgaatacttcgcgtcgagcctcgacaagcacaccgtgatcgccgcggcgtggctgtacggcaataactgcctgaagctgaacgatgagcaattggccgcggccaaagctctggtgatgtacgatgcgcagcgctacccgcaaaacgtcattctggcgctgaccagccttaaacagttcgcacacacctacccggaaatgccgatcactgcgatctcgggcatgaaagccatctggccaccgttcggcaaggtgccggaactgggcaaactgtgccaattcgccaccgaatacctcgacgctacggtagaacagcgcgcgggcgttatcacgaagtggcaaacctcagcggccggcggcgccaaaccagccgaaaccgcacctgaggagccattgcgcaccgaatccggcgcgatcctcacaaacggcgccgagccggcaaccggcacgccgatcgactctctgcagatgctggaaaccgtaatcggctgcgcgctgtatccgtctgatttcgacatttccaacccgccgggcgccatcatccgcgcggtcaccgagatgaaaaagcgcaacgacgaggcgctcaaagcatggaatgagcagctcagcgccacgcctggcgttttgcagttctcccgtcaggcgattgttgcactaatccgcggggccgaagaaaacctgcacgttacccccggtgcgctgcgcagctacatcaacgccaatctgatcgaggtcgacgctaaaccggcgcaacagaacgcggaaaccgtgcaacaaattggcgccgaagcacaacaagcggcctcaaatgctggcgaaaaagctgaagtggtcaccgagtttgagactgaacgctgcgcatggcttcgggctgaaatacgtgccgcgctggccggaacgactggcgttatggatgaaagcgacgttgaagaattgaccgcagccgtcggcgaaggcatatcacacagttacatcgcgcggctgctggccaaagagattgaaacgtgcgacccattcaagcagctgatcgcggatgaggtgcaccacctcacctgcgatgtgttggaaaattggcaggataaaaaggatccgcgcgtcgcgtttatcgattcacgtgttgagttttatttgcaggaaacacgccgggcagcagagcagaaatgccgggaaatggccgcagccatcgacggagccgacagcacccctcttccgcaagaaaacccagagtccgcgcgggttgacgactctgatgatggcaaaaaaacggagattgatcagcaccccggcgaactccgcagcatgggtggtggcttcttcgacgtttccacattgtttaatgagtcaccgctggccaaggtcagcaccgcgggcgccacaaccggcgacgatgttcgcgaattcctggattcgtcaacggaaacggccggagtgtcaggcaaaacggcggaattgtcaggtgagaacgccgataccgcggcgccagtcgaagtacagaacgaggctgccgcggcagtcgtcgacgcaccgctccgggaagtaccggccgctccggcatacttcgagccaggccgttacgctgatatttcaaacacagcctatcacgctgcgaacggcatcagcagcacacaggtgaaggacgcgcgcatcagcctgatgtattaccacgggcgccacgtcatcaaaacgatcggccgggaacgcagcgacgcgctgacgttcggttcgctggtgcacacgctggcgcttgagccagagaatctggagcgagatttcaacgtagagccgattatcccggacggcgctttcacgaataccgcctcaatgcgcgcatttatcgaacagcacaacgccagcctgccgaaacagaccgacgccgatacgctgcgcgccgtgatcgagaagcataacgccaccctcccggcgtcgtatgcgttgggcggcaattacgaagaaaccgcgcaattttatgtttcactgccggttgagtttcaaagcctggcaacggccgaacctacggcttcagcgatgaaggggtgcatcaagaagtacaacgccaccctaccggcgccgttgaaaaccgccggcggccgcgacgcactgctggaacaactggcagccatcgatccggagtttgtcgagaaagagcgcgcgatcccggctccgctgtcggtcagcgggaccaaggaagaaatggcggcgcgcatcaaaacaattctgccaacagccatttttgccgacgaactgatcgatgcctggaaaaattccgacgacggccgccagcaggtcacccagcagcaaatgcagcatgccaaagccattcagcgtgcgctgtttacccatccttcagcgggtccgctgctgcagcatgagcatcgtgctgttgaagcgagttatttcggctttgatgaggaaacaggcctcgaggtccgtgtccgccctgaccttgagatcgatcttaacagcgtgcgcgtaggtgtggatttgaaatcagtcagcatgggccgcgtaaagcaagacgcgctgcgcgccaagctgcaccgggaaattatcgatcgtgactaccacctcagcgccgccatgtatagcgacatcgccgcctttgaccagttcttctggattttcgtcaacaaagacgagggctatcactgggtagctatcgtagaggcttctcctgacctgctggagcttggccggcttgagtacaaaaaggcgctgcgagaaatcaaaaacgcattcgacaccgacacctggccggcaccgatcaccgaagagatcgtcgacgacttaaacgactttgaccagcgccgcatggaagcgctgcgcgtagcctaa

SEQ ID NO: 441822 - DNA, 240 bp, Serratia marcescens
atggctatcgacattaccgtgaaagtagaaagtatcgattcaattgaaaccagtactggcggatataacgcaaaactgattgtggcacttaacgacgcagaattaacagaggcggtcgacgcgaaagccattgtcggtgaatacgacaagggtgaattgcttcaagcaattggtgaagaatatgtccagaagtggttagaggaacaggggttcactgtttctgacggtgatgacctatga

SEQ ID NO: 441823 - DNA, 306 bp, Serratia marcescens
atgattaagaccgtagaaatcaaaatgaatcttttgcacaaaaacatcgttgaagtattaagcgagggtgaaaccattggctttatcgttaataccgataacaaagaaaaaccgcattccctcgttactcctagtgggactgatgctggtgattttgattgcccgaaatgtgccatcgatgctgcggtgcgtacgcactttaacgtaggcagtgagtgcgccacagagttcggtatcaaggggcgaccatcccctaaaaagctgctactgcttgccctgctggccatgctcgcaagcgatgattga

SEQ ID NO: 441824 - DNA, 246 bp, Serratia marcescens
atgagcaaaaaatctgcaattgccgttgcggaggctggtggggtttccctcgcatggcttctgggggaggttgtagatgaagacacggggctaaagcccaaagaactagaaatgcttgaattattccgccagcttccggaagcagaacaagagcgcatgatcgacctcttccaactgcggctgaaagagattgatgattacgttgagaagtacctgcgcgggcggtataaaccgatcgaagagtaa

SEQ ID NO: 441825 - DNA, 567 bp, Serratia marcescens
atgtctttaacatttcaagatgttatcagggctggtggccagcggctgagttcagggaatcagtcttcagtccgccgacgcacagtaaaacctgacgctgtccgccaggctgttgatgaatggcagagcacgctgccgggccgggcgcaggagaccatcgccaagctgatcaccgatgaatggttccggcgcggcggaaagggcctccaactgggcgatattgagcgcaacaaccggcagaacattttccgttggctggacaacccgaaccgtacggaaaaatacgccggctatgtcctgcagctggtgccggtgattgctgacgtgatgccgatcgagatcgccagaaaatacggattgaagcaggggaaaaccaagctcgagctggtggccgacgccatcaaagaatgcgcggacgccaaacaggcggcattacttggcgcaccgctgcgcgagctggagaaagagatccgcgaggggatcgaatcgctggtgcgcctggcgccaccggacagatgggcggccgttatggccagcgccgcggcgatgttcagcggctgcatgtaa

SEQ ID NO: 441826 - DNA, 963 bp, Serratia marcescens
atgtccctcgttatttttcagcagcaagtttccaccgccgcgaccgagctggtggatcaggaagtccagaaatttaacgccgcctccggtggcgcgctgatcatgggtaatggcgaccatatcggtgatttcatcgagcaaaccagctggcagttgatcggtggtcttgcgcagcgccgtaatgcttacggcagcggtgatctgacccccgatgagctgggccaaattcttgaccgcatggtcaaggtggacggccgtatcggtccagtgagcatcactccgaccatgatgaaacgcctgggtaaggatgtttcggaggcgtcggcggtcgtggcggcacaagcggcggaggcgatgattcaggactacctgaacaccacctgcggtgcactgaaaacggcgatcgccaccaacgccaagatggttaccgatttgtccggtgcagccggtacaccggtaatgccgtctttgcgcgggctgaataaaggggttcgcccaatgggggattccttctcgcgcattatcgcgtgggtgatggatggcgccacgtacaacgacttcctggatgagtcgctgagcaacgccaaccgcctgttccagatcggcaacgtgaacatcatgcaggacggccttgggcgtcgctttgtgatttccgatatcccatcgctgtccaaagacaagctgcagcacgttcttggcttgacggccgccgccgccgcggtgcaaaccgtgccactgaacatgctggcgcagcctgtactcggacaggaaaacctgaaagccctaatgcagggtgaatacgacttcaccatcggcttgaaaggctaccagtggaaaaatgccaacatcaaatcaccgactgatgtgcaactgaccaccggcgggaactgggaaaaggttcgcaccagtgataaggataccgccggcgttatggtgaccttcggggagaaagccgcaaagtaa

SEQ ID NO: 441827 - DNA, 342 bp, Serratia marcescens
atggcgatcgaaacattcacctggcgagttcaggggcagccagaagggagcctaaaccagagagtgcgctctgcgcagtttggcgacggctataagcaggtgtccggcgatggcatcaacccggaagcccaaagctggccgttgacgttcagcggcaacaaaagcgacatgcagcccttgctggcgttcgtgcgccggcatacgactaagtcgtttatctggacgccgccgcttggcgagaaggggctatatcgcgttacggctgactctatccgggtggttccgattggcggtccggccgtgtccatttcagcaacgtttgaacaggcctatgcgccgtag

SEQ ID NO: 441828 - DNA, 756 bp, Serratia marcescens
gtggcgatcaccaatgacgtgcagaaactggagcccgggaaacgcgtccgtttcatcgaggtagacggcactgcctttggcgccgacgttttgcggttccataaagaaaccatcccgcatacgtcggccgagatcgacaaggccgcgggtgacgaaacaaagctccagccgaaaaccgtatggtggcagggcaaggaatatggcgcttacccctatgaaatgaccgggctggaatctgccagcgatgggacatcggcgcagccaaaattaaccgtctcgaatattgatgcacttatcaccgcgctatgtcttcgtttcgatgacatggttcaggcaaaggtgacgatccacgatacctttgtgcactatctagacgcgcgcaattttccggacggtaatccgcaagccgacccggagcaggaatttaagcaggttttctacatcgacagcaaaagcggagaggataacgaagccgtagagttcacgatgtcgagcccgatggatctgcaggggttgcgcattcccacgcggcagatcacggcactttgcacctggtgcatgcgtgggcagtacaaaaccggcgatgggtgcgcttacgctggtcagaacggctggtttgataaagatggcaaaccaacggatgaccctgccaaggatgaatgctccggcctactggcggactgtaaaaagcgctttggcgaaaacaacgagctcgacttcggcggattccctggctcgtcattgatcaggagataa

SEQ ID NO: 441829 - DNA, 714 bp, Serratia marcescens
atgcggcagaagacaatcgatgccattctagcgcatgcgcagcgtgaattcccgaacgagtgctgcggcgtgctggcgcagcgtgggcgcgttgagcgttattttccctgtctgaaccggtcagcggagccggcggagcattttgaactggatcctgccggttatgttgaggcggaagactggggggaggtgattgccatcgtgcacagccaccccggcgacggtgcaacgacgcagccgagcgaactcgaccagctgcagtgcgatgttaacgagctgccgttcgtgattgcgtcgtggccggagggcgacattcgaacgatctacccgcgcggcgatcgccagctggtggggcgccagtttgtgctcggacatgccgattgctggtcgctaattatggattattaccggcaagagcacggcctcattctgccgaattacagtgttgagcgccattggtgggaagaaggagaaaacctctacatggataactggcacgactgcggcttccgagagttcgatggggcgccacaggctggcgacatggtgattatgcagctttcatcgccggtaccgaaccacgcggggatcttgctggatggtaacatgctgctgcaccacctctatgggcaactgagccagcgcataccgtatggcggctacttcaaggagcgcatggtgaaaattgttcgtcgcaaagagttgatggtgtga

SEQ ID NO: 441830 - DNA, 744 bp, Serratia marcescens
atgtgggtcattattactcatgggggcagggatgtgggatatcgagaccttctcaaagaggccacacggctaaaaaaagaaaagaagtatgatgaagcttgtcaaacattgagagtagcctttcaatccgcagatgttggtgagtatattgatatccatgaacggctaaggcttcctgtctatctgtgttttgctaatagagacgatgaagcatggtttgagctaaaccgcttgtcgactacataccaagacagtattagccagatagcaataaggtctaaaatgcaaaagtttttagaggatgatggtcggttaattgatgctgcatttttccttgcttgggtatatattcttgaacttaagcataaaatagacctcattgtaaacattcatgcagcggcggataagtgggcaaatgaagaacccatgatggtcgaaatgaaagatggaggtttcgcctccttagactttagaaaaatcaatgatgggagggagccatttgcatttactaattctggaagcccaatttatgatgtggcgcacaatcacacgcttacatcattgaatgacatgttggatgtaaatgccatagaggattgttttgtcagcatatgtgaaaagattggggatagtgaggcccctcctattatagctgagaaaatcattgaaataattggtggggaatatgcttctggtgaatgggtggctgatttgcactctttctttcgcgaacaactatcatga

SEQ ID NO: 441831 - DNA, 627 bp, Serratia marcescens
atggagttgaatcccatccccgttagaactattgagctaagtggtgttctcggtaagaagtttgtaaaagaatacaagtaccgtgcccgcgatgttccccatgcgattagagcgttaaaagggctagtgcctggatttgaacgatttttgctagaagctgaaaagaaagggctaaccttcgcggttttcgttggtaaacgtaatatcagcgaggatcaagtagctatgactaaaggcaacgaaaacattcgtattgttcccgttattgttggtagcaagcgggcaggaatgtttcaaaccattctaggggccgcattggttgctgttgccatgtatttttcggcaggtactgctgctggggccatgggagcatttactgctggtggagctacaggaatggctgcaatggttggcgcttctatgatgcttggcggggtgatccaaatgctctccccgcagccaggcgggctttcagttagccaggatgccgacaataaaccgtcttacgcattcggcgggccggtcaattctaccgcccaggggaatcccgtcggtgtgctgtacggtagccgggagatcggcggtgccattatctctgccggcatctacgccgaagaccagcagtaa

SEQ ID NO: 441832 - DNA, 3216 bp, Serratia marcescens
atgggcgaaatcatggaaaaaatcattcaggggcggaaaggtggcggcggcggtggccacacgccaaccgagtcgccggacagcattcagtcgatcgccaaaacaaaaattctactggcaattggtgagggggaattagccggcggcctcgatgggacgaatatttatctcgatggtacgccgttattgtctccagatggcacgacaaattttcccggcgttgaatgggagttccgtcccggcacccagacacagagctatatccagggtgtgcctggtgctgaaaacgagatcagcatcggcacggagctaaaagcctctcagccgtgggtgcgggcaatcagcaacacccagctatcagccgttcgactgcgcatcggttggccgacactgctgaagcaggaggacaacggcgatcaggttggcacgcgtgtcgattatgcgatcgatctgtcgactgatggcggcgcttaccagacggtgcttaacggcacgattaacgacaaaacgacgtcactgtatgagcgcagccaccggataaacctgccgccggcaacaacgggctggcaggtgcgcgcccggcgccttactgcggattcgacatcatcgcgaattgtcgaccggatgaatattgaggcgatcactgaggtcattgatgcaaagcttcgctatccgaacactgcgctgctctttgtttcgtttgatgctaagcagttccaaaatattccgcggatcagctgtaagccgaaggggcgaatgattcgtgtgccgacaacctatgacccggaatcccggacctataccggtacgtggactggggagtttaagtgggcctactccaacaacccggcctgggtgttctacgatattttgctgaataagcgttttggcctgggtgatcgcctcgatatgacgcaggttgatgaggtggaactgtaccgcatcgcccaatactgcgatcagccggtgccggatggccgaggcggcgacgggaaagaaccgcggtttctgtgcgacgtctacatccagtcgcagaatgaggctttcactgtgctgcgcgatctggcctcaatcttccggggtatgacgtattgggccaacaatcaggcctgcgcgctggctgacatgccgcgggatatggattacacctacacccgcgccaacgtgatcgacggaaaattccactatcagggcggcagccagcgaaatcgctacacgacggcgatggtgagctggtcaaaccctgaaaatcattatcaggatgaagtcgaggccgtggccgagaacgcgctggtgcgccggtatggcatcaaccaaacggaaatctcagcgatcggctgtacccggcagacggaagcgaaccggcgaggccgctgggcgctgttgaccaatagcaacgatcgcagcgtgtcgttctctaccgggctggatgggtttattccgttaccaggacacgtcatcggtgtcgccgatcagatgctggcgggccgggtgctgggcggtcggatttcctctgtcggcggccgcaacatcacgctggaccgcgtggccgatgtaaaaatcggagatcgcctactggtgaacctgccatcgggaaaatctcaggcacgcacggtgcaggcagtgaatggcagggtggttacagtttcgactgcgtacgcagaaacccccgaacctgaggcagtgtggagcgtagacgcaaatgacctgtttgttcagcaataccgcgtttccaacgttgccgacaatgacgatggcacatttaccgttacggccgtttggcatgaaccggggaaatatgcggcgatcgatactggcgcgcgcatcgatgagcggcctatctcggtaattccgccgggcgtgcaaccgccgccgaagaatatcgccattgatagctattcgtcggtaagccaggggctcgccgtgacgaccctgcgcgctaaatgggatgcggtcgacagtgcggtagcctatgaggccgaatggcgtaaagatagcggcaactgggtttctatgccgcgcacgtctgcgttgggattcgaggtgccaggcatttacgctgggcgctacctggtgcgcgtgcgggccatcaacgccagtgacgtatcgtctatctgggcgacgtcgatggaaacctacctgaaggggaaagagggcaagccgccggtgccggtcggcttcaaggcttcgcctttgttgtggggtatccagctcgattggggattcccagacggtgctgaagacacgctgaaaaccgaaattcagtatgcagacaacgccgccgggaataatgcgatgttgctggccgatatcccgtacccgctgcacacgcacactatgaccgggttgaaagcggggcaggagttctggttccgcgcgcgtctgcaagaccgtaccggaaaccagggcgactggacgggctggattaaggggcaatcgaacgctaacgccggtgattacctggagagcattggcgatggcttcttgaccgacaaggacggcgaccgcctcactggcgacattgacacaaacattggggctatcatccagaacgcgctggccaacaatgcgacggttgagcaccagtgggcgcagtacggcacggtgcgggctgatattctggtggtgaaaaccactatagcggaagtcgatcacgccctggcagaactctccacgcaggtacaggcgcagattgacgacgtgacagcggtacttgaggacaagctgacggcaaccgttgatgccgacggcgcaacggccatccacacattgaaagccggtgtgagggtaaacggcgtgttctacaacgcgggcatgtcgatcgctgtgttggcggaaaccggtaaacccgtcatcacccgtatcggattcaacgccaatcagttcgtgttgatgagcggcagcggcgacacgcaatactcgccgttcgctgtaatcaacggccaggtgtttatcagcgacgcgttcatccagaacgcctctatcacgtcggcgaaaattgcggatgcggcaatcacaaacgccaaaatcagcggctttattcagtccgataatttcagtgcgaccagcgggtggcggatggataaaagcggtgcaggggccgggcaaattcagattaacggcggcgacggtaatgggcgcatggagatacgcggcgaccagatcaatgtttatgacgctggcggaaatctgcgtgtgagaatggggaggttgtag

SEQ ID NO: 441833 - DNA, 990 bp, Serratia marcescens
gtggcgtatggcctgtggatgaatggcaaagagctggcggcggttaatagcatttcactattagccaacgataaagaaccctgggcggatggcaataaacaaaagatttacaccccgcctgattacgtcgctgggaacccggtttttctggttggtcaaaccgggtatatattcggcagtcagacgaatccgccattttacggcggggttacgggatggcgaaccgatgggggtaggataattgttgatttctccagtgcaaaccaacaagcgttttttaccgagttcagcatataccaggttcaaccgccgcaatcagtttccggcacgtatggaataatgattcaaaactcggtggactggatgagcattaacagttcgtccaggctgggctttgttgcgtggaaaggggaagtggcgattaacggcaaatggacattgccagtcgtgcaaaacgataacaccaaggttgtctttgttcggtgtgatgaccctgccgtatctatttatcattcagtgcagtcaaatgaattgaccgtgtcgcgtgataactctgtcaatgaagcagttttgaccaccgcaaatgtaaaggtggtcattatgaacagcggttattacccacctacgccaagcggctacggaatggtgattaagaacgccgccggtaataacacattcaccagcgatacagagccggtagtctgggatgggcgttcggttaatgtcggcaggaaccccgaagatttaatcgatacagggatagccaggccaatgatccccctggccgttaatgcatttatgcgcggtgattctcagggcagtggcggggtttataactactacagctgcggatatcggtttaacggcagcgccgtccaattctggcgctctgaatcaggtagaagaatacagacccagtggaatacatcaaaccgatggtactcgtcacagatgccgctcatggttattaacgcagaccattatttctaa

SEQ ID NO: 441834 - DNA, 1323 bp, Serratia marcescens
atgcccgcaggcactcttaccctaaccaataattccgctgtagtgaaaggcacggggacggcattcaataccgaactgaaagccggtgatttcattgtgagcgtcgtcggtggcgtaacatatacgctaccggttaaaaccgttgatagtgccacgcaggtgacgctgattaaagcctatgacggcccaacgcaggcagggtccgcatggtatgccgtaccgcgcgacgcgatgaacgccatcactgcccagttggccgctgaaactgccaaagccctacgtgggctgaaccttgataaaaataactggcaacaggtattcagcggcactggaaacattacggtgacgttacctgacggcagcacttttaccggcccggcctggaatagttttactgcagcattggaaaataaagccgctaaaggggtgaataacgatataactcagctgaagtcgttaagcaccgcaattacagttgcgcagggcggtacgggtgcaaaagacgcagctggcgcgcgaaaaggtcttggcctaggggattcgtcaacgagaaatgtaggctctgtggctggaactgttgcagctggtgatgataccaggcttgggactgttaataataagagcggtggcacaatatcttcatataccaaaattatcggcggagttgagagtaacgtttctgccgcgccaaactctttttggacaacaggcttcacagcaattaacaccaacgtatctggcagcgtcgggcaattaaaaatcggtggcatgttggtttcccagcttggtacggatggaaattggcaagcaaacttatcatttagagaacttgtcggtagcaagacatacgcgtgtttatcagtaaaggccaatactcaaacgtctgattatgaattcagccctaacggaagcgcgacagcaccgggagcatgggttaacaattcagatgagcgattgaagcataacgtccagagaatctccgatccattacgaataatgccaggtataaaaggcgtaacatggcaacgtctggatggcgtatcgccgggtattggttttattgcccaggatgttaataaatattttcccggcaatgtattccattcaggcgacagaaaactacttgatggaacaatcattaaagacgttttaagtcctgacacggctggcatttctgctgcactgcatcatgaagcaattcttgaattaatgagcatcctcaagtatggattgaaaaccattgcatcggtaacgagcgatgaaaatgcggcgtcggcgttaagtgctcttgccagcagaatacccgatgtaaccattgaataa

SEQ ID NO: 441835 - DNA, 378 bp, Serratia marcescens
atgcttttatctcacgcttttcttcgtctgcccgtccggcgcttcggcgccgccctcctgttcagcctgctgttcgttttggcgcccgtacatgccgctacgccgccgctggtactgaatgccaaatcggtgctggtcgtcaatcaacgcaccggaaagacgctctatcagaagcaaccgaaccgcgtgctgccgatcgcctcgctcaccaaactgatgaccgccatggtcgccctagacagcaaacgcccgatgggcagcccgctcaaggtcaccgccgccgatcgcgatctgctgaagaaaacccactcgcggctgaccatcggctcggtgctcagccgccgcgacatgctgcacatcgccctgatgcagcactga

SEQ ID NO: 441836 - DNA, 414 bp, Serratia marcescens
atgagcactccatctgcattagatgtggtcaatcagttcacccagttggcggcatcgacagaggacctttcagaaattgaagtatttgtcagtccagatgttgattggtatatggtgggtgatcgcaaggtggttccttgggctggcaagtgggaaggaaaaaagggcgtttcacagttttataccgtcctgcgtgaaaaaacgagcaacgaacattttaacgttcgagacgtgttaacccagaaagatcgggtggtgattattggagatctggccaccagggtcaaggagactgggaagctcattgaatgtgagtttgtttttgattttgaagttaaaaatggactcattacacgctttcgtccattcgaagacagccatgccatagccattgcttgttcagtggacgactaa

SEQ ID NO: 441837 - DNA, 228 bp, Serratia marcescens
atgagctggtgccaggcccaatgtgtgacggcggtgctggcggggcacggcatcgctcagttagcgacctggctggtcaaacggcagctagaggagggggcgttggccgaggtgttgccgcatctgccgatcaacgtggtctggctgaaaagccgccgggcgcagccgaaggtcagcgctttgctgcaggcgctgatcgccgggttgacgtcggagggacaggcttaa

SEQ ID NO: 441838 - DNA, 1755 bp, Serratia marcescens
atggccaatcgatacaacaccggaaatccgcgtccttcaaacagtatgaaggacttaaacgacaatgctcttgcttatgatgacttccttaatggggaggaagatgttgcatacgatcgttttcaaaaaccattccctacagtgcgccggcaggttgcagagcgtgtaaatgaaataattggagctcagcaagatgcagaggaatacgctaaagcagctaaaggttatgcctcatctgcgcgtgaaagtgaaaaaagttctgctttcatcgcatcaacaatagggcgtccatcatcgaccgagccagtaaaaaaaacataccttacgtttattgatgatgatacacgggtagaaacatacgtgtattggaaacgattggctattgaaatgggagttaaaatcacgcttgcagttgtacctaattggataaatggtgaatatccaagtggtagacgagctatgacattagaacaattgcaggaaatgtatgatgacgggcatgagttagcatcacatggatatgacactttaactattcaagaccatttagacgaacctgatgttttatatgagcaattgtttggtgcacggcagtggctaattgacaatggatttactcgtaatcaggggtatgataattttgtgtggccgcaggggcttacaggaactaatgagattaaagccagggctaagtcagaggttagaaaatattacaaatatgctgtaaacgcatttacaccacaaccacaaattccgcccggtgtatttgattcatatgatatgttccgcgccggctctgacggtcaaacgtctgattatctaaaaggactgctaaatcaggctatagctgtaaatggatggctcattctactcagccatgcatggcacgcaatcgacttagatgatggcagctatgataaatggtctgctcgctatagggatttgattaattacgctcgtgaaaataacgttgaaatagtaacgttatctcaggggctaaaaatcagaggaaacacggaaagtacaggcgagtggctggatgcgccgcgctgtaattatgtaaatattgatggttctcgtttccctggaacgatgggtatgacggttagctcttcatctgaaatcttgtcagcaccagcgacgttgtttaaccgaccatctgaatcatttacatttctgcaaaatacgcatgatacaataacggggcgaggcggttatttacgggtgttacgcggctggcctagtttttcatacaaggagtactctccgctgactggtaattttaccatcagatcggtatgggatgatgttaattctgtttggaaaccgtgggtttgtatgtcgaatgcgaaaggttccagcaatatgacagcaaatcagtcagtgcctgcatcagcaacaaaggtgcttttcaattcaactccatcggttgcagatgataaccttaaggcgtttgatccgccgaacagcaggtttgtagcaccattcgctgccaatatatcgttcacagttcgggtaggttcgacaatagcccctgctgcggccatgaatattgcgttaaacatttataagaatggatctttattccgctgcttaacacaagcatacatcggtacagtcggaggctgggtcgtgaatggaagcacaatgatgaatgtagttgctggtgacattgttgaagtttatgtaagttcaacgcaagcgatcacgctgacatccagcaatacatactcttcgtggcagtatgctgtatga

SEQ ID NO: 441839 - DNA, 627 bp, Serratia marcescens
atgcaaaaagtaggaaacactacagataccgcagatgcaaatggtgagtataccaatggtaatgttgctcagggaataccccctacaatcattaatgctgagatgttgaatactattcaaagggagctagtgaactttgttgaaggtgctgaactgacattagatcccagtgattattatcaattgcttaaggctattaaaaagttaagtttgggcaggaaacagccatttgctgaaatcaagtctgataatacagtggaaaccgccctcaataatcttggagttaaatcagcagcaaagcgagatgttggggctggagaaaaccaaattccagacatgtcattttttgctgcatctttcggaatgtcaggtggcgggtcttatttttatcagccaaatggaactttggttcaatattcatatgctgaaattattggtcctggtccatggacactttcatttccaatagcatttcctaacacctgtcgggcggttgttatgacggatgctggtgcaggagcattttccccgggtgctcagattttgtcaaaaacgcagtttaacgcgtactctaaagcacctgaagggcaaaaagttgggttttatcttatctgcatagggaattaa

SEQ ID NO: 441840 - DNA, 270 bp, Serratia marcescens
atggctaaaaaattagatgctctaagtcggtggttgaatcatcaatcatggacctctgggcaccacctcgacgaagctaggttttatcgagcggtctatcaggtattaaaagaaaacgataaggattcaatcacccaagatgacataaggaattatgtaatttcccagttcacagggaggttagacccaatatttctaagtgaaagggcggaacaggcggcggaaaggttcgaaattatctctgaattctgtgatgctaataatatttag

SEQ ID NO: 441841 - DNA, 354 bp, Serratia marcescens
gtgaacaatttaacgatctccgttgacgtgtttgagagcgagcgcatcaacagcggcattcgcaagctggtgttggcgggaatgcttaaggacaacccagaaacccagatgggtcgagttattcaggctgctgtgggcgcgcaatggatgacgctgcgcaagctggaaagaacggtcttcatgatgtttttcgtggcagatacccaagcggcgatcagcgcgcgactgagggaagtggatccaaaaactcacggattaatcaaagaaaagcggactgtaaaggatccagaaacgggccggcctgtctatttctaccggctggtggccgccactgaaaaggagaaagcagcatga

SEQ ID NO: 441842 - DNA, 1080 bp, Serratia marcescens
atgagcagaatttttgaggttgttcaggccatgtctgggcagaagaactgcattgtgatccccggcccttatctggattatttcgccggtgatcagcagtcctttgccctggctgccgtactgaatcagcttgtgttctggacagggaagtcatcacaggatgatggctggttttacaagacgcatgaggaacttgcaggcgaactgcgcggagtcagcgaagatcaggttcagcgtgtggtgaataagctgcgcactaaatatttaccgggagttattgaagtctcattgcggaaggttaatggcactccgaagaaccattatcgcattgatggtgacaagcttatcgggatgatcttcccgccgctggtggattccgcagaatcacggaatggaaaccgcgaaactacggaatcgactccgcagaatcgcgtaatggatttcgcagattcacgtgaacaatgccgcgaaactgcggaatcttatctctacacagatcaccacaaacagatccaaaacccttgtcagtcggacgaaccgaccgacgaaattgtttcccctgatgaattggtcttaacccatttcaacagcaccaccaactcggattacaaggctgggaaaaccacgatgggttacatccggggccgtctggccgaggactacaccgccgctgacctgatcctgatcgttgactatctaaccgccaaatggctgaacgacccgaaaatgagcgattacctgcgaccaaagaccctgtttggcccagagaactgcgctgaatatttcgagaaggcaaaaaaatggcgtgaaagcggacgaccggcgtgtgtcgatgggaaatggctgaagcctggccagtctgccgacgctggtgatcactccgagcgagacgcggcttatctgcgttttctcgggcggaaattgcagaagaaaaacccaagcgctcttgaagaaatggttcgcggcgaagccagcaaggcgggcgttcgtgccagccgtaatgctgattacgccgtatcaacatggaaccgcatctgggccgactgcgctcagcgcctgaatggaggaaaagcagcgtga

SEQ ID NO: 441843 - DNA, 858 bp, Serratia marcescens
atggtggggctcaattatgcggggtgggccatgactaatctgcctgcgtccgaaatcacaatgaccagcctcgagctggtggactacatcaatgccgatcgtgctgaaaaagccaaaaacgccggggcggagtttccaagcaaagggcatgctgaactcaagcacaatgacttcttgaagaaagtccctcgggtgctgggtgaagcaacatcagggaaatttttccttgatgatattttcaccgttggtaacggcgcacaggccgttcgcaaaatttaccgtttccctaagcgtgaagcctgtctgatggcgatgagctacagctacgagctgcaggcgaaggtatacgaccgaatgacggcgttggaagatcggcagatcgttgcgttgccagcggcaaaagaagatcaggttaaatgcggcctgctaattctcgaatcagctaccaaacttttgaacctgtccaattcctcccgcctcggtgcgctgcagcgcctgcaagagttcgccggtgtccctgcgctgatgcctgcttatgcagtagacgcgccctcagatgctgctgacggctccagccgttctaccgcagcgctgacgacgttgcttaaacgtcatggttcagagctcagcacgccaagcgcaaacgccatactcgagcgtctgggaattctggaacgcaaacacaggccaagtacgcgccacggcaccaagcagttctggagcgttaccagtgcaggtcttgtgtatggcaagaatctgacagatccgcgcagcccgcgcgaaacccagccgcatttctacgagagccgctttccgcgtctgctgcagcgcatctatgacgaatgggggcatggctaa

SEQ ID NO: 441844 - DNA, 198 bp, Serratia marcescens
atgtacaaagaaacagtaatttcccatttcggcggtgtagtgaataccgccatggctttgggaataaagcatccagcggtatgtcgatggggaaatgttatccccgaaaaacaggcaatgagaatagagcacttaaccggcggagaacttaaataccagcctgagctgtataagaagtctaccgctacagccgcataa

SEQ ID NO: 441845 - DNA, 201 bp, Serratia marcescens
atggacagcattaagcaaaagcttctggaaaaggtttcacgcttggagcaagccgccaatcgaggcattcagtgctcagcggctccgaaattggctcagaaaccgggaagaattatcagccaggagcagtgcaactggaccctgcaggactgcagggcattcagagaaatgattaacgagtgttttggatcatccgaatag

SEQ ID NO: 441846 - DNA, 219 bp, Serratia marcescens
atgagtgagcagcccaatgtgaagcgtcttttctcccctgctgctatcagcttcggctatgacggcttcagagggaacatgaaaaccgggagcctgccccatgacgagaacaggcacgggaatggagggaagcatcatgtgacaagtaaacgggccgaccgtagataccggccagccgcatcagtggtaatggccaagttccccccggcgacggagtga

SEQ ID NO: 441847 - DNA, 372 bp, Serratia marcescens
atgagtgatgaccgcaagaccaacgtgccggattttctgggcgaactggatgctggcgtgtttcaaaataaaatctcagcggctttaaacgctactgccctgggtgttctcaacaatggcggcaaagggaagatcgtgatcacctttgatattgatcgcttgagtaattcagttgaagaaaagcgggtgggtattaagcaccaactgaaatttgtaaccccgaccccgcgcggcaaagtgtcagaggaagataccaccgaaacgccaatgtatgttggtaagggtggcaagctgactattttgcaggaagatcaagggcaattatttactgttggcgggcagccagacggtaaattaaaagtcgcgcagtaa

SEQ ID NO: 441848 - DNA, 822 bp, Serratia marcescens
atgtcacaattagacggcacagccatcgagcaaattaagcatctggctatcggcgctgcattcatccaagatcttaatcatgttgattgcccgatcgctgttttaccaaaagatgtaaacgttgaaagtctcgaacgttatcacgatctgcgcttccgcttccgcgggaacatggaaacaaccagcattcccgattttgtaaaatactctacccaatatgcaggcgaaggcgtttgctgcttcatcgatgcagatcgtatgcaggccgaaacgatcttcaacatcggcacgctggacgaacccggtcatgctgataataaagcctcgatcaccctgaaaaaaaccgccccgttctccgggctgctcgatatcaatggccgcaagcaaggccaaaaagaactggcagagtggctggaagataaccgtgacttcctcaccgcattcgatgctgatggcgttgtactcgatattaagcaagccgttggtgctgtccgacgcatcactattgaatccgtctccacttctgaccatgaagagaacgatttcagcggtaaacgttcactcatggaaagcgtggaagccaaaagcaaagacgttatgccagccgcctttgagttcaaatgcgtgccgtatgaaggtttgagcgagcgtccattcaaactgcgctacagcataatcaccaatgacaaaccgatcctggtattacgcatcgtgcaattggaaaaagcagaagaagaaatcgcggtcgaattccgcgacctgctgaccagcaagtttgacggcgtagaagtagaaaccttcatcggtaaatttaaagcttaa

SEQ ID NO: 441849 - DNA, 171 bp, Serratia marcescens
gtgaagaacgccgcgcagctgaccggcatcgacatgagcacgaataaaaccgaggtgaatgtcgagctggccggactcagttacggcaaggtttgcatcgtgaccccggcggacgtgtgggctgctcacatggaaaagctgcgcgagggaaagccgacggcccagtcataa

SEQ ID NO: 441850 - DNA, 444 bp, Serratia marcescens
atgagcgaagaaatcaataattcaatcgaaaacctgccaattacgcaaatcgttaaggtgcgtgatgaagctttgacatttctatgcaagatggcaaatttggatattggtgtaggggtcaccattctcattaaagggactgtgttaactggcactttaatctcaggtgataaatacttcaaagtaataactgagaagtttaaagctcttggtagcggtgaagtggcaagtcttatatcaaacttttttgaggactttggtcgtgaaacatactcgattgttgaaggcgagataccaccaccgacaaactttcttcatctcgctgatgttgagatagtaaatggtaatggccggatgataggcatgagtgatggattactacgactgaagattgaagagattgacggctcaatgatagggcaattgaaactacagaagcaataa

SEQ ID NO: 441851 - DNA, 1119 bp, Serratia marcescens
atggaaactaacaattcagaacaacccgcatcagttattggggaaaaaatggctacatcaatatgttttttcaatcacaaaggtggcgtaagtaaaacaacaaccacattcaacttaggttggagccttgccgagcttggcaaaaaagtacttatggttgacctagactctcaatgtaacctaactgggatggttctaggttacgccacgattgaagagggattagattccttctatgccagccgtgaaaatttaaccatgggcccaattgttgaatatttaatcaatggcggccagcctgaagaatacttaaggaatgaaacaggtaaaatacatggaacattaaataataacctatatttattacctggccatcttgacgttgcagaccttgattctcagatcagtgtgtcgcttaaaattgccgcaggcattcctgccaccagaaatatccctggtaatttacctaaaattcttcaactaattgctcaggcaaatgagatcgattacattctttatgacctcagccctaatgtcggggggttaaatgaggttgtgctgatgtcaagcgattatttcattgttccaaccacaccagactttttctgctggcaagccgtgagctctttgtctaagaacataccaaaatggcataaagagctgcgtagatttaaagaagataatgatgtaaacgcagctagagccattaagaatgaacctaaattcattggcacaatacagcagcgatatcgcccaagaaacggcgcaccggcaaaatcatttgacaaatggattaataacataagagctgcagtagataatattttagtgcctcgattgtccgaaataaactgtcttgttccgcgagataaggttcaaagggcattaacagcaacaggctctgacttgtcagcatatgatttggctcatatacctgactttaactctctaattgctatcagccaacagctatctactccagtgttctcaataaccaataagcaaatttctgatgccggtcagtttggccattcactaaacacaatgaaagacagtcgtgattcttttgcaacgcaattccatgcccttgcggaaagaattctagatattacttcataa

SEQ ID NO: 441852 - DNA, 711 bp, Serratia marcescens
atgaattggcaaggtgtacctttcaatttctttagtgataatactattgataatgtttttctgactctatcgaaattaccagtgatatctatcgatactggtttcagttgggataactttgtctcagctttaattggagggttgattcctgctggaatagcgttgtatacgatagcaaataataataattcaagcgaactacagagaaaggagcaaataaaagatctgaaacaggcaagaaagacccaactgaagatatcggaaagatcattcaatgcgcaagtattatcagcaaacagacaaaactggataaataatttgcgtgacttaaccgcagattttacaaaattgtgtagttcacatatgtattaccgtaagctttatgtggccgaacaagaaggaatcaattggtcgatgggtgaccataaacaagccgacatttacttaagtaaaatcgtatcctcgggagaagatgtaattgctgcgctcacaagagttaggttaatgttaaatcccaatgaaataacttctagcgcaatcattaaagcaatgatggagatgataactatagcgaggaaaacatcaacaaaaaacatgccgaaagaactttttgaagctccacctgaatattattcatatgaaaaaagatatcttgctgtagtgcagagatgtcttaaaacggaatggaagagagttaaatcgggaatgtaa

SEQ ID NO: 441853 - DNA, 501 bp, Serratia marcescens
atggctgaacattcccatgaacatcaacatcacacatccggtcagatgggtaagcacggccgaccctacgccaagttctgggtgaacatggtgttgggactcgtcgtcatgtacttcgtaatgttcagcatgatcgacggcgccagggacttcagaaacaatctcaacatgctctacatggcggtcactatgtgggcgccaatgggcatcttcatgctagcgacaatgcccggcatgtttccaaaccggcggctcaatctcgtgctgtacggcttgtttgccgttctcacactcggttcttttgccgcgacccgtgctcaaaccggaatcggcgatcgacagttcatcgcgtctatggtcccgcaccattcgggagctatcctcatgtgccgcgaggcgcagctctcagatccggaactcgtcaacctatgccaagcgatttccgatggccaacgcgcggagatcgagcagatgaaccggattgctgcacgccttcgttga

SEQ ID NO: 441854 - DNA, 747 bp, Serratia marcescens
atgcacaaggacatttcaacatcaaaggtgttctatcgtcccatcgaggcggccatccgatgggctgggttgctgcggtatctgccgatgatcctggccacgatcgcgtcaccgcgtgtcctgcctccgtcgctgaactgccctcgatggaatgagtgccggctgcactcggaacgtatctatgacggcatcctcaacggagagctgccctacggcaagaacgggatcacgctcaatgatccgaagctgctgaattctctggatctgactgttcgccatgtcgatctgaagcgttggatgcgcacccactatcccgagcaccggccaggattcctgttcagccgtggcgaacgcatggcgcaccccttcatcaccatggaaacaggacaggcgatcctggtcgagcggctggcccttcaggccgcgcttgaacatgcccggcgccagatgcgggaattgcaggagcagcacgacaccttgctcaagcaatctgccgtgctgctggcctccaagcaatgcgagatcagcgagcgagctgagacgacgtatctcaacatcatcggcgggatgctgacgctgatgctgggccagtccccttcgggtgtgccttattccagcttcaagactcaggaggcactcgtctcggcattggtcgcccattatggcggcaccatgggcattacggagcgaaccttaaacggcaagttcgccaacgccaggaagtacgtccgtagcgcaagcggatga

SEQ ID NO: 441855 - DNA, 270 bp, Serratia marcescens
atggcgaacgcacatgaactggcccgcggccacaagcggctgcgcgccctgatcgagttcgcggtcggtgaaggctggcacgtcaagcgcacaccgggtgggcacctcaagttcaccaaggccggctgcgcggcgatctacaccagttcgaccgcgagcgaccagcgggccggactgaacgcccgtgcgcagatccgccgcgccgagcgagaggcccgcatggcgccggccggcggtcgtggggactgcgaggggtgcggccatggctga

SEQ ID NO: 441856 - DNA, 1680 bp, Serratia marcescens
atggctgacctgacctcgcaggacatggccggcaagctgctcgcggcgggcttcgagcgcagcggcccagcggctacggccttgagcgacccgatcgcggacacgcccatggtcgtgacgctggaccagttgcggccctacgaccatgacccgcgcatgaagcgcaacccggcttacgaggaaatcaaggcatccatccgcgagcgcggcctggacgcggcgccggccatcacgcgcaggcccggcgaggaccactacatcatccgcaacggcggcaacacgcgactggcgatcctgcgcgaactctggtcggagaccaaggaagaacgcttcttccgcatatcgtgcctgttccgaccatggccggagcgcggtgaaatcgtcgcgctgaccgggcatcttgccgagaacgaactgcgcggcggcctcacgttcatcgagcgcgcgctcggcgtcgagaaagcacgggagttctacgagcaggagagcggcgccgccctgagccagtcggaactggcccgccgcctggcggccgatggcttccccgtccagcggtcgcacatcacccgcatggccgacgcggtgcgctacctgctgcccgccattcccactgtgctctatggcggcctggggcgccaccaggtcgagcggctgtcggtcatgcgcacggcctgcaaacgcacctgggagcactacgccaaggaccgttcgctgccgctggacttcgacagtttctttcaggaggtgctggcgcagttcgacacgcagggcgacgagttcgcgccgcagcgcgtgcaagacgagctgatcggccagatgtccgagctgctgggcatcggctacgacgtgctggcgctggacctgaccgaatcggaaagccgccaccgggcgctggtcagtgacccgacgccacctgcggcgcagccggcgttgccttcgcccaccgccggcacgccgactccgccgggcgcagcatcgtccatcgccacgcctgcagcggcggccggtcctccacccgccagccctccggcgtccgagcccaccttgcgccacgacgacacggcggttggcgaagcggccacgggaagccagccggccgcaccgggcgatctgcttcgcgagcacatcgtctcgccagcaccgacgacagaacggctccaatcgatccagcgcatggtcgccgaccagttgggcgatgcgctgccgcccgacttctcggcgagcgtgctgcagtccatcccggtgcaagccggcggactctatccgatctccgacgtctggtacatcgacgccggcctggacacgcccgatcggctgcgcatccacatcgcgcagttcgcgcgcgagatcgccggggaggcaggcctggacgagtgcatcgaggatcgcgccgatggcatcgggtttgcgtgccgcgcccgcggccaagccccgtcgccgctcggccgcgcggtgctgacgctgctcacttccctgacgggtcagcccgtcgccgaagcgggcctggacggcgcgcagctcgccgccgacctgccgaccctgttgcacggccagagccaaggccatggcagcggcgcaaggcgcttgagcgacacggcgttggtcaagctctttcggctgctgcgcctcgcccggcgtctgctggacctggaagccggcaccacggcgcccgggacgtga

SEQ ID NO: 441857 - DNA, 1239 bp, Serratia marcescens
atggccgtggacgacaccgccccacgagcccagcgccctggccccatcgcactcgccgacctgttcgacgctgcgctgaaggacctcgcgcccaagtccagctctggcgctcccgcgtccctgcctgctccaacgcccacgcctcctacgtccggcgacgccttcctgttcagtggcaatcggcacgagagcgtgccgcggcggctgttcctcgaccgccgcctgacaccgctggagcgcaacgcctggcaagtgttccgattgatgctcaacgacgatggcgtcacggcatttcccacctatgagcagttgcgcccctggctggcgtcgatgccctgcgcaggccaggcctcccatgagaccgtggcgcgggcgctgacgctgctgcgcctgacgcgctggctgagcctcgtgcgacgacggcgcgaccccaagaccggtcgcatcctcggcaacctctacgtcctgcacgacgaaccgctgacgccgttcgaggcgatgcaactcgacgccgactacctggccctggtcagccagtcgctggggcattcggccaaggccgtccaggtggtgggactcaacaccctccaggagatcgcggacgacccgatgctgtccggacgcaccttgccgtcgcggctgcaagtgctcgccgagcgcctggccgaccagggcatcaccgcctccgaaagttatccacaggaggatgcggtccacgattccgaagaagggcccgcgagccttcttcggaatggcgatcgcccatcttcggaatccgaagcagggccgaaacccgcgccagacggcgctcttcggaatccgaagcaggaccgtacagtacgtagtagtcgtattgatgaagtacgtactaccgcgcaggcgcgtgcgctgggcgacctgcaatggcccaagcgcttcgcggaactgaaggcggaacagcaggccggagccaagatggcgttgcagcaggtggacgctgccctgcggcaggccgtgctggacgaatgggccgcacggtgcggcaagcatggcatccgcaaccccgccggttatctgttcggcatcatccagcgcgccatgcgcggcgagttcaatgcctgggccaagcagaccggcccggcaccgccaacaccatcggcggcgcgagcgccaccaaccgagccgccgcgcaacgtcgtgccgcccgaggtggcccggcagcacatcgagcgcctgcgcgatctgctgcgcaaatcctga

SEQ ID NO: 441858 - DNA, 738 bp, Serratia marcescens; identical to SEQ ID NO: 323917

SEQ ID NO: 441859 - DNA, 354 bp, Serratia marcescens; identical to SEQ ID NO: 323920

SEQ ID NO: 441860 - DNA, 690 bp, Serratia marcescens
atggcagccacatcggcacctacgagatcagccctacccatcgtcgtcccgggccagctcacgttgcggaccatccggggcaagaacggcccgttcacggttgggcgcctttctacccccatcggcgagttcgcggttaaagacgcggagttggagcagtaccccgaaggaaagtacgacggggatttcgtcattcgctacatcttcgcgaagtcctatccggtcgcgggcggcgcgcggtttgaagtgcgcgcaaacctcgacggcatgacgctcaacggcatcgacaaactgagtcgtgatgaggcccgcagcttcgccacccaggaagtcgacccactcgatgaagagctggggacgcagcctgcggaaacgccggccaagcccgccaaggcctccagacccgccaagcccgcacccgtgcaggcctcggcggacccgctggtcgataccacgcccttcggtgtggatgcaccgacgcccgctgcggcggctgcccctggcagcaccgaagagggcgacgttgctttgttcggcttgctctggccgctgggcgattccgtgaaattggattcgaccatcgaccgccgcgccctgcgcgcgcagatcgcccgcctgggcgatctgggctacgcgctggacttcaaaacgcaggagtggagccgccaggccgaactgcaacctgcgtga

SEQ ID NO: 441861 - DNA, 327 bp, Serratia marcescens; identical to SEQ ID NO: 323923

SEQ ID NO: 441862 - DNA, 342 bp, Serratia marcescens
atgagtcggcactacttcgacaccgttcacaagggctttcccatcaccgtcgtactgggctgggaccggccggcaaattacttcttcctattcatcgaaaagccggccgagctgatcgacgataccgcgaaggtcgagagcgacgacttcttgtacagcaacctgcacgagagcgacccgttcaaccactacctggactactaccgagtggtcctgcgccatttccacatcgacgtgcccgaaagcatgttcaccgaagtccaacaggactgcgagggcaacgttggcaaccgtgtagtcaagcatcaggccgacggctcgttcaccgaacagacgttctga

SEQ ID NO: 441863 - DNA, 600 bp, Serratia marcescens
atgtgcccctctccaccgtggtttcaccatcccgaacgccgccttctggcgggatttctcggcctgctgtggtcggcgctggcgggcggctgcgcaacgaccacgacgccagccgcacccgatcccatcgaggacgtgtcggccacgccggaagccagcgcacccgagttcattcccgtcgtgcgctacggccgctacaccctcgtggagatgacacccactgcagcgcagcgcgatctgctgatgcaggtcatcgacgtggccatgcccgaggacgcccgagccacagtcggcgacgggctgcggcatgtactcaagcgcagcggctacggcctgtgccagaccgcgcatgctgtgatcgaactgtacgcgctgccgttgccggcggcgcacctgcacctcggccccatgaccttgcgcgatgcgctgctcacgctggctggaccggcctgggaactgcacgcggatgaccgcgcacggcaaatctgcttcgagcggcccggcgaccgcgcgatcgccgagcacacatccgagccgcccgccaccgaggcggtgcagacgttcccgctggcgcccgcggcttcgggaggccagccatga

SEQ ID NO: 441864 - DNA, 768 bp, Serratia marcescens
atggaacagaaacgcccatccattccgatgcaggtacaggcgttccgccgtcggcgctggaggctcagctggtcctgggtgttggccgccgtgctggtagcgctgctgctgatctggctcgtgtcccgctattctggcaagtccactccccagacttcaacgccggtcagcgtgacgcaggtggccgggcctccgtggcagatgggaaatccggaagggcgtttcacgctgacgctctacgcggacctcgaatgcccgttctgccgatcctatttcccagtgctcaagcgttgggtggccggcaacgcggacgtggccttgcaatggcaccacctcccgttggccgcgcatgagccggccgcgtctgccgaagcgagcctggcggagtgcgccggcgaatctggcggccatgccgccttctggcaggctgtcgagtgggtctatgcccacacgcgcagcgacggccagggcttgcccgaggacctgcggtaccccgaccttacgccagccatcgagcagtgtctggcgagcgaacggcccgaggcgccgatccgcacccagacggcggaagccacgagcagcggcgtgaccgccacgccgtcgctgcggctgcacgatcgcgaaaccggcaaggcgatcctactgcagggtccgatcgagggcgatgccttgctgtcggccatggacatgctcgcggccggcgatcccgccgccacacctactacatcggaaatgcctgccgacgtcgtcggcgacatgcccaggtag

SEQ ID NO: 441865 - DNA, 495 bp, Serratia marcescens
atgtctttcgtcgtcaatgactcctgcctggagtcgctttccgccatcgctgcccaacacgaggactggatcatccagcaagccattgcactgctggagaagcgggttttcaaagcgggtgcgaaactcctcgaccccacggccgtgcgcgactacctgcgcgtgaagctggtcgccgagcccaatgagatattcgccgcggtgttcctggacagcatgcaccaggtgctggcctacgagccgttgttcaggggcacgatcaactcgacttcggtctatccgcgtgtcgtcgtgcagcgtgtgctggagttgaaggccgccgcggtggtcttcgcgcaccagcacccctcgggcatttccgagccgtcgagcgcggatcgcatgctgacccagcaactgcaggccgcgctggcgctcatcgatgtgcgggtactggaccacatcatcgtcggccagggtgccccgttctcctttgcggagtccggcctgctgtaa

SEQ ID NO: 441866 - DNA, 447 bp, Serratia marcescens
atgccagcagcttttacccggttcgcaccaggctggcgaacccttggcctggccgtggcgctgccgacgtctctggcggtgttcagcccggccaccttcgccgccgacgtggtggtcgtcaccgacagccgccacccggtcaagaccatgggcggcgagcgactgatcgagttgggcgaaacgccccggatcgaggccgagctttccgcgaatcttccagccgaccctgagcgggcagcagccatcgtccggcaacgcctgaagcaaggcggcaccgatcttcagcgccgcatcggcaccgcctaccagggcgtcaccgacgcatggagtttgggtgtcacgaccatcccggccgtcgtggtggatcaacgctttgtggtctatggcgagccggacgtggcccgggccgtcgcgcgcatcgagcaacaccggaggacgcagccgtga

SEQ ID NO: 441867 - DNA, 360 bp, Serratia marcescens; identical to SEQ ID NO: 324107

SEQ ID NO: 441868 - DNA, 366 bp, Serratia marcescens
atgaacaccacgacccgcatcagcaccgcagaacgcctcggccgcacctttggccgcggatggcgcgcctacgcgcgcggcgaacgtcgggcgtcgaactggttggtgtccaagggggtgccggcggccgttgccaccgcgctcgtgtgggtggtcaagctgtctgtggtgggattgctgctctacgttgctttttggttcgcactcgtgttgttgggcgtcgtggcggcggcgtgggctgctgctgccaatacctctgacgaggacgagtggcctttcaccgatctcacagaactgcgcaagacaccgggctacgatcccaatctgtacaacgatacgtcgcacgagttgtacaccgacgactga

SEQ ID NO: 441869 - DNA, 828 bp, Serratia marcescens
atgcgtagattatgtttttcattatctgttatcggagtgattacctttatcactggattagcgatatattttaataaagtagataatgtaaccaataaaaaagcatacctcacgtttgttgatgatgatacgcgtgtagagacatatacatactggaatcgcttagctaatgaaatgggcgtcaagatcactctggcagtcgtcccaaactgggtaaatgggaattatccaccagggaagccagcaatgacgctgacccaattacgcgaaatgtatgatgccggtcatgaccttgtttctcacgggtacgatacgctgacggtacaagagcatttagatgatccaaaagtcctttatacgcaattgcacgatgcccgccagtggctcattgataatgggttcacgcgcaatcaaggctatgacacctttgtatggccgcaagggttgagtggtgatgcaggttctcaagcaagagcgaaagaagaggtaaggaaatattataagtttgctatcaatgctttcacaaaagaaaaacacttaacgcctggtcattttgatctatacaacataccgagagcgacttcagatggtcaacgaagcctgcggctgatgaagtggatgcatgacgcgatagaagatggcggttggatgattgtccttagccactcatggcatgaaaaagactatgacaatggagactatcaggtatgggcctcacgttaccgtgatctcatcaagtatgcacgggcgaacgatgtggagatcatcactctatcggaggggttaaaaatctggtgtaatgaaaattgcaacaagattaaaaattga

SEQ ID NO: 441870 - DNA, 1956 bp, Serratia marcescens
atgtcttctaatgtacgggcctttagacatgacatcaacgggctgagagcctgggctgtcattgctgttgttctgttccatttcggtattcctggtttttctggcggcttcattggtgtagatgttttctttgtcatatctggcttcttgatgacgcaaatcatcgtgaccggacttgagcggggtgatttttcagtttggaagttctatctagcaagggcaaggcgcatcattcctgccctgctggctctatgcctggcgttgcttttcctgggctggttctggctacctactcctgattatattcaactatccaaacatgtatttacggccatcctattcatttctaacattaagttttggaaagaagcaggctatttcgacactgcttctcatgagaagtggcttttgcatacatggtcactttctgtggaatggcagttttatatcatccttccaatcgctcttttattcgcatggaagttttttggtaagaactgcttaaaaatcatcctgatactcgggttagcgctttcttttgcattctctgcttatctagccaatgtcgacccttccgcagacttctttcttataccaacgcgtgcttgggaaatgctggctggcggtgtggtttggtggctgactaggggaaagtcgctcacaaattccgcgagcaaaattactgaaattgccggtttcctatgcatcatagcttcgatcgcattttttgatgctggaatgctttggcctagctattatgctgcactccctgttatcggcgcgatgctggtacttgcagcagcacgacaaaaatcaattttcacgtctaatatttttgctgagcgcattggcacatcatcctactcgatttatctttggcactggccgatcgtagtgttactgatctacacagatgcgataagcagccctggatggatttccgtcgggttagttgctagcctgttactcggagagttgtcgcttcgcgttatagagaacccagcaaggaagattcttgcaaggcaggcaccatggacttcagtattctcaattggagcgaccacggcagtagtaggcatgctttcagttgccgcattcaccatgcgattcccatcaaggctaccagttcaggtagatatcgttgccaatgagagcactaataaactcattaaccgtgattcttgttttgccaagtctggttatagttctccatcttgtatatatggaggaaaaaacattaaggtaattgtgcttggtgacagccatggtgatgcaatgatttcagccgttgcttctgcgcttcctaataaggatgatggtttgcttgacattacttatgcaggctgtccaacgatctatggagctcaaatagtacctggagagctggacaaaaacattcgatgtaaggagtttaacctgtgggccaaagaaaagttggcaacccttgataaaagcattcccgtggtgatcattaaccgcacaagctcatttgtgtatggacaacaagtggctgggtctaaacttaataagccttcagtttactttacgaaaattcatgaaagtcccgacaatgaatttcttgatgaattcaaaacagccatgataaaaacaacctgtgacattgccaataacaggagagtttttatagttcgacctatacctgaaatgcttgaggatgtgcctaaaaaagcatctagagccattagctttggaatgagacagcctgacatttcaattacagaatctgattacatgcaaagacattcttttgtatggagcattcaggacgaatccgccaatcaatgtggtgttagaattctaaatccgcttccttatatgtgtaaagatggcgaatgctctggctaccataatggacggccaatttactatgacgataatcaccttagcgaatacggaaataaaattctgactaacatgttcaaaaccatattctag

SEQ ID NO: 441871 - DNA, 957 bp, Serratia marcescens
atgagaagacgcactatttatcattgtctggccctactggtcattctgtttagcatgcagcctgtttatgccgcctgtacttccagctcaagctcaagttcattcggtaccattagttcctttacgctggccagcagcccacccacactcgaatccggcagcggttttgtctgctcagggagcttgctatcgctgctcagtaccaatacggtcacggcacaaatagcctcaacaactaacgccagcggcaccaccccgagattatacaatgcacagagtggtagctatgttccttatacgctgtgtaaggactccggttgcagcagcacctacaatattggcgacagcataggctggagttcaaccaccttaatcgggctgttaggattatttaacgccagtgacggttcgctccctatctatctacgtacggctagcggagtgaacgtcccggcaggaacctatatcgatacaataactcttaattggacctatcatatctgttttatcggtgtcgccggcttgtgcatttatactgacggcaccggcacatcaaccattaatgtgacattgatagtcagcaatgattgttatatcgataacgcaccgaatgttaattttggcacggccgcactgccaagcgagttccagactatcagtagtgcattaagcgtgcgctgcaccctcaacgccacctatagcgtcaatctggccagtactaatccaatagtcaatagttggcggcaaatgcaagcaagcgtcggaggcaataattatcaattgcaatatcaattgtataaaccggacggtagtctatggagtgacaataataactacactgccataggcagtggagcctcgcagtcaatcaactacaccgcaacaattaaccccgcacagcccaaccaacctgctgggtcttattcagaagtcgtgacagtaaccgtcacttactga

SEQ ID NO: 441872 - DNA, 2442 bp, Serratia marcescens
atgagaaaaacagcaattccttataaaagaaatcgcagtgggctctggatgttgaataccatcacactggcactcctgtcctccagtgtcaacgcccaggaatatacagatttgccagcggcaccgagaatgcagccggcggtcaacgaggcaacttattatttgcgcattgttgttaatggtcaaagcgaccagcaagccgtccccgttatttttcgacaaggacactatgctgttgaagccggcacattggctcgcaaccacataaaaatcaatgagaaacagacagggctgattgatgttgaccgaatccccggagtgaaaaccgaatacgattcggccaaccaacagttgaaattgacagtccccgatagctggctgcctctgcaagccgtcagtgacaataatttgttcccttatacaccggcccaaagcagcccggggttactgtttaactatgatgcctattatctcgatcctaaccaaggcgccagtacgttaacgacatggttggagcaacgcttcttcaacgactatggcatgttgtcgaatacgggaacctaccgctctgtactgagcggcgagcataatgaaacaggcaccaaagagggttacatccgttacgatacctactggcgttacagcaatgaaaagcaaatggtcagttaccaactgggtgactttgtcagcaattcgttaacctggagcaattctgcccgcatgggcgggctacgaatcggcagaaacttcggcgtgcgtccagacctggtcacttatccactcatgcaatacaccggttcagccgccgtaccgagtacggtggatctgttcattaacggctacaaaagcagcagcaactcacttaattctgggccatttacccttactaacgtaccttacatcaatggggctggtgaggcgacggttgtcacaaccgatgcgctgggacggcaagtgtctaccagcgtccccttttatgtctccaacattttgttgcggcagggcctgagtgatttcgacatttctttgggagccatacgcaaaaattacggtatcgacaatgctgattattccaacgcagctttcagcggtatttaccgttatggtctgaataattctctcaccttgtcttcccataccgaagctattgacggcttaacattggcaggtcttggcagcgatatcgccgtaggccgctgggggacgtttagtaactcctacagtcaaagttatacgaacaaaagcaaagacttgggaaataaccaatccatagacaccgggagtggcaaccaatacactctcggttattcttattattcaaacctgttcagtatctctgcgcaacatgcccaacgtagccatcaataccaagacctgacgtcttataccagcaatgggcaactcagcaaacaatcggatcaggtgactttcagtaccgcgccatttggtcaaggcaatggcacattaggattgggttatttcgatattcgagcttatgacagtacgcgaacccgcctggccaacctttcctacagtcgttccctgtggggcagcagcagtttgtatctttctctaaataaaaccgttggtgaacatgggtatagtgcacagatgcagcttatcgtgccgctggactcaaatattaccgctaccggcagcgtccaacgcgacaccaatggtgattactctgaacgtttgaccgtgagcaggtcggcccctaccgatggcggaatggggtggaacgttgcttatgccggcggccacagccaataccggcaagccgatgcaacctggaaaacacagtatgcaaccgtacaaggtggggtttatggcggttcgggacaatataatcgctgggctgacctcagcggttcattgatttatatggatagcgacctcttcgctacgaacaagatcaatgacgcatttatcatcgtcagcactgataattacgcaaaaatcccggttaaatatgaaaaccaattagttggcgaaaccaataaaaacggtcacgtcttggttccatgggtcagctcatattatcccgccaaagtcgaaatcaacacgctcgatttgccggttgatgtagaaacgccaaaggtggagcaacgcatagccgtacgtgaaggcagcggtacgctcgtcaccttcccggtaaaaaaagtgcaagcggccagcattactttggtcgatcttcgaggcacgccattgccggttggaactcaagtaacagagctgggctcggggcaaaataccgtcgttggttacggtggtcaggcctatttcagcaacctacaacgccaaaatgaaatccggatacagctgccatcaaacgattcctgccaattgagtttcaagctgccggaaagcaacggcatcgcgcaaataggtcctttgacctgccccattaacttaccaacctctttggagccacaaggatga

SEQ ID NO: 441873 - DNA, 780 bp, Serratia marcescens
atgaaaacattcctcttttgcatcttttattcgttgctggcattcagtatgcctgccttggcggccagctcagttttagtctggccgatttatcaaattattgaatcggatcaaaatgcatccgcactttggttggagaaccgcggagctaaaagcgtcaatctacaaatacgcgttctaacctggaagcagcagaatagtcaggagcgttacgctgaccaaaatgacgtggtcgccagccccccattcgcaaccgtcgcagccgggcagcgtcaacttatccgactgactcgcctaaaacctgtccctgccggccgtgaacaagcctaccgaatcattatcgacgaaattccagcagccgacccattaccgcagggcaaccgtaccgggttacagttgcaaatgcgctacctgttaccgttattcctcgatggggatggagtctggaccaatgagcgtaacgataaaaagcgcgatgccgccaccatgagtttgccgcaactcagctggaaaatggtatcggtcaatggcaagccttatctcaatattcgtaatcaaggtgccgtacacgcccgtttgagcaacgtattctgggcgcacaacaacactcctgccaacgcagcgatcaccctgtcacctggattcttgggttatgttctccccggtcaagaaatgcaatggccgttgccaggaggaaaagcagccccaaccaacaacctccaactctattcacaactgtccgacaacaaaccagccgtcttgatcaaacacgcagaataa

SEQ ID NO: 441874 - DNA, 537 bp, Serratia marcescens
atggcatatcgccgccacggcatctggatacgtatggcttttttattgcccttatccttttcagtaatagcaagcaccgtaaatgataccttcttagtctcagccgtaatcgctggcggttgcgcctttggtagtggcagcggcggcggtaacaccaatttcggtactatcaactttggagaaagagccgacgttagcaccaatgtcgacgtcacgagtaccagtggagcaggctcgttgatcgtaacttgtactcccggaacggctatcactatcgcgcttgattatggacttaacggtggcagtagcagcaaccgctatctcatcaattcacaaggtacgcgtacactcgcctaccagctttacaaagactctgggtatagccaggtatggggcacaggctcgctggccaacgccatcgctacgtttcctgccactacacaaacctacacgatttatgcccgactgttcgccacaagcaatctccctcctgcgggaacctataccgataccgtcacagtcacgttgacctactaa

SEQ ID NO: 441875 - DNA, 555 bp, Serratia marcescens
atgaatctgaaacgcaagttactcctgcctgtaatgggtgccgtcatggcggttgcagtagttcccactacacaagccgccggcacattaaccggtcagattggtgtacaactggttatcggtgcaggttgtacggtggcaaacggcaatacaaacggtggcaccaataattgggggaatctggattttggtacctactctaatttaaccagcattattgacggcaccgtcgtcggcagcgatgggacgaacgccgttaccgtcacctgcagcaccggcttgtcaccgacattatctctgaatggaggattgtacggcagcggtaacactcgcagcgtatcttcaaatggcggtacgaccctgatcccttaccgtctctactctgacagtgctcgtaccaatatcattgatgtcaatacgccaattactctcgcgtctaatggttcgccgcaaaatatccctatctacggccgtatcgtccctgctgaccaaagcaataccgctccggcggcgggcacctatgtagataccgtagtcgccaccctggcctggtag

SEQ ID NO: 441876 - DNA, 615 bp, Serratia marcescens
atgaaaaaaacggtcattctcgaaccgcaacagtttacttgcatggcgataaaatggttattaaattctgaaggtttaaaaccctctggaatattaagtcgatatccggcattgcaaaccatgctggatgatatgcatatagatataatcattatggaaatctatgacgaccatttctcccccatagacggaataaactttatcaggagaaacaaacaccactggaaaacgacacagttaataatactgaccagcatagaaaactcttacttagttaaaatgctggtaaagctcaagccgacagccatcatttcgaagcaagaagagttaaaagagattcagttcgcttttcatagaacactggacagtggttgttacttaagccccaaaataattagcatcatcaccaataataaaatcaaatcattaacctatagagagctgcatatattttcaatgctaataaatgatgacacgcccacaaaaatatcccaaaaattaggtataagctataaaacggttcaagtgcataagcgcagcctaatgaagaagattggtgtcgatagtgcattaggattatcccaagaaattaacagaagcaagtttatttactag

SEQ ID NO: 441877 - DNA, 942 bp, Serratia marcescens
atgcaagcacaggcggcggttttcgatgatttgaacgatctgcgctatttcgctctggtggtggagcatggcggtttttccgccgcggaacgggcgaccaatatccccaaatctcgtttaagcgccagaataaaagtgctggaacagcgcatggacgtacgtttgctgcaaaggaccacccgtcatgtttcactgacggatgtgggcacgcaattttacgcccactgccgcggattgctggccgaggctcttgcggcgcaagaaacgatagatatggccagtggaacaccgcgcgggctggtacgcatcagttgcccggttctggccactcaggtttatatcgcgccctatttaccacagtttatggctcgctacccgcaagtgtccgtacaggtcctcgcccaggatcgacctgtcgatttgcgaagcgaaaatatcgatattgcgttacgacttaggcaaccgacgcatcaggaccccgatctgatttccaaacctctcggtatcagccgccgcattctggtcgccagtccagagtacctcgctcgacatacgccgatcgttaccccagaggatctgctgcagcatgcaaccttgcattatgacgccaatgccacttcaccaaattgggtgataaagcacgtgattagcggcgaagaaaagaccatcgtgcatgaacctatcctgataagcagcgattatgaaactctgttgcaagcggcgattcagaatctcggtgtggcgatgttgccggatgtcgcctgcctgaaagccttggcgaaacatgaactgtgcgtggtgttgtcggattggggagcggtagagttgctatttcatctggcttttctgactcgacgcggcatgttgccttccgtgcgggcactgatcgattttctgtcgggaagcctgccgctggtcgcagtacataaggtcataccatag

SEQ ID NO: 441878 - DNA, 945 bp, Serratia marcescens
atgcaagcaatcgcggttgaatcgttcggggcaacgccgacgttaatgacagcctctatcccccagccagcgcctgggcaactgctggtcaagctggaggccagcggtgtcaatcctatcgattggcggatcgcgcagggcatgcttaaagatcgtgtgccccatgtttttcctctgattatgggcgtggacggcgttggcacagtgatagccgtcggcgccgacgttcagcgttttcaggttggagatcgggtggtaggccaattcttgtttggtcaggttggcaacggcagccatgccgaatatgccgtgctgaatgaaaatgccacgttagcgctgtgtccaggggcggtagaggtaatccaggccgctgcgttgcctacggccggcattacggcgctgcagctcagccagcggcttgatgtcgcgccgggcgggaccgttctgattatcggggcaaccggcggtgtcggcacatttctgacgcagtgggcagtgatgaaaggattgcgtgtcatcgccactgccaatcaggatgcgcagacgcatatgcgggcactgggggcggtagagacgcttgattatcatcagacgtcaatcgagacatggctgacgactcactatccgcaaggcgttgacgcaatggtcgatctggttagtgacggcgctgattttgcacgcaacgccgcccatgttcgccgggggggcgttgcgttgagtagcgtgtgggcagcgcaagaggagcacctcgcggcatgtgagattcgcggcggaaatttcgacgtgcggaccaccgccgaagatctcgagatcgtcttgacggcagtcgcctcaggcaagctcaaggtcaccatcgatcgagtgattcctttggcgcaaggggccgaggcgctttcagccaaccgttctggcggtgcccgcggaaaaacgattttggtgcgttag

SEQ ID NO: 441879 - DNA, 1107 bp, Serratia marcescens
atgaaaattatcgctgcagtggctgaacggccaaaagaagcgtttatcgtccggccgttggaactgggaacgccgcgtgacaatgagttgttggtgaaaattgtcgctacaggcatttgccataccgatctggtggtgcgcgaccaaattttgccggtgccgatgccggtcgtactggggcatgaaggtgccggtatcgtcgagcgggtaggaaaaaacgtcagccacctgaaacctggcgacaaggtgattctttcggtagggtactgcggccattgcgcgccatgcgctaccggcacaccggtctattgtcacgatcatcaggccatcaactgggcgggcagccgtctggatgggtcggtgagcctgcatgacggcgcgcgcgcggtgcatagtcacttcttcgggcagtcatcgttcgccaactatgcggtcgtcaatcaaagcagcgccgttaaggtttccgatgatgcgccgctggaagcgcttggtccgtttgcctgcggcattatgaccggcgccggtgcggtgatgaacagcctgaggccggagcccggtgcatcgatcgccatcttcggcatcggcgcggtggggatcgccgctgtcgccgccgcgcgcgtcatgggctgcaccaccattattgcagtggatgtgcaagagggacgtctcgcgctcgccgagcgtgtgggcgctacgcatatcgtcaacagccgggagcaagatccgctcgaagccattcggcaaatcacgcagggagaaggagtgcgccatgcggtcgaatgctcggggatcgccagtgtcatgaaagacgccgtgagttcattgcaggaaatcggatcttgcgtgttgacgggcgtaccagccctcggtacggaattgccactggatatcctgcatttgctgcgtggtcgcatggtacgcggcagcatcatgggggatgctgccccaagcgtctttttaccgaaactggtcgatctgttcctggcaggacattttccggttgacgaaatgtatcgcttctatccgctggaagagatcaatcaggcgattgccgatacccacgctggcaccaccatcaaagcgattctaaaaatgccgcacgcgtaa

SEQ ID NO: 441880 - DNA, 1521 bp, Serratia marcescens
atgactaaaacatcgcaacgttacgatcatatcgttatcggcgccggctcttccggctgcgtattaacccggcgtctgctggatgctggacgcagcgtattgttgttggaggcggggccgaacgacgacaaaccggagattcacgatccgctgggctccatcgcgctgtggaattcagatgtcgactgggcgtttaccaccgaaccgcagatatacgccaatggccagcgtctgccgtttccacgtggaaaaacgctgggcggcagcagcgccttcaatggcatgatttatgtacgcggcgcccagcaagatttcgacacctgggcttacctcggcaatgtggggtgggattatcaaagcgtgttgccgcatttcaaacggtttgaacagttcgccgacgacaatgatgaagtgcatggcgtcgccggtgaattgcccgtcacgctgaatccgcgccctacgccggtgactctggcgttcttggcggccgcgcagacggcgggtgtgccgctgaatcgcaattataatgatggcggtaacatgtggggggcttatcacacttggatcacggtcaaaaacaacaggaggatgagcgcatgggtggccttcctggaagagtaccgccaccatcccggcttgaccgtcgtcaccgatgcgcatgtcaccggtattgaattcgacggcgaatgtgcagtcggggtgcgctatgttcagcagggcgaagttcacctggctcttgcggacagcgatattgtgctgagcgccggttcactgtgtactccgcagttgttgatgctatcgggcattgggccggcggagcatttgcatgagatggggctccgcgtgcgcgtcgatttgcccggcgtcgggcaaaatttgcaggatcacgtgaatgtgccgctggtttggcaatcgccgcagccggttccggtttcgggcgcgcagggactggaggcgacgctgttctggaaaagccatccggagatgatcgtcccggatatgcaacctatcttaatcactttcccgtatcccggcgcagacgcgcctgaacatggtttcactatcgtgccgaccttgctgcacccttatagtcgcggcgtagtgaaattgcgctccgccgatccttttgcgccgccgtctatcgatccctgttttttgaaggatccgcgcgatctcgagctgttggtcaaacagatcgcctttattcgcgacattgtcgaacgtccagaaatggatgattggcgtttacgggagacagcgccgggtgctgactgtgtctcagacgaagcggttgcggaattcgttcgccgcaatgccgtcagcgatcatcatcaggtgggcaccgccaagatgggcgtcgatgcgatggcggtggtcgatcccgaactgcgggtttatggcgtgcgtaatttgcgcgtggccgacggctctatcatgccgttgatcgtcagcggcaacaccaatgcggcttgcatcatgatcggcgaaaaagctgcctctctgattctggatggtgagtga

SEQ ID NO: 441881 - DNA, 780 bp, Serratia marcescens
atgaaccgacaggcgccgctcttggggcatcggctgcagggccgtggcgatcgcggcgtcatcgtgctgcatgggtggttcggcgatcataccgtctatgaaccgatgatggcctaccttgacgcagcttctttcacctatgcctttgctgatttccggggctacggggcgtcgcgagagcagaccggcacctacaacacggacgaaatggttggcgacatagtggcgctggccgatgcgctgaattggcggagtttcgatgtcgttggtcactcgatgggtggaaaaatcgcgcaactgatcgctgcgcgtcatcccgaacgcgtgcgtagtgctatcggattaaccccggtgccggccagtggattggaggttgacgccgaggcctggcgtcttttcgaacgggcgacaaccgatgacgagcaccgcagaatgctggttgatttttcaaccggcggtcggttgccgccgtgctgggtcgatatgatcgtgcagcgttcgcgggcggcgtgcgatcaaacggtgttcgctcactatctccaaagttgggcgaaggataaccgctcggcggaaactcacggttgcccagtacctttactgttgttgatcgggcaacacgaccctgcacagacgcggcccatcatggaacacacctgtctggcttggttcgataacgtgcaactcgttgtactggagggcagcgggcattaccccatgcaggaaacgccagtctatctgacccaggtgatcgagcgctatttgagccatcaggtcgtctag

SEQ ID NO: 441882 - DNA, 582 bp, Serratia marcescens
atgcaaactgaccattcattagcgccagacgttgacgacagcgttaaacctatccacggactgcatcatttcgcctggcgctgtcgtaacgcagaggagacgcgtcgtttttatgaagatctgctcggattgccgttggtgcatgtcatcaaaaacgatcatgttcccagtaccggcgaatattgcccctatgtgcatatcttttttcgcatgagcgacggttcacacatcgctttctttgatcttggtgacgacaccaccgcgttgccgagccctaatacgccagcctgggtcaatcacattgcgctgcgcgtcgagagccgggtggcgctggacgccatgcaccgacgcctggaaaaatctggcgtaggagtattgggagtgactgatcacgatggttatcttgagtcgatttacttttttgatcccaacggcttccgccttgagttgacgactgaggtggcgcaacaggcgacgatcgacgcgtttgcacgcgatgcccacggtgaactggcaaaatggaatgcggagcgatctatccggacagcaaaacaggagcataaccatgaccgtcaacgttaa

SEQ ID NO: 441883 - DNA, 663 bp, Serratia marcescens
atgttagcggggaccgcgccaatcgaagccacggatacggcgtttgacgtcgattttgaagcggagatcgcggtgatcacgacggatgtgccattgggcgccacgttgcagcaggcgattgacagcatcgccttggttgttttattgaatgacgtttctttacgcggtttgatccccagtgagttggcgcgcggatttggtttctatcaaagcaagccagcaaccagctttgcgcctgttgcggtcacgccggcggcgttaggcgaggcgtggcgaggcgagatgctgcatttgccggtgcgcatcgaactgaatggcaaatggttcggttcacctgatgcgggggaggacacggtgtttaattttgggcaaatcatcgttcatctcgcgcagacgcgaacgctgtccgccggcagcattatcggcgcaggaaccatcagcaacgccgatccggccgtaggctgcgcctgcgtgaccgaagcacgcatccgtcagtcactggccggcatgagtgaactgcaaccctatctgtcgcacggcgacctgctgagaatcgaagtgctggatctacacggatattcgccattcggcgctatatgccagccagtgataattcgggataaagatgagacaaactccccccacgagatcgccattgtttga

SEQ ID NO: 441884 - DNA, 621 bp, Serratia marcescens
gtgttttctaaaggctttgacattgcttatggaaacactccgtttggtgttgatgaggcaaatgcgctgatgagaaacgctttgccttttgcggaaacaattaaatttagacgtttggagcagcgtcatccgcactgtttagaattattgctgctaacggggctgagaacttacgtgttaggttccgactgctctggcttattgccacctctgccgccaatcacgccacggccaccggagccgctttcttgcgcggtgacgtggcaaaacagcggcgagattgattttggcgtgatgaccgcgggtgaaaataaagtgaagggcattgccgccaaacttgcctgccagggcgggacttcgggaaaagcccgcctcagatttaccgatgtcaatcaggtgggtgcaaatacggtaacgctgcgtaagagcggcacgagtgatgaaataaaagcgaagttgtcgattggcgagcccgattcgtctaatgagcaggtgattgatgtatcacccggttttaatgcgacctatgcgtttgttgctaaattggacggcacgcagctgagcggtgtagatgctggcacattttctggcaatgcgctgattgtgtttgaagttatttaa

SEQ ID NO: 441885 - DNA, 153 bp, Serratia marcescens
atgcatatcatttccagggaaccgttcaataacgcaacgaagcaataccctaatgaagccgctgctctcgaggccatttataaaacgttgcgacgcggcgagttccgcacgccggacgagttaaaagcgcttttccttcgctcgatcgtatga

SEQ ID NO: 441886 - DNA, 336 bp, Serratia marcescens
atgcgatttaccaccaaactctctgcattgatcactctgttggtcgcgctggcgatgtttttgatgctgatgggatgctcatacagcttcttttacgttacccaggatcgccaagagcgtcgctttgattcgctggtcacctccctcgatcaggccatgttgcgcgagtcgccgcgcgatcaggagaaatggttgccgatcgtcatgcgcccgctcggcatcgtgtcgatccgcgtagaggccggcaccagtcaactcctcaattataaattgccgacgctgaaaaaagagccctgggatgcgctgaacggctatcgtcaggtctcgcggccatag

SEQ ID NO: 441887 - DNA, 1209 bp, Serratia marcescens
atggcgcttaccgatgtaaaagtaagaagtgctaagccggcggataaggcctacaagcttaccgatggcgaagggatgcatttgatggttcatcccaacggttcccggtattggcgtttgcaatatcgtttcgacggcaagcaaaagatgctggcattgggcatctatccgtcagtgtcgctttctggggcgcggcaacgaagagatgaagcgaaacggcatatcgccaacggtattgatcccagcgcacagcgcaaggttgaaaaggtagcgcgcaaggtcacggtcgaaaacacttttaaagccattacgctggagtggcatgcctataagcgccaaggttggtcgaaggggtatgctgacgatctgatggaggccttcgagaacgacatttttcctgatatcggcaaacgcccgatcgcagagattaaacccttggagatcctcagctcactgcgcaagttggaaaaaagaggtgtactggataagctgcgaaaaatccgccaggcctgcaatcaggtattccgctatgccatcgttaccggcagagctgaaataaatcctgctgccgagttggccagcgcgctaacgccgccaaaatcgacccattacccccatttgcttgccgatcagcttcccgcctttttacaggcgctggctgcctatagcggcagcccgataacccggctagctacgcgtattttgatgttaaccggagttcgcactattgaactgcgtcaggcggaatggcgggagttcgacttcgaacggcgaatctgggaaatcccggtgagcagaatgaaaatgcggcggccacatttagtgcctttgtcagaacaagttcttgctgcgctgcgagagatccaaacgatgaccgggcgttataatctcgttttccccggccgtaatgacattactaagccgatgagcgaagcgagcatcaatcaggtgctaaaacgtattggctatcatggcaaagcaactgggcacgggttccggcatacgatgagcactatcttgcatgagcaaggctatgacactgcctggatcgagctgcaactggcgcacgtggataagaacactattcgcggtacttataaccatgcgcagtatctggagcaacgccgcgaaatgttgcagtggtatggggattacctggatgagttaatgatgcagggtacagctcaggcaggtcgtaaaagggcatag

SEQ ID NO: 441888 - DNA, 648 bp, Serratia marcescens
atgacagcatttcgtcgcttatgccacttggaacatgatactgataaatatgatgatttagtggttttcattgactgcaatccaagtttctctatttacacacagatggcactcctttccgcggataggcttgtagtccctatgatggctgactacagctcactcgaaggcatgaagggtatcatgatgctgttatacgggcattatccttcctccgcggctcaaacgtatgctgaaaaatttgtcacgttccatagccaagcagctgataacaagctagaactgccaaaactggaccgattcattttcaacaactacacatcgaataatggtgtagccacagcttatgactcaatcaaggaagcactgtgtaacttcgcatttgagcaatacgttcgttttcctaacttattcactcctcgcaatcaagcaattaaaatacaaagaatctgggagcaagaatttctctcagaggtaaaagacttccacacctcaggtaaagtatctgcaagcttaggaatccctttattcaaactcccagcccagactcactatgaaatgcctaatggggaaatcatcaatgtagttcgggagagataccgcgaagcccgtgagcatatcgatgagctcgttggtaaattttgctaa

SEQ ID NO: 441889 - DNA, 459 bp, Serratia marcescens
gtggataaattcagcgaactgaaagcggcggcggacaaatattctctgacgctcagtgctcacagagagaacccaaaagacgttgatgcagttgatgcgtgggatgaggctgatggagagttttccgccctcataaacaataacgagatggaaatcatcatcaacctgctggcagagctggaagcgaaggataagcgcatcgccgagctggaagagcgggaaaatcgcgtggtggcgctggcaggtggcaacgctgagctgtgggaaacgatggcggcgagacttgaagcggcagaggccaggctggctacgccgattaaaatcgtgaactacgacgagttcttcatctgccatgtgtccggcgccagtgatgactactgcaagggctgggttgatgggcgtaatgccgctgctcgtgatgttgggaaagcgggattcaccgtagcggaggatgcatga

SEQ ID NO: 441890 - DNA, 219 bp, Serratia marcescens
atgagcactgagaagctgagcgaactgactgtgggcgcattctgcatctacacaagcaaattgctgaagcgcgggtgccgcgtcgtggcattcgataacggaagcgttgtgattaaaaacctcggcggcggttaccacggcgtcccagcaaaatcactggcggcaacaacggaagagcacgcgcgccgcacagaatatatgatcgttatgtggaagtga

SEQ ID NO: 441891 - DNA, 201 bp, Serratia marcescens
atgttcggcctatttcttctcgtctgttacacctatcagccttgtgacttcgtcccgcagggctgggtatacccagaccgttcaaattgtcttgctgatatccaccagcaagggttgccacctcagtatgaatgtttgccggttgatggagttatcccggcacaacgggccgaggcccaggagaaaaattatgagcactga

SEQ ID NO: 441892 - DNA, 612 bp, Serratia marcescens
atgcaaatcacgaaagagcaagttaaggcctggcacgcatgcaccgacggctaccgctggttcctcgaaaaattcccgcagggtggcgcttacgctgctgtgcaccaagccctaaccgatgataaacgcttcgacgatgcacgctggctagttagccagatgtacaaaacgcacctgaacagcgctgagttcatcaaggccgagactgctgccaccgacaagatggttaccgacctcactagcatggagcaccctgcggatcaggtcgatggggagaacagctccggcgactacgcccgaatcggcagctccggcaacgacgcccaaatcggcagctccggcgacgacgcccgaatcggcagctccggcgacgacgcccgaatcggcagctccggcaactacgcccgaatcgatgccacagggaaaaatgctgttgtcgcagcagctggatctgttcgccgcatcgtgcttggcgaagacggttgcgctgtagttccttaccacgacggcacccgcacccgatttgctattgcctatgttggcgagaacgacattaaagccaatacgccatacaccgtgaatgacaacggcgaatttatcgaagtcgaatga

SEQ ID NO: 441893 - DNA, 1071 bp, Serratia marcescens
atggtcgccaaagatacgcatatcgccgctggtgctggtttgcccgtcattcaccagcgtcgtcgtcgccaacgtggcgttgccgtccgcctgcacgacagcgcccggcgtaatgtgcaatcccttggcgctgacattgaggtcacctttgctgtgcgtggtgccgttaagcaccaggttaccgttaacgctcagcgtaatatcccgctgtttgctggtgaggtctttcaggttcacccccaccccatcctcattggccaccaggcgaattttgttggcgtacatgccgcccagcgctttggtatccacggccagttggggcttagcgccttcaccggcgatcggtttgatgctgccgtctttgaagctaatgcggttggcgccctgagtcagcgacagattttgtgcgttgattttgccgttcagctcggtggcgcggctgatgatatcgacatagtcggcgccgctgccgtccagccctttgccgccgatggtgacgccgccttttttcacttccagcgcttccagcgcgccctgcttgtcgaactgcggtttgccggtggtcagcgtcacgcccggcgcattgataaagccgcagccgtcgcaggtgatgccattcgggttggcgatcatcacgttggccttgttgccgaacacctcaagcttgccctgaagctcggaacgactgccgccgatcacctcattgatgatcaactccgccggctttcccttcaggtaggtgttgccctgcgcgctgtagatctccacacccagctgcgttttgccgccgtgagtggcgttattcaacaccgcgccctgtggcccaacgttgaaatctttataggtgttgtgggagatacccgcaccgttcggcgtggcaatattcaccaccggcacgtcgcccggcttgataaccacctgcgtattgccgttggcggcggtaatgccggcggcgaacgccgggtgcaacggctggaaagccgtcaggtagatcagcaaatagctggcgccgcgcgccaacggagggttgagcttatccatattcattccttcgaaaggatgttgttttga

SEQ ID NO: 441894 - DNA, 3450 bp, Serratia marcescens
atgcatcgagctatcgatgcctttctcgcttataacgagcgtgagaaggcaattgtagaaccagtcgcacaatggctcaccaaccatagggtgcagacacatttctttgcgcgcgatacgcagtatggggagcctgtcgacgacaccggaaacctggacgatgccgcaacagtgattgcatttctcggtagcgagggctggggtaagaaccacctacggcttgtcgagcgggcgctaaaattgaacaaacccgttttccctgtcctcatcggcgatgccagtcccgatgaccacaacatggcgcaggggttgtttattaattttaaatggctcgacttgcgaatgggagatctagagccgcttgaaaagcttttgccatcgatactcgaggtgtcggaccagtatgatccggacatcaatacggagatcggcgtgctgatctccggccccgacaatcgcagacaggtggcgctcgataggcttattgatcgagccaagagcaagcgcgagccgatctcggccgggttacggaaagagctggcgcgtcgtggatccaacgggccaagattattgtctccaaatgagtcgccttccgactcggatgctgaagcacgcagctggctgcgtgcggccctaatccaatgtgatcccgagagtccgcagacgcgtgatatcgccctgcgtgacataatgccggatgccgagccagcagaattcgcaagattctggagtcttgcggcagcgcaacaagcgaatgcgtcgtatctccccgcccttgctgaaaaggctgcagtggatccgaccactagcgtcagttttgctggtgttgcgatgttgaatccgaattctcccaaagtgtcgccactttttagagccgcgttgcgcaatgatgatcatcggacaactcgcggtgtgctgcgtgccttgcggattgtccacgttcccgaagtcatcagtgatgtctgcttactcgcggctgaccacaaccgggcggaagtgccgatgtacgatgtattctgtgcgctagccacccccggggctgctgccctcgcggcaccactacttgccgaaacgcccggaatcgatgtagtcgttgatcgaatcatcgaagctgcatacgatgcaaaccactcggtcgtgcgcaatttctcatggttcctcgcaacgctcgatgcgacacgctcccatgctatcctgaacgagcgttccagaaacccccaagttcgcgcagtagcgcaacgcttgctggaaggcatggactctgtatccgccatggcagagaaaccctaccatcttccaggcttcgctgccgatacgatcgatgaacagcacgaccagctgggtatacagaccgaggtgcaaacgctcgccgcgatcatgatggcgcgagatgtaacgcccccgctcgcgataggtctgttcggtgaatggggctccggtaagagctttttcatgtcgcagatgcgcaagacagtgaagacgctcgctcaacgtccgcagcagcagggcgcgtcaccgtattgttctagtgtcgttcaaatcactttcaatgcgtggcattacgccgagaccaatttgtgggccagcctggtcagcgctattttcgaaaagcttgccatccacattttcggaggcacgcctactgaacgtcagcaggcccagttgatcgccgaactggcaagtgctaaggcggttacagaagaggttcgtgcggaagagagacgcgccagcgagcagttgaaggaagaggaagcccggctcgacgagctgcgcaagaagagactggccgaggaacagaagctcgcgaagttcaacccgacctacttgatcgacttgctcgaggacagcactctgaaaaaacaggccgaacaggcatttgaacaactggggctgcctgtagtgctcgaccgagttgatgatttcaagcacgctgtggcggacgcaggcaagctatcaagccaaaccgttgcattgctcaaggtgttgtccgccaagggacgcagtccgctgtatctggcgttgttcgtcgcggcgctggcggtgcccgccgctggttatgctttctataactggctctcgcccgacagcaagctgttcacgacgctcggaaccatgttcgcgggcatcgcgacgttcgcgaccgcgggcattgagatcgtccgacgcggcatgaaagaggttaacgtaatcttgaaacccgtcatggaagcaaggaaaaaggctgacgcggaactcgagaagatccggaagaagcctgcggatgccgaactggcactcgcggccaacgtcgaggtgttaaaggtgaaggagcaggatgcgcgacgccgcgtggccgacgctgctgcacgcgtggccgccaccgaagaacgcctgcgcgaactggaggaaagccgcgatctagcccgcttcattgccgaccgccacgattcggcagattatcgcaaacacttgggcctcgtgtccctcgtgcgtcaagatttcgaagcgctttcggagcggattcgggagcacggaacggcggctgatggcgggcgcaaagtcgaacgcatcgtcctgtacatcgacgatttggaccgctgcccggcctcgcaggttgtcaacgtactgcaggccgtgcacctgctgctcgcgtacccgctattcgtcgtcgtggtcggcgtcgattcgcgttggcttactaattcactctccatgcactacaaagaactcggcgcggcgttcaccgaagcgcctgaggcagctgctagcccccagcactatctcgaaaagattttccagattccgtattcgctacgtccgatgagtgcggagggctacggcaagctagtgagagagctcacagcgggcggccagcgcatgcctgtgacgcagctacttaccccgtccggtccggcagacgtgaagccgtctactcccgcatccgccgcgattggatccgcgctcacttctgacgcaaacgtgaccgcaccgcagtcggcactggcaccagaatcagcagcggtcgaggagcgcgcactggtcattcatagctgggaggaatctttcgccgcgagcctttacccgttgatcccctccccacgagctgctaagcgcttggtcaatgtctatcgcgtgctgaaggcgagcgtcggaggtgcccaactgcaggcgtttgagggcactgagacagagccaggccagttccagattccgttgcttttactagccatacagatctgtgatgcctcgacggcgacggcttggttcgctgaccttatggccgagcaggggcagcgtaattccccggaggaggccttcatacgtactgccactgcggacgcccgcaagcggctgatggagcgaatcaagtacatcttcatggaggccggattcccgaaggatgccaccttgctgacgaactggatcccgctagttagccgttttacgttcgagacgcgctctatagtctga

SEQ ID NO: 441895 - DNA, 1740 bp, Serratia marcescens
atgaaactcgtcgttatgcactatctgcgctcgctacgcgagcgtgacgaactggacgctattcttcctgatcttttggctgagagtggtttcgaagttctaactcgtcctcgtcgtggcacacggcaagctggtgtcgacgtagcggcagtcggccccgatcgtgatcgtgatggtagtcgaagtctgttcctattcacgatcaagtccggtgatttgacacgagagcattgggataccggccagcaggccgtgcgtccgtcgctgaatgaggttttggatgactatattccgaaccgcattccgccccattttgcgggtctgcccgtcattatatgcgtttgcatgggcggcgagatgcgtgaggatgttcgggcacagtggagcggttactgtcgggcgaacgagaaagccaacattcactttgccgaatggaatggggatcgtctctcagatctaatccttagcggtatgttgcgtgctgagttaattgatagcgagaatcgagggctattccataaagcgctagcgatgcttgatcagcccgaggtcgcttatcggcatttccgtcacttactcaatgtcattttcactgagacgaagaatcagacagagcgtacgcgtcagctacgcaaggcctacctgtgcctttggatactttttgcctgggctcgcgatgccgataaccttgaggccgcatatcgagcatcagagctagtacttctacgtagctggccttactgtgatatttcccatctgcgcaagggaacgacgcaacacgagcggctagctcattttgatcaagtcttgaagctgcacttcaccatcgctcaccttctacttgtcgagaagattggccctttcgccgacaagcgctatgcgctttcaatggccgtaaactcacgcaacgcagtagatattaacatcgcgctattcgagatgctggggagattgtctcttcatgggctatggctggatgctatgagtggcggggaggaggagtcattcgcgcaagctatgaatgaaagggcggacaaggtgctcaacatagcgattggtatgctgaatgcgaatccggtgcttgctgttcccgttcgtgacgatttcacgatcgaactggctctgtttatgcgtttcgcaactttgcgtggccgcctatctaatgtcgctgactacatccgcagtatgtccgaccatctctgctacggactgagtgctcggcagcattatccgacgcctacgacagaatatcgtgatgtcctcacccatccgagggaccgcagcgatgcatacttcgaagagcatacgcgtgcggggattctttacatcttcgtgcttgcttggctggcaatgattggcgatcaggagcgagcagagcatttgcgccgcacgttgttagagcacgctccacacatgactcaccaaatttggattcccgacggacggacggatgacgttttctgggggggagatcgggaccacggattgtcggtgcctggcctgccactcaacaattcgctagatgcagtttttagcctactgaaccgtgtgatgaaagagcacccgttggatgagcgaataagtgccgttcgaaatcacctgacgccaatttttcttatggcctgccgccactatcgcatgcctgtaccaccacatgtgtggcaaggtcagaagagtgcaagcaccgtttccgatcaagcaacacctaatgctgagatagagaagtcgcaagatgagtag

SEQ ID NO: 441896 - DNA, 1713 bp, Serratia marcescens
atggcaacaaaggagacaccgattaacaaggctgaattggctacgcaactccttactcgcggtttggttcagactgttgcggaccgagggtatcggcgcttagatgatagccattctgcattgcttgagacgcttgcaactatattgaacgctactgatgcgccaccgattgacctttatatcgaagaggcgctgtcggagttggaggggccacgtttcttccttgttcagcattttctatgtgatctgataccccttttgaacgtagatcaggatgtccttcttgccttcatcacgcgtctgcttgatgcaggtggtaatgacctggctgcaggcatcccaagtactgcttttggggagtggactaagaagaacgaagccaggccttccaaggtctacgaagcggcacgtgtcggtgattgcctggctctgcgtcaactattcactgttctcgtaatgaacgccgatatcgaggaaagcctcatttttgcgcaggctaacgagagggaggcgaagcttgccgctctctcggctttggggggcatggagttgggcgaacgctacgatgaggtgcttaatatcctgcaccaaggggcgtccagcaatgacgaagacatcgcattccggtccctcgaagcgggctatcgtgctgctgcacagcgaaaaacactcgcaccagtcggcttggatgaacaacttgaacgggtcgttcagacgaggagtcccctctcgatccacttggcagtggacttgctgtggtgtcaccaggtcagtctcacagaaaaagctatgaacctgtgccttgatgctgctgcggatgttgacccagatagcgcaggaacgatttcacatctcaaccacgcagcatatcagcttgtggatgcagggtatgctgagaaagtaattttcctgcttagcaagttatttgatcgttcaaaaggccgaattacgctgaacgcgttccagagcacgttttacgcgttgaaaaatgctggctctgaggtgctggggagcgctgttgtgtactggctgctgaacgggagcgcgcatacccacaaatgcgtggctagcgaagtttgtggtgtcggaaatgacgatcctcctttctcaatccccgcgtcatctcttccagtggagccatcggaacaactatacctctgtcgcaaggccgtcgggtggttcttcattgatccaatggttgcagtagtcataccgttagcggtgcttcgcggcgggtcgtcagatatcaaaaatgatgtcctcgatctgatctatcaccccttgctcgtgagctatgggggcaagttgaaggactaccttgagcgtaacgccgaaagtattccggaccttgctgaattgctcacacgaaaggtagcacttcagaatgcaatggacggtattgagcgtttagtcgagctgcaccctagtgaaatgcagcgcgagacggcacatgtccaatggcacgagcagatggagcggggcatggatcaagggcaccggaagtctatttttgaggatctcgtcgccaaacaatacatcctgtatggcagatcatcgttgactccaatccacacaatgcaggggaccacacatctcaccgagactgcgatgcattcattttcgatctcgtccgagttgcccatcctcgacattgttgacccagttggactcgagcatatgctcctccaccttaagcttgagctgcgaggatag

SEQ ID NO: 441897 - DNA, 699 bp, Serratia marcescens
atgagtttaagacatcagttagagattttattctctaaatatttaggctcagagattgagagtatcaatatcataaaggatattgatgattcctcagtcaagaatatatcagattacaagttttcagatttaattgaagggtataattcatttatagaactcaatgaactacctatggataggtttgatgttttacaatccgtaagaactataaaatttatatctgatacaaagtcaaatttaatggatttcccaaaatttgttaaatcatttaatttaatcgctaggaagtttgatattcaattcccaggatgggagtacccagaagagtcacaagtagatccggagttaaagatagactcaaatccgtatggtaagtttacgtatcgaatttttaatagaagtcaaactataactggttttggcgcagcgttgggggagttgattaaatcaaaaaccatcaatgatctaagtgacattgatgttctcattaatagattaattttttcatcagatgatttgcttaaactaaataaataccttgacgatgttaagattaaatctaagaaaataggcaatgggcagcgaatattctttaaattattctttaaataccttttggataaagatggagaaacttatttaaatgttagtcagaatttagaaaaggcacataaaagagcattggctgaggtatag

SEQ ID NO: 441898 - DNA, 981 bp, Serratia marcescens
atggaaaataaaataactatagatgatcagtcagtttattatttgtatcaaactgatccgaaaccacagtacactggttacaatattttattgtacagtaaaaaatatgctgatgagaaagaaatagcgcaagttgaaatttttaggaataagtcaaaacaacgtttaggatggcttttccctgtccttgcacttatttcaggtgagcatgactatgctgacaatgaattttttataaagcaagcatatgaagcatacactcatttaaaggggcaagtgctcgatgagaatatttatatatttgtattaaataacacagttagtgatttgcttgaagtaggtaaggaaaaactaggtgttttttcattgtctttttcgaaatatggtatttatccttactttagttctttgactgaatacagtaatagtaatgctctgagcataccaaataaattaaccataaaaaaatgctttaatttggcagaggagaaaaacacttacatccatattttagtgaaaaaaataataacaaaagagaaaaatgagtatgcgagatttatgtttttttatcaagtgtatgaactttcaatggagctgtttttttataaacagcttgaaaaatttaaaagaaataaaaaacgactcgcaacgctaaaggataaacttagtgaattttcctctgagaggaaactcattaatgccatgtatgaaataatgggggataaatatgacattgttctttccaatatttccaagtcaatatttggcgcaattaatgaagagtcatattacgatggtgaaatgaaatccaatatgatttacgatttaagaaatgcattggtacataattactttagatataacttcactgataatttaaaaaatcttagcgattatttagaggtggagatctatgatattttacaatttttatatgacgatgaatatttaagaggggtatttattgatgagtacctgtag

SEQ ID NO: 441899 - DNA, 180 bp, Serratia marcescens
atgttgactgacaccaggctgcgtcaccttaagccgaaggagaaactctataaggttaatggccgtgatggtctttatgtcgcggtgactccagctgaatcgatctcatctcgctacaactattcaataaacagggagcaggtcaacaaaaactcccccccggaattagagcttttctag

SEQ ID NO: 441900 - DNA, 165 bp, Serratia marcescens
atgtttataataaaagtcattgaggagctgctcgcctgggtcgaggaaagtgggttcaatgagaagctcactattgagatgctttcagaaaaaagcggatattcacgcgggcatatccagaaagcctttaaagatgaaacgggggtgatgctgccaacttactga

SEQ ID NO: 441901 - DNA, 726 bp, Serratia marcescens
atggattgttctaacgagttcagacgcagtattttagacgaaataatctgcatcattgaaaaggtgatagatactcagagccatgtttcaattagagcgttatccatcaagtcaggatattccattgggcatttgcagcggatgttctatttgtatcaagggatgaagatagggacttacatccgaaaacgcaggctgagccgctcgacgttgctgttgaaacgtacggatatgaagatctatgaaattgccttactgtctggatttagttctcaacaatcatttagccgcgccttttcaaatcaattcggttgtccgccgcgaacatttagaaccatgagccactggccttttgtcaattatcaaccgattattgctttcgacaaagagccctttcccagcagtatcgtgtacttgaatttgcacgagtattacgagaaaaaaaggcaggtgcaactgttgtctccggtcatgatccggggacagatgaagataaactacaaggacccaataacctgtggtctgtacaactcatcggcaaggtacattgcaatccggcgtaatgagcacaagatgagtgaaagcgagttcatcctgtctgcctatgaaggtgttctagcctcattggatatctccattaccgagagcgtcatgtttaaaatccacgatcattgcccgggtgaaaaggacgacatcagcatgtggtatttcataccgattaaatga

SEQ ID NO: 441902 - DNA, 858 bp, Serratia marcescens
atgctgtcgcgacgccggttgttgaccgctctcctgttggccccgctttgcgcgcgggccaccgccggccggccgccgcaaaagctggccgtgctggattggggactgacggaaattttgttggcgctgggggtgactccggcgggcgtctcggcgccggactggtatcgcaagctgatcccgacgcctgagttgcctgcgtcggtgctggatctcggcctgctgtttcagcccaatctggaaacgctgtacgccctgcgcccggacgctatcgtcatcacgccgcagcatgggttgctgaagccggcgcttgagcgcgtcgcgccgacgctcactcttccgacgcgggggctgccgggatacgtcagcgccacccggcagttgggcgaacggcttcagcgtcaacctcaggccgcgctgctattggccagcctgaacgacaagctcagccgcgcctcgctgctggcgcggcaggttgcccggccggtgctgctcgccgccccggtagatgcgctgcacctgcgggtgtacaccgcaggcagcctccccggcgacgtgttggccgcctgcgggctgcgcaacggatggcctggcggcgcgggggcggaaggcagcgtgctggtggagctgacccgcatcgccgatctgcatgcgcggctgatgctgttgacgcctgaagatcagcgggcgtcggtgtctcgatggcgccaaagcctgctgtggcaacgcctgccgctgacctgcgcgcgcaacctgaatctgatagcagaaaacatcagcgatgccggcgccgtggtgaccgccgggcgctttgccgacattttcacgcggatgatgctgaggtggcgtaatgcatga

SEQ ID NO: 441903 - DNA, 1617 bp, Serratia marcescens
atgtcggtattgatgatgttgtttcgtatggtgcgcggcgggttggcactcgcggtgatcgccggtctcgtcagcgggctttgcaacgcttctctgttggcgatgatcaatcatggcctgacgcaacccgatgaggcgccatggctgagcccgggaggtgacttcgcgctgctgacgttcctgatgctggcgacgcgcgtggtttctcaaaccacgtttatggcgctggggcaaaaggtgaaggcgcgattgcgcagcgaactggtgcaagacgtcagtgaaacgcgctggctgctgctggaaaaagcggggatggcgaaaacgctgtccgtgctgacgcaggatctcgacacgctggtggtatttttcgtcaacctgccgaacctcttgatattcggcgccgtcatcattggttgtttgacgtatcttgccaccctctcggtgagcgtactggggttggcgttagcggcgatagcctgcggcagcctgggctaccgtgtcgcgcatggccccgcgatgaatttgctgcgccgctcgcgccagcgggaagatacgctgatacggcaatgccagaaattgttcgacggcgcgcgggagtttcggctcaatgcggcgcgccgccgtcagtttgtcagcggtgaactggcgcagaatattgacgcggttcgccgggaaagaacccgcggttatgtgttgtacggtttggcgagcagttggggaagcactctgtttttcgctttcatcgggctggtgttgttcggtttacgcgatctcctggctttggacgctcgcatgcttaccggctatatcatggtctttctgtatatgattgtgccggttgaaggggtgttatcggcgttgcccacccttgccggcgcgcgcgtggccatgcagcgggtacaatcgctgcgcgagcaactcaagcccgaagttccacagcgtcgcgtcgcgccatctcccttcgtttcgctggcgctggataatgtccgttatcagtatcagagcgaagagggcgagcgttttaccctggggccgttggacttgcacattgcgcccggcgagcaactttttatcgttggcggcaacggcagcggtaaaacgacgctggcgaacctgctggtggggatttatcctcccgatgacggcgtgatttggctgaacggcgagccgatcggtgaagatctgctggaaatgtaccgccggcatttttcagtggtgttcaacgatttctttctgtttgacgatgtggcgttcgtcaccgagcgcacccaagagcaggtggatcgcctgctgcatctgttgaaattgagccataaggtgcgttttgaacgagggcgtttttcaacgatcgcgctctctcaggggcagcgcaaacggctggctttgctgcaggcgtggctggaagaacgcccggtttatctgttcgatgagtgggccgccgaccaggatccggaatttaaagcggtgttctacctggagcttttaccgatgctgaaggccgaaggcaaaacggttatcgccatcactcatgacgaccgctatttccatttggcggatcgcatcatcaagctggagtcggggcgagtggtctcttcggcgcctggtgcgccctcatga

SEQ ID NO: 441904 - DNA, 186 bp, Serratia marcescens
atggtcgaccacacgcaaaaacaccaaaagaagatcctgcaagcggcggtgaagacgcggcgcgccggcctgtcgttcgagccggttccccccggcaatccgcccttcgttgggcttccgcatcaaacagaggccgtgctggtgcacctgatcggccataacgactcacaggaaccatcggaatga

SEQ ID NO: 441905 - DNA, 435 bp, Serratia marcescens
atggaaaacacaaatctatgggagcttattgaaaaaattaatcatcaactttctcttccccatccaaagttagacacactcattccgcagccgttagacaattatgatgagaatgaatatgttaaattctatagatcttccggattctctatcagcgcagatgtaaaagtcacccaactgacatttagaacccacaagtcatcagacaacaagatagttttactttccatggatctttccggttattgtatcgagctaaaaacggtcaaaaagcactacccaaacctgacattcagtgactttcctcggggccactccgtggatgaagtaaccagccttacgaccccaccggatgagcacggtaaaacgattacatttagttttgcggaaagaaacccagactgcctgagtaaggtaacatttaacctggaatga

SEQ ID NO: 441906 - DNA, 501 bp, Serratia marcescens
atgaaaaagtatctggtagcttccgcactggcctgtgcggcgatctcttcctccgcattcgccgccgacggcgtaattaacttcaccggaaaaatcgtcgacaacgcctgcgtagtggatccgacgctgaacgtgcagatgggggatgtggcggcggcggcatttaaaaatgtcggtgatgaggctcaagagcagtccagactgttctcattggatctgaaagattgcccggccaacctgaaaacagccaccgtgcaactggacggcgaggcggatgccgataataaagatctgtttaagctcaccgccggcggcgccaccgggcttgccttgcgtattaaggggccaagtcaggatatcgtcccaggtggcaagtcagaagctctcgaattaaaggagggtactaattccctcaccctcttagcagtctacaaatcaacggataaagtcaccgccggtgatgctaacgccactatccaatttagcgtttcgtataactga

SEQ ID NO: 441907 - DNA, 165 bp, Serratia marcescens; identical to SEQ ID NO: 429057

SEQ ID NO: 441908 - DNA, 741 bp, Serratia marcescens
atgactttcggcaactatgtgaggggcagaaaactcattcgcgccgcatttatgctgaaagcgacgaacctctccatttcccatatcgttaatgagttgaaatttcagtcatatcaatcatttggccgagcatttcgcaaacagttcagaacgtcgccgatgcagtaccgcaagagtaaatcttgggacgtctcctccgccatccccttgctgtttctcgatggcatacccgaacatcgctatgtccacctgccaaaatttttcgatgaatcaggggattgtatcgatgctgagatctatcacttccaccccgcggtttcagcgctgcgattggcggcaattgataaaatgcaagcaacagacggcggcatgattaatttttttaacttcggcgcaagcgccaacaaagagaaccacgttagcatctatttgaagacgacctatgttcctgaaggcgctgatatcagcagcgttcttgcctcgctggccgaggttcagggaaaaaaggatatgcaactgtttgccgaattcacttttaaaggcgcgagcaatgaagcgcaacaattcacgcaaagcatttacaccaaatcattcccgataaataaagtgggcatggtcgatcgcttcctcatcgaaatccttagcccaataggcaatggcgaaatagcgatgaagacctatatccctattttattccctgtcaggaaaagagcgataaatggaacgaaaatgccagaatag

SEQ ID NO: 441909 - DNA, 624 bp, Serratia marcescens
atgaatccttcatctggggtaaatttagttatctcggccatttccttggcgatttctggaatcgcagcttattactcagttcaggcttataaccaatctgagataatcgataaacagatttcgcatgtggtcatggcgtctatcgggaacaagataaatcgctacgctgaaaatgcttataattcatatctcttcctgagtagattgagaggtgtggagcatgatacccctgaattgggtgggaaagttgaagtgctatcgctggattttttgcacaaacaggagctgtcaggtatatccgtctctgaagatactcttttccaaatagctaagagtaatggtgaaactgcaggcaaaatagcgcagtgcctagcagccgttacggagataaacagtgatataaaacagttttctaaaatcacgcaagaaacgatgacactggaattgcgcctgactctgtctgtaatgccgtatcgtttcaaaagggtcagtatggtctgtcaagacgctgataaaatgctttctgagcagatagagaaaacacaacctgggaatggaacgctaggtgaactcgaagaagcacaagcgcttcaaatagaaagacgaatagttccattgcggtaa

SEQ ID NO: 441910 - DNA, 744 bp, Serratia marcescens
gtgaaagatttttcaaaatattcgaaagcgttagggatggctaagttctatgtttatgcattttatgacattgaagatgcatcaaaaaaaccgttttatataggcaaaggcaagtcagaacgctgtcttgatcatataaagtgtaatgatggctctccgaaatcagaacgaattaatcatctgttaaaaacaggaaatctgggaatcgacatactacgccatggcatggatgaggcaaccgcgaagcttgttgaagcaacatgtattgatctcttaggtgttggagaactgaccaacaaagtacgaggaagcagctcccttatggggcgaatcacgctggatgagctcaaccatctccttcttaagcaagagacggaaattgcacctgaacatgcagggctcgcttttttgctaaacagcacctacaagtctggcatgagtgcacttgcattatatgaagctacgcgtggcgtctgggcaaaagtaccaaaagatgaaaacctgcaatttgcatacgccacctacggcggtttggttatggaagtttacgagatacagtgctggctaaaggcaggctctcagcagtactttactcgggaactgatcatcccccccgaaaccaaccgttcagagtttgttgggcgaattgcatcaccagaagtcagagaattatacgtaggcaagctaatcaaaaaatcgcgcagtcacggtagccctttcgtaaaagttgggctggcacaataa

SEQ ID NO: 441911 - DNA, 156 bp, Serratia marcescens
atgaaagatttgacagacaaagagttgttgcttgtggctggtggtcagcagtctgatcgtgatgatgatcgggaacgtgccagctgggaaattactgtcaccagagatggggatggtaacacgacaatcaccggcacggtaaaaggtgaattctga

SEQ ID NO: 441912 - DNA, 822 bp, Serratia marcescens
atgagaaaaaagaaaaaaattgtacgtgaagggatatgcaaactaaccttaaaaaaagggaagtttgttgaatcgcacattttacctaagtcacttacaattcttagcagaaccggtgaaaaaacaatacaggttgagttgaagcgcccgcttaaaaaacgcttccagggatggtatgataatcaattatgtattgccgagggtgaatatatactaagccaaattgatgataaagcgattagagtactcagggagaactttcttatttggagcggttggccggctgatattatggagctcaatacgcccgacattataatggcggcgaataataatgaactaaaatatggactaagagttattaaaagtttggattggaaaccagttaaattgttcatgttgagtcttctttggcgttcggcagcatctgaacgagaagaaatggattctgtcatcattccgattaattttctcgaaaaattacgtatagccatcttgaattacaattcattatcggcgaatgaattcccaataagattatatcaaatatctgacagaggggttgctcacaataggactcctattatcgatgaggatattattgatttcggatctcctattggtattaaaaaatacactgtctgcagactatatttagatgggttgattgcatatattacattagacccagatgagaattatttagagaatgcacaggcaatcattcttggaggcaacgacgaaacaattgtcttccttcatacgtatgagaactctcggacttttgaaaacctacgagaagtaatagagcaacatcaataa

SEQ ID NO: 441913 - DNA, 1155 bp, Serratia marcescens
atgtcaaggaattttaacgttggtattgttgccgattggttggtaagttatgccggtgctgaaaaggttatttcagagtttattgatgtgtttccagactccgaactttattctgttgtcgactttctttcaaattcgtcgagagagttttttaataataagaaggctaaaacaacttttattcaaaatctacctttcgcgagaaaaaaatatcaaagttatttgccgctaatgccggttgctattgaacaattagatgtttcttcacatgatgtaattttatctagcagtcatgcggtttccaaaggggtactgactggaccagatcagttacatatcagttatgtccattcgccaattcgttatgcatgggatcttcaacatcagtatttaagggagtcaggtttgagcaacggcgtgaaaggtatgctagctcgctttcttttacataagataagattgtgggactatcgcacagcgaatggagttgatcatttcgttgccaactctcacttcattgcaaggcgaactaaaaaggtctacgggcgtgaagcagatgttatatatccgccggtagatgtagagcgtttctctttggtgagcaagaaagatgactactacttcactgcttctcgtatggtgccgtataagcgtatggatctcattgttgaagcttttagtcatatgccggataaaaaattagttgttgttggtgatggctcagagatgaggaaagtgaagtctaaagcgagtagtaatgttgaaattttggggtaccaaagcaacgccgttatgcaagaatatatgcaaaatgctaaagcattcgtttttgccgctgaggaagactttggcattacaccggttgaggcccaagcttgcggtacgcctgtaatagcttatggaaaaggaggggcgctagaaacgattcgaccttatggtgtcgagaatgctacaggttatttcttcaaagagcaaactgttgagtgtattgttgatgctgttttattttttgagaataacggtgactctctcactcctgatgcttgcagaaacaatgctttaagattctcttcggctaggtttaaaaaagaaattgaacaatatgtagataataaatactctctatttaaagaaaggaaaagtgtagtgtattaa

SEQ ID NO: 441914 - DNA, 2529 bp, Serratia marcescens
atgagtggtggtgatggtaaagacagccgcggtcctggcggtggagtgaatggtgggccgacggggctgggtgggggtgtggatgcatccgatcactccggctggagttcggaaaataatccatgggggggcaaggataaagacactggtggacataccgggggcggcaataacggtggggacagggattctaccaacaccgggagtaacgttaacctgagcctgtttccggaagcacaagcgtctgtcgcggtgggggcacagttcaatctttcactgttcgatggcgcatggggattcagcctactgaaatcccaaaaggtacaatcgtttatcacaaaatcgatagccaaagtgaaaacgctcggtattcccacggtaggcacattgtggcggactagtctgtggggattggtcgtggaaggcattacgccaaccaagatcgctcctgatgatatgtctatggtgcgacatattgtgacgacactccctgcggatttggtcactcagacgccgccgggccaacttcccactcaaccggcaaccctggtcagcgctcgtattgctgacctcgttgatgaggggcagcaaaaagtagccgttgttcgttcaccgtcgttaccgatgagcgttccggttgtggaggccaagcccaccaagcgaccggacgtctatacagtaggaattgtaccgggcatgcctgatattcatattcgcgtcaatgcgccggcgccgccaaccacggcgaaacctgtggacggtgttaccgagataaataatgctgaagccaaaccgttacctgcgacgcaaccgggtggcaacacgcacgatggtatcgtggtgttccctccaggcagtaatctgccgccggcttatgttgccgtggtggagatcattccgcaaaatgaagtcaatgcccgcgagaccgaacgcaaagcgcttctgagttatcaggaaatccgccaggagcgtgaagcaatgcaaaaggcgcgcgaggaaaaatccaagaaatttggttggctgttgccagaagatctggcaatcatactgcagcaaattgcggaaacgcaggcgcaaattgttctcgggcaggctaccgcgcaacgccagtcggttcaggaatcaaatgccagagcccggaaccaaccggctcaggctgaccagtatcgccgcgagctgacccggaccaatgcgtctacggaagcactgaataatcagctggcctcgcaacgacaggcggaaactgacaaacgtgcagaaattgccgaattcgagcgcagagcacgagaaaatatgagcaaaattcgtgctcggcagccgactgatccggatattgcttcgttgtcaccgcaagcgcaagcggcgttctggcgcaaccaggcgaagaaagagttcgttcttacgatcagcgatggcgatttgcctcaatatcctccagtcatgggcagcaaacccagtccgctgtttctggatcaaccggcctacttctggcgagaaagcggatttgctatcagcaactataattcggtggcggcgacggagacactggaagccggtatccgtggcgcgtttgcccgggcctcggcgacgttgacgaagacacctgcggaaaaactgtatgccaacgggcaagtcaccacggtcgagtttgctcagctctcttttgtcttttccgagagtctggatgtgcctgcattgagcgtcatgtcatccctgggtgtcggtcggttcggattgacgcgagatgatgtgaggaatgcactcggcaactataattcggtgcggttaccctatcggctggtttctcgtgagacgggggatgtcggggaagagaaaatccacatcaacatcgttcgccctgatgagcggaacgtaaaaggtgcggtgccactaaggccactatcatgggatgcggtgaaaagggagttacgctttaccactgatgacagtgctatttctctgacctggacaccggcgaatgacaagggcgtatccggttatgttattaccgtcacgccggttgatgcgcctgcaggcaagctttcgacggggggcagcgtcgatgtgtcagggaaaggaacgctgactgcattacccaatggtgatgttcagcagatccatgactatattttggttccaccgattgaaagtggtcttgatccgatttatgtcatgttcaacaaaccacggaaaaaaccggctcgagaagacaagccagagcttattaaacctcgagaaggaactccggagcgcgggcacaaatatcatccagccccaaaaactgatgaaattaaggggttgggagagcttaaagcaggtagaccaaaaactcccaagcagtcaggagggggccgccgggctcggtggtatggcgacaaggggcgtaaaatttatgagtgggactcacagcatggtgagttggaaggatatcgtgccagcgacggtgaacatctgggggcttttgatcccaaaacgggtaagcagttgaaaagtccagatccaaaacgaaatatcaaaaagtatttatag

SEQ ID NO: 441915 - DNA, 390 bp, Serratia marcescens
atgataaccgccgaaatttcaattctgtatgttgccaacgtcacgaagagcgctgatttctattctgctttgctaaacctggagccggttgaacaaagcccgacctttgcgctttttgctctgaaaaatggctttaagttgggtttgtggtcaagccatacggttgagccgggggtgcatccagcggctgccctgccgcaggcccggggcgaaatcgtgttctcggtgcctgatttggccgccgtggatgcgctctatcaggaatgggggaggaacccccaaattaacgttattcaaaaaccggtcaggttggatttcggttataccttctccgtgcaggatgccgatgggcataggttgcgagtctgttttttggaggatgaagcatga

SEQ ID NO: 441916 - DNA, 426 bp, Serratia marcescens
atgaatcattggctggcggtggcttcggcagatcacgttgcaacgggcgttgagggcggtttcatgcaggtctgccatggcaagaaaggcccattgaataaaatcaagcccggtgacggcgttgtctattattccccctcaggcagttatgggaaaaaagatggcttgatggcgtttaccgctgcgggttttgtcgatgaaggagaaccctatcaatatgatatgggagaagggtttatgccttttcgccgcgacgtgcgctgggcccaacacaagacattgccgataacgccatttttgcgagagctggattttacgtccttgcaaagcaattgggggtatcagctgcgatttggcattctgtccattactgaaaaagacttccggttcatccttcaccacatgacggaaaacgccgcaggttaa

SEQ ID NO: 441917 - DNA, 189 bp, Serratia marcescens
atgaaactgccgctcttgaaaatgcgaacgttgaccctatctaaaatttgctgccccgttgctggcctcgtagtgttcactcaggttgaacatcggcaggggcagcatctatcacttgtaaagcacatcaaaattaaacgctatggccgcatcaacggctttaccttgggtctgaaacggcacatctga

SEQ ID NO: 441918 - DNA, 438 bp, Serratia marcescens
atggtcgaaagtaatactattaataagaacgttgtaagtaagtattcccgtaatggaagctttaacgaagcgaagctctcacacaaccagcttcgttctcattgcgtcagtgtcagattaaatgatgaagagctaacgcttctcaatgagaaacgaggccgtcatcgtaaaggcgagtggcttcgcttatctttacttaataaacttcctgctgtcgttccagccatcaattttgaagcctggaaaacccttggtgagatttcgcagaagctaaacaagcttgtggctcatcttgatagcaagagctatgaaagccctctgacgcaaactgaactcttcgccgtaaagcgccaggtctcagagcttcgcttgcatttaattaccgccgacctgtggagagcttcccatgaaggggatgcagaagataaagcgaggtaa

SEQ ID NO: 441919 - DNA, 1146 bp, Serratia marcescens
atgaaggggatgcagaagataaagcgaggtaagaacttcgctggcgtagtgttttatgcattgaggccagcttcgcatcataaaactcccccatcagtaattggtggcaatatggatggaagcaatgccggagagttgattgcagaattcaatgcgactaaagcgcttcgcccgggtcttgctaaacccgtctggcacaattcgcttcgcttgccgaaaaacgaagcgctgacagatgctcagtggtcagagattgctgatgattacatgtcacgaatgggcttctctgaaacgcacctcagatgctatgtcctccatgatgatgcggccggccagcacatccatatcatcgccagtcgcatcgaactcagttcggggaagctctacttaggtaaaaatgagaaccttatcagcacccgtatcatccaggatcttgaacaagactaccagctaacaagaaccaaaggaccgaaagcatctccagcagcgccctcacctaaaccgaagctcaaaaaatcccgtaatgagatgatgatagaaaagagaactggtgagcaatgcccaaaaggaatcatccaaaacgcccttaacgaactgcttgataccaggcaatcgattaccgacttcgtgcaacagcttgtggcacaaaatatcaggccaatccctaacattgcctctagtggacgcatgaacggcttctcattcgaatacaacgggattgctttcaaagcatctcaattgggaaaagggtattcctggtctgccttgcaaagcagaatcgactaccaacaggaacgtgataatgctttcctgtttaaactaaaatcatctgtcagagaaacatctgttagtgcaactcatgatatggccataactatagatgctcctgaaaccacgacagaatacgttaaccgccccatagaagcacttatcctcgataaacgagctgctggtcaggacgaatactctatcgcttctgtcgaagcgcttctcccagaagctgttgcaactaataaagaagcgatagcaaccgaaacgttaaaagtagcgcccaagcgaagctatgcagtgtcagcgaatcgcaaaaaaaaaatggcgtctcaattggttattgaatacgccattttatttacaataatcagttag

SEQ ID NO: 441920 - DNA, 579 bp, Serratia marcescens
atgccgcatgtttttaatgtccgattgattggagaaggcgcactggctgcagccaatgacctctttgctgaggctgggtatggcgtccgggtgcaaatgatgagtgctgaagattttgagtggtgcgttgcgttggctcgccaacaacccgaagagcgccgtattccctgggcgttgaatggcgccgcgttgggcgatcctgacggctttatgtttagctttaagatacagggtatcgatgaccggccggcaggcgcctgtctctgccggttttgtccggctgcaggcgagcaactggcgatattaaatattgagatgctgcaaaattttcgtattagagactcgagccttgatggcaatacgctacgttttgcgctctatgtcgccgtgctctttatggtggataccgcatgcgcaggtttgcgcttaatatcgccgattaatacggagttggctgattattatataaatcatcatcattttgtcgatctcaccggggggctcaaacagatactttatcgagacgctgaggcgcttttcctgtggttccaggaaggtttttcgccgccggcctcataa

SEQ ID NO: 441921 - DNA, 414 bp, Serratia marcescens
atggcgcgagcactgttagtcggtgcaaccgggctggtggggcgcgagttgctgcagcggttgcaaagcgatccgcagataacggccatcgtggcgccgacgcgcacgccgctgccgccgcacggcaagctgaccaacccggtcggcgatgcgctgttcgaactgctgagtagcctgcagcagccggtcgatctggtgttctgctgcctgggcaccacccgccgggcggcgggtagcgccgatgccttccgctatgtcgattatcaactggtggtggagagcgcgctgaccggccgtcgcttgggggcgcagcactgtctggtggtaagcgcgttgggcgccaacgcggattccaccttcctgtataaccgcaccaaaggcgagatggagcaggcgctgcgcgaacagcactga

SEQ ID NO: 441922 - DNA, 243 bp, Serratia marcescens
atggataactacatcatcgatctcgtacaacttgcgtgcagcacgggcaggaaatggaggttcgatttttttaactgtcctgatctctcatgccatccaaccctcttcataatacgatgcacatgcttgagggatatcttcttgtctaaacgctctgacttctcccaaagtgattacggctacagcttctccagtttcctcttgctcatcaacggtaagaaaattttcattttctacaagtaa

SEQ ID NO: 441923 - DNA, 969 bp, Serratia marcescens
atgcgtattctcaaaaaaattgcattttcggtagccattttgttaaactgtgatgaagtgaaaaacttcattactcccatgaaaatcaaaaataaagcagcagcatactattctctcataattttgtcttttgcagcaatctattatattacttggtcagttaatccagattcattcataaaaaatagcgcgctgaataccacccctgtccaggacgctgtaaacttagcgttttcgtataataatgtggcgcatgaaagttatgataatatttcaatcgaggatttttccaacgaaatattaaaagccaaaaaggaatttgacagaataattaatcaaaacattgatcttgaaggtgtactgtcccagcaagagtcaaacctagaatcaataggcgaaaaactgtccaatgcatgggctatgaatacacaggtgtatgtgggtaaatcgtctctaaaatatgacaacgagctgattgttaaagaaagtgagcgtgaggctatactttcacaaaagaataaaatccatgaaagccagtttgatattctattggctgataaaaatctcgaaatattagaagttaaacttaggatagcaactgccagatatgatgcttcagaatatgttttgtcacacactggtgacttcaatgatccaaagctcgtttctgaactaaatatcgccaataaaataatagatgacacaagatctagcttaataataaacaacaagaaaatcgttgaaataagaagtaaggtgcaaaatttgttgagtaaacgtcaaaaggaagatctcaacttttgggatttcattttttacagcataggaatatcaacaacgactacatttggtgatttagtagccaactcaagattaattagaatgcttgtttgcatacaactgctgttatctattttggttttagccaacgtaactcaaagtttcttgtcaaaaaataaaaactcatga

SEQ ID NO: 441924 - DNA, 249 bp, Serratia marcescens; identical to SEQ ID NO: 32317

SEQ ID NO: 441925 - DNA, 1380 bp, Serratia marcescens
atggcgcaagctcagttgtccttgttcggtcagaacgaggcagaaacatatcacgacacaagcgcaaggggctttttctcgctcctggtgcaatggccaaccggcaaacgtcaatcctctttccctcttgagcagatgccaacagtccttaatgctgttgatcatcgtcttgatacctggctatcacaggccgagtttatgcggccaaacaggcgagtcgtgaacctccttcggattggtttgttattcgctgatctcgatacctacaagatgccctgggctcaaggtcgcaagcctgaagaactggcggcggccatcacgtacttttgccagtctgaaggcataccgcagccatccatcatggtctattcagggcgtggcattcaggctaaatggctactggaaaggccagtacctcgccaagccctgccccgctggaatgcttgccaaacccatctaatcaacaagctggccgagctgggcgctgatccaggggcaaaggatgcaagccgagtgcttcgcctggtcaataccgtgaattcaaagagcggggccgtgtgccgtgtggttcacgtactggaagaagggggcttacccattcgctacaacttcgagtatctggctgaaatgctgttgccggtggctcgctgggacatcgagaagcaaaaggcggaacggcagcaagccaggctgacggtcgttaatggtggcaaggtcgggaacctgcgcaccttcagcggtcgtcaactggcctgggacagactggaagacctacgcaagttgggccagctcagaggcggaatcaacgaaggcgagcgaatgaggcatcttttctggcgtcttaactttctccttctctctggggcgacaaacagcgcccagatgtaccatgaggccgccgctctttcctccgagctggatactcgttggtcttaccgctccaaagagcttatgacgctctacagcaaggcgaaatcctatgaggctggggaacgtgtcgagttcggcggaaagtcgtttgcaccgctatacacgcccaaaaacgacacgctgatcaacctattccagatctcacagcaagaacaagagcaactgaagacgattatcagcactgacgaggctcagaagcgccgcagagagcgcgatagactgcgtgatgaagaacgtcgccgcgccgctggccagcttgagcgtgaagcctatgaagccaactcattgagcaggcaaaagccctgggaggcaatgggcatgagccgggctaaatggtatcgcctgggcaagccttcacctcaacaaaacagtgagacaagtccctcccctattactaatggcgaagcctcagccccagcgctacaggcggctaggtgtaaagccgtttag

SEQ ID NO: 441926 - DNA, 279 bp, Serratia marcescens; identical to SEQ ID NO: 40786

SEQ ID NO: 441927 - DNA, 426 bp, Serratia marcescens
atgatgcaaacagaacttaatcccctgatctgctccctggtcgccacccctcgccgtatggctgcaatgcctcgccatgtaggccgcttctatgtggtgttcgagtcgatgctttaccagcaaatgaaagggctctgccgcgagtatcgcggggcttattggcttatgtgggagctgtcgaacggcggcttttatatggctcctgggcgtcgtgatgaaatgctgaacatcgaggctatgaactactttagtggccaaatgagcgccgatgctgccgggattaccgcttgcctctacctctatagccatctgtcatttcacacggaaggcgctgaccaggagcggttttcaaggctgtatcacagcttgcgggattgggcttgtgagcatgacgaaaaagaggccatcttggccgcaatagactag

SEQ ID NO: 441928 - DNA, 156 bp, Serratia marcescens
atgaatacggatattgtatcacttgcaaaacacattggcgacgctctgacggcccgccgccccgttcatatgccacgcatgaagatgcgggagcttggcttgctcttggttgaactgaaggcgtatcgggaggccgccgcgaccgtttcccattga

SEQ ID NO: 441929 - DNA, 1068 bp, Serratia marcescens
atgaccgaacataaggccgaacgtgctccctggggagacttcccggcagtagtgaggaacggcgatctaaaggatctctctaaagaacctgaatacgaagccgccaaacatggcgaccctgccgccgccttggccattgccaggcgtttgatgaaaccggagacggtcgattcagtgaaggccatgataggcgaccagaaacccaaggttgtgcctgtcctggctgttgagtcagggggaaacaacaagatcccgttaatggccgcgcatgtgctcgctgaccgtctagggcttgaggttgaatacagcattgtccaagcggaaaaggtcggtcgtacaaactcaaatgctgatcatcggctggccattaacccggcttttgtcggggaggtcgagcgtgaccagccttatctgattgtcgatgatacgctggcgatgggcggcaccctggccagcttgaggggctacattgagaacagaggcggcaaggtcttaggggccgctgtaatgaccgctcaccccggatcggttgatatgcctgttaagcctcaaatgttggcagcaattgagcagaagcacggcaaggcaatggatgaatattggaggtctacatttggctatggaatcgaacaactcacccaaggcgaagccggacacctcagaaaagcattatcagttgacgccatcagagatcgaatcactgcggcaagagatgcggcaggctggggaatgggcaaaagcggagctgaagcgcctgaacgcccaggaaagcaagagttaacgccagaacaggcgaaggccgaagacttcaggcagctatcaaaccaagagcttctgaagaagtatcccggcgataaggcgatccaggatgccgcaagcgtgtacgctgtcgcggataagttcgcccaggtaaaaattcaagacgatgcagaacgggggcgattcgttgactcagtaagggcgcgactcgctgataacctggccctcgggaaggataacccaaccccgaagattgccgaggctgtagagcccaagccccggaaccatgaagacgatctagagcggtga

SEQ ID NO: 441930 - DNA, 858 bp, Serratia marcescens
atgaccatgattaagcctgaaatgaaagaaaagatcgtccgagctgctgaatcacttcgatctgaaggggtagcaaagccaacaaatgagcaggtgcgcgagcgcatgggcggcggctctttgtctcatatctcgccggttatgcgtgagtggcgggcctctcaagagcaatcggacattgttgtaattgagctgccgggggagctgaaagccgggtttgatcgtgtggctgccgagttgtggcaggtggctagtaaattggctgctgctgatattgaagcggttaaagctcatgccgccgagcatgtggctatggcagatcaggagcgtgatgaagccctggacgaagtggcccgcctggaaagtgaactagatcgctgtcgtgttgctgtgagcgaaaaggaggccgagactcgggccgccctctctgaaaagatcactatcgagcagaaggcaatcggcttggcttcagaggttgagcggctgactcaggaactcgccgtttgtcgccagtctatcgagtcgtttacctctgataatgccacgctcaccgcgaacctgaaggcggccaaccaggagatcgacaagctggccaaagccaaccaggacaaccagggcagcatcgaggcgctgaaggaagaacgggccacgctcaccgcgaacctgaaggcagccaaccaggagatcgacaagctggccaaggccaaccaggacaaccagggcagcatcgaggcgctgaaggaagaacgggccacgctcaccgcaagcctgaaggcagccaaccaggagatcgacaagttgactaagccaacagcgaaacgccaacagaaaaaagacgcagccgacaccaaagagtaa

SEQ ID NO: 441931 - DNA, 339 bp, Serratia marcescens; identical to SEQ ID NO: 40780

SEQ ID NO: 441932 - DNA, 753 bp, Serratia marcescens; identical to SEQ ID NO: 40779

SEQ ID NO: 441933 - DNA, 1245 bp, Serratia marcescens
atgagtggtaaaggggcagacctcagcgggctggattcgttcaacctgtccgacctgatgggcgggcctggtgccgcgccagtagaggcggcggaaccagagaataacaacctgctgattcgtgaagtaccgatcagcaaaatccatccagaccctaacaacagtcgccagcgagtagacccggcaaaaatcaccgaactggctgactctatgaaggcggtcagtaaggtaacaggcaaacaacggggggtgaaaaacccccttagcctgaagcctcacccggagcttgaaggcgagtttatgattaacgccggttatcggcgttacctggccgcacaggaagcgggccttgataccgtcccggcgtttatcgactctgacgccgacgagtacgataacgccgtcgataacattcaacgggaggggctgacggccctcgaaatggcccacttcatccagcgtcaaatcgacaacggagacaagaaatcagagattgccggaaagctgggtaagcccgcttcgttcgtgtctgaccatatcagctttttcgagttgccggattgcattcgtgagctgtacgactcgggccgatgcgtgtccgttcaagccttggctatcctgcatcgttcattcaagaactaccccgacgaggtggaaacctattgcatcgaaagcatggttgccgaggatggggacgaactgacaacggcagacgttcgccgcttctgtaatgacctgaagaacccgagcacggagccggacagtgacgaccagggcggcgcaggcttgccaggtgcagacggcgacaaagagccggacagtgacgaccagggcggcgcaggctggccaggtgcaggcggcgacaaagagccggacagtgacgaccagggcggcgcaggctggccaggtgcaggcggcgacaaggagccggacagtgacgaccaaggcggcacaggctggccaggtgaaggcgataaggacaagcaacagccgttgaccatcgacggtgccccgattggcgggggcgggccggatgcggcggctaatgccctgctgaacgctgacgagcaacaaggcaaaatcaagaagccgatcattcaggtgcgctatgacgagcgaccggctcgcctgttgtccagtcgccgcgctgcatatggtttgggctggctgaagtacgacgacgacggggaagaaatcgaagttgatctgaaccaagttcagcttgttgctgttatcgagggctga

SEQ ID NO: 441934 - DNA, 228 bp, Serratia marcescens
atgacggcaaaagcgaaaacctactttgccgctgctgttgccgttggagtgctgttgttgttcgcggcctatccattgctgaaggacagtcaaaccctgttggcctggctggccattattgcaacggtggccgtgcttgtgctggcggtgccgtcgagaataggccgcagcttttaccaggcgacgttagccgcctggcgcaagctggcaaatggcgggaacaactga

SEQ ID NO: 441935 - DNA, 732 bp, Serratia marcescens
atgaaaccaacattgcaggcttacgacgaactacagcgggcatatgatcactttaacaacgagctgtttgatggtgtcctgcccgattgcctgatcaccctccaacgagaaaaacaaacctatggctatttcagcccggagaggttcgttaactcccaaggaacccggacggacgaaatcgccatgaatccggcttacttcgccgtatgcccccccgaagaaattatgcaaacgctttgccacgaaatgtgccacctatggcagcaccatttcggcaagcctgggcggcgtggctatcacaacaaggaatgggccgacttcatggaagctatcggactaatgccaagcagcaccggcgcacctggtggagcacgaaccggcgacaagatggcggattatgccattgagggcgggcgcttcttggaagcatatgaaagcctgatgacggatgactatcggatcagttggatggatcgcttccccagtcgtgaaaagctgatggcagcaatcgccaacggcaccaccgatgaaatggccggggatctttctatcatggggctggctgggatctctgttgaggatggagaaatcacatttgagccaggggagcgcccgaataagtcgaatcgggaaaaatatacttgcccgctctgccaggcgaacatttggggcaagcctggcctaaacgtcctatgcggagactgtgacacggcttttgaggccgctaactga

SEQ ID NO: 441936 - DNA, 531 bp, Serratia marcescens
atggcaaagagctatcggatcgaaaggcgcgtcactaaggagcaaaaagaagcctggcaggctttctgccacgctcagggcgtatctgaatccgacatgctgggcctaatgatcgagaaggttacggcgggcagtgttgcccttgaccataaggggctgaaggaaaccaagacggatcagctcaatatcaggttgaacaccagagacatgaagcgcatcacgaagcgagcgaaggccgaagggttcaccagtcggacggcgtggctaacggctgttgcaatggccaacctgaaccgcgagccggttcttaccgagagcgagatccaagcactgcgaacgtcaaacagggagttggcggcaataggccggaacctgaaccagatcgccaaggtactgaacaccgagtttagagagtcggataagctcaaccgccaggcggttctagctctatctgaaaagatcgattcccaccgcgaggaagtcgccggtttgcttcaacgcaacttaaacaagtgggggatcgatgaataa

SEQ ID NO: 441937 - DNA, 996 bp, Serratia marcescens
atgaataagggctatgacactctagccgggttgctagaggggaaggtcaagaccaaggccaataagaccggcgatctgaaaggccgagttaagcgagtcacggataaagcctccgaggtgatggttaaggtatctggcgcggccaaaggggccgagcacgtaaaagctcacctggactatatcagccgaaacggaaagctagagcttgagaacgagcggggagaagttatcaagggaaaggcagcggtaaaggaggttcacaaggaatggacgcaagacggcgggaaacgccgagccaataccagggataccgctaacctggtgctgtccatgccaaagggaactgatccgaaagctgtccgagactcggcccgggattttgctaaggggcagttcggggataactaccagtatgtttttgccctgcatactgacgttgatcacccgcatgtgcatctgaccattaaaacgctagggcatgatggccgccgtctccacatcaagaagggtgatccgcagaagtggcgcgaagggttcgcggagcagcttcaacggcgcggcattgatgctgaagccacacccagggcaccgagaggcgtagttaaaaaagccgtctcccaggtcatcaagaatattcggagtcggggcgagatcccggaggtcgataaggctaaggtcaaagagatcgtttccgagttcaaagataagcaggcaggcaagccgccgaaggcgaaaccgtgggaagacaagatccagcagcgacagcaggaggttagaaaatcctggttgtcggcggccaaagacctgaaccaaggcgatgccgaagatagggaactggcgagcaagatagttggctttgtttcgtctatgccaccactggcaacagaacggcatgagatagccgccaagctggccgagcagatgaagccccaacagaaagcccaggacgtagggcagggcaaggcaaaatcagagagggacgaagacgagagataa

SEQ ID NO: 441938 - DNA, 1695 bp, Serratia marcescens
atggccaagggtaaagagtcgagcggagagaaaaagccctattacgagctgattgctgaaacacttatcaagcagctcgaagaaggcaccgcgccgtggcaaaaaccctgggaaccgggcacctctatggtgccccataaccctgtgagcggtacaaaataccggggcggcaacgccctatggttgaccatgcaaggtaggtcagatccgcgctggatgacctacaagcaggcgcaaagcgtcaatgcccaggtgaaacgaggtgaaagcggtacgctgatccagtatttcaagttccaagaccaagtgcccaagttagacgccagcggaaaacctgagattgatagcgacggcaaaaagaagatgatcaccgtccaactggataagcctaaagtcttctcggctgttgtcttcaacggtgagcagatccaaggactccccccaattgagacagaaaagaaagatcccgcatggaatagacacgaacgggcggaagccattctaaccaatgccggtatccccatttcacacgatcaagctgataacgctttttacctccctggcaaagatgaaatccacttaccagggcgcgaccagttcgccaccgctgataggtactatgcaacagctctgcatgaacttggccacgcaaccggccatgccagccgcttgaatagggacttatccgggcgctttggctcggagtcctacgcaaaggaagaattacgcgctgagatcggttccctgctgataggggatgaattagagatcgggcatgaccctggccaacacgctgcctatgtcaaaagctgggtaaaagtgctgaaggaagaccccaaggaaattttgcgagcagctagagacgctgaagcgatcaaagattgggttattgccagggaacgggaaagcaccctaaccggcgacaacgccagacctccccaaacgcaacaagaagatcaggcggtatccctggctgaaacccgcaagctgatggagattgtagcgaaccagaacaaaggggccaccctgggggattctgcttccctcgccctgaaagcattggggctcaacgaaaccaaacaggtgatcgatgttatctctacactcaatgacctggtgaaacaccccgccttagctcaacaggtgaaaaaggctgaagctgagttagcactattgaaaccccagcaccaggagcaacaccaggagcccaaggcaactgaatcagcggcaacggataacaagccccagactgaggctttcagtgaaactcgcaagctgatggagattgtagcgaaccagaacaaaggggcggccctgggggaatctgcggctgttgctttggaaggattggcccgtaatcaacctgaccaggcaaacgatgttatctctaatttgagtgacctacagaaacacccagcattagccaagcagattgagaaggccaaggccgaacaggaagcgattagagccacgcaaggggctgaccaagggcaacgcattgaccctatcagcaaattgcctctggcgcttgctgagaagctatctagtcggtttgcgaatgaggaagatagggcaaaattccttgaaaaggttcaagcccgactttctgacgctccccagcctgaaatcaagatccgggaggccgtggcaacaagcaaagagcccaaggcacaagcggaagatatggaacgctaa

SEQ ID NO: 441939 - DNA, 147 bp, Serratia marcescens
atgaacgataaattactgaagctgaatcagcccggtcagattgtcgaactgaccaaacaagaggctgaagaattgggcgctttcgaggaaagcgccctttccgaacaagacgccctcgatgcgattgaaacagaacaggaggcgtaa

SEQ ID NO: 441940 - DNA, 630 bp, Serratia marcescens
atggccaaagcggcagccgcaacagcgaccgctgataagcaacagcctgaagcggcggccccagctcaagaagttaaccggctcgcgggtaagctggttgagcatggtaaagccccttatgagcacaaccccgacaataacgggagttactttgtcacccttgagaatgcagacggccaacaaagcacaacttggggtgtgggcctagaaaaggcgattgaagaatcccaggccgaagctggccagcatgtcgagctggaaaacttgggacgcaaaccggtacaagttgaaaagcagatcaaggatgaaaagggtaatgttaccggcaccaaaacggttaactcgtatcgcaacgaatgggctgttaaggccgaagcaatccgcgattcttcccgtgacgctaaagagttggtcaaggagcacccggacttaatcaacgaaatcacggcggttaagctcgctgaaaaattcgcggcggcaaatttgagcgcagtcgatcaagcccgtttcatggagcgagttcgcggccaggtagcggataacgtatcgaccggtcagcaagcccctgagctgaagattagggaagaaacaaccatcgaacgcacgaaggagacagagaatgaacgataa

SEQ ID NO: 441941 - DNA, 441 bp, Serratia marcescens
ttggccgatgcgctggcttatctgcgcgatggcgatgtgctggtcgtctggcggctggatcggcttggccgctccctgccgcacctgattgagacggtcggcaagctggaagcacggggcgtcggcttccgctcgttgactgaaaacatcgacaccaccacgccgggcggacggctcatcttccatgtgttcggtgcgctgggccagttcgagcgcgacctgatccgcgagcgcaccaaggccgggttgaccgctgccgccgcacgcgggcgcaaaggcggacgcaagccggttgtcactgccgacaagttgcaacgagcgcgggagcttgtcgccaacggcttgaatgtccgcgaggccgccgcacgcctcaaggtaggaaaaaccgctctctacgctgccttgcaggcggccagttctggcagtgcagccgactcctga

SEQ ID NO: 441942 - DNA, 258 bp, Serratia marcescens
atggaactgaaaaaaaacatcagtgattacactgaaattgaattcaaaaaactaattgaagcaatcattaattgtgacggtgatgagaaaactcaagataacaacctcgagagttttatcaatattactgagcaccctagtggttcagatctgatttactatcctgaaggaaataataatggaagccctgaagccgttatcgaagagattaaggagtggcgaaccaaaaatggtaagccttgcttcaaacaagggtaa

SEQ ID NO: 441943 - DNA, 273 bp, Serratia marcescens
atgtgcgaaaggatgtttaaaaaagatgtttattctgaatgggttatacgcaatagcctgtattggatgacttctcttactcaatggaagctttgtgaagatatatcctcctggacaatctcttttgaaaacgatagtcccgaatgcctctatgaattcgagaggctgctgaatgattacactttgcgagaaaaactacagcataaaacaggggcgttgagagattctattgtccataaagtgcttcgcagtgtcgatgaaaggctttcgtga

SEQ ID NO: 441944 - DNA, 228 bp, Serratia marcescens
atgaatgagatgagagtgctgtttttaaatggattgaattgtcttcttgatggtaattatagctcagctaaagtggcggactacgcctatagattttatctggactatgacattcctgacgaagagctttcatatgtagtagattatttaaaaggaattgatgctggcccagaatttgaaatgagcaaagatgaagtaatatctttcatcaagctaaatctgaaatga

SEQ ID NO: 441945 - DNA, 1455 bp, Serratia marcescens
atggatttttcagaactaaacatacaacgtctttttggtcaagaggcggctgaaagtgaagaaatagataggcttaaggaatattattttaaaagtaaaatatattctaaagtgattgtcgatcttcctttaagaatattggttggccataagggaatcggtaagtcggctttatttcaagttggcatggatgatgagaaaaataatggaagactgactttcattataaaaccagatgatatagcaggtattggtggtaaagatgacgatttcctatctctcatcactcgttggaaagtaggtattaacgaaattatagcaaataagatcatggcctacttcggtttattcaacgaggataagagtttaatacacaaagcattgggggcaggtgtcacattattagatgttttaagtgaaactatcaacatcaaagataagattgatttatctagaataaactctgatataaaaaccagggcaatacaaaacttcttagagacaaataaggtttcaatttatattgatgatcttgatcggggatggcaagggagattagaagatatacagagaatctctgcgctacttaatgctatcagagatatttccagtgaaaacagaggtgtgtatttcagggttaacttgagatcggatgtttattttctttcaagaacttcggatgagtccactgataaaactgaaggttctgttatttggttcgactggtctaatcatgaaatatttgctcttttgataaagagagtcgcaactttcaatggatatcatggtctaactgataaagaacttcttcaaaagaaacaatcagaactaatgaagtacttgacaaatataattgaagaaagatttacaggtagcggtaagtggtctaatgcgcctatgtataaaattttaatgtcattgattagaaaaagacctcgagaccttgttaaacttttgactttagcagcacgtaaggcccaggatgatgagtctacaataattaagactaaacatctgaaggcaatactagatgaatattcgcaaggtagacttcaagacacaataaatgaatttatatctgaattacctgatgtagagcgtcttattctggggatgaagccgtcaaagcggcagcataaagcatcagagaattataactactcaacaagttcattattggaaaaattaaaatcaatagaacaacaaggcgggtttaaagggcgaaacaataaaatcgtatcaacaaaagaattagcagcctttttatataaaataggctttattacagcaaggaaagttttgcctgatggaacaatagatagaaaatacttcgaacaaaataggtatctttccagcaagtttgctgacttcggctatgattgggaggtacaccctgcatacagatgggcattgcagccagataacatttatgatctcattgatggtatagattaa

SEQ ID NO: 441946 - DNA, 1179 bp, Serratia marcescens
gtgtccgattttccgagtatcgatcaagcccgtgaggcagctcggcagttggttcagacaatgattgcaacaaagagaaatcccaacaagattaaaagggaactcgatttggctgaattgaccgtgagtgaagcttttgcccaatacaggagtcacttacttggcagaaccaaacctgctaaaccaaacactctcaatgtgttagacaaagctgagaatcggttgaaagaatggcaaaaccttcgaatcaaggatcttactggtaatgaaatccttcgaaagtttgacgagattgcttcaagagccagaacagcagcagaacagacttttaggtgggccaatgttgctgtaaaacacgcaatcgagattgaagctgggaatgctcagacccagcaacgacaaccttcgttgtcctataatcctttttcaattttaaaggtacagaagaagttcagaacacgatctgagctggaagatagctatcgtgccaagggcgtacgaaatccattgtcccccaaagatactttgggacggtttctagctgcattacacaataagagaggttttaatcgtttgggttgtgattatctgttgctgaccattttgacaggagccaggaaagaagagacagcaacactgtgctggcgagaggccctgacagaagaggaagtcagaacgacaagctatgtcgatctcgaaaaccgggttattcgcttttacgacacgaaaaatcgtaacgaccatgagcttccaatctgtgatgctacaaagcgaattctggaagaccgacgagatatcgtcaacgataccgaaatacgggcagataaacgcaaatgggtttttccggctcgttcatcacgaagcaaggttggacattattctgacagtaaaagcttgcgcgagtatatctgtcaggaagctggaataatgaagctgggaatgcacgatctgcgaagaacttttggccgtgttgcagaagaactaacttcgtatgcagtggtgaaaagattgcttaaccaccgtaataccacggaccctactgaaagatatgctgagcctgataacgagcgagtttttgaggcacttcaacggattgagcttcatatgctgatgacagtacctgagttgtataatacacttttggcttcggcgaaatatcaaccattgccaacaaattag

SEQ ID NO: 441947 - DNA, 804 bp, Serratia marcescens
atgaacaaacaacctgcacgcctgataaaaaaaagcgttaccgggcaaaagctaaaaaaaatctgcggcgctgcaggcattttattcgccatgagctatttccctgcggggcaggccgaaatcatgctaagccactcatacagttacaatggcttcgactggactatttatggcgcggtttatgattggtttggcccagacgccacccccaacccctgctatcaaagaagttgcgatctgggcatgcaggtttatgcatatgacttaaccacccacgagaggaaaaacgcgatcggcgcagcacaatattttgcctactcacccagcgggctttccacggccagagatgtcggagaagcgggcaaaagcgtcagggtttcgctaccggcgcaatatttactctggcgatccgccaccggcctcgataacgactactacggctacatgacctgcctggtttaccgttctggcggcaccacacaggtctacgccgaggtctgcacgtcaggaagcaatgccccgccgccaactcccgtctggtgtaaacctaaatcaggcaacattaaccttaaccatggaacgctcaatggcgacgaggtggacggcaaaaccaggaccgccagctatgtcgtttggtgcaacagagacgtcaccgcgaaaatttatgcaaaaaacctgatcgatagccggttgtatttacgcagtgacaacagcctctatgccgatctgatgataaacgacaggccgttaaaccctggcatcacgcaagcctttaaagagggggtaatgactccaacttattga

SEQ ID NO: 441948 - DNA, 510 bp, Serratia marcescens
atgcgcgcgctggcttttccctgttacacccgcttgcggtttttactcatgatgacgctggcctatgtcgccggcgcgcaggccaataccacgctcacggtttccggcagcatcgtcaacccggcatcctgcgtcattaacaacaatcaaatgattgacgtggtttttggcgacgatgtgataacgacccgcgtcagcaccgatgtctatggcggcaactacctgaagcaggtggtgtataccctggaatgcaagaacgccaacaaagtgaacatgaaaattgaaggcaacgctgcggcgttcaatagtcaaatactgaaaacggagcaaagcgatctgggcgtagcgttgcggattggcaataacctgatggccgtcaacagtaccgtctatcagttcgactatccgaatacgccgcaattggttgccctgccgattaaacgatccggcggagcgctaaccgcaggtaagttcaacgcgggcgccacaatggtgttgagttttccgtaa

SEQ ID NO: 441949 - DNA, 126 bp, Serratia marcescens
atgtaccaagcattcgttgaggttgagaaacaaattgcggcccgtatccggttgttcttgagcctgcctttcgagaagcttgatcgcctttctttacaacgccaattggaagagcttggtcagtag

SEQ ID NO: 441950 - DNA, 147 bp, Serratia marcescens
atgaagaagcgtttttccgacgaacagatcatcagtattctctgcgaggccgaagccggggttttagctcggggactctaccataagcatgctttttccgacgccacgttttacatctatggactacctccgttttgcaagtactga

SEQ ID NO: 441951 - DNA, 1017 bp, Serratia marcescens
atgaatatcgtatttctgggtattgatctggctaaaaatgtttttcagctctgtgggttaaaccaggccggcaaaccggtttatacgaaacgaactggccgaaaagaattgctccagacgctggcaaatattcctgcatgtctgattgggatcgaagcgtccaccggggcttgttactggcagcgtgagtttgagaaactggggcacaaagtaaaggtcatcagtcctcagtatgtaaaaccctttgtccgcgggcaaaaaaatgatggtaatgatgcacaggccatcgcagtggctctgatgcaaccgacaatgcagttcgtgtcgccaaaaagccccgaacagcaggatatccaggctttacaccgggcaaggcagcgtattgtcaatcaccgcactgctacagtctgtcaaataagagggctgttacttgaccgggggatccccattggcagtgctgtctccagagctcgccgggctattcctcttatccttgaagatgcagaaaacggtctaagttcccgtatgcgcagaacaattgccgagctctatgatctctttaacgatctcgagcgtcggatccatttttttgataaggaaattgaaacagtattcaggcaatcagaagcctgtcagcgtatcgtcagagttaaaggcattggccctaaaacggccacggccgttgttgctgctattggcaaaggaactgaatttaagaatggccgccactttgctgcatggctgggtctggttccacgccagcattcgagtggcgacaggcaggtgctgatgaatatgacgaaaaaaggcgacaagcatctgcggacactttttattcatggtgcccgcgctgtcgtcagggttgccacgaataacaatgatggccatatgaatcagtgggttaaccagttaaaggaacggcgtggatttaataaaacgaccgtggcggtcgctaacaaaaacgcgcgaataatctggtcgatgctgagaaatgagaccgagtatcaggtagtgtga

SEQ ID NO: 441952 - DNA, 2049 bp, Serratia marcescens
atgtctaaaaaagcactatcaataaattttccaatccagagagttgtgctttctgacgttctaccatacgaagtacctattgtgttctcgaataagcacttctataggtttctttgtgaacacaatgtaagattctcagatacaaaaatagagtggaactccaaggataatgttctcgacaatctagttaagatactactaagcatcccgccagatgtcatagtaaagcgtgatatcactagcgctcaagagaagtcttacgttgatgtcactcaaaccaaaacggattaccatagtgttccctttacttttttcacaacgcataagcaagatcagctgcgacaactttctcttatgcaccccaaagcccaactactggttgtggaattttatgaacaatataaagaccttataatttactttgctggaaaaagtgatttcaccttgcgagcccctaagcgagttgcgggctgtaaattcataaatagcagaacccttatagaaaagcaggaccagctcgatactttggtcgaggtttcaggggaaaactatgaaaacttaagatcattttttgtttacgagaagtttagcaatgtttttaagttttatgagtctccagaacaccttcattgcgagcgagactttaagttcttaacaaagtatgacatctctggttgctttgacggcatatatactcattctcttccatgggctatatatggaaagagttactcgaaaacacacctaaaacctttgaaatattcttttggcaacaaatttgattccttgatgcagaaggtgaattacggtgaaacaaatggtattttaattggccccgaagtatctcggatattcgctgaaattattttgcaagctgtagattccgaggtatcgactcgtcttatggagagaggatggaggctagaccaagactttaaaatctacagatatgtggatgattatttcgtcttttacaatagcgaagaatgctgccatcaagctaaaatgctattacaagaaatattaaaaagattcaagctatctctgaacaaaggcaaagaagaaaccttgtcgagaccgatgatcactccaatatctattgccaagaaaaaaatatcggacttatttgatagatcgcttaactggagcattgcaagcgatttaaaagatggtgaaagtcgtcctcgaggtgagatttatattggacgaacagccttagttacagattttaagtcaattctctcagcctctggtatcggatatggagacgtgcttaactattcgctttccgtggttgaaagaaagctaggtgcactgattgattcttatgaaaaaatagaaaaagcaccaggtcttgataagggattctctaaggcgctagagtctctgctatggtttgttttctttgtttacggcgtctcacctaaagtcaacacaactataaaactgtgcagaatctgccagcgaatacttgcattttatagtgagaaatcgattggtcttagctatggcgcgctaatctcacaagtgatacatgaaagatgcgtcagcataattgataagtattctgatggtaaaagcgctcagattgaaataatgtatcttttggtactgatgggtcagctcggaaaaaactatcgcgtaagcgagagtctccttgctcgctgttttggattcgagaagattgatggaacctacacacaaaaaaatgaactggactatttctcaataaccaccttgttattctatataggcaagaaggttagatattcagagatcagagccgcattagaggcctatattctacaacgtttcgctcaaaataaagactctttgataggtagttcggagatgacgcatctagccttagatcttttagtgtgcccgtacgttagcacagaaaagaaggagtccatactgaattattatggaatggccggatccgatctttcgcggcttcaatcttacaatgactactggtttaccaaatgggctaactttgatttttccaaagagctggacgccaaggttagccaagaagtatactaa

SEQ ID NO: 441953 - DNA, 1389 bp, Serratia marcescens
atggacagccacattcgactgatagggcagttaatcgtgtctattgaccaagcattttcgataaaaaacctgaataaactgctcgatgaagaccgcgagaaaggcggtgatttagaagagcgatacattccggacgcatacgccttacgtacgcatatctatgagttaaaaaaatccaggtcactctttcgatataagtatcgaatcggtgcagtaaccactcaattttatgagctccgcctcggtcgactaaataaagtcataaaagggcgcaaggaatctcactctaggcttgtggaaaccgagctagaaaatatctctagcaaaatcctatcaaaaaacttcagggtagagctaaatgcattgccggcacccattagaagcaaaacagtatatggagttggcagggatttagcgcaaattctcgcaataagattcgtacagaaaatccttaaggatgtctatcatgtagagatgccgcctagagacattttagtcgctcaagtcaaatccctagctatggatggtgcaccaaagtttattctgcgtgcggacgtagaatcgttttatgagtccgtgcagcacaaatatttacttgaaaacattcaccaatcaccccagctctccgtattagtcaagaggattataactcggattttgagcgattacttgaagctttcaggtgcagatagaggattgcctagaggaataggaataagtgcatacttatctgaaatatatttagcatatatagacgcccagatcagaagacacagtgagattttttattatgctagatacgtagatgacatgataatgatgttcgcgcctgagaagaaggacgcagccaatgaatatctgacttcattcagcgagcttctcgccaagcaaggcctgtctctaaacgataagactcaagaactgaatttgatggatgaacagcgcggaaaatttacatatcttgggtatgagtttgatgtctcccaaagcagtcgcggcgtcaaaatgagcactgccaagtttgaaaagtatcgaaagcgcatagaaaaatcttttaaagactaccatgctaaagtagcttttatccccaagaaagcagctagagaacttattacaaggagcctattcctaacagggaatacgcgactttttaacagaaaaagcaatgcttttattggcgtatactatagcaataagcatatcaccgatctttctcaattaagaggcttagacagtctttttcaagctaagatcaacttattaacggacccgggactaaaaaggaagctctctcgattgtctttcgaaaatggttttgccaagaaagagttcagaaacctcagcacgaaaaaactgtcagaaatatctcggggatggaaacatgtctaa

SEQ ID NO: 441954 - DNA, 186 bp, Serratia marcescens
atgggccaggcaatggtcgatgtggtcgtggatcaggacgcgctttgcggccgtcaccgcgctttccaccgccgcgagctggcgggcgatgtcgagacaggattcgccactttcgatcatccctatgacgtgccgaagatgaccatcggcgcgtttcagccgcttcacgagatcgggatgggttga

SEQ ID NO: 441955 - DNA, 525 bp, Serratia marcescens
atggcaacggcccctcaacacgtcgaccgcacggcaagcgaagcgcgcaggcccggatctggaagccgggccggaggcgtcagccgagcggagcgagggaacgatggaagcccgaatggggcgagacgccgcaggcggctcgatgcgctacgcgcacgacagcgcgaccggccatgtttcttggccggggacgtccggacttcaaggctcgatgcacaagctcatgcgccagtcatcgggaaacaggttcgacagcgactgccgtggtctggccgatccggcgcagccggttcggcggtctttgaggggcgccaagcctgcgcggcggggatagcccgcagggctttcccctggaggcaagcgaagcgcgcagcgccccgtcaggggcacgtaggcatcacgccgagtcgtcaggacgcaggctggattccgataccggcatccacggcgatgacgagtccagcagatagcgcgcaccgcgcgcgtacagacccgacagcccggtgggctggtagaacccggtga

SEQ ID NO: 441956 - DNA, 210 bp, Serratia marcescens
atgacccgcatcaccaccaaccgcccgcgcatggcggcgatctacgcccccggcactgtacgcgcccgccgctggcacggcgcaggcgacgtgcgcggctaccgcccgccctcgggctggacggcccgcgccgacctcaccgacattcatcccatcacgggccgcgccttgtcgcgtgccgtgtggtggcttatcgagacaaaggaataa

SEQ ID NO: 441957 - DNA, 273 bp, Serratia marcescens
atggcccataccacccgccagaaagacaagctgatcgcccgtgtccgtcgcatcaaaggacagttggaaggcatcgaacgtgccttggagtgcgaggccgcatgcgtcgaggtgttgcgccagatcgcgtccgtgcgtggtgcggtcagcggcttgacggcagaggtaatggaagaccacctgcgcgaacatgtcctagccgctgcgaccgacaagaagcgccatcagggcggcgaggaaatgatcgaggttatccgcgcatacatgaaataa

SEQ ID NO: 441958 - DNA, 972 bp, Serratia marcescens
atgactacgactagccctcaagcatcgggccacaatcatttcttcctcggtggcgaccaccagcgcaatgaacgcaaggtgtggctggtgatcgcgcttaccgccagcatgatgctggtggagatcattgcgggcaccatctacggctcgatggcgctggtggccgacggctggcatatgtccacccatgctggcgcgatgctaatcgccgcattggcctaccgcttcgcgcgccgccatgcaggcaatccgcgcttcaccttcggcacgggtaagctcggcgatttggctggctttgccagcgcggtactgctggccctgatcgccttgctgattggctgggagagcctggttcgcctgacccagcccatccatatcgacttcgagcaggcgattgcggtggccatcgtgggattgatcgtcaatttggtgtgcgcctggctgttgaaggacgatcattcccatcacggtcatcatcaccatcacgcccacgatcatcacggccacggccatcacgacgagcaacatgaaccgggcaaggcccgtgacaacaatctgcgcgcagcctatctgcatgtgatggccgacgccctgacatcagtgctggcaatcgtcgcgctattgttggggcgcagctccggctggacatgggccgatccggtcatgggcgtgatcggcgcgctggtgatcgccaaatggtcgtggggtttgatccgggacgccggcagcgtgttgctcgatgccgctgccgagggcgaggaagtccgtgaagaaatccgggaggcgatcgcgcccacgggcagcgaggtcacggatcttcacgtgtggcaggtcggccccggccatttcgcggcgatcgtttcactgataactcaggagccacgagagcctgcacattacaaggcgctgctcgcccatatccacgagttggcacacgtcaccgtggaggtggaacgtggggcggctgcatga

SEQ ID NO: 441959 - DNA, 771 bp, Serratia marcescens
atggtcgatcgcagcgccgagcactggtatccgactgccgcgtatctgtacgtgctgcacttggacgaccttgggacggcctgggaatatctgcgcagaaaccccgattaccggctcgactggctgcgccatcatcgccggccgaaagccgcgcagcaggcggcgcatcgctggggcttgcgcctgctggaagatccggcgttggatgcgcgcgacgcgcatccagcctggttgcccggccatgtggccgtggtgcagctctatcccgacgccgatccgccgcaggatgcccccgcgttcacgttttggcgcattgccgggcacaagcaactgctccatgacggcaaagggctggcgctgatggcgcacagcccaggtcattgcctgcgcttcgcgctggcgcccggcctggaagacgggatggctgtcgcctatgcccgccgcggcggcgccgccgcacctgcgcgcaaccgtgcgctcggcgcggccctggcttctgcgaagcccaggccggcacccgccgcgctgcttgagctacacaccttgcaggcgctcgacgcaaccctagcgggtgcgtccttgcgcgaggtggccgaaggcttgttcggcggcgatgccgcagccgattggtacagcgacggcggcttgcgctccaaggtgcgccgcctcgtgcggcgcggcgatgcgctgatgcgcggcggctatcgccgcctagcacagcttgcaccgcttgagaagggtcgttttgaaggcaacgcaaaacgaccctga

SEQ ID NO: 441960 - DNA, 234 bp, Serratia marcescens
ttgcaaggtcaacgtatcggctacgttcgcgtcagcagcttcgaccagaatcctgatcgacaactggaacaaatagaagtcggcaaggtattcaccgataaggcttcaggcaaggacacacaacgtcccgaacttgaaaggctgctggccttcgtccgcgagggcgacaccgtggtggtgcatagcatggacaggttggggtcgtttgcgggagggggcggaatcctacgctaa

SEQ ID NO: 441961 - DNA, 957 bp, Serratia marcescens
atgatgtggtcgcgctacaaagtgcggaaagtacatcaaatcccaatcgttgagagaatgtggcaagctatcgcccaacaaatcgctgcagccgacccaaaaccgctacgcggtttcggtcggctgagctcaggcgttagccaccaagaaggtgccatgaaaacatttgccgcatatgtaattatcgcgtgtctttcgagtacggcattagctggttcaattacagaaaatacgtcttggaacaaagagttctctgccgaagccgtcaatggtgtcttcgtgctttgtaaaagtagcagtaaatcctgcgctaccaatgacttagctcgtgcatcaaaggaatatcttccagcatcaacatttaagatccccaacgcaattatcggcctagaaactggtgtcataaagaatgagcatcaggttttcaaatgggacggaaagccaagagccatgaagcaatgggaaagagacttgaccttaagaggggcaatacaagtttcagctgttcccgtatttcaacaaatcgccagagaagttggcgaagtaagaatgcagaaataccttaaaaaattttcctatggcaaccagaatatcagtggtggcattgacaaattctggttggaaggccagcttagaatttccgcagttaatcaagtggagtttctagagtctctatatttaaataaattgtcagcatctaaagaaaaccagctaatagtaaaagaggctttggtaacggaggcggcacctgaatatctagtgcattcaaaaactggtttttctggtgtgggaactgagtcaaatcctggtgtcgcatggtgggttgggtgggttgagaaggagacagaggtttactttttcgcctttaacatggatatagacaacgaaagtaagttgccgctaagaaaatccattcccaccaaaatcatggaaagtgagggcatcattggtggctaa

SEQ ID NO: 441962 - DNA, 765 bp, Serratia marcescens; identical to SEQ ID NO: 6031

SEQ ID NO: 441963 - DNA, 258 bp, Serratia marcescens; identical to SEQ ID NO: 231742

SEQ ID NO: 441964 - DNA, 1434 bp, Serratia marcescens
atgtctgaatttgaattattggcacaggatctgcttgaaaaagcagcagcggaagaacaactgcgacaggaaaatgataaaaagctactcgagcaggtgctggaaatttatgaccagaagtacgtggctgagctgctcagaaaagtcggtaaaaatgagtggagtcgcgagactcttaatcgctggattaatggtaagtgcccacctaagtcgctaacgtcagccgaagaggctcttctgcgaaaaatgctgccggaagcgccggcacatcacccggactattccttccgctttattgacctgtttgctggcattggcggtatacgaaaaggctttgaaaccattggtggtcagtgcgtttttacaagtgaatggaataaagaagcagtgcgcacatataaagccaactggtttaacgatgagcatgcacacacgttcaatcttgatatccgggaagtcacgctcagtgataaacctgaagtaccggaaaacgatgcctatgcctacattgatgagcatgtgccggatcatgatgtacttctggcaggattcccctgccagccgttcagccttgctggcgtgagcaagaaaaactcactaggccgtgcgcatggcttcgaatgtgaggcacagggaacgctgttctttgatgttgcgcgtattatccgcgcaaaaaaaccggccatctttgttctggaaaacgttaaaaatctgaagagccacgacaagggcaaaacatttaaagtcatcatggatactctcgacgagctgggctatgaagttgcggatgcggctgacatgggcaaaagcgatcccaaagtcatcgacggaaagcacttcttgcctcagcaccgcgaacgtatcgttctggtcggtttccgccgcgacctgaatattcaccaaggctttaccctgcgcgacatcagtcgtttttatccggaacaacgtctgtcatttggcgagttgctggagcccgtggttgacagcaaatatatactgacaccgaaactctgggagtacctctataactatgctaaaaagcatgcagctaagggaaacggcttcggctttggcctcgtcaatcctgaaaataaggaaagcgttgctcgcacgctatctgctcgctatcacaaagacgggtctgaaattctgatagaccgcggctgggatatggccacaggtgaaacagactttgcggacgaagaaaatcaggcgcatcgtccccgcaggctcactccgcgagagtgcgcacgcctcatgggctttgaaaaaccagatggtaggcctttccgtattccagtgtcagacacacagtcgtaccggcagttcggtaactcggtagtggtgcccgtgtttgaagcggtcgctaagctgcttaaaccttacatactgaaagccgtttcagccgatacagacaagcctgaacgaatctga

SEQ ID NO: 441965 - DNA, 1209 bp, Serratia marcescens
atgtcggttttccataactggctacttgagatcgcaggcgggaattacttcgtctacattaaacgcctttccgccaacgatactggcgcaacaggtggtcaccaggtcgggctttatatcccttccagtatcgttgaaaggctgtttccgtctatcaaccatacccgtgaactgaacccctcggtctttcttacagcacatgtgtcatcgcatgattgtcaggacagcgaagctagggcaatttattataacagccgtcattttggtaaaacccggaatgaaaaaaggatcacgcgctggggaagaggcagtccacttcaggatcctgaaaatacaggggccctgacgctgctggccttcaggcttgatgagcaaggtggggactgtacggcagtgaacatctgggtatgcgccagcactgatgaagaggatgtcattgagacagctatcggtgaagttatacccggaacacttatatccggacccgccgggcagattcttggcggactatctctacagcaagagcccgtaaatcataaatatgttcttcccgaaggctggcaccagcgctttccgtctggaagtgaaattattcagtatgccgccagccattatgcgaaaaattcccttgatccggatgagcaacttattgaccgccgacgcgtggagtacgacatatttctgctggttgaggaactacatgttctagacatcatccggaaaggatttggctctgtggatgagtttattgcgctggccaactctgtcagcaatcgccgtaaatccagagctgggaagtctctggaactgcacctagagcatcttttcattgagcacggactacgacacttcgccacgcaggcagtcacagaagttaataaaaaacccgatttcctcttcccttccgcagaggcctaccacgatgctgagtttcccgtagaaaatctgcgcatgctggcagtcaagactacctgtaaagaccgctggcgtcagatactgaatgaggccgataaaattcatcaggtgcacctgtttacactccaagagggagtgtcgcaggctcagtaccgggagatgcgggaggcgggggtcagactggtagtgccatcatcgctgcacaaaaaatacccggaagcagtgagagcagaattaatgacgttaggtgcgtttatcgctgaacttacagggctttatgcagaacttccataa

SEQ ID NO: 441966 - DNA, 2154 bp, Serratia marcescens
atgaacttcaccgaccttttcatccggcggcccattatggccctggtcgtgagcctgctgatcctgctggcaggcctggcttctgtcttatccctgtcggtgcgccagtatccgtacctcgaaaacgccaccatcaatatcacgacctcgctgccgggggcgactcaggaggtgatgcagggctttgtcacgacgcccatctcacagtccatcgccacagccagcggcatcgaatacctgagttcgacgacaacccccggccgcagcgaaatcaaagcccggctggtgctcaatgccaatgccgaccgggccatgaccgagatcctggccaaggtacagcaggtcaagtaccagcttccagcgggcgtcgccgatccggttatcagcaagtccaccgaaggcggtaccgccgtccagtatgtcgcgttctacagcgacaccctgaccatcccacaggtcacggacttcgtgaaccgcgtggcgctgccgctgttcgctgggatatcgggtgtggggcaagtcgataccaacggcgggcagacgctggcgctgcgcatctggatcgaccccgtgaagctggccgcgcgcggcctgtcggcgagtgagatcgcggcggccctgcgcgccaacagcgtgcagtcggcgccgggtcagctcaagagttcgctgaccgtcaccaacatcagcgcagccaccgacctgcgcagcgtagaggacttccgccaaatggtgatcaagtccagcgccggcggcggcgtggtacgactggccgacgtggcgacggtcgagatcggcggccagaactacaacaatgcgtccttcgccagcggcatcccggcggtgttcgcggcgctcttcccgacaccggacggcaacccgctggacattgctcggcaggcacaggaactgttgccccgcatccgggcgactgcgccgccagggttgcaggtcgtgccaaactatgacgtggcgaagtttgtcaatgcgtcgattgcggaggttcaacacacgttgatcgaagccatcgcgatcgtcatcgccgtgatcttcctgttcctgggaaccttccgcgcagtcatcatccccgtcgtcaccattccgctgtcgctggtcggaacggcggcgctgatgctggcgttcggcttctcgatcaacctgctgacgctgctggcgatggtgctggcgattgggctggtcgtggatgacgccatcgtggtggtggaaaacatacaccggcatatcgaggaaggcgcatcgcctgtgcgggcggccctgctcggcgcccgcgagatcgtcggccctgtgatcgccatgaccatcacgctggcggcggtctatgcgccgatcggcctgatgggcggattgaccggggcgctattcaaggagttcgccttcacgctggccggttcggtcatcgtctccggcgtggtcgcgctcacgctgtcgccggtgatgagttcgatgctgctcagttccaagcagagcgaggcgaaactcgccaggcaggtcgaacactatatagaaggactgacctcattctaccggcgcctgctggcccgcacgctggccgcgcgcagcgcggtgctgctggtcggggtcgccgtgctgggcgccatcgtggtgctgtttatgggcatccgccacgagctggccccggtcgaggatcagggcgcggtcatcgtcatcgccaaggcaccgcaatatgcgggcgtcaattacaccgctcgctatgcccagaaaatcgagaagatttttgaatcgctgccggagtttgacaacagcttcatgcacatcggcggttccgggcgcggccagaaccagatgctggccggtgcgatcttcaaggattggtcgcagcgttcccgctcctcaatccagatacaggggcagctccaggcggccggcggcagcatcgacggtgagacgctgacagcggttcaggtgccgcgctgcccggttccagcggcggcctgccggtgcagatggtgttgcgctcgcccgacgacttctcgacgctgttcaagacggccgagcagatcaaggacgcggcctacaagagcgggctctttctgtacgtgcagaacgatctggcattcgacagcccgcaggcccatgtcgccatcgacagcagcaaggcgcgcgagatgggcgtga

SEQ ID NO: 441967 - DNA, 1155 bp, Serratia marcescens; identical to SEQ ID NO: 129499

SEQ ID NO: 441968 - DNA, 645 bp, Serratia marcescens
atgaaccttccctataactttatgaacggcgacgaagatttaactgaagaaataataaacaccatgctccaaattgggataaaggaagcaacgcttggaagagtgagtgtactcatgatttcacaactatatgtatcctttatgtcgcgtcgcgaaaacccgttcattatagcggatgaaatttcttgccttgaaggaaacaagttacgaggggaaagtagaaccaagccaccgacgatgttcaatagaaaaccttatcttcgaggattgtggcataagcactaccacggttcaggtatagatgtgatggcccgaaatttacaagttgcattgaaaaattacggcttaccaaaatttgaagccaaggttgaagaggcaatgcagtctggtgaagatcgttattttaccgctgaagatgctgctctcatcgctcatgaggctgttatggaacattgggaacgacgtgctggcgagcaaaagatgactggacactggatcatttatgctatttatgaaggaaagaactattatctgagccttggtcggcataccgatgatgaggcagagcttaggcgacaaatcgaaaccacatgtctgtatcaattcccttttttgtcagaaatactctgtccactcacggaatga

SEQ ID NO: 441969 - DNA, 447 bp, Serratia marcescens
atggcagataactcatttttcaacaatgttgataaaaaaatcgcagagaaacagcaagagcaaaaaaaagagaaaacgcgtttagatgaagaaagagcctttttatctcaaattgttgaatcactagtgccaaaagttgagttttacaaagaggggctgcttgaaagaggaatctatgctgaattgtcctcctcatcacgatatatttgtttcaaaatgaaatacaaggatgggggacgacatgacctgctcttgtctgaaacgcaacgatttgatggggggatcaccatgacgactgaatcaaccaatgatgatggtcgcacctatacatctacagatggtagttcttataaatcaaataattgggataatgatatcttcattcagaaactggaaaagcatatcaatgattatctgttttatgccgagcgtcacggcggcctttga

SEQ ID NO: 441970 - DNA, 903 bp, Serratia marcescens
atgccaaactctcctgttttggagttacaagctctatctagtgacccatcagtggatatagttgcaacattgatgaaagccaaaatgatcgcagtaaaactgggattacctgagataacagaatggatagaacttgaactgaatggttatccaaccaacaatgcaacacctgactacaggaagggccaggggcagcttaaggcatttaatccttttaatggttggattccggttgatttgagtcaaattgactttgagttacaaaaaaaattcaagactttcactgttattgagtctatttcatccatgcaaagaattgcgatgctgggtgaaaagaaagcaagcttagttgtacccgttgaaatcgcagggatgttgggtttgggtcgtaaacacattcctgaaattaggtggttcttcagcatcgggtttgtacatggtttgattaactctgtcagacaaagaactcttgattggtcgttagatcttgagaaaaaaggtattttaggggaaggattaagattttcgcaaaaagagaaagaggcggctcccatgacgattcataacatcacaaacattcacggcaatgttaacaacgctggtgtcattggttcgggcaacggcgatatcacccagaacaacagcatcgccgctggcgattttaactcactagagaagcagcttaaggaatggggcgtatcggaagaggatgtcgaaactctacatcaagccattcaagaatcaccagtcccttctaacgcagataattttggcagtaggatcggcgaatggttaggccacacaatcggtaaagcatatgcaggtaccctgaggatcgcaggaagtgcagccccattattactgactaatgccatttgccactactacggtataccagtttaa

SEQ ID NO: 441971 - DNA, 468 bp, Serratia marcescens
atggcgtatccactgttgacccgtcagcgtctgaccgtaaggctgtctgcggtgaacgggatgctgcagatgtccgacgctgtctgtatgccgggcattgaaaaggacgacatcggcctgtgcttcgcgtgctgtgcgcaaccgttcctgcagaaaatcttccgcaacccggtcatccgcatccaggaacaccacccattcgccacggtgaatcgccagtgcagcattacgggcagcatacaccccctgattttcctgaagaatgagaataagccgttcatctgtaatggcgctgagtaccgtccatgttgcgtcggaggagccatcatccacaacaatgatttcagtactgagcgctgtttcgccaagcagtgtatggaccagaactccgatgttgtcagccgcattgaaggcaggaatgatgacgctgatatcgatgttgattttcattgcactaagggaatgtaa

SEQ ID NO: 441972 - DNA, 360 bp, Serratia marcescens
gtgaataacccggcgtcaattacccaccgcccggattattacgatatccgcgcgttcagctatagtgacgtgattgcagatattctggcactctgtacacagacacggtaccggtctgtcagacgcgcgctggtcaggcatgcgctggtggaaagccgccattttctgggcctgtaccggcgcagggtgagtgaccggcaggcggtccgggcgcgttttcgtgcgcggatagcctttcgccatctggtacccggcgtgagcaacctgagcgatgtctttttcctcctgaagctggtccgcaatatatatttgcctggtgtccgcaatactcccgcagccgtttcgcaggtgcggcgttaa

SEQ ID NO: 441973 - DNA, 321 bp, Serratia marcescens
atgctgcgggaatgcctgtggatagtcgcacattaccgggacaccgaagcggtactcacccggcagtttcgcctgctggctgtcttactgtatctgggcggttattttccgaaaggggatgccgacggcatgctcccggaaaagtgtttcattttactgaacgccccggaattaagccccctcctgacagacgatacgacccccgatgttctggcggcgtcctgccgcacgctcttctactgcagacagatatcaccgttaaggtgttaccgccatacgcgctgtctgagcgaacatctgtttcaactgatggagatctga

SEQ ID NO: 441974 - DNA, 360 bp, Serratia marcescens
ttgtcgaataaaaaaccaacagcccgccaccacaccgaagcgccgtggtgtgggctgaaacgcgatatcaccccgtgctttggcgcacgcctggtgcaggagggcaaccgcctgtattacctggccgaccgggccagcatcaccgggacattcagcgacgcagatttacgccatctggaccaggcctttccggtactgatgaagcagttggagctcatgctgacctgcagcgaactcacgccccatattcagcgctgcatcacgctccacgcaaaagggctaatatgtgaggccgatacgctcggctcctgtggctatctgtacatcgtaatttatccgacacctgcaacaaccgcataa

SEQ ID NO: 441975 - DNA, 480 bp, Serratia marcescens
atgcccgtatcatattccccgacatgcaacgccttaccattaaccgctcaacggacggttaaacgggcgttatcgttacttgagcaccacctgcgcgagccgggtgcgtctttcacatccaccagtgccacccgtgactggctgcgcctgcaccttgccacactggagcgtgaagtgtttatggtgctgtatctcgacaatcagcatcgccttattgctcatgaaatcctgttcaccggcaccatcagcagcaccgaagtccatccccgcgaggcggtcaaacgcgccctgtacttcaatgcggcggcagtgatagtcgcgcacaaccatccttccggcgaccccacaccgagccaggctgaccggtctgtcacgcaacgccttatacaggcccttgccctggtggacattcgcctgctggaccatctgattgtcggcggtatggagatggtctcgtttgccgaacacggctggctgtaa

SEQ ID NO: 441976 - DNA, 219 bp, Serratia marcescens
atggaacacgctgcactgtcccggcttgaagccctgtgggacgcgctgacacaggtccccgtcgaagaggatgagaatgacgtggttatcagcgaaccctttttacactttccggcaggcaccggcatcacgacagtctgggcgtggttcgaaaccatgaacccggccttcaccgtggcccataagctgtatggcaggcccccctctaggccgcagtag

SEQ ID NO: 441977 - DNA, 480 bp, Serratia marcescens
atgaccgacattattaatattaacgacaaccatcagcgacctctgcaggctggcgataacggttctgcacctgctctgacagccacgcccgtaccggacgaacagcgtgtggaattctggccgcagcactttggtaacatcccgcagtggataacccttgaaccgcaggtctttgcgtggatggaccggttctgcgctgactacagtggcggcatctggaatttttatactctcaacaacggcggggccttcatggttccggaaacggacaacgatgccttctggtcgctgttcaacgccatgaatggcaacgccgcagacatgagcgccgaagccgccgggattgccgtctgcctgctgacatacagtcatcatgcctgccgcacgatgtgcagcgccatgaccgggcattacgaccggctgcgggattacgccctgcagcacgccgaagcccgcgccattctcaccattattgactga

SEQ ID NO: 441978 - DNA, 3234 bp, Serratia marcescens
atgaagtgtcatgataatcaggtagaggaggaaattcggaattgtgctagtgcactcctggatattacaaatggttatcctttacatgtaatttactcttctgaatatctgtcgcagaatgggttaccactatcatcatggcaaattgagaaacttccatcctgcactgatggaaatataataacttactattccgaactttggcgtaatcttaattataggcaaaaagatgtgctccatctctgtagtggttttcagtttgcctggccaagacaagcaattggtacaataataaaagataatcatgagtatgctccaagtgtagatgctgtggcgcatatgctttcagaaggtttctgtggcttaagaccatttcatgaaagtttggtagtttttataaaaaatcagaaagagcatcaagaacgaataaactcattattaccaagtgtttgtgactggctaaaaaattgtgctccggtacacctgaaagacaattggctttggtccagtcttgctcgtgcaggcgattctacagaattacgtgaaggggttacccgagactggatacttgataaacttgtaaatggtatgccaatcaaatcatgtattcgtttattgtccgaggctgaaacttatgccttcgatgcattggaatacgcagaagcatataaacacagagagttaaaaacaaggttaataaatggtcctgagtttcagatatgggatcccattaatttagaagtactgtctcttgtatcttctaccgaaccggcattaaatgaaattttatcaggcaaaaatgagtactctccagtaaaattatctattttagccatagcattatggcacagaggtgatttgtatcaagctaatcgcttatctaagaaagctattgaccgataccgcgctaaaaataaattattatcttcaagacattcacaagaccatgagtctgaggctgtgactgttattaaagcaggggtgttaactgacagtctaaattatgatgcaattttcgaaggggagaatttttctaattggccagatggatttgtggctagttttagacatgcatgttgcactaaaaaagatcttagtctgcttctgagagcttggcactatttgccaagcaattcacatcataaatctcagattgagcttgaagcaattagattaagcattgtagagggagctgacataacctgcaggccagagtacaagtccttttcctcacaacatttgtcaggtttttttgatgcattttctaagaaaaaattcatccgtattttaactcatgtttttgaaggacagtcatcgacaacttcaaagattgaagttgtgagtagttaccataactggtttttttcttcccttaacatgagattaaatgctgaaggagattattcatggttacctgtcagcgcgatttcagaccgtatagatgtttcagctcattatgaattgctcaacgagatagctgattggatcgctgatgtcatttgtgctgaaggcacattaaattttgacatagcgtgttcattatttccggtagggcctgtattagatgatatacaatgggaaactcgcagaaatgatatttctctgaggaggagttggattgaaattgcagccgatcttcatttgataacgaccaagacagaagtttcacgtgacgagttaaagcgcatagttgatgatggtgtgttcaatattaactggttaagattatggtacaaagaatctggccttaaactgttaaaagataatgcctcagaactgcttattgatctcgaagaagttcgtcaaatgagcgagttagaagaaactatcgagaactccaataataacctcgaactagctcaaatagcattccaacatgaaaatctagcatcttttcaaaagttgttgagaaaaacatgggattttgtcctgggctatggacatcataaagatccaactatttttgatgttataaatgctgtgagttttatttcttatgaagatcctgattctgcacttacaatcttagaaagaatatcaccaatagtttacaatatttcaaaatttactgatggggacgaaactaggaactctaaacactccttaacttcaatcttggcacgattaaatccgcaaacagcggcttcagtttatgaacaggagctttgtgatggtgaatggtattattctgaagacacaatacttaggctaattgagagatgtgatttttctgaaccaattataaagaatttatacctgacagggttgcattcaagctgtcttcaaatgcttctgaataaggtagagagtgggaatccacatgctattcaaattgcgggtgaattagaaaaacttctcggtaaaaaaattcagatgttgaatgatgataaacattcgtcaaatgatgttctggatgaaaagattgtattgaacatatcagattatccaccggatagtttcgatgaactcatcgttgatctaaaaggaaattatagcactcataaatttttagtgtcttggtataaatactggtgtgatcagggaaaagaaaatgaattgctgcatatacttacttcatgcatttcgacatttactgatcgatttgatgataaacgatatttgctagatcttcttttttcaagctcttttaaattagaaggtaagagtagagcctttaaaattttggtggcagcccatagatcaatggggggatggtcggattggtatgagcgtgaagaaaatagcattaaccgacttaagatagttgcggaacagtacccacaaaaaatcgaggaatttataaagctcacaacattacagcctgacgactggaacgacaaatttggtaaactgatcataccaaatgacaaactggtttttttactttctcatagcggcagaaaagaagaagctcttaagctcacattacagatggtaaaaagtttagaagatagcgtccggaatcttcaacttacaaaacctatttgggattggcacagaaatgactctcttgaggaggcattacttaaatctttagtttcaagacttaagctgccaattccttcaattaaaatctgggtaatggagcagctttcacaacttttaatagctcagaagcctaaagtagaggatctattaaaaaacaagaatcagaatgtgttgaagtacttagcgttttctttatcgcaaaatctaaaggatatgtttgtgataatgaaattgggaagtttataa

SEQ ID NO: 441979 - DNA, 1200 bp, Serratia marcescens
atggataagaaggcgcagttggatgcagaaattaaccgacaggaaaagacgctaaaaagcgaaacaaaccgtataaaaaaagcgctacgccagcaggaagctgagctggattcacgaatcaggcaaacctttgagcaagcgtctcaggcgggtatagaaacgttggcacagacggcgttgttgcgaacgatgatcgctggttcggccacacccacacccgttataccatcagaacgaatcaccgaacccgccttgagccttccgttacctcagtctttactaccgccggaagtaaatgaaataaacagcaaaagagtgctacaggccgcgatcgaagaacaggcagcgattaccggactaagcgaaaatctgttgttcagtttgattgctgccgcaagtgttgtatcagttgtcggattaacaggaaaatacgcccagaaaacggtggtttctttagccaatattctgtcgggaagcatatggggggaggtctctattcatggtgatctttttagtatcagcgacttaatgaaatcgcctgtgctaatcaggagtacaagtagcacgagttctatgacgctgggtgacttcttagcgcaccaacaatcaagcgggttaatgacgatagtaaaactacgtgggtttaaccgaatgccgccggaaacattacttcccgaacttaacgaatgcctgtttagcagtgaatattctgcgggactatgctggaaggatcaaaataataccttgcggcacctttcgttaagttaccctgtattgtttgtattgacgtttaccgttggtaaaagtacgttcccactacaggggccagttgccaatcagttgcccgtatttatggccgaatatagcagtacacaggttgagcagactgaatactcaccagccgaatatatttcagatattgcgcccgcgtgcgtggcctccaaattatggtcttcgttatacgccgatgctcaccctaaagataatcagcagcaaactatgcgggcggtgttaaacgcattggattattccgacgaaaaatctcaggcgctggcaatgctggctttcactattgggcgcagtaccacagaaaaaataaccgcagaaattgagccattggctcctgcattgataccttatgttcaggaaatcactcacggtgcatctgcaaccgtgcttgatcatctgttccagctataa

SEQ ID NO: 441980 - DNA, 5997 bp, Serratia marcescens
atgaataacccactggaatcatttgaatcaataagggatttttacatcacctatcttgaaactgcttttcgtataggttcacccgatattcaggcataccgacgtagcttactggaacagcaaggtacattatgtgcagatctttttctggaaccaatgccaagatatcaggattatggtttaaccatcagtgatttacgtaatgtggctgaaggtgaggaatggctgccagggtttaccgagcaacaaagggacgcatttatcgatctttgtctgggagggcttttgcctcgcgataaagccgattccaccaaaggacgttttaaactttatacccaccagctagacatgctgaaaagaggtgtacagcccgcaatgccgggtatcgttacatcaggaacagggtcaggtaaaacagaatcttttctgctgccagttctggctcaaattgtgaaagaagcgagtggttggccgaaaagtccttcgcttaaatgctggcagccgtggtggcatagtggagtaaatactcagcctacgtttatgcgtgaggcagaagcatcagcacggccaaaagccgtgcgagcgctaattttgtatccaatgaacgcactggttgaagatcaaatggtgcgtatgcgtcgggcgcttgattcccgagaagcacatgaagcgatggatttacacttgggtggcaaccgtatcttttttggtcgttatactggcgcaacgaaagtcactggctggttaaaccatccccgaccggggagcgaggaaaaagagaaaaaagagaaaaaacgggtcgctggtaaaatcactgaattgcgcgaatatcttcaatccgtggaagacactcatcgggaagctgtgcggcaggggattcgggatcatgatgataacctgcaattcaatttccctagtgtatcaggcggagaaatgcttagccgctgggaaatgcaaaaatcacctccggatatactgattactaacaccagtatgctttccacgatgttgatacgggagattgacgatcctatttttgaccaaacccgagaatggattgaacacgatcctgatgcctatttttatcttgtccttgacgaactgcatcttcagcgcggtacagcagggaccgaagtcagttatttgctcaaacatctcataaaccgtctggggctggatcaggaacagcaccgacataagctccgtattctggcatccagtgcctcactgcccgttgatggccctgaaggtaagaaaagcgttgagtatttatgggggatgttcggtcagcgaggactacctgtgagtgcagcagccaaagactgggcagattgcgtggtgaatggtgccatggtttctccagcacaggataatacgttgcatttccacggagacctcaacgacttctgcaatacggtaagacagctacagggatcctcactgccatctttgcaacactggtcaaacgttgcccgaagtatggggggctatcatgacgagcagtgtatggaaaaactggctaaatgggttgttgtgcaggccgcctgtatgcttgaaaaaggttgctatacatgtgaaaagtctctgcgtgctacatcaataactgctctggcagagcgtatatttccctcccattccgcaggacgtgaggggattcgtgcattaatatggttacgtgctgctacagatagctggcctgagtggttttcacatccctttcccgacgatattccattgccacgttttcgcgcccatgcgtttttacgggctctggaaggattatatgcagcaccgctaccttccccctcaagtgcatcaacagaagaaagagatcagcacttttttgccgatctgacggttgagtctggcctgcgttatggcgagcgtcactatgacaacaaaaaatcacgacgcgtagaattactctactgtgagtgttgcgccacactattttttggcggcaaaccctcttctttctcggcaacggatagccgcgtagagcttttacccaacgatcccgatattgatcaactacctgaacatgcgaaatcggttatggttgaacgacgttccgccgaagaatatgcgttgtttatgccgaccgtcgatcgattctggcctagaggagaaggaactccagccgatgaggactcttttgggaagtggattaaggctggttacgatccgtttactgcggcgattcaacacacgttatcgcctataagatcgattgaacaaactcatattgcaggctggttctattatgtcccatcgggtgatttttccactaggaaaagaggccagtcgtccagccagtcaccggggagtgcgctgcctttccagtgtccggcatgtggtacatcatataaatacggtaaaggtaaactatcacctatccgcagttttcgagtcggttttgcgaaaaccacgcagctcttggccagtacgttgatggctgaattacaacgctctggcgatcgggaacggctggtcacattttctgacagtcggcaggatgctgccaatgcggcgctcgatttggagtcaggtcaccatgatgatgttcgccgtgagattgttgtgcgctcgctgaaggaactgtcagcgagtcagtgctcccataaagaagtgatcatacagttagaacaacttaataaacgcagaaaagaactaattagcaaagagattaaagaggggcggctctctgcggatgaagacaaagaattaggacagctttttggcgaaaaagagcggctgagtgacttattgctactgccacaggcagacagcgtatcgctgagcagcatactggagcctgaagcaccaatcgcaggcaacgtccttaatcctctgttggcaacattagttgacgcgggtattcatcctaccgatcgaacggggatatctcctgtccctgagccctcaaaacaaaaacatgatgaagaaactatcacttttgcatggcagcaattatttgaaaaaaacaaacagaccaaatggtgttggaagaaacatccttcctatgaggataatctggacgttgcccggaaggaaatctcccgcgacctaaaacaactggtcggggaaagcgtgttcagtaaaacctattttgcgctggaagaagcaggatggggttatccctgtcttcctctggctaacaactgctcgcgggaacaattggctgtctatgacgctatgcttcgcgtattggcggatgcctatcgagtcgcaccgtcccagtacacaacaacagaaacgcgctggcatgttgcagaggatgtggagcctaaaaatcggttgcgccgttttagcgatgagctttgtaaccactccagagccaagacattatcgctgattggggactttctggtgcacctcaaacgctctggtcatcagggcggcattattgacattggaaaagtgcactttcgtttagtagaggctaccgctcctttctggcgctgtagtcactgtggccgcgtgcatttgcacaagggggcaaaactttgcacccgctgttatgcgccactacctgaaacatcttctggtaacgcgggggaattacaaacccaaaactatctcggtaaacgtatatcgtatgcttcccgtatcagtagaatgcgttctgaagaactcacgggcatgacggggaatccggcagcgagattacgccgttttaaaagtatcctcattgctgatgatgacgacatattgccaaaagggctggaggacttcgaacctcatcctgagttggatagagccgccagagaggtggatgtactctctgttaccaccacgatggaagtgggggttgatattggcgatctacgcgcagtttttcaggctaacatgccgccgcaacgttttaattaccagcaacgcgtagggcgagcgggacgacgtgggcaggcttttgcatttgtattaacggcatgtcgcagcaagagccatgatttattttacttccgtaacccggaaaagatcaccggcgatctccctccgccacctttcttaactactaaactggaaatgatctgccagcgcttagtgcgcaaaatctggctggtggccgcttttaagtggctcagagagcaagtagtggattcggggcagtcgtggcctgttgatggtgacagacataaacccgacaatcacggagagttttttcaggttcattggctaaaagaaaatcaggcaaactggttgccgcgcattcgtaacgcgctgaaagaaaccatcaacgcgcgtgatgagtttgctcaagcgtgtatgcaacaggatgaaatattctaccgtacaataatccaccctctgacgccggaatgtctaatacaagatattaaatcagtactggacgacgacgctatggcaggaaagggactggcggaagcgttggccgaacagggaaaattccctatgtacggtatgccaacccgaacacgacttctgctgacaaggccggtgagtacggacgaacatgatgtacagttcgccagcatggatcgcgatctggatattgcgattcaggaatttgcaccgggaaaatatctggtacaggacaagcgccgttactttaccgcaggctataccggaatgctgaagcaaagctacaaaaacccggccgaatttttcactgaagctgacgaaccgggagaatgcagggcgatgaccgtttgcccggtgtgcaaagtctgggtactggtgggctcgatgaccgctgtatgcagcgcctgcggtggggtcatggatggtgctgagcaatattcgtgttacgtacccaacggatttattaccactcttgaagataaatctgcaaaagaagactttgaccaaaccctgacggtggccagcagagtatctattgctgaagcttactcaattgagaatgaagtatctgtacctgactctaatgttgccatccagctaaaatcccaaacctgccttaacaggttaaatcgtggtgtttatgcggacaaaacatggagtggtttcaatgcgatacaaggcaatctacgggttccattcagaaaggcgggagtatatcagccgctatgggcaaaccacgtatggttagacagtaaccttcttgaggctgatttatcacttaaaaaccgctttacccctatgcaggaaagccgagaatcgttttatctctcggcacctaaagtaaccgatttactggcgttgatgttggtggatactccggtggacctccagttacagtacttgcaaggcgcactgacccctgcatttcgggcggccgcgctatctgcttcttttatcatcgtcaactatgcttcgaaagagctacttgatactgatccggaagaaattgaaattctggagcctcgcgtacaaattttaaaaaacggtatttctgcaccgatattacaaatggccgatcgtctggttaatggttctggattatgcgagcgactacagcagatcgggagctctggctctccgattgttcttgaagtgatgaatgagattatcaatgacgaaagatcctatccactaaaagagtttttagaaccacagcatcgcgacgtatgttttcaggcatgttattactgcctgcatcgatacggtaatcaggcttatcatggcttgctcgactggcgtctgggactggatgtcattcaattgcttttggataaaacctatgatgccggactacgtggagatttttcatcccctggcataattgactggacggttaatgccaaacgactggccgaagaagcatcgtctttatttaaggggagtgaagtaaaaatcgtgggaaatatcccgctgataggtattagcccacaacgctgggcggcagtactgcatcctttctggagttatgacggggtttttaaagctaatcctgaacttgaggtgctctcgcttgaggaagatatcgtatttacaaacacctttgagctttctcgccgtatgggaactgtgatggcaaaactgtgcacaccacctcgttcgagcgaaaaatga

SEQ ID NO: 441981 - DNA, 531 bp, Serratia marcescens
atgaatataatgacgttggagcgtacccgcccggcgctcccctcaaagctgggcgtatttattacctgcccaatgaggtacttgctggaaagcgagcagcattctttcctgtgtttgcctttgcctcctcaggctgctctggggagtgccgtgcacagactggctaacacgttgcaaaaaagtggcgagaatagtcctgaatcaatcatacagaggcttgaaaacgactttgtggcgaccttgataaagactcagcaaggagcactggcgctatgggactgggaacgctatggcattgctggattagtatcgcgtcaggcgttgatcaaatacattcgttacgccaaatctcttgttactcaggttgatgttacggatggttttaagttgcggatttttgagtcgttaagagacattttggggtcactccgtcatcgaaccaacttgaccccaaatctgaccaccaaattctcccgatgcggagggaaaactaaaaatacatcgggaagacttttcacgctaacttattga

SEQ ID NO: 441982 - DNA, 405 bp, Serratia marcescens
atgaaaagaaccatcgcagtagtaacgttttgcgcgttactggcgggttgtcagcaggctggcaaccgttccgtcgccaaggcggagcaggcgcaagccacggaaacatcctccatgttatcaacccggccggcagtgaatgtgggcaacgacgccgccctgtatacctgcatgaaagaactgaatgcgttgcagcaggtttcgccggcggcctatcagagcaaaaacgccgaattaaatcagattctgacgcaggccaaactctatacgcaggtgcgcgccaatctgagccgtgagatcaacggcattctggactccggctatcaataccgcatcggcaaagcctgcaatgacattcgtacggcgttaactcaggcgctagttgagcgggtggaaaacatctga

SEQ ID NO: 441983 - DNA, 1188 bp, Serratia marcescens
atgaacgaagtcgccgcttcccgccgcacagcctggctgcgcgttgtcgtgcttgccgtttccgcctttatctttaataccaccgagtttattccggttggtttactgagcgatatagcacaaagttttgccatgcagaccgagcaggtggggctgatcattacgatttacgcctggattgtcgccgccgcctcgctggtgtgcatgctgctgaccagcaaaatcgaacggcgtaaattgctgattggcgtatttatcctgtttatcgccagccatgtgctgacggcggttgcctggaacttcaccacgctggtgatttcccgcgccggcgtggcgctggcgcactcggtgttctggtcgattaccgcttcgctggcgatccgcgtggcgccggcgggcaaaaaagcgcaggcgctgagcatgctggcgggcggcaccgcgctggcgatggtgctcggcctgccgctggggcgcgtcgtcgggcagctgctgggctggcggatgacctttatcggcatcgcggtggcggcgacgctggcgctgctgatgctgtggcggctgctgccggtgctgaagagcgagcactccggctcgctggccagcgtaccggtactgttcaagcgcccggcgctggtcagcctgtatatgctgaccatcattgtggtgacggcgcactttaccgcttacagctatatcgagccgtttatccagcgggtggccggcctgagcgataacttcaccacgctgatgctgctgctgttcggcgcgaccggcattatcggcagcctgctgttcagccgctacagcgaacgcttcccgtccgggctgtttatcagcgcgatcggtctgctggccgtctgcctgctgctgctgctgccggccgccgacagtgagctgcacctgacgctgctgtgcgcgttctgggggatggcgattatggctatcggcctgtcgatgcaggcgaaggtgctgagcctggcgccggacgccaccgacgttgcgatgtcgatttactccggtttgtataacctgggcatcggcggcggggcgctgctgggcaaccaggtcagcctgcaccttggcatgccgagcatcggcctggtgggcgcgccgctggcgctgattgcgctggggtggtgcgtactgaacttctaccgcagcgagcgcctgcagcatcatcgcgcctga

SEQ ID NO: 441984 - DNA, 1419 bp, Serratia marcescens
gtgagtgatacttttgtgatggataaccggcgggccgatgcgcaatcgccgattcatgagcaggacctgtcggccagaatcgatgcgctacccgcctcggccgggctatggcgctttattaccctgttgtcgttaggcggtttttttgagctgtacgatctgtttcagaccggctatatcagtggcgcaatgatcgccgaaggcattttccatctcggcgccgacggcgtgttcggcgtctccgatcaggcggcgtttgcctcggtgacttttcttggcctgtttgtcggcgccagcctgctgagcccgtatgccgaccgcttcgggcggcgggcgacctttatgtttgcactggcctggtacggcgcattttcgctgctgctggcgctgcaaaatcaggcggaatggatattgctgatgcgctttctggtcggcgtcggcctgggcatcgagctggtaaccatcgacacctatctcaccgaatggatcccggcgcatttacgcacccgcgcgttcgcctttgctttctttatccagtttttatcggtgccggcggtggcgctgatgtcatggtggctggtgccgcagaccattttcgggctgaccggctggcgctacgtggtgattatcggcgcgctggcctcgctggtgatttggctggtgcgtaaaggcctgccggagtcggcgcgctggctggtgcagcagcaacgctatggcgaggcacgtcaggttatggcgggcatggagcagcgctgcggcgtgacgaatgcgccgccgtttccgcagcgcgacgcgccggcggcggaagaggggcgacaggggcgttttcgcgatatctggtcgccgcgctaccgcggccgtacgctgatgctggtagtgatgaacttcttccaggcgatcggctttttcggctttggcaactggctgccggcgctgctgtccggcaaaggcgcctcggtgacccacagcctgctgtatgcgttttttatcacgctggcctatccgctgggctcgttaatctgcagccgctttgccgaccggatggaaaacaagtggcaaatcgttctttcctgcctggtgacggttattttcggctcgctgttcgcctggcagagcaacccgctgtggctggtgctgtgcggtattttcatcacctggtcgaacgcctggctgacctacagttaccactcttatcagtcggaagtgttccccacctttatccgcgcccgcgcggtgggtttttgctactccttcagccgcttatcgacggcgttcagcagcattattatcggcgtgatcctgcagtacggcgggtcggccggcgtcatcggctttatcgtcttcagcatgctgatggtgatgggagtgattggcattttcgggccgaagacccgcggccgcgacctggaagtgatttaa

SEQ ID NO: 441985 - DNA, 1461 bp, Serratia marcescens
atggctcatagcaaaacaggcagtcaccacgcggtcgcagacgcgctggatcagttggaagccctctaccagggtgcggtcgaagcgctgcgtacggcgatcggcgattttattgataacggcacgctgccggacgcgcaggcgcgggccgccgggctgtttgtctacccggagctgcgcgtcagctggcacggcaccgcccccagcgaaaagaaaacccgcgcctatggccgcttcacccatcccggctgctacaccaccagcgtgacgcggccggcgctgttccgccactacctggaagaccaactgacgctgctggtggaagaatacggcgccgccatcgaggtggcgccctcgcagcgtgaaatcccctatccgtatgtgatagacggctctacgctggagctggagcgttcgatgagctccgggctggcgcaacattttccggtgccggagctggcgcagatcggcgatgacaccgccgacggtctgtcgcaggccagcgacaccttcccgctgtcgcacttcgacgcgctacgcgccgacttctcgctggcgcgcctgcgccactacaccggcacgccggtggaacacttccagcagtttgtgctgttcaccaactacacccgctatgtggacgaatttgtccgctgggcctgcagcgagatcgccgatccggacagcccgtatcaggcgctctcctgcgccggcggtatctacatcaccgccgatactctgtcgccggagcaggccgtgtccgatctggcatggaaaaacaaccagatgccggcctaccacctgattggcgccaacggtcagggcattacgctgattaatatcggcgtcggcccttccaacgccaaaaccatctgcgaccatctggcggtgctgcggccgaacgcctggctgatgatcggccactgcggcggcctgcgtgaaagccagtcgattggcgattacgtactggcgcacgcctacctgcgcgacgaccacgtgctggatgcggtactgccgccggatatcccgatccccagcatcgccgaagtacagcgggcgctgtacgacgccaccaagcaggtcagcggcatgccgggggaagaggtcaaacagcggctgcgcaccggcacggtggtcaccaccgatgaccgcaactgggagctgcgctacgccgcctcggcgctgcgctttaacctcagccgcgcggtggcggtcgatatggaaagcgccaccatcgccgcacagggctaccgcttccgcgtgccttacggcacgctgctgtgcgtctccgataagccgctgcacggcgagatcaagctgccggggcaggccaaccgcttttatgagggggcgatctccgagcacctgcagatcggcatccgcgccatcgacctgctgcgcgccgaaggcgaacggctgcactcccgcaagctgcgtacctttaacgagccgccgttccgctga

SEQ ID NO: 441986 - DNA, 1437 bp, Serratia marcescens
ttgaacttatttgcgcagcttcgtcaacgggtgatcgccacgccgtggtaccccaaacggaaaagttaccgcgtgctgtttcggcgcgagatcgtgccgctggcggtgccgatcttgctggaaaacacctgcgtcctgctgatgggcgtattgagtacgtttctggtgagctggctgggcaaggaggcaatggccggggttgggctggcggacagcttcaacatggtgatcatcgcctttttcgccgcggtggatcttggcaccacggtggtggtggcgttcagcctgggcaaactggatcaccagcgggcgcgcgcggcggcgcgtcagtcgctggtgctgatgacggtggtggcgctgctgctggcggcggcgatccacctggccggcgagcaaattattgatgtgattgccggcgccgccacgccggaggtaaaggcgctggcgctctcctatctgcagaccaccgtgtggagctacccggcggcggcgattgcgctgatcggcagcggtgcattgcgcggcgcgggcaacaccaaaattccgttgctgatcaatggcggcatgaacatcctcaatattattatcagcagcgtgctgatatatggcattccgggctgggacggtctgggcttcatcggggccggattggggctgaccctgtcacgctatattggcgccgtggcgattatttatgtgctggcgatcggctttaatccgtcgctgcacattaccctgaagagctatttcagccggttgcagctgtcgattctgaaagaggtgctgggcatcggcattcccgccagcattgagtcagtgctgtttaacggcggcaaattgctgacgcagatgtttgtggccggcatgggcaccagcgtgatcgccggtaactttatcgctttctcgatcgcctcgctgattaacctgccgggcaatgcgctgggctcggcgtcgaccattatcgtgggacggcggctgggcaaggggcaaattggccaggcggagaggcagctgcggcatattttctggctgtcgacccttggcctgacgctgctggcctggggcagcgcgccgttcgccgggctgtttgccgcgttctatacccagcaggatgatgtgaaagaggtggtgaaggtgctgatctggctgaacgccgcctttatgccgatttgggccgcctcctgggtgctgcccgccgggctgaagggcgcgcgcgacgcgcgttttgccatgtgggtgtcgatgctgggcatgtggggctgccgggtggtagccggctatacgctggggatcgtgctgggcatgggggtgaccggcgtctggctggggatgtttatggactgggcggtacgcggcgcgctgttctactggcgtatggtcagcggccgctggctgtggaagtacccgcgcaataaggaaaatgcgtcccgggattaa

SEQ ID NO: 441987 - DNA, 357 bp, Serratia marcescens
atggaggatgctatcatttacctgttaaatgtgatctatcagggatatcgacagtcgttcagcatcaaaggccgggacagccgcgcattctatatcacgctggtggtatttcagcacctgtggtttgtgctttacctggctgtcaaggtggtgatgaattacccgctttcatggatcgtggtcattatctttgtgctgccgctgctggccagcaatatccgccgcctgcatgacggcggctacagcggcacctggtgtttctgctggtttgtgatgccgcacctggcgctgattggcaccatgtttctgtcgtcgctcaataacaacaatccctacacccgctacccgcaaaattaa

SEQ ID NO: 441988 - DNA, 903 bp, Serratia marcescens
atgagaaaaccacgtttaccgccgctgggcgccgtacgcgccttccatgccgttgcgggctgcctgagctttaagcaggccgccgaacagttgggcgtcagcgccaccgccgtcagccatcagatcaaactgctggagtcgatgctggaatgccgggtctgtgaacgcagcgcccagggcgtcagcctaacccatgccggggaattgttatacggcgcaacgcaaagcgccttcagcgcgctggagaccgccaccgcgcagattatgcaggccgctcagccgccggcgctgacggtcaccaccacctccaattttctcacccactggctggtgccgcgcctggccgattttaaagcgcagctgccggccattgatttacgtctgcacaccagcgttgagcgggtggatttaacccagcgcaccgtcgatgccgccatccgctaccgcgaaacgccggaaactcacctgcacagtaccctgctgtatgaagaccgctttatcctggtggccagcccgtcgatcggcatcaaaacgaaggaagatctacacaccgccacgctgtttcacgtggagcagcggcacgttcccgccgactcgcccacctggcaaaactggcagcggcgctacgggcctgacgggctggactgcaacggcgggttgattttcagcgatgaaacgcacgcgctgcaggcggcggtggctggacaaggcgtggtgatcgccagccggctgctggcgaacgatctgctacagcgcggcgtgctgaccgcaccgtttgacgagtcgctgcccggcgcgcgctattatctggtgacaacggaggaagcggcgctgcgggcggatattatcgccctgcggcactggttattgcagcaaatggcggggcaacctgcagataaatga

SEQ ID NO: 441989 - DNA, 573 bp, Serratia marcescens
atgataccgttagccaaacagccggacgcaggcgcgatcgcgccgccgggtgcggtgctccgggcgatcgtgctgagcgtactgttatctgcggcgctgctgctgttccggcagtatggctgggcgcagccgctgcccggtgttgcgctgccgttcagcctggcgctggcctttacctgcggcgcggcgctggggcgttaccgtccgctggcgcagccgtcgccgctggtggtggcgcgctatggcttattgatcgctgccgcagggctgctatggatcctgctggcgctgcacggacagctggaatggacgatgctgctgccgggcgcctggctgaccggcgccggactgggcgcggtttacctgcgccatcgcgctagcgcgccgccggggcgacatcctgtttgggagcgcgccgcgctggcgctgatctgcggtgcagtgctggcggcgacgcagtggctgcagtggcaggcggcgggtgggtttaacttcgcttttgcgctgctggtggatatggttctgtttggcgcgctgctggtgcgcattgtcgaacgcgaccgtgaaagctga

SEQ ID NO: 441990 - DNA, 168 bp, Serratia marcescens
atgaagcgtttactggcttttttgcggttcagccgtggggtacaggccgaaccgcagcagacgaagcagcccggcgacagcgccgcgctgttggaaaccatgctggccaccagccagctgtacggttttgagttccatccttcgctgctgcgtcattatggaaaataa

SEQ ID NO: 441991 - DNA, 1227 bp, Serratia marcescens
atgacgaccgtcaatagcgcaaagcataaatcggcgccgatgcatgtttccgccgccggcatcagcaatctgctgcatgaagatgtctgcctgccggccgcggtgattcaggccggcgcgctggaaaataatatccgctggatgcagcgttatgccgataagcgcggggtttcactcgcgccgcacggcaaaaccaccatgacgccgtggatttttcgccggcagcaggaggccggcgcctgggcaattggcgtcggcagcgcctggcaggcacatgccgccatgtctacggacatcgagcgggtgctgatggcgaaccaactggtgggcaaagccaatatgcaattagtgtcgcagttgaaacagcgctatccgcactgtgattttctgtgctgcgtcgacagtgtggacaatgccgcctcgcttgccgcctttttccacgctcagggacaaacgctggacgtgctggtggagctgggcgtgccgggcggccgctgcggctgccgcagtacggcggaggcgctggcgctggcggccaagatcgcggcgctgccgggcctgcggctgcgcgggctggagctgtatgaaggcgtgctgcacggcgacgatccgcagccgcagatagaagccttgctcagcgcggcggcggcgctggcctgcaatatggcggagcatgtcgacggggagtttattctgaccggtgcaggcaccgtgtggtatgacgtggtatgcaacgtctggctgacggcaaaaaagccgccgcactgccgcattgtgattcgccccggctgttatatcacccatgacaacggcatctatcagcaggcgcaggatgcgctgctggcgcgcgaccgcatcgcctgcgatctcggcggcgatctcagcgccgctctgcagctggtggccatggtgcaatcggtgccggaagcccggctggcgattgttaattttggcaagcgtgactgcgcctttgacgccgggctgccgcagccggtcgcccattaccgggcgggtaaggcgctgccgttcaggcccggcgcctataccagcagcgaggtcatggaccagcactgtatgctgaggcttgcgcctgacagcgatgtgcaggtcggcgatatcctgatcttcggcacctcccatccctgcctgacctttgataaatggaaaacgctgttgctggtcgatgacgactacaacgtgcaggcggagctcgacacagccttttaa

SEQ ID NO: 441992 - DNA, 1485 bp, Serratia marcescens
atggaacacaacaatttcctgatctggtttttactctatgctttcgtcatgatggcgatcggctggtacgtcacccgccaccagaaaacgggggaagactttatcctcggcggcagaaagctgccgatgctgctgaccctgggctccaccgtcggcaccatggtcggcaccggctccagcatcggcgcggtgagctttggctataccaacggctgggccggcatgctgtacggcatcggcggcgcaaccggtatcctccttaccgcctggctgttcgggccggtcaggaaactgcgctttatgaccatgagcgaggagatctgctactacaccggcggcagtcgcatcgtgaagaacctggtggccctgctgattttcctcgcttcaatcggctggctgggcgcacatatcctcggcggcgggctgtatctggcctgggcggcggatatcgatatcaccgtagccaagatcattatcgccgtcggctttatcttctatgtcggcatcggcgggtataaagccgtctcctggatcgacacgctgcaatccatcgtgctgttcctcggctttatcgtgttggccgcgctgtccgtcagctacgttggcggctgggacaccctggtcgccaacaccgatccgcaggcctttacgctgttcggcatcggcaagctcggcctgtggccggcgctctctctggcgatcgtcatcggcattggcgtactggcaacgccgtcttaccgtcagcgcatctactccgccgcctcgacgcgctccatccgccagtctttcgtgattaccggcgtgctgtacatgggcttttcattcctgccggcaattatcggcatggcaacgcacgtgatgaaccccgagctggagaaccccagctttgccttcctgttcgccaccaacgccctgccggccgcgctggccatggtggtgctgatcgccggcatgtctgccaacctgtcatccggcagttcggatgcaattgccggggtttccatcattctgcgtgatatttacaccatggtgacagggaaaatgccgccgccggagaaagctatcaatctgtcgcgcattttcctgctgctggtgattctgctggcgctgattttcgccctgacgtcgaatgacatcattggctatatcaccaaaatgatttcaatgattatgtcgggcatgtgcgtcaccgtgctgctgggtaaattctggctgcgcttcaactggcagggctgcattgccgcgctgctgggcggcagcctgacctcgctgaccgtgattctgatcccggcctggtcacaggcgctcggcaacccggtgatcccggcgctgctcgtcagcctggtggccgccgttgccgtcaccctgctcaccccgaaaaataaactgtcacgcgaggaggtgctgcaaatgatcaccgacgaacgggaaaccacccacaccgataccaaaccaatcggaccgctggcgggagagagcaaatga

SEQ ID NO: 441993 - DNA, 396 bp, Serratia marcescens
atgattaaacgttacgggattaccggctccacgggcaccggcggacaaaacctgcctttcgccaaagcggtcagcgcagacggctggctgtacgtctccggccagacgccgatggtcgacggggagattatcgacggcggcatcgtcgcccagtccacccaggcgattcaaaactgcctcgacatcatgaacgaagcgggtttcggcaaagaagatatcgtacatatgaaagtctttctgaccgacgcgcgctacttccagtccttcaataaggtcttccgccatttctttgccgagcatccgcccgcgcgcgtgtgctgcgtggccgatctggtcgtcgactgcatggtcgaggtcgacatcacctgttttaacgccaaatacaagcagaactaa

SEQ ID NO: 441994 - DNA, 1437 bp, Serratia marcescens
atgaaacatcactacctgtttaaaaacgccaccgtgattgacggctccggcggcgccggttacgtcgccgacgtagccgtcagcgacgaccgcatcacccgtatcgcgccggttattaatgacgatgcggacgtcacgctggagtgtcgcggccgggtactgtcgcccggattcatcgacgtccacacccatgacgatctgatcgtgatcaagcacccggaatatgttgagaaaacctcgcagggcgtcaccagcatcatcgtcggcaactgcggcatcagcgccgcctgcgcggtgatgaaagacgacgtgcccgacccgctcaacctgctgggagaactggcggagtttcgttacccggatctggccagctatcgccgcaaagtggacgaggtcacgccgtcggtgaacgtcgccacgcttatcggccacaccacgctgcgcaacaactttgtggcgtcactgaacgagccggcgcaaagcgccagtatcgacgatatgcgcgccgccctgcggcaggcgctgcaacagggggcgctggggctgagtaccggcctgtcctacggcaacgccgttaacgcctcaacggaagagatctgcgcgctggcggagctgctggccgaacatcagggcatctataccacccatatgcgcaccgaatatgacgggattattgacgccatgcatgaagcatttcacgttggccgtcacgcccgggtgccggtacagatctcccaccataaatgcgcaggcgccaaaaactggggacgcacggtggaaacgctggcgctgatagagaagtatcagcacagccaggatatcagctgcgatctctacccgtaccgcgccggttcctccaacctcgatccgcagcaggtcacggcggactatgacattttgatcacctggtccacgccgcacccggacatggcgggcaaaaatctgcaggaaatcgccgccgcctgggataccgatattcacagcgccgcccgccggctgattcccgccggcgccatctatttccagatggatgaagccgatgtgcgccgcgtactggctcaccccagcgccatgatcggctccgacggtctgccctgcgatcccaacccccatccgcgcctgtggggtaccttcccgcgggtattgggccactacagccgcgacgaaaagctgttcccgctggctaccgccgtacacaagatgaccggcatgtccgcacaacgcttcggtatgcggcagcgcgggctgatcaaagagggctactttgccgatttggtgctgttcgacccggaacgcatcaacgatgccgccaccttccagcagccgaaacagcgggccgacggtattgagcacgtgttcgtcaacggcgtactgacctacagccagcaacagatgaccggccggcgcgccgggaagttcctgagtaaaactcattaa

SEQ ID NO: 441995 - DNA, 627 bp, Serratia marcescens
atgaaaatgaaccttacgctgccgctggtcgccattctgcgcggcattacgcccgatgaaattgacgatcatcttcccgtactgattgaggccggttttcaggcgattgaaatcccgctgaactcgccggcgtggcaaaccagcattgcgcacgcggccaaacgctatggcggacaaacgctgatcggcgccggcacggtggtgaatgtcgccgacgttgaccagctggcggcggcaggttgccagtttattgtgacgccggcgacgcagcctgcggtaatccgccgggcgctgcaccacgcgatgccggcgctgccggggtgcgcgacgccgacggaggccttcagcgccatcgaggccggcgcccggcaaatcaaactgttccccgccggccagttcggccccggctatgtgcgtgcgctgaaatccgtgctgcccgccgatattgccctctacgccgtcggcggcgtcacgccggacacgctcggcgcctacctgcaggcaggctgcagcggcaccggactcggcaacgacttataccgggccggacaaacgccggaacgcacagcggcgcaggcgcgggcctttgtggcggcataccgctcccatacccatcagaacgcttaa

SEQ ID NO: 441996 - DNA, 1050 bp, Serratia marcescens
atgttcatcgtcaccattgattccggtaccaccaatacccgggtgcgtatctggcaggataaaaggatcatcgccgacgcctgtgcggcggtcggggtgcgcgacagcgccaaaagcggcaatctggcaacgctcaccgccgggattaaagacgccttggatcgtgcgctggcgcaggctgaaaactgtacgctcgatcgctgcgcgatcgtggcgtccggcatgatcaccgccgatgtcgggctctgcccgctcccccacctgagcgcaccggtcggcgttgaacagctggcgaacggcgcggtggcgcggcatattccggccattgcgccgcagccgatctggtttattcccggcgtaaaaaacgccctgccgcaggttaacctcgccaacctcgatatgatggatgtgatgcgcggtgaagaggcggaaaccttcggcctgctggcgttacacgccgtgcacggccctgcggtgatcgtgctgcccggctcacactcaaagttcgtcaaaatcgaccgtcagcagcgtattgccgcctgcgccaccaccatggccggcgagttactggatgtgctgacccaccacaccctgctggccggctcactggaccggcagttcgccgcccggctggatcgcgactatatgctgcagggcgccgaagcctgccggcataccggcctgtcgcgcgcctgcttctcggtacggctgctggatctgtttaccgacgccacccacgaccagaaggccagctatttactgggcgtcacgctctgcgccgatattcaggcgatgaaacagagccgggcgctggcgatgacgccggatacccgcgtggtcatcagcggcaaaccaatcctgcaacaggcgctggccgcgctgatcgccgccgatccctttttcaccgccgacgcgctgctggtggatgaggatcccgcccggccgctgtccagcatcggcgccatcgccgttatggaaatcatcatgcgtcaggcgacaccgcacagtgcggcgccgtctgacgtcgtcgcatccggagacccgttatga

SEQ ID NO: 441997 - DNA, 771 bp, Serratia marcescens
atgtcaggtggcgagagcacgaactcttccagcattgataaggttttaacgctgttggaagaaataggagaccatcccgaaggcatatcgctggcggcgttggtcaagcgtacccagatagcgaaaacgaccggattccgcatcctggaaaccctcaaggagcggcagtatgtgatgctggacagcgcgacggagcgctatcatctggatctgaaaagtctggaactggggataaaaggattaatgaatgtgaacctggttgaggtttccattccgtacctgaagaagctttccgccaaaactgaagaaacctgttttctgggcgtctacaacgacggccatgtggtctacctgtacaaaagcgaagggacgctctccatccagaccaacgcacagctgggtgcgcgtctgccggcctactgcaccgggattggcaaggcgctgctggccttccagccgcaggaagaaatcgaccgcgtgctgagcaaaccgctgacggcgtttaccgagaaaacgctggttgaccgcgtggcgctgtatgaggtgctggcggatattcgcctgaaaggctactccctcgataacgaagagaacgaagaggggctgacctgcgtggcgcacccgatcttcaactataccggcagcgtggtcggcgcgctgagcgtcgcggggccgacgcaccgtatgcagcgtaaaatcgagcgggttaacgaggagctggagcaggcctgctcactgatttcccgccgtctgggctacctggggaaatag

SEQ ID NO: 441998 - DNA, 438 bp, Serratia marcescens
atgcgttggcctaaacacaccttggtaatgtgcaccgcggcgatgttatcccttcccaccttttttgctcaggcgcacggcgataagcgcggcgtcgacagcgaaacgctgctggaatcggaacacgcctgggacggtacgcgatattccgcctatccgcagggcactccgcagctttcggtgctgaagatcaccattgctcccaacagcagcctggactggcatcagcatccgatcccgaatgccgcctatgtgctgagcggcgtggtgacgatagagaagaaatccagcggggaaaaacgacaggtcaccgccggcgaggtgctgcccgaagtggtagatattgcccatcgcggctataccacccaagagggcgcggtgctgattgtgttttacgccgggaagaagggcgtgccgctgtcggaggcggttgaataa

SEQ ID NO: 441999 - DNA, 525 bp, Serratia marcescens
atgaaactatggcccgttgcgaccggcattgctattgccttgaccctggttgcctgtcaatccccttcgccaccgaaaggtgttcggcccatcaacggctttgatgccaatcgatatctgggaaaatggtacgaagttgctcgtctggaaaaccgtttcgagcgcgggttggagcaggtgaccgccacatacggcaagcgcagcgatgagggcattagcgtgcttaatcgtggctatgatccggtgaaaaacacatggaaagagagcaaaggcaaagcctattttaccggtacacccaccgtcgccgcgttgaaggtttcgtttttcggccccttttacggcggctataacgtcatcagactggacgataattatcaatacgcactggtcagcggcccaaaccgtgactatctgtggctgctgtcgcgcacaccgaccctgcctgatgccgttaagcaggattacctgaaaacggctcagaagctaggcttccagatcgatcggctcgtttgggtgaagcagtaa

SEQ ID NO: 442000 - DNA, 726 bp, Serratia marcescens
atgtcttactccataggcgaatttgcccgactttgcgggataaatgcgaccacgctacgcgcctggcagcgtcgctatggcctgctaaaaccgctgcgtaccgatggcggacatcgccagtacagtgatgccgatatccagcaggcgctcaaaattctcgactgggtaaagaaaggggtccctgtcagccaggtgaaaccgctgctggttcgtcccggcgcgcgccagactgataactggctcaccctgcaggataatatgctgcagcggctgaaagagggaaaaatagagtccctgcgtcagcttattcacgaagccggacgcgactatcctcgcccggaactggtggtaaacgtgctacgcccgctgcgcagcaaagtctcggccaacatcccggccatcatgaccctgcgcgaaatcctcgatggcatcatcctttcttacaccgcattttgtcttgaaggggacagaaaagcgccgggcgatacctatctgattaccggttggcatctggctgacccttgcgaaatctggcttgaagcgctcaagcgaaccggccaagggcagcgcattgacgtgcttcccgtaccgccagccacactggccccggaaattctcccgcagcggaaatggctgctggttaccaccggtaagcttacctccgcccgccaaaaacagatcgacctctggcagcaggccgtttccctcgaggttatcactctgtaa

SEQ ID NO: 442001 - DNA, 960 bp, Serratia marcescens
atgaagacctaccccaacattgggatcagcggatgtttaaccggttctgccgtacggtttgacggcggacataaacggatggcctttgtcatggatgagttggcgcggtgggtaaccttcaaacccgtttgcccggaaatggctatcggcctgcccgtacctcgcccggcgctgcgcctggtaaaaaccagcgaaggggatatcagtatgcgtttcagccatacgccgcacgatgatgtgacggaaaaaatgaccggcttcaccgctgagtatctttcacgtctgggcaagttgtcgggttttatcgtctgcgccaaatcgccgagctgcgggatggagcgcgtgcgcgtttacgatgaaaagggtaaccgcgggcgtaaagaaggcgttgggctttttaccggagctttaatggataaatatccgtggcttcccgttgaagaggatgggcgtctgcacgatccggctctgcgggaaaatttcgttgagcgcgtttttgccctgcatgaactcaatactctgcgggctgaaggtctgacccgccgtgcgttgctgggtttccacagtcgttacaaacttcagttgctggcgcatcatcaggcgggctatcgtgacctcgggccgtttgtcgcttcgctgcatcagtgggaagatctggacgcgttcttcgcggtataccgcgaaaagctaatggcgatcctcaaacaaccagcctcacggaaaaatcacaccaacgtactgatgcatatccaaggttatttccgtaatcaactgaatgctcgccagcgcggcgagctgcgtgacgtgatcctccactaccgcgccgggctgttgccgatactggctccgctgaccctgctgaaacactatctggccgaatatccggatcgttatttgttgacgcagaactactttgatccctacccgaaagacttagccttgcgtttgatgatcaattga

SEQ ID NO: 442002 - DNA, 687 bp, Serratia marcescens
atggaatggctgaatatcttaatcgttgaggacgaaacgccgctggcggagatgcacgccgagtttatcaggcagcacggcaactgccggcagatgtggctggcgggcaatctggcgcaggcgcgcgcaatgtgcgaacgctttaaacccgatctgatcctgctggataactttctgcccgacggccgcggcattgagctgctgcacgagctgacgctgcagggctacggcggcggcattgtatttatcaccgccgccagcgatatggatacggtagccgaagcgctgcgctacggcgtgttcgactatctgattaaaccgctggcctacgaccggctggcgcagaccctgcaacgcttcagccagcggcggcaggcgctgaagggcaaaacccgcgtcagccagcagcgcattgacgagatgttcaatacctatgcccgcagcgagcggcaggcgacgctgccggcgggcatcgacgcgctgacgctgactaaggtgcgcgagctgttcgccgacccggccatccgccacaccgccgaaagcgtggcgcagcagctggggctgagccgcaccaccgcccgccgctacctggagttttgcagtgcgcaccagcagctgacggcggagatggtatacggcaaggtcggccggccacagcggatttatcgcggcgtcgccgcatcctga

SEQ ID NO: 442003 - DNA, 1071 bp, Serratia marcescens
atgttggcgggcgccatatttaatcgagtctacagaacggaacatcaggccattaccgatattcgcgcatttctgcgcgccaatgacctgaatattgatacgacggtggaagtgtttattaccgttacgcagaacgataaattgatggcctgcggcggcatcgccggcaatattattaaatgtgttgccatcagcccgcagctacgcggcgaagggttggcgctgtcgctggcgaccgagctggtcaacctggcgtacgaacgccatcacagtcagctgtttatctataccaaaacgcaaaacgaaggcctgttccgccagtgcggcttttacccgatcgccgatgtgccgggcattgtggtgctgatggagaacagtccgtgccgcctgcagcgctatgcggcgcggctggcaacgcagcgccggccgggcgaggtgatcggcagtatcgtgatgaatgccaacccgttcacccggggtcaccagtatctgatccgccgcgccgccgcacagtgcgactggctgcacctgtttctggtgcgtgaagacacctcgcgttttccctatgaagaccggcgccggctggtgatgcagggcagccgcgacatcaccaacctgacggtgcacgaaggttcgcagtatgtgatctcgcgcgccacctttccctgttacttcatcaaggagcagggggtggccgacgactgctacaccgaaatcgatttaaaaatcttccgccagtatctggcgccggcgctgggcattacccaccggtttgtcggcaatgagcctttctgcgccgtcacggcgaaatataaccgcgatatgcgccactggctggaaacgccggcgctgcccagcccgccgatccagctggtggagattgaacggctgcagtatcagggcaccgccatctccgcctcctgggttcgcaaactgctggccgccggcgatttccacgccgccgcgccgctggtgccggaagacactctttactacctgcaggatctgcaggcacgacgccagtctaacgcggcgtcgccggaatttgagtccgcacaatcaggtgaatga

SEQ ID NO: 442004 - DNA, 288 bp, Serratia marcescens
atggccggcacgctggaatccagcgatgtgatggtgcgcatcgcgccctgcgacggcccgcagcatgacctgctgattgccagcagcgtggaaaaacagttcggcgcggcgatccgcaacacgctgctgcaggtgctgaaccagtacggcgtcgagccggtacaggtgatggtcgacgacaaaggcgcgctggactgcgtgctgcgcgcccggctggaaaccgcgctgatgcgcgccagcgacgacggccaactgccctgggaggtgagcgatgaaaacgctgaataa

SEQ ID NO: 442005 - DNA, 1506 bp, Serratia marcescens
atgaaacgtcaacaaggtccgatcgatctgcagcaactggccggcctggccgtctatcaggagagttcaaaagccaatcagcaggcggccaaaccgcgcgacagaaagcgctgcgactcgctgcaggaggcggtgcgccgcagcggcctgcaggacggcatgaccatttcgttccaccacgcgtttcgcggcggcgatctgacgctgaaccaggtgatggacacgctggcggcgatgggctttcgcaacctgacgctggcttccagttcgctcagcgagtgccatgcgccgctggtggagcatatccgccacggcgtggtcagccgtgtttacacctccggcctgcgcggcccgctggcggaagagatttctcgcggcctgctggcacagccggtgcagattcattcccacggcgggcgggtcaacctgattgagtccggcgagctgcatatcgacgtcgcctttctcggcgtgccggcctgcgatgagttcggcaacgccaacggctacagcggcgacgcctgctgcggttcgctcggctacgccaaagtggatgcgcagcacgccgataccgtggtgctgctgaccgaggcgctggtgccgtacccgcatcatcccgccagtctggcgcaggatcgggtcgatctgatcgtacagctggagcgggtcggggatgccgacaagatcggcgccgacgccacccgcatgacctccaacccgcgcgaactgctgatcgcccgccgcgccgccgaggtgatcgccgcttccggctatttcagtgaaggtttctcgctgcagaccggcaccggcggcgcgtcgctggcggtgacgcgctttctggaagacaaggtgcgcgcccgcggcgtgcgcgccggttttgcgctcggcggcatcacctccaccatggtggatctgcacgagaaggggctgatcggcaaactgctggacgtgcagagctttgaccgcgccgcggccggctcgctggcgcgtaacccgcagcatatcgaaatcagcgccaatcagtacgccaacctgacctcgaaaggggcggcggtggatcggctcgacgtggtggtgctgagcgcgctggaaattgacgccgggttcaacgtcaacgtactgaccggttccgacggcgtgctgcgcggcgcttccggcggccactgcgacaccgccgccgccgcgcggttggcgattatcgttgcgccgctggtgcgcgggcgcatcccgacgctggtggatgaggtgaccacctgcgtcacgccgggatccagcatcgacattctggttaccgatcacggcattgccgtcaacccggcgcgcccggaactggcgcagcggctgcgcgacgccgggctggcggtggttgatatcggctggctgcgccagcgcgctctgacgctgaccggtgaaccgcagccgatcgccttcagcgacaaggtggtggcggtagtgcgctaccgcgacggttcggtgattgacgtggtgcgtcaggtggcggagtag

SEQ ID NO: 442006 - DNA, 549 bp, Serratia marcescens
atgacgatcctcccccccgaacaggctgccaaccgcgccgtcggcctgacggaactgctcgccgcccgcgagcggcggcgcgaccgtcagcaggcctggctgacgcgccatccggcgacgctggtggtgctgacaccgctggcgccgggcgcgctgaaagacagcccgctgacgcggcgcatcttcaacctcggctggcaggcgctgcgcgctgagcaacggcggcaggggtggcgctgcctgcgcgccgaggtgcaggggctgcccagcggcggcgaaggttttttgtcgctgcaggcggcggcacggcaggtgaaacagtgctgcatccggctggaggatatgcatcccgccgggcggctgtgggatatcgacgtgctggacgcgcaggggcgcattctgtcgcgcgacgatggcgggctgcctgcccggcgctgtctgctgtgcgatcggccggcgcgcgtctgtgcgcggcagcgccgccacgacgttgaacggctgctggccgccatggaggagacgctcaatgctgcactcgctgcccgctag

SEQ ID NO: 442007 - DNA, 891 bp, Serratia marcescens
atgctgcactcgctgcccgctagttccgccagtccgccgccgctgtctgcggctgaacggcgctttgccctgtatgcctatcgcgccttgctgaccgaggtcaacctgacgccgaagcccggactggtcgaccgcgacaacaacggggcgcatcaggatatgcatatcggccatttctatcgcagcgcgcgcgccatcggcgtctggctgccgcgctttatccgtcaggggcggcaggacgcggcgctgccggccgatcgcgtgctggcgcggctgcggccgcttggtctggcctgtgaaaaccatatgttccacgtcaccggcggggtcaacacccacaagggcagcgtgtttgcgctcgggctgctgtgctgcgcgttcggccgtttgtcgtcgccgacgcccgctgcgctgtgcgcggaggtggcggctatctgccaggggctgacggtgcgcgagctgcagcgcaacaacgccgggcagagcgccggccagcggctgtaccgccggtttggcctgagcggcgcgcgcggcgaggccgaagctggcttcccgctggtgctgcacggcgcattaccacgctatctgcggcggctgcggcagggcgataacgcgcagagcgcgctgcaggactgcctgctgtggctgatggcgcacaacggcgataccaatgtcgccgcgcgcggcggcatggccgggctgcgctggctgcagcagcgcgcggcgcagttgctggcacagggcggcgccggcggcagagacggtatcgcgcgactgcgccggtttgacgccgagtgcacggcccgtcatctcagccccggcggcagcgccgacctgctgatagtcacctggctgctggcgcagatatcgccaccggccttacaggaataa

SEQ ID NO: 442008 - DNA, 1230 bp, Serratia marcescens
atgaaaaaaaacaagatgctgctctgcctgccgctgctgttttccgcctcggcgttggcggaaaccgccgactatcagctggagcaggtgctggtgatgagccgccacaacctgcgcgcgccgctggccaacaacggcagcgtgctggctaactcaacgccgcaggcctggccgcagtgggatacgccgggcggtgagctgaccaccaagggcggggtgctggaagtgtatatggggcactatttcaacgcctggctgaagcaggccggcctgctgccgcagcagggctgtccgacaccgggcagcgtctacgtgtacgccaacagcctgcagcgcacggtggccaccgcgcagttctttaccaacggcgcgttcccgggctgtgacgtggcggtgcatcatcaggataaaatggggactatggacccgacctttaacccgattattaccgataacagcaagcagtttaaccagcaggcgctgaaggcgatgaacgacaaactgcactcgctgcagctggatgccgcctaccggcagctggcgaaaatcaccgattacgccgactccagcgcctgtaaaaccgacaagcagtgcgacctgaccgcagaaaccagcaccatgagcgcggtgccgggtaaagagccgggcgtcgccggcccgctgcgggtgggcaactcgctggtggacgcctttatgctgcagtattacgagggcttcccggccgatcaggtggcgtggggcaaggtgaccacgtcggagcagtggcggcagctggcgcagctgaaagacggctatcaggattcgctgttcacttcgacggtggtggcgcagaacgtcgccaagccgctgctgacctacatcagctcggcgctgatcggtaaggagaagggcgatgcgcccaagctgacggtgctggtggggcatgattccaacatcgcctctctgctgtcggcgatgcagttcaaaccttatcagctgccgcagcagtatgaaaaaacgccgatcggcggcaagctggtgttccagcgctggcacgataagcagggcgatcgcgacctgctgaagattgagtatgtctatcagtccaccgagcagctgcgcaacgccgacaagctgacgctgcagcatccgccgctgcgggtgacgatggcgctggaaggttgcccgaccgataaagacggcttctgcagctggagcgactttgaaaaagcgctgaaaacaatgttgtaa

SEQ ID NO: 442009 - DNA, 696 bp, Serratia marcescens
gtgctcactacatttcttaccgatatccgctggctgccggtcagcgactttcccggccgggttatccgcggccatttcagtctggcggcctatcatgacgcgctgtggcaacaggcggcgctgccgtttcccgatcatctgtctgcagcggtgacgaaacgccgcgcggagtatctggccgggcgtctgctggcgcgccaggcgctggaggcgttggggcatccgcaacgggtggtggcgcgcggcgccgatcgcgcgccggtctggcctgacggcatcgtcggcgcgctgagccacaacgcggataccgcgctgtgcgccgtcgcgccggcggccgatagcggcggcgtcgggctggatgtggaaacgcagatgccgatgcagcgcgccgagcaactgtggagcgggatcgtcaacccggcagagcaggcgtggctgcggcaacagccgctgccgttcaacctgtcgctgacgctgacgttctccgccaaagagagcttgttcaaggcgctttatccgcaggtgcagcgctactttgattttctcgatgcgcagatcgtcgcattggatccgcaggcgcagacctttacgctggcgctgctgcaggatttaacgccgcagtgcccggccgggcggcgttttggcggacgctttacgcttgatggtgacaacgtaacaatatttattttcttttaa

SEQ ID NO: 442010 - DNA, 648 bp, Serratia marcescens
atgacgatcgacctttttgaagacgcgctgccggcgccgtggcgtgaggagatagcgcccggcgcggtggtgctgcacggatttgtccgcgaccacggccccgagctgctggcggcggtgcgcggcgtggtggcgcaggtgccgtggcggcatctgaccacgcccggcggctataccatgtcggtggcgatgagctggtgcggcaacggctggaccagcgacagccgcggctaccgctacgccgaacgcgacgcgggcagcggccgccgctggccggcgatcccgcccattctgctggcgctggcggacgaggctgcgctgcaggccggctttggccactttacgccggactcctgcctgattaaccgttacgaccccggcagcaagctgtcgctgcatcaggataaagacgagcgcgatttcggcgcgccgatcgtatcggtgtcgctcgggctgccggcggtgtttcagttcggcggcctgcagcgcagcgaccgggcgcggcgtattccgctggcgcacggcgacgtggtggtgtggggcggtccgtcgcgcctgtgtttccacggtattttaccggtgaaggagggctaccactcgctggtgggatcgcaccgcatcaacatcactttgcgcaaggcgctgtaa

SEQ ID NO: 442011 - DNA, 957 bp, Serratia marcescens
atggacttttgcgctgtgatcacaaatcaagccaccgcattactggccgagatggccgtattcgtccaggtggcggaaagcggcagtttctccgccgccgcccgccagctgggcgcttcgccctcggccgtcagccgcagcgtcagcaagctggaacgggcgctggcgctgcgcctgctgcaccgcaccacccgtaagctgcgcctgagcgagcagggagaaaccgccctgcaatactgccggcagatgctggcggcggccgacgcggtgctcagcctcagcggacaaaacgacgccgagccggaaggtctggtcagcatcagcgtgccgaaagcggtcggccgctttgtgctgcacccgcatatgccggcatttttgcaacgctaccccaaggtggacgtgcgcctgcggctggaagaccgctatatggatttgattgacgacggcgtggatctggcgctgcgcatcaccgacagcccgtcgccggggctgatcggccgtaaactgatgaatattgagcacctgctgtgcgccacgccgcactatctggcgcagcacggtacgccgcagcagccgcaggcgctgacgcagcacagctgcatctatctgggagagacgccgaacgacgcgcgctggcgcttccgccgggcaggcaaaacgcagatggtcaacgtgcgcgggcgctatgccgccaaccacaccggcgtgcggctggatgcggtcagacagcatatcggcatcggcagcctgccgtactttaccgcccgacaggcgctggcggacggtgaactggtgcaggtgctgccggactgggagtttctcagtaactatcgcggcgggctgtggctgctgtatgcgccgacgccgcacctgcccgccaggctgcgggtgtttatcgaccatctggtcgcctgcctggcgcagcagccgcagcttacagcgccttgcgcaaagtga

SEQ ID NO: 442012 - DNA, 630 bp, Serratia marcescens
atgacagaacgacattactatcacagcgatgcactgcagttgcaggcgcaggtgctggcctgccagccgctggaggacggcaactatgcgctggagctggatgctacgctgtttcatccgcagggcggcggacagccggccgacggcggcactctgaacggcgaaccgctgctgcggctggtgccgcgcggtgaggatattctgcacgtggtggcgcgcccgcagccgccgggcgccatcgatatcgaggtcgacggccggctgcgggtactgcatgcgcgctggcactccgccggccatctgatcggctatctgggggaaacgcagggctggcgcccggtgaaggcgcatcactggccgggggaagggcgcattacctttatgcccggcgacggtgtgaaagcgctggagcaggcatggctgcaggaggcgctgacgcgcctgatcgccgccgatttaccgcgccgtcagcggcaggaaaacggcgttcgccaggtcggcttcggcgatctgccggcctacggctgcggcggcacccacgtgcgctcgctggctgagctgggtgaggtgactatcagcgcgctgaaaatgaaaaaaggccaactggtggtttattacgatctcagataa

SEQ ID NO: 442013 - DNA, 324 bp, Serratia marcescens
atgaagaaaatcatgctttgctgttctgcggggatgtcaaccagtctgctggtaaagaaaatgacggcggaggccgccagccgcgatctgccggtggagattgccgcctatagcgcgggggaatttgatgagcagttcagccgctatcaggtggtgctgttggggccgcaggtgaaatatatgctgccggcgctgtctgcgcgcgcggcggagcagggcattccggtcgcggcgatcgatatgatggattacggcatgcagcgcggcgataaggtgctggatttcgccctggcgctgatcgcgcagcagggagagccggcatga

SEQ ID NO: 442014 - DNA, 1323 bp, Serratia marcescens
atgacctctctctatcaggcgatggtcaaccttatcgagcagaaggtgacgccgctggccggcagcgtcggccagcaacgccatgtgattgccatccgcgacggctttgtctccgcgctgccgtttatgatcatcggctcatttatgctggtgtttatctttccgccgttctccgccgacagcagctgggcgttcgcccgcggctggctgaatttttcactgcaataccgtgaacagctgatgctgccgtttcacctcagcatgggggtgatgactttctttatctcggtggggatcggcgccagtctggggcggcaccataaactggacccgatcatgaccggcctgctggcgctgatggcgtttttactggtggcggcgccgtaccgcgacggcgtgatcgatacgcagtatttctccggcgaggggattttcaccgctatcattaccgcgctgtatgccggtgaactgtacgcctggctgaagcggcacaatatcaccatccggttgccgcaggaggtgccgaccggcgtcgcgcgatcgtttgagatcctgatcccggtggtggcgatcgtcgccaccttgcatccgcttaatctgctggtgcagagctacaccggcatgatcattccccaggcgattatgcatctgctgcagccactggtgtccgcctcggactcgctgccggcgatcctgatttccgtgtttatctgccaactgctgtggttcgccggtattcacggcgcgctgatcgtcaccggcatcatgaacccgttctggatgaccaacctggcgctgaaccagaccgctctggcggcgggcgcgccgctgccgcatatctacctgcagggcttctgggaccactacctgctgatcggcggcgtcggctctacgttgccgctggcgtttttactgctgcgcagccgggcggcgcatctgcgcagtatcggcaagatgggcgtggtgcccagcgtgttcaatatcaacgagccgattctgttcggcgcgccgatcatcatgaatccggtgtttttcctgccgtttattctggtgccgatgattaacgccaccttcgcctatatcgccaccaaactgggctgggtggcgcaggtggtgtcgctgacgccgtggaccacgccggcgccgattggcgcctcatgggcggcgaactgggcggtaagcccgctgctgatgtgcctgttctgtatggtgctgtcggcgctgatgtattacccgtttctgaaggcttatgagcgcacgctgctcaagcaggagcaggaaaaacaacaaccacagggcggagaagccgccgttaattcctga

SEQ ID NO: 442015 - DNA, 1392 bp, Serratia marcescens
atgaaatatgcattcccgcaagatttctggtggggcagcgccagttcggcgccgcagagtgaaggcgagagcctcagtttcggcaaaagcgccaccatctgggacgagtggttccggctgcagccggagcgttttcaccagcaggtaggcccgcagcaaacctcggatttctaccgctgctggcgcgacgacatcgcgttgctgaaacggctgaaccacaacagtttccgcacctccatttcctgggcgcggctgatcccgcaggggcgcggcgaggttaatccgcaggcggtggcgttttataaccaggtgattgacgagatgttggcgcagggcattacgccgtttatcaacctgtttcactttgatatgccgctggcgatgcagcagcagggcggctgggaaagccgtgaagtggtgcaggcctatgccgagtttgccgatgtctgtttccgcctgttcggcgaccgggtcaagcactggtttacctttaacgagccgattgtgccggtggagggcggctatctgtatgacttccactacccgaacgtggtggacttcaggcgcgccgcgacggtggcctaccacaccatgctggcgcacgcgctggcggtgcggaactaccgcgcccgcggtcaggacggggagatcggcatcatcctcaatctgacgccttcctatccgcgctccgccaacccggccgatgtgcaggcggcgcatgttgccgatctgatgtttaaccgcagtttcctcgacccggcgctgcgcggcagctacccgcaggagctggtggcgctgctgcgtcagcatgaccagctgccgccatgccaggcggaggacgccgcattgctggcgcagggcgtggtggatctgctgggcatcaactattaccagccgcgccgcattcagtgccgcgacagcctggtcaatccggacagtccgtttatgccggagtggtttttcagccactatgcgatgccgggccgcaagatgaatccgtaccgcggctgggagatttacgaaaagggcatctacgatattctgaccaacctgcgggaaaactacggcaacccacgctgctttatttccgagaacggcatgggcgtggaggatgaacggcgttttgagcagaacgggcagattcaggacgactaccgcatcgattttatccgcgagcatctgcagtgggtgcaccggggcatcagcgagggcagccgctgcctgggctaccatatgtggacctttatcgataactggtcatggagcaacgcctacaagaaccgctatggctttgtgcagctggatctggcgagccagcagcgcactatcaagaaaagcggcgaatggttcgccgcaaccgccgccgccaacggttttgaggagcaacgctga

SEQ ID NO: 442016 - DNA, 324 bp, Serratia marcescens
atggacgatttggaaagtacggtgatggagattatcgtcaatgccggccagacgcgcagcctgtgtttcagcgcgctgcaggcggcgcgcgacggcgattttgcactggcgcagacgcagctgcagcaggccgatgagttttcccgcgccgcacaccgggtgcagacccggctgattgagcaggacggcggtgagggcaaaacgccgatgacgctgattatggtgcatgcgcaggatcatctgatgaatgcgatactggcgcgggaactgattgccgaaatggtcgaactttatcaacgacaacggccatcggctcagggataa

SEQ ID NO: 442017 - DNA, 921 bp, Serratia marcescens
atggccaatatcaatgatgtttcccgcctggcgcaggtatcgaaagccacggtgtcccgggtgctgagcggcagtcgcggggtaaaggaagagagccggcaggcggtgctgcgggcggtggaaacgttgaactatcgtccgaacgccgtcgcccagtcgctcaccagccagagcaccggctgtatcggcgtgatttgcgccacggaacatattcagcaggcgaccggttatctccaggcgctggagaagcagctgagccgtcagcagaagcatctgctgctgcgtttcgccaacgacgccgctgcgctggcggccgcggcggcggagctgagcagcggctggtgcgatgcgctgatcgtggtcggcgcgcgtttcgcgctgccgccgctgccggacagcacggtgtgtctggactgcgtcaccgcgtccacgacgaaaagcgtgggttttgaccaccagtttgcggcagaaaccgcggtgcattacctcgctagccagcagcggcggcagatcgccctgattaactttgccgccggcgacgccgccgaacaggtgctgcagggctattgccacgcgctggaaacgcaccttatcccctataaccgccagctggtggtggaagacgaagcggtgacgcgtattgcgctgcagcgcctgctcaacagcacgatgccgtttaatgcgctgctggtgaccgacgactgtcaggcgcaggaggcgctgacggtgctggcgcagtatcagcgtcaggtgccggcgcaggtgatggtgttcagtctggacggttcgctgcagtggcccggcgcgccgacggtgccgtcgattgagtattcgctggatgcgctggcgcagcgtgcgctggcgctgctgagcggcgcagaagagcctggtttactgcgcggcagcctgacggcgcgctga

SEQ ID NO: 442018 - DNA, 1896 bp, Serratia marcescens
atgacgaaaataagaaactatgcccagttggccggcgatattctggcggaggtcggcgggcaggataatctggtcagttttacccgttgcgccacccgtctgcggctggtgctgaaggagacgccgccgcaggcggcggagcggattaaacagctgccgggcgtcatcatggtggtgcagagcggcggacagtttcaggtggtgatcggcgtacatgtggcggaggtgtttgacgctttttccggcctggtcgatcagagccagctaaaaaccgaaggcgcgaaagtccggctgctggacgcggtcatcggctccatgtcggcgattttcgcgccgatcgtgtttgtgctggcggcggcgggcatcctgcagggcggcctgatcgtcgccagacattttgcgccgcagctggcgaacggcggcaccttcgaggtgctcaactttatgtcttggacgccgtttgcctttctgccggtgctgattgccattaccgcgtcgcgctttttccgctgtaacacctttatcgcggtgctgtgcagctgcgcgctgattaatcctgagtggggcgccatcgccgcgcgtatcgcgcagggcgaagcgatccacttcctcggcctgccgctggcggaaacggtgtacacctcgtcggtgctgccgccgatctttatgatctggtgcctgtcatacgtggaaaaatatgcccgccgcgcgatccccgacgtcgtcaacgaattgtttaccccgctggtctgcatgctgattatggtgccgtttacgctgttgctgatcggcccgatcaccagttcggcggcgttcgccattgccggcggctacaactggctgtttgacaccgcgccggcgctggccgccgcgctgatcggcggcgtatggcaaatggtggtgatcttcggcgtgcactgggggattacgccggtggtgatggccaactttgatgcgcacggccgcgactcttttcaggctttccagaccattgcggtggtggcgcagatggcggcggcattggccgtcggctttaaatcacgcaacccgcagtttaaaactaccgcgctttccgccggcgtcaccggcgtgttcggcattactgaaccagcgctgtacggtgtgaccctgcgcctgaaaaagccgtttatctgcggctgtatcggcggcgcgctgggcgctttggtcaccagcttcttcggcagttactactatgcttatgctggattacccagcctgctgaccgtggtaaacgctatcagcccggagaacccgatgtcgtttatcggcgaactggcgggcgttgctacggcgataatcagcaccatggcgatggtgtacgcggtgggctttgacgatccgccgctggcggcgggcggcgcggcgcctgcggcaccaaagacgccagaaatgcctgcggctgatgagccggcggcgcagccgcaggcggtgacgctgctgtccccggcggcggggcattatgtgccgttggagcaggtgaacgatcccagctttgcgcagaaattgctgggcgaaggcgtggcgatccgcccggtggacggtcagatcctggcgccctgcgacgcggtggtctcctcggtgatcgacagccggcatgcggtcgggctgacctgcgccaacggcgccgaattgctgatccacgtcgggctggatacggtcaagctgcaggggcagcattttgacacgctggtggcggtgggccagcaggtgaaagcgggcgacccgctgatccgctttgagcagcaggcgatagaagcggcggggtatgacgtgaccacgccgtttgtggtgctgaacagcgatgagttcgcggtgcgcctgctggacgtaaacagagaggttgcctgcgggcagccggttatgcagattgggtaa

SEQ ID NO: 442019 - DNA, 1431 bp, Serratia marcescens
atgaaaagcgtatttccgcaggattttctttggggcggcgcggttgccgcacaccaggttgaaggtggttgggatcagggcggcaaaggcccgagcatttgtgatgtgctgaccggcggcgcgcacggcgtgccgcgcgagatcacccaggaagtggtgccgggcaaatattacccgaaccatgaggcggtggatttctatcatcactacaaagatgacatcaaactgttcgccgagatggggttcaaatgcttccgcacctcgattgcctggacgcgcattttccccaagggcgacgaggcggagccgaatgaagaggggctgcgtttctacgacgacatgttcgacgagatgctcaagcacaatattgaaccggttattaccctgtcgcatttcgaaatgccgctgcatctggtgcagcagtatggcggctggaccaaccgtcaggtagtcgatttcttcgtccgcttcgccgaggtggtgtttgaacgttacaaacacaaggtgaagtactggatgaccttcaacgagatcaataaccagcgcaactggcgcgcgccgctgttcggctactgctgttccggcgtggtgtacaccgaacatgataatccggaagagaccatgtatcaggtgctgcaccaccagtttgtcgccagcgcgctggcggtgaaaatcggccaccgcatcaacccggcgatgaagatcggctgcatgctggcgatggtgccgctgtatccgttctcctgtaagccggaagatgtgatgtatgcgcaggaatccatgcgcgaacgctatgtcttcaccgatgtgcagctgcgcggctattatccgtcctacgtactgaacgagtggcagcgacgcggcttcaacatcaggatggaagcgggcgacgagcagattctgcgcgaaggctgctgcgactatctgggcttcagctactacatgaccaacgcggtgcaggccgccggcggcgagggcgacgccatttccggctttgagggcagcgtaccgaatccgcacgtcaaagcctccgactggggctggcagattgacccggtcggcctgcgttatgcgctgtgcgagctgtatgagcgttatcagaagccgctgtttatcgtcgaaaacggcttcggcgcctacgacaaggtggaagacgacggcagcatcaatgatgattaccgcatcgactacctgaagtcgcatatcgccgaaatgggcaaggccgtcagccatgacggggtggagctgctgggctatacgccgtggggctgcatcgactgcgtttcctttaccaccggccagtacagcaaacgctatggctttatctatgtgaacaaacatgacgatggcagcggcgatcagtcgcgttcgcgcaagaagtcgttctactggtatcagggggtgattgcctctaacggcgaaaccctttaa

SEQ ID NO: 442020 - DNA, 1260 bp, Serratia marcescens
atgtcaaaatggcattggctgtttagccagttaacgcgcaaactctggtttcgcgcatgcttattcgcgcttctggccgtcatttcagcgttagtttccatcgtcattaaaccatttattcctgccagcatcggcggcatggtcggcgccgatgcggtagataatatcctcaatattctggcgtccagcatgctggcggtaacgacattttcattaaatattatggtgtccgcctacagctcggcaaccaccagcgtgacgccgcgcgcgacgcggctggtgatggaagacagcaccacgcaaaacgtcctggcgacctttatcggctccttcctgttcagcctggtcgggattgtggcgctgagtatgggcgcctatggggagcgggggcgggttgtattattcgttgttacgctgctggtgattgcattaatcgttatcacgctcttgcgctggatccagcatctttcattattggggcgcgtaggggaaacgacgtcgcgggtggaagaggcggcgcgcaatgcgctggaaaatcgcgttaacatcccttacatggggggcaaagcgtggttatcccctcagtactctcctgcggatgccatcgcgctctatccgacagacattgggtatattcagcatattgatatgcagatgctggatgaccggctgcaagaaattgaaggggagctttatttggcctgccagaccggcgcctttgtgcatccgggacatcctgtgggctggatcgttgccccggacgctaacctcgagacggcagcactattggctgccatcaccatcggtgcggagcgctcgtttgatcaggatcctcgctttggccttgcggtgttggcggagatcgcctcccgcgcattgtcgccggccgttaacgaccccggcacggcgattgatgttatcggccgcgcggtgagactgctggcggtatggggcagaaacaaaccggaatctgacgcggtgatctatcacaacgtgtgggtcaaaccgatcgtgacggcagatctcttcgatgacattgtgaatcccatagctcgcgatggcgcagcgctgattgaggtacaactccgtttgctcaaaggattacaggcgctcgatcggatgaatacggccgtttttgctgcggacgtgcgcagatatgtcgccatcattcagcaactggctgaaaaacacatggtgtcgcagcaagattgcgccagactccatgcatggatacgccaatcggggttagacaatcactga

SEQ ID NO: 442021 - DNA, 474 bp, Serratia marcescens
atgaagaaactggtctgttttatggttagcctgactgcgctattatcgggcctgtctgttccagcctatgccgccactgcgctgctgcactgtgaggccgaaatgctgatccgcaggaatatgacggaaaacggccctctttcactgcatgccaacgcgcactatttctttgatccggcagggaaaggctatctggatattgtcggcaccgtgcaaaataagcagcaagccttccatctggacaggattatctacttcacttacgtccgcgccgcgcgcgatggtttttacaccgtgaaatttacccacagccggcccaagccgctcgacaatacgccgcaggcgatgctggcttatttttatgagatcggtgagaagacgcccggctacccggtggatgtctcaaaactgaacgagagcctgatcctgttcagtcatttgtctttccccaccatgctgtgccagaagatctga

SEQ ID NO: 442022 - DNA, 912 bp, Serratia marcescens
atgaaatacataataaatttgattgttgtttatataccagcggaaaaaacactcagtttacataacgatccgtcgcaaaaggtgaacctgtctaacccggccaatcgcttactgttagaactcatcaaatacaatggcaccacgttggagcgggaaacgttattacgtaacgtatgggaggattatggttttaccggctccaacagtaacttaaacacctatatcagcgaactgcggaaatcattatccagcctcagcgaaaacataaaaatcatcaccaccgttcctaaggtcggctttcgtctggacgctgaaatagaaccggcattacgcgccgacatctacgcggaaacgcgctccgacgccgatgcggtcgcccagtgcgctacctcaccgccaattgacgaaaaggaagaagaaaaaagtgaagatggaaggaacaaaagtgatgagcagcacaacggcgttaacgacagcgtcacccccgcagagacgcctctacaccagccgccggcaacgccaaaccgctctcgccagcgcagctataaacgcagtgcggtcatggccatggcattcgcgttaatcgcctggctggggtatgcctattttcacacgccgcggctgctgaagattgtatcggagccttattcctatcttttcaccctcggcagctgcgaggtgtactcgctggactataaaaacgcctatagcaaaaaagcgctgatcgccatggccaaaaaagatattgcccaggaaaagctggactgccaacacatcaggaacatgatcttttataagaaaatgtgggccgaggataaattcaacgaagtcacctttatgggtatctgttcggtcaccaccacggaaaaatatgaacgctgcttcaccatcaagaattatgcagggaattag

SEQ ID NO: 442023 - DNA, 522 bp, Serratia marcescens
atgaaattaaacaaaatcatgatggccggcgtattggtattcggtgtttcaaccatggcgcacgcgggcaatcagggacaaggggtggttaaattcaaaggagcgattattgatgcgccatgttccatctcgccagaaaccgtcgatcagaccgttgacctgggccagatctctaaagtggtactgaaagacggcggcaaatccgtcaagaaagagttccaggtactgctggaaaactgtgagctggaaaaagataagagcactgtttctctgacctttaccggcgttgaaaatagcgacggccgcctggaaatcaacggcaccgcgaaaggcgccagcatcgcgctggtggataccgaaggtaaaccgatcaaactgggtaccgcgacttctgcacacaaactgaccgaaggtaaaaacattctgcgtttcggcgcttacctgcagggtgacggcgcgtctgcagccgtggtcccgggtgatttcaccagcgttgctgacttcaccatgtcttaccagtaa

SEQ ID NO: 442024 - DNA, 546 bp, Serratia marcescens
atgcgttggttgaaaccctggataactgtggttcttttattgttgttgggcatgctggccatgagccctgtcgcgtttgccggtttatctggccggggaacggtgcatatgggcggggcgattattgacagcgcctgtgcgattgcggccggagaacgcgatcaaacggtcgatatggggacggttcccgtcagtcagattgtcagtcaggggcagggtagcgccattccttttagcgtgcgcctcgttaactgttcgctggaaagatacacctcaaggctgcctgactggcaatattttcaaatcacgtttgacgggccgacggaaggcaacgggttcggcctgcagggcgaggcacggggtctggccatccaaatcagcgacgaacaaggcaatgttgccgcgcctggcgtagcgatgccaaagagcgacattcactcgggaaatatgcagctgaattatttcatcaggctgattggggataaaaaaacgctgcgtaccggcgattatttttcaaccatcagattcaagctcgattattactga

SEQ ID NO: 442025 - DNA, 2532 bp, Serratia marcescens
atggattggttttctgctggggcactctttcgcccgaaaacgatagggatattaattgcgttagccattaacgggttgcctggttatgtactggcaggcgacgcaattgaatttaacaccgatgtgttggatttgaatgaccgaaataatattgacctcagccagttttcgcgtcgcggatatattatgccgggtgcatataacatgacgattcggctgaataaacatgaattaccggaacagcaggttatgttctatgcgcctgacgatgacgataagggcagtcaggcctgtctttccccggcgcaggtggcgcaactggggctgaaagaagaattcagcaagcaactgacgtggtggcataacggcgaatgcctggatatgcatagcctgaagggaatggaggccaccggcgatctgtcggcggcggcgctgtatctaaacatgccgcaggcttacctggaatatacctccgaggattgggacccgccttcgctgtgggataacggtatttcaggattgttgtttgattacaacgtcaacgcacagggcacccgccagcagcgggacggcgcgcgcgattacgacttcagcggcaacggtaccgccggcctgaacatcggcgcctggcgcttgcgtgccgactggcagggcaatatcagccatcagagcgggagcgctcaggggacggaaaagaaactggactggagccgttactacgcgttccgcgccctgccgtcctggcgctcgcgcctgacggtgggggaagactacctggattcgagcgtgttcgacagcttccgctataccggcgccaatctgcgctccgacgacaatatgctgccgcctaacctgcgcggctatgcgccggaagtggtcggcgtggcgaaaaccaacgccaaggtcaccgtcagccagcaggggcgcgtgctgtatgaaacgcaggtggcggcggggccgttccgtattcaggacattaatgacgcggtgtcgggcaagctggacgtacgggtggaagagcaggatggcagcgtgcaaaagttccagatggacaccgccagcattccgtacctgacccgaccgggcagcgtgcgttacaaactggcggcgggcaagccctccgactggcggcatcgcacgcgcgggccgatgtttgccagcggcgagttttcctggggcgtcagcaatggctggtcgctgtttggcggcagcatcctcggcggcgattataacgcgctgtcgctgggggtcggccgcgatctgtgggtgttgggggcgatttcgttcgacgtgattcagtcgcgtgcgcatatcccgcaggaggggacgttaagcggcggttcttatcgcgtgaactactcgaaaaactttgatgagtacgacagcaacatcaccttcgccggctatcgcttctcggaaaagaactttatgaccatgagcgaatatctggatgcgcgctactacggctatcagatcggcagcagtaaagagatgtataccctcagctttaacaagcagttccgcgatctgggggtcagcacctttatcagctacaaccaccagacctactgggaccgggcggcgaacgaccgctacaacctgacggtatcgcactatttcgatctgtggtcgatgcgtaatttgagcctgtcgctgtcggcttaccgcaatacctatgacggcgtcaaagacgacggtgcccacctgtcgctgtcgattccctggggcaacagcggcagcctgagttacaacgccgcattggcgaaaggggataacagcaacagtctgagctattacgaccgcattgatgaacacaataactatcaggtcagcgtcggcaagacgcgcagcggcgcctcggtcagcggttatataaaccatgaagccgatgccgcgcagctgagcggcaatatcagctaccaggaaggacaatataccgcgctcggtctgtccgcccagggcggggtcacgctgacaatggaaggcggcgcgctgcaccgcgtcggcacgatgggcggtacgcggctgatgctggataccggcggcgtggcggatgtgccggtgcgtggctacggcagcaccagccgcagcaatatgttcggtaaagcggtggtgaccgacattaacagctactaccgcaacaaggccagtatcgatctgaacaagctggcggacaacgcggatgccagcgattctgtggtgcaggcgaccctgacggaaggggcgatcggcttccggcgctttaatgtgattgccggtgaaaaagccatggcggtcattcgcctggcgaacggcgatacgccgccgttcggcgccacggtgtttaatctgcgtaagcaggagaccggcatcgttaacgacggcggcaaggtttacctgagcggcatcaaggcgggcgaaaaaatgcgggtgttctggaacggtgaagcgcagtgcgccatttctttgccggatacgctgccgaaagacggtttcaacaacctgttgctgccgtgccaaccgctggaacaggcgggcaacgcggcgaagtag

SEQ ID NO: 442026 - DNA, 756 bp, Serratia marcescens
atgaaaccaagtactttgctgatgatgtccgcctgcctgtttagcggcgcggcggcgatgcagcaggccaatgccgccatcgccctggatcgcacccgggtggtgttcgacggcggcgcgaaatccgtcagcctgaacgtcagcaatcagaaccagcaactgccctatctggcgcaggggtggattgaggacgagcagggcaacaagatcagcgatccgctggtggtgctgccgccggtgcagcgcatcgaggccggtaagccgagccaggtgaaaatccaggcgctgccgggcgttaaacagctgccgcaggaccgggaaacgctgttctatttcaacctgcgtgaaattccgcccaagagcgataagcccaatacgctgcagatcgccctgcagacgcgggtcaaactgttttaccgcccgcacgcgattatgcaggacgtggaggcgctgaccaagccctggcaggagaagctgacgctgaccaggcgcggcgatcgctacacggtgaataacccgacgccatattacgtcacgctggtggacgccagcagccagaagaacggcaagagcgcggcgggttttgaaccctttatggtgccgccgctgggtgcggccgagatgtcggtcagcgcggcggcgctgggcagcgcgccggtgctgacctatatcaacgattacggcggtcgtccgcagctgactttccgctgcgctggcaatggttgccaggccgtggcggaaaatcaccgcagctaa

SEQ ID NO: 442027 - DNA, 633 bp, Serratia marcescens
atgaccatcaaacgcagtctgtcgggtaaagcccgtttatgcccgacacgtcaggttctgcggctcgccgcactgttgctttgcgcggcgggactggctccgggcatcgctgcggcggcggataactggcaggtggaaggcgccaacggcgtgctgcacgttcacggcgtgttgacggaaagcgcctgtcggctggagatgaattccgccgagcaggcggtatcgctgggcaataccggcaccggacgcctgcaaaaggccggcgaccgtggcgaaccggtcgctttccaactgcggctgcgcgactgcattcgcaccaccggcagcagccgggacgagcgcggcggcatgttgagctgggatgccaaccagccggtggtcagcgtgcgttttattgcgccggcggatgctgacaatgcacagctgattaaagtgcagggcgtttccggtttgggtctgcgcatgcttgatgcgcaagggcaggatattcgcctgggctttcgcggtaagccgcagtttctgacgccgggtcaggacgttctgacttaccgggtgatgccggagcgcaccgccgcgccgctgcaggccggcgcgtatcgcagccaggttaatttcagtctgaattatgactga

SEQ ID NO: 442028 - DNA, 522 bp, Serratia marcescens
atgcacagttatttaagccgcagcagggggttttggctggcgatgggaggatgcctgctggcgccgattttttcccccgccctggctgcgccgggcggcagcggcggtacggaaatcaaaatttatggcacgctggttgagccgccgccgtgccagattaataacaacaaggtgatcgatgtgccgtttggcgacatcgggatcaaccgggtggacggtaagaattacttaaagcaggttgaagcgccgctgaagtgcgatgaaagccagctgaaatgggatctctggctggaggtgcacggccaggcaacggcgtttgataaagcggcgatccagagttccgtggccgatctgggcattcacatgctgctggacggtaaaccgctggagctgaataagccggtgcggattatgcctgtcccgacgctgaagttgcaggccgtgccggtaaaaaaagcgggtgccgagctgccggaaggggcgtttgacgcctctgccacgctgctggtcgagtaccaataa

SEQ ID NO: 442029 - DNA, 522 bp, Serratia marcescens
atgcgtacccagggcgtcgcgctgttattaagcctgctcattccatgtgctgcgctgcaggccaaggagaatttgtatttccacggctcactggtggcggagccttgcatgctggagcctgatgatgcggagatcgaactcgacttcggcaacgtggtggataaatacctgtaccttaaccagcgcacggccggtaaggcgtttgccatccgtttgacacagtgcgacaccaagctgggtaatctggtggaaataaccctgaaaggggctgaaagcggcccgttgcccggcttgctgcagccagcgggcggcagcctggcaaaaggcattgctatcgggctggagtccgttgaaggaaagccgctgccgatcaatcggacctaccgtcatgaactgcacgacggcagtaatatctttaacctgatgggctatgtgcaggccgagccggaggcgctgaagagccatacgatcacccttggcagctttagcgccgcgctgacgctgatgattgattatccctag

SEQ ID NO: 442030 - DNA, 1014 bp, Serratia marcescens
atgcgattttttattttattgctggggatgtttgcagtaattggtgcccatgcggagccggataatacctgttggggcgatccggtgactatcgccatcgtggatatagcttccgcaccttttacgagtaataaaaaaggtgcggaggcaacaatgcgatatcaaactaatccaagccactttggtgggtattgtaatcgcagtgagccatataccgtaatgactcattatattgatatggggccggcacttataccttcaaatattaatccagggtattttaaactcaatgatgacattgacgttcttttgggtagtagaggtagaggatcggtagtaaaatacttccctttggagccatctgattcattaattggtggtggcccaagctattttggggaaaatgttttttacagcgacggatttagtgtggccggtactggagtggtaaaattaaaattaaggcgggatattattggcggagctatcgtggtaccgccagatactgaacttttttcagcctaccgggttatgaatgacgaaccttacccgccacgccccagcaagccgatggttcaagcgcgcaccaaagggggcggacagataataccggtggcgccggagtgttcgattaatcaggggaacaccattgaagttaacttccattcgttacaaacggatttggttcccagccgcagcgatgatgagaggttccgcaaagatattgcgttgcactttagctgtaataccagcctgacgcaggatattcaggtgcggctggtggcggatagcgcgtatttttcctcagatcttatccgctctaataattatcggctggggtttgcgctaaagcataacggggttttggtcaggccaatggagtcattttctgcccggattgaaaacggggtggataatgagaatattaccctgtcaccggtaaaaagcgcttttaatgaactgaagggcggtgggtttaacgcttcggcgacgctggtgattttacctatttga

SEQ ID NO: 442031 - DNA, 816 bp, Serratia marcescens
atgatgtcgcactatgtcgatatgggaagcggcctggcgccgtctgatcttaaccctggctactttaaattaaatgaagatgtcgacatccgtatttccagtgccgcgacggggagtgcggcctatcagtattttcccctagcccctcctgcgttgaaagcttttacgcttccccctgttggacagggaacccgtgggatgatgttctctacgaccagtcagggatatgtttatttaatattgagacggaatattattggtggtgctgttgtcatcccttctaatgtcgaactgttctctgtttatcgggtcatgtatacgaatgatatttctgtaccccggccatcccgacccagtaagccgttggtacaggcgcggacgcggcccggaggtcaggtcatcccggtgccgtcagagtgctctattaatcaaggcaatgccattaacgttaacttcggcacgttgcaaaccgcgctgatccctgcttccagttctggtaaaaaaggcgagggatatagtagagatattacgttgtcctttaactgtaacagcagtctgacacagaatgttaaagttaaattggtggcggatacatcaatgttttcatcggatttaattcgctctgacaatgctgaattaggctttgcgctaaaaaacaatgagagattggtcaaaccaatgggggcatttcccattcggttggaaggcggcctggggcgtgcaagcatcaccttgatgccggtaagaaaccctcaggctgaattaaaaggcggtgcatttaatgcttcagccacgcttattattcagtctttttaa

SEQ ID NO: 442032 - DNA, 1002 bp, Serratia marcescens
atgagattattgtccctgttaacgtgtgcgttattcacgctggcggcccatgctgagccggataatacctgttggggggagccggtaaatattgccgtggtagacattgccgctgcgccttttcccagcaataaaaaaggggccgaggcgaagatgggctatcaaaccaatcccgaccatttttccggcgtgtgtaaccgaagcaatatgtttgctaatcaaatgaggcattatattgatatggggcctgaattaatcccctcgaacattaaccctggttactttaaattaagcgatgatgtggatattttgatttccagtagtggttataatttccctctggggccggaaacgaacctatatgggccaacactccctccttacggtcaaaatgtcagggtagatgggttggctgcggcaggcaccggcgatatatcgttaaagttgcggcgggatattatcggtggggcgattgttgcgccggcggataccgtgcttttttctgtttttcgggtgatctatatggatccgattcccccacggcctagtcgcccgttaatccaggcgcataccaaatcagccggtcaggtgatccctatcccagcagagtgttccattaatcgcggggagactatcgaaattaattatgggactttgcaaaccgtgttagttcccgccgtcggcagcggaggtgacgactacgtgaagcatattgcgctgagttttagctgtaatgccaacctgacgcaggatgttcaggttaaattggtgtcggacgttgccggtttttcagccgatctgatccgttcggataacagtgccctgggtttcgccttaaagcataataaccagattattaaaccacaagattcattccatgccagaattgaaggtggcgtcgggaatacggaaattgctatctcgccggtgagagatcctaaggctgcattaaatggcggagcgtttaaggcgtcggctaccctggttattctgtcgctgtaa

SEQ ID NO: 442033 - DNA, 1701 bp, Serratia marcescens
atgattttttgcctgtggttcatcattgtcatgcagatttacctgccaaacggcggcggaattggtttgaatttaccgctaaatagtcttgcctggatggcgatggctgcggtgacgctggttatttggcaatgcctgcctaagcataaatacctgacgttaacatctgtcagcaggttgtttattggcggcgtggcgctgctgtttattccgctgacttatacgcagccggaatggctggcgcatgccggctggcgcctggcggggctggcgggaggcctgctgttttactttatcttgtcgcaataccgcatgccgctgcgttttcgtcgtttgctgctgcatatgatgctgtgcgcagtggcgctgcaggcggcgctgacgctgtttcagctgttctggccgggtgtggcgcaggcgtggatggattatgtgcccggcggccgcccctacggtattttccaacagccgaacgtgctgggcagctttatcgccatgggcgtggcgctggcgctgatgctgtggctacagccgcagtttggcctgcccggtttggttactgaacgctggcgcagcgggctgctggccgcgctgctgttactgctgccggcggtgctggtctgggttcagtcgcgcaccggctggctggcgggaggcgtggcggcggcgttgatgctactgacgcagtggcgcattgcgccgcggcgtagccggatcgcggtacagttaatcacgctgggtgcggggttggcgctgttggccctgtggcaggggctgttgacggaacagggattgcgctatgtcagccataccgcctccaaccatgcgcgttacaccatgctgcgcgacacgctggcgatgattgcagagaaaccgtggtcaggctggggatacggcggttttgagtacagctttcaacacttccgcgtgcatcaggcggtgccgaccgtggtgacggaaattgcccgtcatccgcataacgagctgctgctgtggtgggtggagggcggtgtaatcgctctggccggcgtctcgttgttcatcgctggcggcatcgtcctgctgcggcacacgctgcgtctggcgcagggggaaagacgtgcggaaggcatcgcgctgtttctcgtgctgttgccgctgctgctgcacactcagacggaatatcccttttatctgtcgtttccgcactggatggcgtttttaatcctgctggcgatgctggagcgacgggccatgccggttatgcgccgacggcgtttgtcaccgcgcttacgcgcgccgatcgccaggggaacgcagctgctggcggtggtgaccctggtgatgatggcgggcgcgttaagcggcggctatacgctgacgcaggcggaaaggggcggtttcaggcagatggaggatgtggacgccatgtcgccgtttacctactgggcgtatcgcgatcgccgtcagtttgaccggcaaatgtcttccctgctgacgtttaaccagacgggggatgaacggcgtttacagcagtatgcatcttgggcggagcgttatttgaagcatcgcgtcgatgccaacgtgtacgccacattcatccagattttgcagtatcagcaacaagatgtgccggcagaacagcaacgccgcgaggcagcgctgctgtttcctatggacgcgcgttttcaacccgtggcatctgatgagggaacacaatga

SEQ ID NO: 442034 - DNA, 606 bp, Serratia marcescens
atgacccggacaatctctatttatatcgacgactccaatcttttttttgccgcaggcttaaggttggcgctggagcagcattttagcgcccgcagcgtcggagtctgccatttatacagtacggcttcaccggccgatctggtgattattgccgccggcgaaggtgtggccggccagttctgccggctgccgcgtccggactatcgactgtctacggcgtacctgaccctgcgcgatcggccggaggtgccgatgctgatgctgccggcctgccagcgggaaaccggccgcctgtaccgccgcgacccgctggaaaaaattatgcgtcaggttgacgccgcactggaagcctgtgagatgcggtacgattttgcgcaccgctgttattggtgtgacaagcatgcgttaacgcagcgcgagcgtgatatcgtgcaccgccttggccgtggggaaacgccgtacgacattgcagagcgcttacaaatcagcgtaaaaaccgtcagcctgtacaaacgctcgatgatgcgcaagatgcacctgaagagcacgtcggacctttatcactggctgcagaacggcggcctgaagcaccagcctgtggcgtaa

SEQ ID NO: 442035 - DNA, 1116 bp, Serratia marcescens
atgcctgtgaaatctgaacgtaaaacggttgtggtgcttggcggcggcgtgctgggcgtctccaccgccctgcagctggtgaaaaaaggcgcgcaggtgacgctggtcaccgaagccgcgctgtgctccggcgcttccggccgctcgctatcatggttaaattcggccggggaacgctcggcggaatatcacgcgctgcggatgatgggcatcgatcgttaccggacgctgttcgcggaggatcctgcccgcgactggctgcgctttgacggcgggctgttctgggcggccaacgacacggcgggtacgctggcccggcacgcctatgaaaaggcgcacggttacgattcgcatgtggttgacgcgcacggtatcgcggaaattgacagcgcggtgaatccggctgcgccggctgagtgcgccatcgtcaatccgggagaaggctgggttagcctgcccgacttaatccgccatcttcatcagcaatttcaggcgcttggcggggaggtgatcgagcatgccggcaaagcggaggttatgaccgataaggggcgggcctgcggtatccattgccagaaaggcacctttcgtgccgatgcggtcctggtggcctgcgggccgtggacgccggatgtcgtcgcgccgctgggcgtcgctattcccaatggttcgccggtttcgatgctggcgatcagccagcccgtcgcgcagagcatcaagctggtgatgaatacgccgcgcgcggcggtgcgcccgaacccggggagcaccattgccgtggatcacgattggtatgaagagcagatcgttccacagcctgatggcggctacaccattgccgaaagcgtggtcgatcaactgatggaggaagccggcgcactcatcggtcgcggcgccccgctgcacgctcagagttggaagctggggcttaaacctatcccgggcgatggcgagccggtactcggcgaactgcagaaagtgcccggatgtttcgtcgcctttacccactccggcgccactctggcgctgatcgtcggcgaactgctggccgacgagattgttgacggtaagcaacacccgatgctggcgacattccgcgccgaacgtttccactga

SEQ ID NO: 442036 - DNA, 1074 bp, Serratia marcescens
atggcatacaaaagcatcgccaccggcctgattcggacagcgctggtcggttttggcatttccgggcaggtctttcacgcgcccttgctggccgccaatacgcggttccggctggacgctatcgtcaccgctaatgaggagcgcatcggcaaggcgcggcagcgttatccgcaggcgcgcctgctcgccaactggcaggcgttattacggcatatcgatagcggtgagctggagattgacctgatcgtgctggggacgccgcccgcgctgcacgccgaacaggcgcgcgacgccacggcgcgcggcattcacctggtggtcgataaaccgtttgccgccaatgccgcgcaggccgagcagatgctcgccgacgcccggcgtgcgaatacgctgctgaccgtgtttcataaccgccgctgggacggcgatttcctgacgctgcaaaagctgctgagtgaggacgcggttggcgccgtccgcacctttgagtcccgctttgagtggtggcgtccgcaggggttcggcaactggcgcgaccggactccgctggccgaaggcggcggcctgctgcttgacctcggcagccaccttatcgatcaggcgattcagctgtttggcccggtacggcaggcctccgccgaattggttcgctacggccgccaatcggacagcgatgacgatgcgtttgtctcactgctgcatgagaacggcgtacgttcccgcctgtggatgaacggccaggcggcgcagaacggaccgcgctttcacctgctgggcagccggggcggctatacctgctggggcctggataaccaggagccgtcgctcgccgccggtctgttaccaagcgactcgcaatatggcgtcacgccggagccggactgggggacgctgagcaatggcgaaacgcgccatgccgtaccgcatcagcgcgggaattaccccgcgttttatcagcagctggccggcgccctgctggacggcggcccttccccggttgatgccggagaagcgctgacggtactccggctgatcgacgatctccatcaacgctttgccgtccgctgcgcctga

SEQ ID NO: 442037 - DNA, 777 bp, Serratia marcescens
atgagccagtcagtgattcatgaaacccacccgacgccgcagcccacctaccacggggccgggctggaactgcgggagcttacgctggcctatgggccgctggaggtgttgcgcaaggtctcgctacgcgtcgaacccggcaccaccacctgcattatcggcccgtccggctccggcaagtcgacgctgctgcgggggattaaccgcctgcatgaaccaaagtcaggggacgtgctgctgtcgggaaaatcggtgctgcaggacaagccggatgcgctgcggttgcgtatcggcatggtgtttcagcatttcaacctgttcccggaccatagcgcgctggagaacgtggcgctggcgccgtggaaagtcaaagggctgccgaaatcccaggcgatgtcgattgcacaacggcggctggatgaggtcggtctgggccagcgcaccgatcaccggccgcgggatctctccgggggccagcagcagcgcgtggccattgcccgggcgttggcgatggatcctgaagtgatgttatttgatgaagccacctcagcgcttgacccggagctggtcaagggcgttctgacgctgatggcggatctgtgccgctgcggcatgacgatggtggtggttacgcatgagatgggttttgcccgcagggttgccgatcaggtggtgtttatggatgaaggcgaaatcgttgagtacggctcgccggaaaatatctttgaacgcccgcggtcggcccgcctgcagcgttttttatcggaggtactgtaa

SEQ ID NO: 442038 - DNA, 819 bp, Serratia marcescens
atggacctgttaaccattctctcgcgcaccttctttgatatcccgtcgatgctggaggtactgccgcagctgatcggcaccgggctgataaataccatcatcatctcactgtcggcgacggtgctgggcacgctgtttggcttactgctggccctgatggggatctcgccgtcgcgctggcttcgtctgccggcccgcatttataccgacctgttccgcgggctgccggcgattctgaccatcctggtgattggccagggcctggcccgctttagctaccagcttttcggcccgacgccctatccgctcggtatttttgccctcagcctgatcgccagcgcttatatgggagaaatattccgctccggtattcagagcgtagaaaaaggacaaatggaagcctgccgggcgctgggcatgagctacggccgcgccatgaggctggtgattattcctcaggggatacgccgggtgctgccggccattgtgaatcagtttatcgcgattattaaagactcatccctggtctatctgcttgggctgatgaccgaccagcgcgagctgtttcgcgtcagccaggacgcggccgttctgaccggcaacctttcgccgctgatgctggccgggctgttttatctcgccatcaccgttccgctgacccatatggtgaattatgtggatgtgcgcttccgcaccggccgccgccgtttaacagcgccgcaaagcggtctgaaagaggtcgatgaagttcaacaccacgccgacgccacgctgaaaaacggttcggctaacgcgcttatcaccgagagaggtcagtaa

SEQ ID NO: 442039 - DNA, 822 bp, Serratia marcescens
atgaaatcgcacaaatacctgcacaacatgacggccatactccttggctcagcagttctccttagcgcgccatacggcgctctggccgccgataatgataatccctacgggctgatccagcccggccacctgcggatagccagcctcggcgatgccaaaccctatacgttcaccgataaaaacggccagttcaccggctttgacgtggagtttttcaccaacgtggcgcaccggattgggatcaatcaggtcgattttatcggccaggatttttccgccattctgcccgccgtagccaacggccagtacgatgccggcgtcgccgctattggcattaccccggcccgggcaaagaccgtcgatttctctaccggttatctggcgggctacctcaccgtactgacccgtaaagattcgggggtgaaggatgtcgcctcgctggcgaaaaaacgccttggcgtcgtccaggggacactgcaggaaagctatgccgtcaagcactttacccagaccgacgtcgtgcgttttcccgataacaatgccgccgtctcggcggtgaacaacggcaccctggatgccatgttcctcgattacgaagccgcaaaaagctacagcgatcgttttcatctggttaacgccgccaatgttccctcgtttgatgcccccgccggcatcgcgatcgccaagaacaagcccgccttcaaggccgcgctggatcaggcgatcaacgacgccatgaaggatggcacctggaagaccctgtatcagaagtggttcccgggttcaccgatgccgaagcagtatctgcccgacgggcagtaa

SEQ ID NO: 442040 - DNA, 1092 bp, Serratia marcescens
atgacaaacaggatgcctaaaaccaaatcgccgaccgtggctgatgtcgcccgggaagccaacgtctccaaggcgcaggccgcccgcgccctgggcggctatggcgcagtgagtgaagaggtgcataagctggtgcatcaggcggcgttaaagctcggctaccggccgaacgagctggcgcgcagtatgaatacggggcgttccaatacgataggcgtcatcgtcggcgatatcgaaaacccgcactttggcctggcgctgcgcggcattgccgatgtcgcccgacagtccggctatcatctgctgttaagcaacagcgatgagcagcttgaggaagagcaggaggccgtgcgcgtgatgatggaaaaacgcgtggacggcatcatcgtcgtgccgtgcagttccgccgccaatgataatcagcacctggcgcagattatcgccgacggtaaagcgctggtgctgtttgaccgggcggttcatggccttggcgttgccaccatctcggtggattttaccgataccgcgcaggaagcgacccggctgatgctggatggcggccaccggcgtattgcctatgtgacgagcatgcgctgtgaggaaccctggcgctatcctgaagatttaggcccgacgccggtagcgcagcgtctggcggggatggagaaagcgtttcttgaagccggcgtgccgtttgacacgtcgctgatcaaggcgaatgcggtggatgacgcttcgattgcgcgcattgtggcggaactgtgggagagcgcttctccgccgacggcgctggtggcctctgatagccttatcgccatgtcgctgctgcgtgagttgacgcagcggggattgcgcatacccgacgatctgtcgtttatcatgtacgataatttcccgtggaccgagatcgtcacgccacccttgagcgtggtggcgcagccggtgtatgaaatggggcgagaagccgcccggcatgtgatcgcccagatacggcaggaaccgctgaccgatcgggttgagtttaccgccagactgctggtgcgcggctctgttgtgccttgcgccgacaagagcgggaacgcgggccgttga

SEQ ID NO: 442041 - DNA, 798 bp, Serratia marcescens
atgtctttactgtctgtccctaccccctctatcgacccggtaaaaaacggcgtcagccaggaagagtggcaggtgcgcgtcaaattggccgccgcctatcagttggccgccctgtataactggaccgatcatatttatacccatttctcggcgcgcgtaccgggggtggaagagcacttcctgattaacgcctacggcctgttattcagtgaaatcaccgcctccaatctggtgaaaatcgacctggacggcaatatccttgccgaccctaccgggcttggcattaatcaggccggctttgtgatccacagcgccatacaccgcgcccggcccgatctgcaagcagtgctgcacacccacaccaaagacggcgcggcggtatcggcgcaaaaagagggtctgttgccgctgtcgcaacatgcgctggcttactattcgcgtatgacctatcacgaatacgaaggcgtggcgctcgatctggatgagcaggaacggctggtgaacgatctgggccacagcaacgtgatgattttacgcaaccacggcctgctggccggcggcgtgagcatcgaacacgcgttccgcgagctgcacggtctggagcgcgcctgcaacattcaggtggcggcgctcgccggcgggcgggacaatttacactacgcgccgccggccgcgatcgaaaaggttaaggcgcagtctgcgcgttttagcagcggcacggatgagatcacgcaaaaacactgggcggcggccatccgccagttggaagccagcggtttatcccgctttaaccagtaa

SEQ ID NO: 442042 - DNA, 789 bp, Serratia marcescens
atggtagcgcaagccgcacaggcccggataaacgccagaggtacggcgattgacgtgcgcaacgtcagtcaccgcttcaccctggggcaacgggaaatcgccgtgctggataacatcagcctgagcgttgcccccggtgaaagcgtcgccctgctcggcccttccggctgcgggaaatccacgttgctgcgcctgctggccgggctggagccgctgcagaccggccaactgcttgctgacggccgcccgctcggcgcccccagccccgagcgcattctggttttccaggatcccacgctctacccctggcggacggtgcggcagaacgtgctgctcgggccgcaggcgcaggggctgagcggccaggagcaacgggccgacagcctgattagccgtatcggccttaacgagttcgccaacgcctacccgaagcaactctccggcggcatggcccagcgcgccgcgctggcacgcgcgctgctcaacgagccgcgcctgctgttgctcgacgagccgctgggaaaactggactcgctgacccgcatcagtatgcagcgcgaattgattaacctgtggcaaagccagggctacaccagcctgctggtcacgcacgatattgaagaagcgctgctgttgtgcgatcgggtgatcgtgctgtcgccgcgtccgagccggattctggcgcagtttacggtgccgctcgcctacccgcgccaccgggacgccccgctgctgattaaacaccggcaggacattctgaaaattctcggccaggagatcgattggtaa

SEQ ID NO: 442043 - DNA, 999 bp, Serratia marcescens
atgccaacgtatttgcttgatagcaccctgaaaagagagaaaaccgccggcgaacggatctggcttaccggcctgctggccaccgccgcgtggctggcgtccgggcttatcaccacctattggcctgacgccagccgccaatggccatacagccgggcctggtcctgtctgcagctgacgctcggggtggcgttgctggccctggcgcttggctatcggcgctggcgcggccgcgggcagcgcttacagcgcgccgggcagtggctgatcgcgctgccgctgtttttcagcctgtgggagctgctcacggcgaaaaccgggctgctgccggtgccgtttttcgccccgccgcaggcgctgattgaggtttacctcaccgactggccgcgcctgctgaacagcctgtaccactcgctatcgttactgttgctgggggtcgcgatcggcaccctgagcggctttgtcagcggcgtggcaatcggctggtcgcagcgcatcggctattggctgcacccgatactgcgcattctcgggccggtgccctcaaccgccttgctgccgctgtgcctgtttattttccccagcagctttgccgccagcgtgttcctgatcgcgctggcgacctggttcccggttaccgtgctcacctggtcgggcgtcgccaacatcgataaagcctattacgaggtggcgcgcaccctcggcgccagtcagcgctttttaattttccacgtggcaatccccgccgccctgcccagcgtgtttgtcggcttgtttatggggctgggggcgtcgttttcagtgctgatcgttgctgagatggtcggggtgaaagcaggcatcggcttttatctgcaatgggcgcagggctgggcggcctatcccaatatgtacgcagcgctgcttgtgatggcctttctgtgttcagggctgatcggcctgctgtttttcgtccgcgatcggctgctcggttggcaaaaaggagtgatgaaatggtag

SEQ ID NO: 442044 - DNA, 1050 bp, Serratia marcescens
atgaaacaccttgcccagtattcacgccgcagatttctcagtttgggaggcagcctgctggcagcccccgcgttggccgccctatcgccgacgctgttcgcccatgatatgaccgccatgcatcaggagggcggcaacgcactgcgcctgcccgcgccttataagttgaaactcgccatcaaccagagcgcggtatgtattgctcccgtcaccgtggcggagcagcagcacttcttcagcaagtacaatttggacgttgaatttgtcaacttcggcaactcgaccgatctgctgttggaagcgatcgccaccggcaaagccgacgccggcatcggcatggcgctgcgctggctgaaggcgctggagcaaggttttgacgtcaagctcaccgccggcacccacggcggctgcctgaatctgctgaccgccaaaaatgcgccctttaccagcctggacaagctgaaaggacaaaccatcggcgtgaccgatatggccggcccggacaaaaacttttttgccatcctgctcaaacgccacggcgtagacccgatcgccgacgtgcagtggaaggtttatcccgccgatttattgagcgtcgcgttggataagcaggaaattgccgccatcagcggcagcgaaccctttagctaccgcttattggcgagcggcaaataccaactgctggcaagcaatatgaccggggaatatgccaatctcagctgctgcgtggttggcgtcagcggatcgctggcgcgtaaacacaaggccgcagcggcggcgttaacccaggcgctgctggatgcccacagctacgcggcagagcacccggaaagcgttgccgacgcctttatggcccacgcgttaaacaccaatgtcaaagaagtggccggcattatccatggccaggcccacgggcatcacgccgtgggggaagccttcgtcaaagagctgacccaatacgtcagcgatttacagcgggtacaggtgattaaacccggtaccgatgcccaccaatttgcggagagcatctatgccaacgtatttgcttga

SEQ ID NO: 442045 - DNA, 969 bp, Serratia marcescens
atgttgcgtattaaatcccccctgggcgccctattgctgctaggcctggcaggcctgccgctgctcgccgacgcacgtatcaccttgcatatcgccgatcaaaaaggcgggatgcgttcacagctggaagcggccaacgaactcgccaacctgccttacgatatcaaatgggccgagttccccgctgccgccccgcttgccgaagcgctgaacgccggcgcggtcgacgccggcattatcggcgatgcgccattgctgtttgcccttgcgcagggcgcaccggtgaaagcggtcgccgtggataaaagcaatccggcgggcaccgcggtgctggtgggcgagaactcgccgctgaaaagcggccaggatctgaaaggaaagcgcatcgccaccggtaaaggttcgatcggccacttcgtggcgctgaaggcgctgcaacaggccggcctgacaaccgcggacgtacagctggtctttttaggccccgtggatgccaagatcgcgctgctcagcggctcggtcgacgcctgggccacctgggagccttacaccacccaactggttaaaaccgggcaagggcatgtgctggtcagcggtagcggtctgctgccgggaaataccttcctggcggccaccgatgccacgctgcgcgatagcgccaaacgccaggcactgcaggattatctccgccgcctggccaatgcggagcgctgggcctacgccaacctcgacagctacggcaaaacgctgggaaaaattatccgtttcccgcccgatatcgcccgcgagcagttcgccaaccgccaactacgctggcaaccgattgacgctcagaccgtgcgccaacagcaggccacggccgatttctatcaggctaacgggctgatccggcaaccgcttgacgttactcatacctttgataagggctttagcgtgccgccgcaaacgccacaggaaggtcagccatga

SEQ ID NO: 442046 - DNA, 1194 bp, Serratia marcescens
atgagctccgttcagtcaatccctctccttgcgcggcgacagcgcataccggcgccgctcgcgcagatcgccgagcaactggcgcagcaggccgcagcgctggatcgcagcggcgagttcccgcacgccaatctggccctgctgcatgaatatgggctgctgggcctggcctgtgagcagcgttatggcggcgccgacgccaacctgcccactctgcagcaggttgtcagcgccatcgcacagggcgaaccgtcaacggcgctgatcgtctgcatgcagtacctgcaccacctgcgcctggccgccaatcccaagtggtcagaagcgctgcgctgcgcaatcagccaaagcgcggttcaacacggggcgctcatcaacagcctgcgggtcgagccggaactgggttccccggcgcgcggcggcctgccccgcaccgtggcgacccgcacctcggccggctggcggctcaacggccacaagctctataccaccggcattgacgggctgagctggctggccatctgggcgcgtagcgatgatgccaacccgcaggtgggcacctggctggtgccgcgcaacagcccgggcatcaccattaaacgcagttgggatcatctgggcatgcgcgccagcggcagccatgaggtgatcctgcacgatgtgacggtgccgttgagccatgcggcggatatttacccggccgatcggccgccgccgccggatacggcgcagatccgggccgccgccaatgcgcacgccgccctgctgccggccatctatgacggcgttgcacaggcggcgcgccgctggctgatcgcctggctgcaacaacggacgccggccagtctgggcgcaccgttagccagcctggcccgcgtacaggaaaccgttgggcaaatcgacggcctgctgctggtcaatcagagcctgctgcgtcaggctgcggcgcaggcattcagcacggaacaagccaatctggcgaaagtgaccatcaccgaaaatgcgatagcggcggtggaaaaagcgctgacgcagagcggcaaccacggcctgacgcgccataacccgctggaacgccactaccgtaacgtactctgcggacgggtacataccccacaaaacgacagcgcatggatcaaagccggccaggctgcgttaagaccacaggacgataatcaacatgttgcgtattaa

SEQ ID NO: 442047 - DNA, 1083 bp, Serratia marcescens
atgagcgtccaatttttaggcatgatcggccaccgcctgtcttcggaaatcatccccccggcaggcccgatatttgaccgcgactacattgtgcgctttgcgcagacccacgaggccgctggttttgaccggctgctggtcgggcattggtccgatcagcccgacggttttttagtcacggcgctggccgggctatccacgcaaaaaatcaacttcttactggcacaccgtccgggctttgtctcgccgaccctagcggcgcgcaaattcgccacgctggaacatctgctgaacggccgcctggcggtgcatatcattagcggcggcaacgacgccgagcagcgccgcgacggcgactacctcgatcacgatcggcgctatgcccgcaccgacgcgtttttagacattgtgcgtcaggtctggactcaggaacggccatttgacgccgctaacgatttttaccaggtcgagcaggccttttcggcaataaaaccgctgcaacaaccccatatcccgatctttttcggcggctcatcagacgcagcgatcgccgtggccggcaagcacgccgacgtgtttgccctgtggggcgaatcgctggcgcaaacccaggaaaccatccagcgtgtacgagccgaagcggccaaacaccagcgccacatcgacttcagcgtgtcattccggccgattatcgccgacaccgaaacgcaggcctgggaaaaggccgaagagatcctgcatgtcgccaccgaacatgccgcgcaaaccggcgtgaaccataagaacaagcccgacagcgtgggcgctcaacgcctgcagcaaaccgtggcgcagggcgacgtggtggataaacgtctgtggaccggcatcgccagactggtcggcggcgggcacaattccactgcgctggtgggcacgccggagcaggtggccgatgcgctgcttgattactacgatctgggcgtgcgcaacttcctgatccgcggcttcgatcccctgaatgacgcgcaggaatacggtaaagcactgttgccgatcgcccgtgccaaaatcgcccaacgcaacgccaaacaaagcgcctga

SEQ ID NO: 442048 - DNA, 888 bp, Serratia marcescens
atgcgtacagacgacattgacgcactgctggcggtggtgcaattcgcttctcttagccaggccgcggaataccttggcattagccaatccgccatgacccgccgtctgcaaagctttgaacagagcctgggcgccacgctgctggatcgccaaaccaaaccgcttaaactgacggccatcggccatcgcgtctatgagcagtgcctgacgatcaaacgcgaaaccaagcggttggaaagtttgcttaatcaggatgcggagccgcgcggcccgctgcgcctgggaattccgcagagcctgggtgaaatcgccttacgcccggcgctgctggccctcggagaacattacccgcaactgcgcccgcaggtggtctgcggttggggcgggcagctgataaagcgcctggaaaacgttgagctggacagcctgctcgccatggggccggctcagcaaacctttgatgacagcctgacggccaaggcgctgtgcccgctggaggttgtggtgatcgccggcaaaaaccttaacctcaacgccaaccgtctcggccgttgcgcacaccacggctgggtattgaaccccgacggttgcggcctgcgcgccggcttaaaccgcgacctgcagtcgcaggggctcgggctgaaaatcaacgtggaaaccgccggcgcgcagttgcaaatcagcctggtggcccaggggttggggctcgggctggtgccccgggccgcgttaacccatagcccgcatcaggacgagatcgccattgttgagctgaccgacttccagccgaaggtccagctgtggcaggtcagcagcccgggactgggcaacctgcagcggcccactaccttttttgccgagaagatcgtgcaggcgcttcgcgattaa

SEQ ID NO: 442049 - DNA, 600 bp, Serratia marcescens
atgacagtgccattacgcttagaccgtttacgcgggttcatcgaacaattggcccgactgcatcaacagccgctgggcgatacggcgcggctggaacaggcggcgcaatggctgtccgaactggtcagccaggatgactggctggccgaagaatacgcccgcccacaccctcagcattaccagcagtacctgctgcacgttgattccgcccagcgcttttccatcgtcagctttgtttgggggccggggcaggttacgccgatccatgatcaccgcgtgtggggactgattggcatgctgcgcggcgccgaaatcaaccagcgttacgtgctcgacggtcagggcgtgccccggcccgaaggcggcgccgagcggttaaccgccgggcaggtggtgaaactgtccgagcaggagggcgatattcatcaggtcagtaatgcgtttaacgatcgcgtatcaatcagcattcatgtgtacggcggcaatatcggtgtcgtcaagcgggcggtgtatggcgaaagtggcgcggtgaagccttttatctccggttactcgaacacccaactgcctaatatctgggatctttctaaggaagtataa

SEQ ID NO: 442050 - DNA, 1581 bp, Serratia marcescens
atgtctgccattgtttaccgtgatttttccaccctgcgcgccgcgttgttggcacgccaggagttggcgttgatcgatgtgcgcgaagaggctgaatttgcgcaaagccacccgctgtttgccgtcaatattccgctgagcaagctggagctggaggcctaccggcgcattccgcgccgtggcactcccattaccgtttacgacaacggcgacgggcgggccgaacaggcggcagcgcggttacggctgttcggctatggcgacgtcgctctgctggccggcggtctggcgggctggcaagccggtggcggcgagcttttccaggacgtcaatacgccaagcaaggcctttggcgagctggtggaaagccgcaggcatacgccatcgctgaccgcgcagcaggttaaggcgctgatcgatcagcatgccgatgtggtgatcgtcgatgcgcgccgttttgatgaataccaaaccatgagtatccccaccggcaccagcgtgccgggggcggagctggtgttgcggatcaacgcgttggcgccggatcccaatacgcaggtgattgttaactgcgccgggcgcacccgcagcattatcggtacccagtcgttaatcaatgccggcatcagcaacccggtagcggcgctgcgcaatggtacgatcggctgggagctggcggggtttgcgctggaaagccaacagcagcgccgctacccggacggcgtggagaatcgggcgcaggctcagcaacaggcccggcgggtggcggacgcggccggtgtcgtgcgtatcgatcgcgagacgtttgggttgtggcggcaggatacgacgcgcaccacctatctgtttgatgtgcgcagccccgaggagtatcacgccgggcatgtgccgggcagtgatagcgcgccgggcgggcaattggtgcaggaaacagatcactatgccagcgtgcgcggcgcccgcgtggtgctggtggatgatgacggcgtgcgcgccaacatgagcgcctcctggctggcgcagatgggctgggaggcggcggtggcggacgggctgtccgccgccgactttaccgagcagggcggcccggcggcgcagctaccgccgtcgccgccgacggatgacatcaccccggcgcagttggccgcactgctggcgcaggaaggcacggtgctgctggatttcaccaccagcgccaactatgtggcgcgccatattcccggtgcgtattgggtcatccgttcacagttgccgttggtgctggaaaaactgccgccggcggaacgctatgttgtgacctgcggcagcagcctgctggcgcgctatgccgtgccggaagtggccgcgctgaccggcaagccggtgcagctgcttgccggcggcacccaggcgtggatagctgaaaaccggccgttggaaaagggcgaagggcggttggccgcgccgcgcatcgatcgctatcgccgcccgtatgaaggcaccgacaatccgcgtgacgcgatgcaagcgtatctggactgggagttcggattggtggaacagctggcgcgtgatgcaacccatggctttaacgtgctctga

SEQ ID NO: 442051 - DNA, 957 bp, Serratia marcescens
atggcgcagttttctgttttacttagggttgtggggctgggcgccatgttattgacggcgccgctggcacagggggcgatcggcgacgccaaactggtgctgggcgatcaggcccgcgggctgcgtagcctggtggaggccgccggcgtgatgagagatgcgccttatcagtatcaatgggccaatttccagggggcggcgccgctgtttgaagcgcagcgcgcggccgccgtagatacgtcctatgccggggatctgccggtattaatggcggcggcgggcggggtggattttaagctgattcaaaccaacgtcggctatggccagtctaacgggattattgtgccgaaggattcgccgttgcacagcgttcagcagttgaaagggcaaacggtggtggtttcctccgcgcgtggcagcatctcgcaaaacttgctgtatgcggcattacaggaggccgggctgaagcgggaagatgtgaaggttcagtttgtgatgcccaccgatgccagcgcggcgtttagcaccggcagggtggcggcctgggcggtttttgatccctatttgggcgttgcggagcaaagcggcgcgcgcctgctgcgtgatggtcagggattaacgccgtcgctcggtttcctgaccgccacgacgcgctcattggccgatgcggacaagcgagcggccatcaaagattttgccaaacgcgtcgccagagcacggcagtgggcgatcgatcatccggaggaatacgccaaggtttacgctcaattgacgcgtttaccgctgaaaaccgctcggcacattgcgggtcggacgtcaaagggcgcgcatagcgtcaatcaacaggacattcaggtgctgcagcccgtggccgatttgttttatcagttaaagattctgccaaatcgcgtgacggttaatgacctgatcgataaggagtttagcttggttaaatga

SEQ ID NO: 442052 - DNA, 651 bp, Serratia marcescens
atgagtacttacaaagagatagcaaaacgcatcgcgaagattattgtttctcccgaaacggcaattggttttgtgcacggtgtattatccgtacctcaagacttaggttatctggcctatggttatctgaatacagaatccagatataacagagacacggaacgcatcaggttaattaaggcggttcgctttggcattcttcagaatgaaagctttataaacacaatagaaaccatattaaaaaaattcaatcaatacgtaccgaaaaacaaaagagataacatttacgctaaaattggatcgtctatagtgggtcgtacagtcaccaactccataatatcaaaaaaaatagcaacatctatagctcaacgtagtactcttatgatcgctctgcgaggtggcattgtcggcaatacgctcttagcaggaggcatggcagaacgtagcatttatacgtctcaaaggcttcaacgcactgaaccaaaaatatataacgcgttgcgcccaaaaaattatgacttcctttattttattgttgagccggctttacatccttttgttgaagcattaagagtgagaagaacgcagggagaagcagcattcaatcagattctagagcttgtagagaaagaggttaattatgggaaatga

SEQ ID NO: 442053 - DNA, 963 bp, Serratia marcescens
gtggggttagcgttgttttttgcgcataacgggggctccatgaatttcagacgtcttaaatactttgtcaaaatcgtcgatatcggcagcctgacgcaggcagcggaagtgctgcatattgcgcaaccggcgttaagccagcagctggcgacgctggaaggcgaacttcagcagcaactgctgattcgcagtaagcgcggcgtcatgccgaccgaagcgggcaacattctctatgcccatgcgcagacgattttgcgcatgtgtgagcagactcaggccgccgtcagcaacatcgggctggcggtcagcgggcaggttgcccttggcgtcgcctccggctgcgccgccgcgcagctggcgatgccgctgctgcaggcgatgcgcgatgcgcaccccggcattctgctgcgcctgcatgaggataccggcccggcgctgaccgatcaggtggccaactgcgcgctggatatggcggttatttatggcaccaaggcgccgcaggggtttaataccacggtactggcgaaagaggatctgtatctggtggcgtcacgttcggtgcctaatcccggcgactatatcgatctgcgggcgctggcgcggctgaatctgtttttaccgcaccggggagacagcgtgcgcgatcagattgaagacgcgatggcggtgcgcaaactggcgttgaatgtcgtcggcgagatcgaatcgccgaccatgctcagcgccgccatcgccggcgggctgggggcgaccattttgccggagtctgccgcgcgggcgctgaccggcccggccagagcctggatggcgcgtatcagcaatccgtcgctggcattgccgctggcgctgtgcgtgtccgttcagcagccgctgtctgaagcggcgcaggcggtgaaagcgcaactattggcgatgattgccgctccgggccagccgaaacgcgcgctgacgctggtgcagtaa

SEQ ID NO: 442054 - DNA, 2760 bp, Serratia marcescens
atgggcaagctctgggggcagcgcacgctgccggtcaacacacggttatcgcgactgcatattgcgttggccatggcaacgctgtcgatggccggtacggccaatgcggttttcgctgacgataccgttcttgatggcgatcgccacatttctcattcggttacttatgatgggaaggtgattgtcgggcaggcagatatcagtcatttactgattgatggcggcacattcagcgccgatcagctggttattggctcggaaggtcagtcgcaggcgacggtgcgggtcagcgacggcgctaagttggtgaacgatgaggccacgatagcgtacggtgttgacgatgcgcagtatgatcaacggccgcaggcggtgattagcggtcagggcagcgagtggcgggttaacaataagctggctgttgcgggcgtgctggatgtgctggatggagcacgggtcagcgccggggagctgaggttcgcgtcccgcccttgggatgataaaaaggcggcagatatttacgtcggcggcgccggctcgcatttacatgttgacgggcgggcagagattgagagcctctctttggtcgacggcgggcgcttcagtaccgatagtaagaagttatataccccggggttgttggtgataggcagccgcggctcttttaacggtactgacaagtatagttatgacttgaatatagggagcgacctgacgttgggccaggctcaggcgcctgggattctggactctgatattgtgatcgataccgacactgatgcgatgtcgagttattgggcgaacggggtggtttttaatcacacctcgaatgattacgaacttgccaacgttatctccggctacggttcgctggtcaatgtgaacggccagacgacattgacgggcgatctgcgagattttattgggcacgttatcgttaaaggcggcaagcttaccattaatggcgatatgtcgctggggtatgaggatgattggctgatcagataccaggagctgagcgtagagaatggcgggacgctggttctgaacggcaccatgggcttttttggtatgaaaggcactgggttctcaagccatgtttttgtgaaaccgggcggcgtgctggccggtgatgcgacggtcggcaggacgcagatagagcgagatggccatatttcccccggtgacggaggtatcggcaagtttacgatcaagggcgatgcgatcttcaatgatggtgcgttctatgatgtggatattgccgcagacggccgcagcgacagcgtggcggtggccgataagacgacaatcggcaaggatgtcaaggtgctggtgaatgcgctcgatccgcataccagttaccagaacgggcaaagttaccggatatggacgacttacaaaggctacgaggggatgtttagcgaagcggtgttggactccgcctttttggatgcatcactgacgaacgacgaaaaatatgtcgatctgactatccggcaaaaagacgctggcggtaataccggtggtggcaaggaagtcggaggtgatgacggcagccacaatggcagtgacgacggtaataccggtggtagtgacgacggcaataccggcggcggtaaaccggacgtgcccggcatcttccagacggtggcgaccagcgacaaccagtggaacaccgccggtgcgctgagctcgctggcgcagcaggggccatcgctcgggctgtacaactcgctgctgatgctgaatgcggggcaggcgcgcgaggcgtttaaccagctgtccggcgaacagtatgcgtcggtgcagtcgagcctgcagcagagcggcacgctggtaggcagcgtggtgaaccagcatatgcagacgatgttcgacggcgacagcctgacggtgccgccgctggcgatgagtctggtgcagggaccggagcgtgagcgcaacggggcctggggacagatgttcggcagctggacgcgcagcaagggcgacagtgacaccggcaaactggatagcaacaccggcggcttcctggtgggggcagaccgtgaactgagcgagggggtgcgcgccggcgcctacgcgggctacagccgtacccatttcgacgttgacagccgtgcgtcgtcgggccacagcaacaactaccacctgggtctgtatggcgcggggcagcgggatgcgctggcgctgcgcggcggcctgggctacagctggcaccggattgagagcgagcgcaacgtcggcttcggcggctatagcgaccggctgaagggtgattacgacggcaatacgctgcaggcgtttacggagttgggctaccaactgcgttatgagtcgtcgagcgtggagccgttcgtcaacctgagctacgtgcgtctgcatacggatgcggtgcaggagcagggcggcgcggcggcgctgagcgtgcaggatgagacgatgaacaccttctactcgacgctgggcctgcgcggtgcgacggatatcccggtctcgggcgttgacgtcacgctgcacggcaacctgggctggcagcacgcctacggcgacacggacacctcggcgcggatggcgttcgccaccggcgacagctttgccaccaagggtgcgccggtggataaggacgtggcggtggtcggcgtcggtctggacgtgccgctgacgcgttcgacgcgtgtcggggtgtcctatcagggacagtacggctcgcagctgcaggccaactcggtcaatgcacagctgacggtctccttctaa

SEQ ID NO: 442055 - DNA, 2925 bp, Serratia marcescens
atgggcaagctctgggggcagcgcacgctgccggtcaacacacggttatcgcgactgcatattgcgttggccatggcaacactgtcgatggccggtacggccaatgcggttttcgctgacgataccgttcttgatggcgatcgccacatttctcattcggttacttatgatgggaaggtgattgtcgggcaggaagatatcagtcatttactgattgatggcggcacattcagcgccgatcggctggttattggctcggaaggtcagtcgcaggcgacggtgcgggtcagcaacggcgccaaattggtgaatgacgaggcaacgatagcgtatggcgttgacgatacgcactatgagcaacggccgcaggcggtgattagcggtcagggcagcgagtggcgggttaacaacaagctggccgttgcgggcgtgctggatgtgcttgacggtgcgcgggtcagagccggagagatggcagtcgcatcccaaccttttgggggtaataaagcgacggatatttacgtcagcggcgccggctcgcatttacatgttgacgggcgggcagagattgagaacctctctttagccaatggtgggcatttcagcaccgatagtaagaagctagttctcacagggagcctggcaataggcagtcgtggaacctttaacggtcataccgacaccatcgaccacccgtcatgggggatcactgagcttttgaactatctgaaactggggccggctcaggcaccgggtatcctggatcccgatattctgctggatacgctaagccagaggagtcgatggcaagccatcatatttaatcattcgtcggatgattacgaattcgctaatgctatcctcggtgctggaatgatagtacatatgaacggccagacgacattgactggcaatctgcatggctataacggagatatttttgtccagggcagcaaactcaccatcaatggcgatatggggctggactatgaagaggagttgggtggcagaaaccaggaattgagagtggggaatggcggaacgttagttctgaacggcacgatgggggtttggggcctgcgacaggatgcattttcatcgtgggctgttgttaaatcgggcggcgtactggctggcgacgcgacgattggcaaaacgaccgtggagcgaggcggtcatatttcccccggtgacggcggcattggcaaaattcagatcgaaggcgacaaggatagtatcgccggtgctctgatttttgaagacggcgcgttttatgatgtggacgttgcggcaaacggccgcagcgatagcctgacagtatctggcaatgcgcagatcggtaacgatgttaaagtcctggttaatacgctcgacccgcataccagttatcaaaacgagcaaagctatcggatattggctatcaccaaggtgcttaagggaacattcagtgaagcggtgttggactccgcctttttggatgcgtcgctgacaaacaatggcaagtctgtcgatctgaccatccggcagaaagacaccggcggcggtgatgacggcgataccggcggtggtgatgacggcgataccggcggtggtgatgacggcgataccggcggtggtgatgacggcgataccggcggtggtgatgacggcgataccggcggtggtgatgacggccatagcggcggcggtgacgacggccataccggcggcggtgatgacggccataccggtggcggtgatggaggcaataccggcggcggtgacgacggcgatatcggtggtaacccgaacgcaccgggtatcttccagacggtggcgaccagcgacaaccagtggaacaccgccggtgcgctgagctcgctggcgcagcaggggccgtcgctcggcctgtacaactcgctgctgatgttgaatgcggggcaggcgcgcgaggcgtttaaccagctgtccggtgaacagtatgcgtcggtgcagtcgagcctgcagcagagcggcacgctggtaggcagcgtggtgaaccagcatatgcagacgatgttcgacggcgacagtctgacggtgccgccgctggcgatgagtctggtgcagggaccggagcgtgagcgcaacggggcctggggacagatgttcggcagctggacgcgcagcaagggcgacggcaacgtcggcaagctggacagcaacaccggcggtttcctggtgggtgcagaccgagagctgagcgacggggtgcgcgccggcgcctacgcgggctacagccgcacgcgtttcgacgtagacagccgttcgtcgtcgggtcacagcaacaactaccacctgggtctgtatggcgcggggcagcgcgatgcgctggcgctgcgcggcggcctgggctacagctggcaccggattgagagcgagcgcaacgtcggcttcggcggctatagcgaccggctgaagggggattacgacggtaatacgctgcaggcgtttacggagctgggctaccggctgcgctatgagtcatcgagcgtggagccgttcgtcaacctgagctacgtgcgtctgcatacggatgcggtgcaggagcagggcggcgcggcggcgttgagcgtgcaggatgagacgatgaacaccttctactcgacgctgggcctgcgcggtgcgacggatatcccggtctcgggcgttgacgtcacgctgcacggcaatctgggctggcagcacgcctacggcgacacggacacctcggcgcggatggcgttcgccaccggcgacagctttgccaccaagggcgcgccggtggataaggacgtggcggtggtcggcgtcggtctggacgtgccgctgacgcgttcgacgcgtgtcggggtgtcctatcagggacagtacggctcgcagctgcaggccaactcggttaacgcgcagctgacggtctcgttctaa

SEQ ID NO: 442056 - DNA, 552 bp, Serratia marcescens
atgagcaacacatttcatgtgttgggaatttcaggcagcctgcgcgccgcctcgttaaacacccgctttctgcaggcaatggaccgattacggcctgagaacgtcagctttacccgctacacgcacctggatgcgatcccgctgtttaatgccgatcgcgaagatcatccctgtccggccctgacgcactggcgcagcgccctggcccgcgccgatctggtgctgctggtcagcccggaatacgcgcatggcgtgaccggcgtgatgaaaaatgcgctggactggatcgtcggcagcggtgaactgctcgataaaccgctggcttttcccaatctctccccgcgcgcgcggctggcgcattcgcaactggcggaaacgctgcagattatgggctgtcgtcagcttactacctgcagcccgcaggccacgctggcagcaccgtatgtcttgccggacgccgatgaacaaacgctggccgcccacccggagatcggcccacggcttcaggcactctggcgcaatattgcagaggaactctcggcgttacgctga

SEQ ID NO: 442057 - DNA, 789 bp, Serratia marcescens
atgattagatggccatggaaaaccacgccctccccggcgctgacgcccgcccaatggcaggaagcgctggcaattccgttgctgatgccgcttgatgacgatgaatgccgccgactggcggcgcttgccgagaaactgctgcagcaaaagcgcatcgtgccgctgcaggagctgccgctgacgccactgatgcagatgcgcattgccctgctgttcgccctgccggtgctggagctgggcgtcgacgttctggacggcttcaatgaaatcctgctgtatccttccccgtttgtggtggaagaagagtggcaggacgatctggggctggtgcattccgggccggtggtgcagtccgggcagagctgggagcaaggccccatcgtgctgaactggcaggacgtgcaggactcgttcgatctgtccggctttaacctggtgatccacgaagcgacgcataagctggatatgcgcaacggcggcgtcgccaacggcgtaccaccgatgccgctgcgcgaggtggcggcctgggagcacgaactgcacggcgcgatggacgccattcaggacgagatcgatctggtcggcgaggaagccgccagcatcgacgcctatgccgccagcgatcccgccgagtgctttgcggtgctgtcggaatatttcttcagcgcgccggatctgctggcccagcgtttccccacgctatacccgcagttttgccgcttctaccgccaggatccgctggcgcggctgcagcgctggcagagcgaacacggcggcggcgaggcctaa

SEQ ID NO: 442058 - DNA, 804 bp, Serratia marcescens
atgaaactaatgccggggagttatgataatggcactacggtggataatgaggcggaaattctggcttcatttcagcaccgcagtcgcgagatttatcaaagattcaattttgacggtgatattccctatggagaattgccgcgtcaaaccattgattggctatattctccccattcggttgtcggcacgttgatatttattcacggcggttactggcaattttgtaataaagaagattttgcctttatcgctgcggtgccgctggcgttggggctggatgtggtgttggtggaatatagccatgcgccgcaggcgacgctgacggatattgacggggaaatcggcgcggcgctgagcgagatccaacgccggctggcgcagcgaccgccgtgcgggccggtctatctggccgggcattcggccggcgggcagctggttgcccgctggcagcagcatccgctggcggatgcggtattcccgatcagcggtatctttgagctggagccgctgctgtctacctacgtcaaccaccgcctgctgctgacggcggccgaaatcgccgcgctcagcccggcgcggcatattcccgcacggcttacgccgatgacgctgttctacggcgcgcaggagctgccggagctgatcggccaaagcgaacactactgccaggcgctgcgtcagcagggcttgtcggtcgggctgcaggcggtggacggcgccaatcattacaacgtgctggacgtgctgtttgccgccgacggggcgttgattcatctactgcaacagggggaagatggccgatga

SEQ ID NO: 442059 - DNA, 372 bp, Serratia marcescens
atgagaaccatcgtcgacaccgggctgccggatatcgggcagcccttttcatgggcgacacgcggcggcggcatgctgtttaccgcccacggcccggtgcgtgcggacggcacgattgaaaccggcgcggcggagcggcagatagcgctgacgttcgataatctggcgcaaacgctgcgcgccgccaacagccacagcgataacgtgctgcaggtgattatttatctgaccgacgtgaatgacgtcaaactgctcgatgaaatatataaacgctattttaatccgccttatcccaaccgttcgacggtcattgtcgataaactggtggtgccgggaatgaaaatagaaattaccgtcagcgcctgcgattaa

SEQ ID NO: 442060 - DNA, 1191 bp, Serratia marcescens
atgttcgcacatctgcaaccttccgccgccgatcctattatgtcgttaatggaggcctatttacgggatgataatccgcaaaaggttaatttaggtatcggcctgtattacgacgaacagggcaatatcccgctgatgcaggcggtgcggcaggcggagcaacgcttactgacgcagggtcatccgcacggttatccgccgattgaaggcagcgcggcctttgccgcgcaggtacagcgtctgctgctgggcgaggaggtctccgcatgcggactggcgacggtgcagacggtcggtggttccggggcgttaaagctggcggcggattttctgcgtgattatctttcccgcgaggagatctggctgtcagacccgacctgggccaaccacggggcgattttcgccggcgccggcctgcaaacgcacagctatccctattttgacgatatcgccggcgagctgcgctttgaggcgatgctggaatgcttcaacggcctgccggccggggcggtggtgttattgcatccctgctgccataacccgaccggcaccgatctgacgccggcgcagtggcgcacggtgattgaggtgatgcagcagcgtcgcctgctgccgctgtttgacatcgcctatcagggattcggcgacggtctggagcaggacgcctatgcgctgcgtgctgcgcaccgggccgggctggactgcctgatcgccaactcattttccaaaaacgcggcgctgtacggcctgcggctgggggcgttgacgctgtgctgcggtgatgcgcagacggcggcaaatgcgcaaggcgcgctgaaaaccctgatccgccgcagctactcctgcccgccgacccacggcggccgaattatggaaaccattctgacggatgatgcactgcgtcacctgtggcgcagcgaacttgacgccatgcgcgatcgcatccgtcagatgcgcctgcggctggccagcgggcttgagcagggcggttcggcgctggactaccggcgaattcgcgaccagcgcggcatgttcagctacaccggcctcaatccgcagcagttggagacgctgcggcagcgctacgccatctacctggtggcgcccggccgcatgtgcctgccgggcctgaacctgaacaatatcgactatgtcgccgacgccattctggccgtttcccgcagcgcgtga

SEQ ID NO: 442061 - DNA, 1404 bp, Serratia marcescens
atgaaagatcaggcgcgttttgatgaaatcgcccggcggcagggcgggctgaaaaagcagctgacggccgggcagatgtcgatgctggccatcggcggcgcgataggcaccggcctgtttctcggcagcgcttatgcgatacagatggccgggccgagcgtactgctgagttacctgattggcggcgtggtggcgttgctgctgatgggctgcctggcggagatgacctcgcagcacccgacctccggttcgttcggcgattacgcggagttttacctcagcccgctgtgcggttttttagtgcgttactcctactggtcgtgcgtggtgctggcggtgggcaccgaggtgaccgccatcggcatgtatatgcagttctggttcccggatacgccggcctggccgtgggtgctgctgttctccgccgcggtgatcgtcattaatctggtcggcgtgaagtctttcggccaggtggagtatgcgctgtcggccatcaaggtgctggcgattggcgcgtttatcgccatcggcgtcggcatcctgatcttttccgccaacccgcactttggcctgcacaactttaccgccggcggcggcttcttcccgtttggcctgagcggcatgtggtttgcggtgatcgtgtcgatcttcagctacctgagcattgagatgattgcggtagccgccggcgaggcgaaaaatccggtggtggcggtacgcagcgcctttaagggcaccatcttacggctgtttatcttctatatgctgtcgattgcgctgatgctggcgattgtgccctggcgccagtccggtaccggggaaagcccgtttctggtggcgatgaacgtcatccacctgccggcggccggcggtatcttcaactttgtcgtgctgattgccgccctgtcggcgatgaacagccagctgtatatcactacccgcatgatgttttcgctggcgcgcgccgggcaggcgccggcggcgctggggcgggtcagcaagcgcggaatcccgctcaacgcgctggcgatgtcatgcatcggcattgtagtgtcgattgtgctgagcctggtggcgccggaacagtctttcgccgcgatgatgtcgatatcggtgttcggcgcctgtttcacctggctgatgatttttatcactcacctgtttttccgtcgccatcacggcgggacgcatctgaagttccgcatgtggggcttcccctataccacgttgctcggggcggggctgatgctggcgctgatgatctccaccgcctttaccgactttttccatatgacgctgtggttcggcatcccgtttaccctgctgctggcgggcatctatctgtatcgcctgcgccgccggccggcggcccacgcggtgaggccgacgccgggcatggagtag

SEQ ID NO: 442062 - DNA, 429 bp, Serratia marcescens
atgaaaaagtcgtcgaaaatcgttggcatcgtggcagtgctgattgtcgcggggttgctctattcctggccgttaatccagatggagtttgccggcagtgcacactataccgagcaggataagcgagagtatgcattttataccccagatatcctgaaaaaaatgccacgaatctccccgcgttatgactttgacttcgccaacattacaggtccttcaacgcatgtatacgccgtaaacttttacgcgactgaggataccagcaaaattgataattacctgacatccattggctaccagcgtcaggataactgtaatattgacaatgaatgctggaaaggcaaagaccccgtggaaacggtcatggtcatgaaactgaaaagtgaaaaaggtgtcgttgtgcaagtagtctatgatttcacatcataa

SEQ ID NO: 442063 - DNA, 594 bp, Serratia marcescens
atgagtaaacaaaaggacatcattgatggacgggattacggtagatccaacggattgatttacaccgaagttcttggatggattgatttaggtcatgcgcggggcaatgacatcaggggattgatgcgaaaaattaacgctggtgaatcttccggacaggatgaatacaatgttacgtattcacaatcgatgaccgatcccacctacaccattaaaatgggtaaattcattacctggcgcattaagagggggcgttcatataatgaacgacaaagtattgctctcgcgatgatgacaacactagcgcgaaagtttgaagcattccaatcatcattccccatcaacctagtgacggacagcggttttagtggtgaagatctggtttccgacttactgggtttctatcgcgtgatgtctattcacaacccatttccactgctgcgccctgtcagtaaagcagaagctctaaaacgttgggatcactatggtccgattggatcgttcaaaaacacctgtttcttgccaatattattccctgacccggtcagataccccatgccaaaccacgtctgggagaattgcccccttttatga

SEQ ID NO: 442064 - DNA, 408 bp, Serratia marcescens
gtgctaaatatcaaattaaccattgtggtctgtagcgctgtgctgctggtcgcctgcgagtccaggctgctggatatccagcctgccgacgtgactattaaagataaccgtctgtgcgtgtctatcccggcagggaaaaatgaatacctgaacggattacaaatcgttgatgctgagggccgcattttccgcaaatacttggctgcagacgccagcgtggcgcctattcctgtactttccggccgctgtattcctgatttcggttatccgtttaaggcgggcggccaatatggtatccaggtggaaactttctttaccgatgcccggcggcccggtgggaacagctactcggcgtcgttcagactgtaccgcgagcagggcgtgctcaaggtggccagggcagggtga

SEQ ID NO: 442065 - DNA, 597 bp, Serratia marcescens
atgcctgtgtatcaaattgacggcctgacgccggtggtcgaccccagcagctatgttcacccgacggcggtgctgatcggcgatgtgattatcggcaaaggggtgtatatcggccccaacgccagcctgcgcggcgactttggccggctggtgattgaggacggcgccaatattcaggacaactgcgtgatgcacggtttcccgcagcaggacacggtggtggaacaggatggtcatatcggccacggcgccatcctgcacggctgccgcatcggccgcaacgcgatggtcggcatgaatgcggtggtgatggacggcgcggtcgtcggtgaaaacaccatcgtcggcgcctgttcgtttatcaaggccgcggcggtgttcgacgccaataagctggtgctcggcagcccggcgcgggtgctgcgcgagctgagcgaacaggagctggcctggaaacgcgtcggcacccaggagtatcaggatctggtgacgcgctgcaaaactaccctgcgggaagttgcgccgctgagcgaagccgagccagaccgccagcgcctgaccttcggcgatcgtctggtgccgaaaagccagctgtaa

SEQ ID NO: 442066 - DNA, 1212 bp, Serratia marcescens
atgaaccacgccttcatctgcgacggcgtacgcacgccaattggccgctacggcggtgcgctggcgacggtgcgcgccgacgatctggccgccctgccgctgcgggcgctgatggcgcgccacccgcaggccgactggacgcaggttgacgatgtgatcctcggctgcgccaaccaggccggggaagataaccgcaatctggcgcgcatggcgctgctgctggccggactgccgcagagcgtttccggcaccaccatcaatcgtctgtgcggctccggcctggacgcgctggcaatggccgcccgcagcatcaaggccggcgaagcccagtgggtgctggccggcggtgcagagtcgatgacccgtgcgccgctggtgatgggcaaggccgacagcgcctttagccgtcaggcgcagctgttcgacaccaccatcggctggcgtttcgtcaacccgctgatgcagcagcagttcggcaccgactcgatgccggaaaccgccgaaaacgtcgccgcacagttcaacatcagccgcgccgatcaggacgccttcgccctgcgcagccagcagcgcgccgccagggcgcaggccgccggcattttggcgcaggaaatcgtgccggtcagcattgcggggaaaaaaggtgcgcttatccaggtcagtgacgatgagcacccgcgccctgaaacctcgctggcgcagctgcaggcgttgaaaaccccgttccgccagcccggcaccgtgaccgccggcaacgcgtccggggttaacgacggcgcggcggcgctgatcgtcgcctcggaggcaatggcgcaacagcaggggctgacgccgcgcgcgcgcattgtcgccaccgccgcctgcggcgtggagccgcgtctgatgggcatcggcccgctgccggccgcccgccgggtgctggaaatcgccgggctgagcctggcgcaaatggacgtgattgagcttaacgaggcgttcgccgcccaggcgctggcggtgctgcgccagctcggcctgccggacgacgccgagcaggtcaaccccaacggcggcgccatcgcactcggacacccgctgggcatgagcggcgccagactggcgctggcagccatgcacgaactggaacggcgggacggccgctatgcgctgtgcaccatgtgcatcggcgtcggtcagggcatcgccatgattattgaacgcgtccaacactga

SEQ ID NO: 442067 - DNA, 441 bp, Serratia marcescens
atgaacgccaatacgccgcgcgcgctggcgcaacgctgcgccgaacatatgtttcaacaagacagctgcgcccaggcgatgggcatgcgtctggatgcggtcgactgcggttttgcgcaggtcagtatggaggtcggcccgcagatgctgaacggccaccgcacctgccacggcggccagctgttcagcctggccgataccgccttcgcctacgcctgcaacagtcaggggctggcggcggtcgccgccggctgcagcatcgactttatccgcccggcgctggccggcgaccggctgatcgccagcgccgaagtgcgccatcagggaaaaaccaccgggctgtacgacgtggaaattatcaaccaacaggggaaaaccgtggcctggttccgcggccgcgcccatcgccttggccatcaggtcctggaggaacagccatga

SEQ ID NO: 442068 - DNA, 1536 bp, Serratia marcescens
atgaacgcaattccccttacctcacccgttgcggtgattggcgcgggcaccatgggcatcggcatcgcgcaggtggccgccgccgccgggcatccggtcaccgtgttcgatattgaccgcgccgccgccgagcgcgcctacgagacactgagccagcgcctgatgcgccgggtcgaggccggcaaggcggatcgccgcgccagcgaacagctgctggcccgcatccgcatcgccgaggcgctggaagaactggccgacagcgcgctggtgatcgaggccgtagcggaaaagctggcggtcaaacagagcctgttccgcgagttggaagcgatttgtccggccgacacggtgttcgccagcaacacctcatcgctgtcgattaccgctatcgccgccgcgctgcgccacccgcaacgcatggccggcatgcactttttcaatccggcgccgctgatgcagctggtagagatcgtcaccgggctggaaaccagcgccgcgacgtgcgatcgcctgagccagctggcgcagcaatggggcaaacgaccggttgtgtgccgttcgacgccgggctttatcgtcaaccgcgtcgcccggccgttctatgccgaaacgctgcgggcgctggaggagcagctcgccgatgcggcgacgctggatgccgtgctgcgcgacgccggcggcttcgccatggggccgctgcagctgaccgatctgatcggccaggacgttaacttcgccgttacccaatcggtgttcgacgctttcttcaacgacacgcgcttcaccccgtcgctgttgcagcaggaacgggtggccgccggccatctggggcgcaaaagcggccgtggtttttaccgctatggcgacgatgtcgatgcaccgcaggccagctacgccgctgccgctaacgccggcccggctgctcgggtcacgctgcacggcgactggtcgccgctggcggatttcgccgcgctgctgacggaaaatgcggcgtcggtcaaacaacccggccagaccagcccgctggcgatgatcgatgatgttacttttatgttaacaaatggcaaatcagctagtcaggtcgccgaagacatcggcacgccggtggtgctgttcgatctgtcagccgactaccggcaggcaaataccctggcgatcggctgcgcggcgcaaaacaaccctcaggacaacgccaaagtgattcaatgcttgcagtcgctgggcaaacgggtcatcacactgccggattatcccggtctgctggtgatgcgcaccgtcgccatgctggtcaacgaggcgctggacgtggtcaacaaaggcatcgccagcgcagccgataccgataacgccatgcgtttcggggttaactatccgcgcgggccgctggcctggggacaggcgctgggctggaaacagatcctcgccacgctggaaaacctgcagcgcttctaccttgaagaacgctaccgcccgatgccgctgctgcgccgctgcgccgccggtcacgcccttcccccttcaggagccgaacaatga

SEQ ID NO: 442069 - DNA, 792 bp, Serratia marcescens
atggacaacaacctgattctcactcacctcgacgccggcgtactgaccatcacgctgaaccgccccgaccggttgaacagctttaacgatgagatgcaccaccaattggcggaagcgctgactctcgccgaacgcgacgaggcggtgcgctgcgtcctgctgaccggcgccggacgcggcttctgcgccgggcaggatctgaacgatcgcaccgtcaacgccgaccagcaggcgccggacctcggcctgtcggtcgagcgtttctataacccgctgatccgccgtctgaccgcgctgcccaaaccgatcgtctgcgcggtgaacggcgtagccgccggcgccggcgcggcgctggcgatggcctgcgatatcgttatcgccgccgacaacgccaattttatccaatctttctgcaaactcgggctggtgccggactccggcggcagctggttcctgccgcgtctggcaggccatgcgcgcgcaatgggcatggcgatgctcggcgataaaatcagcgcccgtcaggcgcaggagtggggcatgatctggcaggtggtggacggcagcgaactggaggcccatacccgggcgctggcgctccatctggcgacccagccgacctacggcctggggctgatcaaaaaagccatctacagcgccgccaccaacacgctggaccaacagttggatctggagcgcgacctgcagcgccttggcggccgcagcgacgactatcgcgaaggcgtcagcgcattcttcgccaaacgcccaccggtcttcagcggaaaataa

SEQ ID NO: 442070 - DNA, 774 bp, Serratia marcescens
atgactaccccctggatattgcacgagcggcagggtcgcgttcttaccctgacgctgcaccgcccggaggcgcgtaacgcgctcagcaccccctgcctgcaacagctgatcgaacggctggaacaggccgaggccgacgacgacaccggcgcggtggtgatcgccggcggcgcgcgtttttttgccgccggcgccgacctacgtgaactgcagcagcaagatctgcccgccaccctgcgtgacccgcgcccgctgctgtggcagcaattggcccagttcagcaagccgctgctggcggcggtcaacggctatgcgctcggcgccggctgcgagctggcgctggcctgcgacatcgtcatctgcggcgaaagcgcccgcttcggcctgccggaaatcaccctcggcctgatgccgggcgccggcggcactcagcggctgattcgctgcgtcggtaaatcccgcgccagccagatggtgctgagcggcgaggccattgacgcccgcctggcgctgcagagcggactggcgagcgaggtatgcgtcgacgcgctgacgctggagcgcacgcagcaggtggccgcgcgtatcgcgcaacaggcgccgctggcgttgcgcgccgccaaacaggcgctgcgccaagcggaggaaaccgggctgacgcaggggctggccatggagcgccagcagtttgccgcgctggccgccaccgaagaccgccgtgaaggcattgccgccttcttcgaaaaacgtaccccacactataaagggcgctga

SEQ ID NO: 442071 - DNA, 1059 bp, Serratia marcescens
atgacggtttttcatcgcctgaatgtcgccgctattgaacgcgaaacgccggacgccgtcgccattaccctgcgcgtgcccgacgaactgaaaagcgcctaccgctatacccccggccagcacctgacgctgaaagccagcctcgacggcgaagagctgcgccgctgctactccatctgcagcgcgccgcaggacgggctgttgcaaatcggcgtcaaggccattcatcaggggcgtttttcctcatttgtcaatcaacggctcaaggtcggcgacgcgctggaggtgatggtgccgcaggggcgcttcggctaccagccgcaggcggagcgccacggcaactatctggccatcgccgccggctccggcatcacgccgatgctgtcgattatcaaagccacgctgctgctggaaccggacagccagttcacgctgatctacggcaaccgcagcagtcgctcggtgatgttcaaagaagcgctgtccgatctgaaaaaccgctacccgcaacgcttccagccgctgtacctgttcagccaggagagtctggacagcccgctgctcagcggccgcattgaccgcgaacgcctgcaggctatcggcgccacgctgctcgactaccgcgactatcaacatgcgtttatctgcggcccggaagcgatgatggacgacgcccacagcgtactggagcaggccggcatgccggccgggcgcatccacagcgaacgcttcaacaccagcggcgtcagcgccagaccggccgatgccgccagccgcaacgccacccgggtggcgattcagctcgacggtcgccggcaggagatcgacgttacggcgcaggacgacagcattctcgacgccgcgctgcgtcagggggcggacctgccctacgcctgtaaaggcggggtctgcgccacctgcaaatgcaagcttaccgccggcgaagtcgagatgggcgtcaactacagcctcgagccggaccagctggccgccggttacatcctcagctgtcagtcgtggccgaaaggcgacggagtgacgctggatttcgacgtttag

SEQ ID NO: 442072 - DNA, 498 bp, Serratia marcescens
atgatcctcccccacttggagcccgccgagatcccgcagatctggcactgcctacagcagatcagcgacccggaactgccggcgctgtcgattaccgatctgggcatggtgcgcaaggtggagcgcgacggcgacggctggcgcattatctttacgccaacctattccggctgccccgccagcgaatttttgcaggacgcgatcaaacagcggctggccgccgccggtttcagcccggtgacggtcgccatccggctcgatcccgcctggaccaccgactggatgaacgccgacgcgcgtgccaggctgcgcgcctacggcgtcgcgccgccgcagggccatacctgcgatagaccggacagccacggcccggtgcagtgcccgcgctgcggcagtgacaataccgagaaaatcagcgagttcggctccaccgcctgcaaagcgctctaccgctgctgcgcctgccgcgagccgttcgattatttcaaatgcatctag

SEQ ID NO: 442073 - DNA, 759 bp, Serratia marcescens
atgacgcaacgcgatccccgtattacctatcttttgcgtcagggcgatacgccgctgattctggcgcagcgcctgtgcgcctggtgcggccacgcgccggagctggagatcgatctggcgctggcgaatatcggcctcgatctgctcggccaggcgcgcaatattctcagctacgccgcgacgctgatcggccccgaatgcagtgaagaccaattggccttcggtcgcgacgagcgcgaattccataacctgctgctggccgaacagccaaacggcggcttcaacgatacgctggtgcgccagttcctgctggatgcctaccacctgctgctgcagcgcgaactcagccgcagccgcgatccgcagctggcggccatcgccgccaaatcgctgaaagaagcggaataccatctgcgcttcagccagggctggatgatccgcctcggcgacggcagcgaaaccagccatcaaaaaattcagcagtcgctggatgcgctgtggcgctttaccgccgaactgttccacgccgatgacaccgagctgatgctggccgaacagggcatcgccgccgatccgcgtcagctgcaggcgccgtggcaggaactggtgaacgatacgctgcgccaggcgacgctgacgctgccggagcagccggcgttccgcctcggcggcaaacagggccagcacagcgagcacctcggttttatcctcgccgagatgcagttcctgcagcgcgcctaccccaactgcaactggtag

SEQ ID NO: 442074 - DNA, 1539 bp, Serratia marcescens
atgacgccaccgtcctcagagtcagcaaagtccagaacttcgccgttgctgtttcaagccgccgtgttcgtggtgatcgtcgtcgttacgctgatcgtgtttaacgtctggcagagctggcatgcccgcaaactcgatctgcaaagtgcggataacggcacctctaatctggcgcgctcgctggcgcagcatgcctacgacaccttcaagcaggtggataacggcctgctggatttgaaagaacgcgccgaacacgacggatttggcgctccgcaacagcgtcgcctgcaaaaagtgatgcatgaccaggtcaccaattcgccgcagctgcacggcagctttatctttgacgcgcaggggcgctgggtggtgacctcgttcggcctgaccggcgcccacgccaataacggcgaccgcgcctatttccaatatcataagaaccacaacaataataacttctatattggcaaagtaatccgcagccgctccaccgacgatctggtgatccccatctcacgccggcttaaccacccggacggcagctttgccggcgtggtgctgtcgacgctgtatgtcgattatttccgcaacttttacgatgacttcgcccttgaggacaacgatgcgctcagcctgctgctggcggacggcaccattttgtaccgccgcccttacgcgccgaataacatcggcaagaacgtcgccctcggggtgctgttccggcagattctgccgtattcggcgttcggcaacgccacgctggtgtcgcagtttgacggcgtggagcgtatttacggctactcccgcgtaccgcattacccgctggtgatcgccgccgggctgtcgaaacacgatgtactgagcagttggcgcaaggacaccggcctgttcgccctcggcggcggcatactgctggcgatattgctggcgctgggcatggcgctgatccggcaaatcaaccacagcctgcagacggaggcggaactggtgcgcacccgcgatcagcttacgcagatgaaccagacgctggaggagctggcgctgctggacggactgaccgggctggccaaccgccgccgcttcgatatggcgctggccaaccatatcaatcacgccgtacgctatcagcgcgatctggcgctgctgatcctggatatcgactatttcaaacagtacaacgacatctacggccacgtcgccggcgaccgctgcctgcagcagatcggccggctgctgaaagagatgcctaaccgcgtcggcgatctgatcgcgcgctacggtggtgaagagctgacgatcatcctgccggataccgatctggcagaggcgatgagctgcgccaaacgggtgcttgcgcatgtgcgtcggctgcaaatccctcacgagggcagcccgctgggcctgattaccgtcagcatcggcgtcgccattcaggctcccggcgacgccgacagcacgccggtcgcgctgatcaaacaggcggatgcggcgctctatcaggccaagaaaaacggtaagaaccaggtgtgtcacgcctga

SEQ ID NO: 442075 - DNA, 195 bp, Serratia marcescens
gtgtcggactacattatcattacgctgttgacgttgtcggtctattatccgctgacgctgggagcgctggccgtgatgatggctatcgccgtgcgccggcggcaatcgccttactggcggctggcgctgctgctgtttacgctgctgtttgtgctgttcgccatggcggcctacagctggcatcactcgcgctga

SEQ ID NO: 442076 - DNA, 420 bp, Serratia marcescens
atgcagattcaaccctatctgttctttaacggtaactgcgaacaggcgattaatttttatgtcgagcaactgggcgccaggctggaaatgctgatgcgctataaagatctgcccgccgaggcgaaacaggacgacatgccggaggtagacccgcaggcggtaatgcacgcgcacctgctgattggcgacggcgcgctgatggcctccgacggctgcccgcaggaagacggcgacaacggcgcgcaccggggctactcgctgtcgctgaaccccagcagcgtggagcaaggtaaagaaatttttaacaaactggcgcagggcggcacggtcaccatgccttttcagcctacgttctgggccaaaggtttcggcatgctgaccgaccagttcggcgtcaactggatgattaacgtggaataa

SEQ ID NO: 442077 - DNA, 774 bp, Serratia marcescens
atgggaagtcaatctcttaatggcaaagtggtcctgatcgccggcggggcgaagaacctgggcggcctggtggcgcgcgatctggcgcaaaacggcgcggcggcggtcgtggtgcactataacagcgacagcagccgcccggcggcggaagagacgctggcggcggtcaaggccgcaggcgcgcaggcgatcgccgtacagggcgacctttcccggccggacaacgtcgcccggctgtttgaagaggcggtgagcgcgttcggcaaggtggatatcgcgatcaataccgccgggttggtgattaaaaagccgatcgccgaagtgaccgaggcggattacgacaccagctttgacgtgaatgccaaggcggcgttcttctttattcagcaggcggggaaacatctggcggataacggccggattgtcaccattgtcagttcgctgctggcggcctatacgccgttttatgcggtgtatcccggcagtaaggcgccggtagaacacttcacccgcgccgcctcgaaagagttcggcgagcgggggatcagcgtcaatgccatcggtcctggccctatggatacgccgttcttctacgggcaggaaagcgaggaagcggtagcctatcaccgcagcgcggcggcattgagcaagttctccaaaaccggcctgaccgatattgaagatattgcgccgatcgtgaaattcctggtgaccgacggttggtggatcaccgggcaaacgctgttcgccaacggcggctatactacccgttaa

SEQ ID NO: 442078 - DNA, 945 bp, Serratia marcescens
atgccgcagccgcagcgtgaggcgccggtggataaaatagggagactgcgggtatttatccaggtcgccgaagtgggcagttttgtgcgcgcatcggaaatcatgctgatgccgaaaactacggtgtcctcggcgatccaacagttggaaagcgagatgggcgcccggctgttccaccgcaccacgcgacgggtgcagctgaccagcgacggcgagcgcctgctggaacgcgcgcgcatgttgctggatgagatggcggcgctggatcggctttttctgccgccggatgcgtcgatcggcggccgtctgacggtggatgtgcccagccgcattgcgcggcgcatcatcgtgccggcgctgccggacttctttacccgttaccccgatattcaactgtttctcagttccagcgatcgccatatcgatctggtgcaggaaggcgtggactgcgttgtgcgggtcggcgagctgcacgacagtagcctgatcggccagagcctggggcaactgggcatgatcaactgcgccagcccggcgtatctgcagcggcagggcgttccgctgcgaaccgaacagctgactgcgcattgggtggtgggctatgctcagccgaatttgatgaccgcgaacgtctggcagtggcgacaggatggcgcggcgcaggagaaagcgctgcccagccgggtgacggtgaataatgcagaaaactacatcggctgctgtctggcagggatggggctgattcaaatcccgcgttttgacgtgcagcactatctggatgccggacagttggtggaagtcttaccgcaggcgcgcgcgcctgcgatgaatcttgcgctgctgtatccgcaccgtcgccagcgcacggcgcgtttcagcgcctttgcggactggtttagccggctgattgcgcctttttgtgaaacggcgcaatcagcaaactag

SEQ ID NO: 442079 - DNA, 921 bp, Serratia marcescens
atgttattaagcccaacttttgagcgctctttcttgcgccctcgatactggctgctttggatcggtctcggcatactctatttgttagttcttctcccctacccgcttatttatcgcctcggccatctgctcggcagaatcgccaaacgctttatgccgcgtcgggtaaaaatagcccgacggaatctggaactgtgcttccccgacatgcccgcagcggaacgcgaagccctggtgacccgcaactttgagtcggtcggcatgggtctgtttgaggtcggcatggcctggttctggcccgactggcggatttcccgctggtttgccgtcagcggcctggaaaatatgcaaaaagcgcgcgaaaacggcaggggcgtcctgctgatcggcatgcatttcctgacgctggaactgggcgcacgcatcttcggcatgcaaaaccctggcatcggcgtgcatcgcccgcataacaacaagctgatggagtatgtacagacctggggccgcctgcgctccaacaaatacatgatcgaccgtaaggacgtaaaaggcatgattcgctgtctgaaacagggcgaaatcatctggtacgcgccggaccatgactatggccggcagagcagcgtgtttgtgccgttttttgccgtgccgaacgccgccaccaccaccggcacctatctgctggcgcgcatgggccggcccgccatcgtacctttcgtgccgcgccgtctggcgcacgccaaaggctatgagctgattattcagccgccgctggacaattttccgctggatgacgacaccaaagcggccgcctacatgaataaagtggtagaggagcaggttttactcgcccctgaccagtacatgtggctgcaccgccgtttcaagacgcgccccgcaggcgaagcgtccctttactag

SEQ ID NO: 442080 - DNA, 198 bp, Serratia marcescens
atgtttgttaaaaatgacagtaaagatcgtgtagaatcggcatgcggcagcgccagagggtgcgcatgtgaagtgcgcgcctgtgtgaaggacgctgtcgattgttcttgtcgttatgtaaaagacaacccgtgggctggggttggcgccggcgccgttgttggactggtcgtcggtttccttttaggcaaaaagtaa

SEQ ID NO: 442081 - DNA, 249 bp, Serratia marcescens
atgggcatcatttcttggattatttttggtttaatcgccggtattctggctaagtggattatgccgggcaaagatggcggcggttttatcatgaccatcatcctgggtattatcggtgcagttgtcggcggttggatcagtaccttcttcggtatgggccgcgtcgatggctttaacctgggcagctttgtggttgccgtgatcggtgccctggtggtgctttttgtctacagaaagatcagaagctaa

SEQ ID NO: 442082 - DNA, 405 bp, Serratia marcescens
atgggtttgttagatggcgcattaggcaatgttttaggcaacgtgctgggtaatgcattgggtaatggcggtaaaggcgggatcgatatcgcggccattctgcagtgggttgagcagcagggtggtttgcaggcaatcctgaacaaactgcagcagggacagctgggcgatatcgtcggctcctggctgggcaacggtgaaaaccaggccatcagcggcgaccacgttcagcaggcgctgggcagcgatgcgattgcgcagctggccgccaaattgggcgttgacagcaaccaggcgtctgaaaccgtggcgcagctgctgccgacgctggcggataaagcctcgccaaacggtgaagtgaaacaggacgaactggccaactacgtcggtaaactgttcagctaa

SEQ ID NO: 442083 - DNA, 1083 bp, Serratia marcescens
gtgacagggattatctcaatactgacgtgtttactggcgttggtgactattgcgccgatttcaacgcatccggcctggtgggtccgcgtatgggatttcccccgtttgcagatactggcgctggcgttattgacgctgttgctgaatgtgacgctgctgccctggtcatcgccgtgggtttggggcctggcggtagtcaatctggcctgtgtgatttatcaggcgcgctggatttatccttatacgccgctgagcaagccgcaggtgctggattttaccggttatgagaaaaagccgcgcgtgcgcatactggtcgccaatgtgctgacgccgaaccgccatgcggaaaagctgctggcgctggcggcgtcagagcggccggacgtgctggtggcggtggaaaccgacggctggtgggagcaacagctggcgccgctggaacaggattatccctatacgctgaaatgcccgcaggacaacctgtacggcatgcacgtctattcgcgcttgccgcttgtcgacgcagagattcagtatctggtggataaggagattccgtcgatgcatatgctggtacaactggataatgggccgcaggtgcgtttgcactgcgtacacccgatgccgcccagcccgacggagaatgatgaatcggaagaccgcgatgcagaactggtgctggtgggaaaaagcgtagtggatgccaaaacgccggtgatcgtcaccggcgatctgaacgatgtcgcctggtccaccaccacgcggttattcctgaaaatcagcgggctgcttgatccgcgccgcggtcgcggcatgtacagcaccttccatgccggctatccgtttttacgctggccgctggaccacgtttttcacagcgatgattttgtgctgggcagcctgcgccgcctgccctctattggctctgaccacttcccgatcatggccgaactggtgtactcgccgaagaagggcgcacagcaagagagcctgcagcgggagagcgaggatgaggcgctggctcaggagaaactggccagcaccgacgccacgccggcggacgtccacgcccccggcgcctga

SEQ ID NO: 442084 - DNA, 1005 bp, Serratia marcescens
atgaccatcactcacctacccgagcagatgcgcgtgattgagattaccgccgccggcggcccggaaatgctgcagcccgcccagcgcccgctgcctgtgccggcgcagggcgaaatactggtgaaggttgccgccgcaggggttaaccgcccggatgtgctgcagcggcgtggacactatgcgccgccgccgggcgcatccgatatcccgggattggaaatcgccggggaagtggtcgccgtcggcgagggcgtccagcactatgcgctcggcgacagcgtctgcgccctgatcgccggcggcggctatgccgaatactgcaaggtgcatgaaagcaatgcgctgccggttcccaaaggcttcagcatggctgaagccgctgccattccggagaccttcttcaccgtctgggtgaacgtctttcagcgcggccacctgcaggccggtgaaactgttctgatccacggcggcacttccgggatcggcacggtcgccaccctgctggccaaagcgttttgcgcccatgtgatcaccaccgtcggttcagaagaaaaacgggcggccagcctggcgctcggcgccgatgtggcgatcaactaccgcacggaagacttcgtcgaacagacgatgaaagcgaccaacggtaagggcgccaacgtgattgtcgatctgatcgccggagagtacctggcgaaaaactatcaggcggcggcgatggaggggcgcattgtgcaaatcggcacccaaaacggcgtggtgaaagagctcaacctgatgccgctgctgctgaagcgcctgacgcataccggctccaccttacgcgcgcgcagcgtgcaggataaagcgcaaatcgccgccgacctgcagcaaaaagtctggccgctgctggagcgcggcgccatcaaaccgcaaatctttcagaccttcccgctggcgctggcggacgaagcgcaccggctgatggaatccagcgcgcacatcggcaagattatgctcaccctataa

SEQ ID NO: 442085 - DNA, 210 bp, Serratia marcescens
atggctacaataaaagcagttaaccatcagcaggcggaaacgttaatccgctccggcacggcgaaaaaaattgagttggcgtacgatatcggcagcgatgatttctttcagctcgccagtttatggtgcgatcgcggcgccaaaatcaccaagggaaaagaacactttattgtttcattaaaaggattccgcattcctcccaatgattaa

SEQ ID NO: 442086 - DNA, 408 bp, Serratia marcescens
atgggcgtaatattagccgccggtatggtactgacagcggtcttgccatacgtgaagatggaatttgccagcagcgcccactataccgaacaagatactcgggagtatgaatattacacaccggacctgctaaaaaaaataccaaaaatttcaaaaaattatgagtttaattatagcaatatcagtggtccgcaggcgtttgtatttggtatacagttcaacggcacaaccgataccagcaagattcgcgactacctgacttctgaaggttatgagccacagaagcaatgccagacagaagctgaatgctggcgttctccacacagcaaagatgtcgtatctttttatcaatcaacggaattaaatttagtgagtgtcgaaatttatcgcagtgagtataccgagtaa

SEQ ID NO: 442087 - DNA, 738 bp, Serratia marcescens
atggggaataacctgtttggtcaatgtatcggcgatgcgttacccgcgtggcagccagccggagaaccgggagcacagacgctgtccgggcgtttttgccggctggagccgctggatatccagcgcgatgccgcagcgctgtttcaagcctatcaactggctgaagatgggcgcgactggacttaccttccctatgaacgtccgcaaacgccggatgaatttacccgttatctgcaaaaccaggctcaggccggcgatcgaaaaaccatgacggtgatcgatcagcgcagcggcagagcgcttggcacctgcgcttttatgcgtattgaccgggccaatggcgtggttgaactgggcatgatcaactggtcgccgcggatgcagcgccaggcgagcggcagcgaagcgatttttctgatgctgcgtcacgtctttgacgatctgggctatcgccgctgcgagtggaaatgcgaccagcttaatgcgccgtcgcgtgcggcggcactacgctttggctttagcttggaaggcaccttccgccaggccgtggtggttaaggggcgcaaccgggataccgactggctgtcaatgctggaccatgagtggccgcagcgtcgtgctgcctttaacgcctggctctctgccggcaacattgacgatgatggccggcaaaggcagcggctgcaggcgtttgccacgtggcatgcagaccattctgccgtagtcagttcgctgtaa

SEQ ID NO: 442088 - DNA, 1416 bp, Serratia marcescens
atgcacccaacgctgcaacaagatttaacccgctttccactgatccttgatcacacccgccggctggccgaaacctttctggccggcctgaatgaacgccccgtctgcccgccggcggcagcgcagcaactcaagcccggcgacgatcgcttatctgcagagggcgtaggcgcccaggctgcgctggagcacttttggcaacattatgccgacggcctttccgccagcgccggaccacgttactttggttttgtcaccggcggcgccacgcccgccgcgctggccggcgactggctggttagcgttttcgaccaaaacagcctgctcagccatgacacggtagccgccgccatcgagctggcagcgattgaacagctaaaaagtttactcggcctgccgaagacattcagcggcagcctggtcagcggcgcaacgatggccaatttttgcggactggcgattggccgccaatggctgggcgcccagcgcggcatcaacgtggcgcagcagggcgtggcggcgctgggcgcggtgcaggtgttggccgccagcccccactccagcagtgagaaagcgctcggcatgctgggcatcggccgtgatgctctggtgcctatcgcccccctgccggattcggaagccatcgaccccgatgcgctggcgcgccatctggccgcacacccggccacgccgaccatcgtactggccagcgccggtacggtgaataccacggcgttcgacaatatttcccgtctgctggcgctgcgcgaacgctacgggttctggttgcatgtcgatgcggcattcggcggcgtcgccgcctgctcccccgcctacgccccattactggaaggctggcaacaggcggattccatcaccgtcgatgcccataaatggctgaacgtgccctatgacagcgccatccagtttacccgtcatttggcgttgcagatgcaggtgttccagaacgtgtcggcttatatggaagcgccggccctgcgcccggatcattacctgcacctgacgcccgaaaactcaaggcgctttcgcgcgctgccgctgtggatggcgctgaaagcctatggccgcgatggtatacgcgatatggttgaacgcaatatcttgctggctaaacagttgggcgatggcctgacggccagtgggggattctgtctgctggcgccggtcaaccttaacgtggtgtgtttcgcactgacgggaatcagcggcgacgcagaagcggagcgcgataactttttggcgcggctcgatcggcacggcattatacgctgtaccgccacccactatcagggccagccggcgatccgcgccgcgctggttaactggatgaccgaagaaagcgatatcgcactggcgctggattcgttgcgggcatgccggtttacagcgaactga

SEQ ID NO: 442089 - DNA, 867 bp, Serratia marcescens
gtgaaatttgaccgcttgcctctgcagtgtttgccgacctttattatcgccgcgcggttggaaaatttgcgcgctgcggcgctacaggttcatctgacgcatggggccgtcagtcagcagattcggcagctggaacaggcgctgggataccggttatttgaacgtcgcggtcgcggcgtacgcctaaacggtgccggtcgcgagctgttggcggccgcagagccggcgatgcaagcgctggagcaaggggtcttgcgggcgcgcgccgttgctgccggtcaggggttgcgcatcagcgtattgccgtcatttgcccattattggctgctgccgcgtctgcccgcgtttcaggcggcgcatccggatatcgtgttggatattgacgcctccctgacggtgcaggatttggcccaccaaggatttgacgcggcggttcgcatcggcgctggcgaatggcgcggcgtgcaggcgcagcggattgctgatggtgacgttattccggttgcggctcctgacctggcgcagcgctggcaagcggcgctgttgcaaggtggcgaagaactgccgttactggagcatgatgtgacgccgtggcgtacatggtttcaggcaaggggaagggaggcgtgcgggcaaacgctggcgctgttcaatgatgcggggctgctgctgcgcgccgcagagcagggatttggtattgcattggtgaagaccctgctggccagggatatgcttgccgccggcaggctggttgcgttggctgatgcctggcggccggaaggcgtcgattactacctggtctggccgcaggccaatgataaccctgccgtgcaacggctgctggcgtggctgcagcaacagctgtga

SEQ ID NO: 442090 - DNA, 2700 bp, Serratia marcescens
atgacttatttcagcaacaaaactcatcgccgtccgcaggggcatgagtcgtatgccatcgcgcaagaggcgacaaacagcattgaccagacgctggcgcagcttaactgtaatcgtcttggtttgacgcaggacgatgcgcaggagcggctcgcctattacggggcaaatcaggtcgctcatgaaaaagcgccgcatgcgctgtggcagttggtcagcgctttcaataacccgtttatttttgtgctgatggtgttggcggcgatcagtttctttaccgactactggctaccggcccagcagggtgacgaaaccgatctgaccggtgtcagcatcatcctgattatggtggcgctgagcggtttgctgcgcttctggcaagagtaccgcaccaataaagcggcggaggcgctgaaaagtatggtgcgcaccaccgcgacggtgctgcggcgcagcagcttcagcgcccaatcgctggtggtggaaattccgctgcgtgagctggtgccgggggatattatccagctgtcggccggcgatatggtgccggcggacgtgcggctgctcagctcgcgcgatctgtttatcagccaggctattctgacgggggaagcgattccgattgaaaaatatgacacgttgggaagcgtcagccagaagtcctgcgatgccgaggccgccagcgaaagcgagctgctcgagatggccaatatttgcctgatgggcaccaacgtcgccagcggcaccgccagcgcggtggtggtggccaccggcggacaaacctattttggttcgctggcaaaatcgatcgtcggcagccgggcgcagacggcgtttgaccgtggggtcaacagcgtcagctggctgctgatccgctttatgctggtgatggtgccggtagtgctgctgattaacggttttaccaagggcgactggggggaggcggcgctgtttgcgctggcggtcgccgtcggcctgacgccggaaatgttgccgatgattgtcagctccaatctggcaaaaggcgctattgccatgtcacggcgtaaggtagtggttaaacggcttaacgccatccagaactttggcgcgatggacgtgctgtgtaccgataaaaccggcaccttgacgcaggatcgcatcattctcgagcatcacctggacgccagcggcgcttcggatagccaggtgctgcatctggcctggctgaacagctttcaccagagcggcatgaagaacctgatggatcaggcaatcgtgcgttttggccgcggtaagacgggcatagaggccctggggcgttacagcaaggtggacgaactgccgtttgattttatccgccgccgcctgtcgatcgtggtgcaggacgaacggcagcaacagttgctgatctgcaaaggggcggtggaggagatgcttgctatcgccagccatgtgcaggagggcgactgccgggttacgttggatgagacgcgtcgtgcggcgctgctggcgctggccaatcaatataatgaggacggcttccgcgtgctgctgctggcgacgcgcgaactgggcgtacagggctgcacgctgccgctcagcgtggaggatgagcgcgatctggtgatccgggggctgctgacattcctggatccgccgaaagaaagcgcgcaggcggcgatcggcgcgctgcaggaacatggcgtagcggtgaaggtgctgaccggcgataacccggtgattacctgcaaaatctgtcgcgatgtcgggctggagccgggggtgccgctttccgggccgcaaatcgagctgatggacgatcgtcagctggcgcaggaggtggagctgcgcaccgtgttcaccaagctgacgccgctgcaaaagtcccgcgtactgaaaatgctgcaggcgaatggccacaccgtcggttttctcggcgacggcatcaatgacgccccggcgctgcgcgatgccgacgtgggtatttcggtagacagcggcaccgatattgccaaggagtcggcggatatcatcctgttggaaaaagacctgatggtgttggaggaaggggtcatcaaggggcgcgagacttttggcaatatcatcaaatatctgaatatgactgccagctccaacttcggcaatgtgttctcggtactggtcgccagcgcgtttatcccgttcctgccgatgttggcgattcatctgctgattcagaacctgatgtatgacatctcacagctgtcgctaccgtgggacaaaatggataaggagtttctgcgtaagccgcgcaaatgggatgccaaaaatatcggacgctttatgatctggattggcccgacgtcgtcgatttttgatatgaccacctatgcgctgatgtggtttgtgtttgccgccaacagcgttgagcatcaggcgctgttccagtcgggctggtttattgaagggctgctgtcgcaaacgctggtggtgcatatgctgcgtacccagaagattccgtttatccagagtacggcggcactgccggtgctgctgatgaccgggctgatcatggcgattggcatctatattccgttctcgccgctcggcgcctgggtgggtttgcagccgttaccgtgggagtatttcccgtggctggcggcgacgctggtcagctactgcgtggtcgcgcagctgatgaagcgcttctatatccgccggtttggcgtctggctgtaa

SEQ ID NO: 442091 - DNA, 774 bp, Serratia marcescens
atggctttaacctatgcgccactgttgatctggctgctagtgctccatctgctggcggacttccctttgcaaccgcgcgcctgggtgcaggataaggctcaataccgccaccggtcgcgttttttactgctgcacgccctgctgcacggcgtcgtggcggcctgggccgttgccggcttcggtctgctgcacggcggcgtctcgtcggcggatgtgctgctggcgctgctggtggtcggcatcagtcactacgtgattgatctggccaaggtgacgctgatggcgccgatgaaaccggcggcaagcttcctgctggatcagggcctgcatctgctggtgattattctgctgtggctggcaatcgtgccgcatgtcgctacgctgttcgaggcgttatggcagcgtttcgacggctggcgcgtcggcctggcggcgctgggatacgggctgatttatatgccgatggggctgctgatcgggcagttgctggcaagctggacgccgcagatgcagccgaacgccaaggcggacaacgattctttgctgcgcgccggcaaacagatcggctatctggaaagaacgctgatcctgacctttgtgctgctggggcatattccggccattggctttctgctggcggccaaatctattttccgctttggcgatctgcgacagagcgacgataaaatgcgtaccgagtatgtgatgctcggtacgctgttttctttcaccctgacgattatgctggggctgctgattaccctgttatggtaa

SEQ ID NO: 442092 - DNA, 600 bp, Serratia marcescens
atgaaagcgcaaatcagcgttatcaccggcgatctcgtcaactcacgacgtgttgacaccccacgttacatcgcgcagttacgcaccgaactcacggcgcttcaacaggccggcctgctgacgcagtttgaaatttttcgcggcgacgcctttcaggccgtgggccagcccgagtccggcctgtggctggccgtctacctgcgtaccgccttaaaagcgcaacatgatgccgcgctctgggacgcgcgcatcgccgtcggcctgggcaaacgccggggccggggcgacggttacggcagcgccttcctcaattccggcaacgcgctggacctgatgacaaaaaattgcaggctggctctgaaaattgacaatgaacgcgccaatgccattgtcagcgatctgctaccgatgctagatcataccctcagccgtttgtcacaggcagaagcgcaggtcgtccaggcacgcatgctgacaacgaccaacgcgcaagcggccgccgcggtgcgcaaggcagcgtcaaccgtctccgcaacgctcaaacgcgcggcctatgatgaaattatccggttcattgatgcgattaacaggatcatttaa

SEQ ID NO: 442093 - DNA, 180 bp, Serratia marcescens
atgtacaatttttcacgttatcaggccaaagaattggcattagcctatatgagcggcaaacagcacgatctctcgccgcaggcattcctgcagcagcttaagcagacggaaaagtcattcgaacatctgctcaagtatggcgcagaacagccgcgtgaagtgatgatgaaaagcttctga

SEQ ID NO: 442094 - DNA, 336 bp, Serratia marcescens
atgatgctgacgccattacaactgtttaaaaacctgtcggacgaaacccgactgacgatggtgctgctgttgcggcaggctgaagagctgtgcgtgtgtgaactggcggcggttttaacgctgccgcagcctaaaatctcccgtcatctggcgatgctgcgcgcaagcggcctgctactggaccgccgtgagggcaagtgggtctattaccggctttcgccgcatatgccggcctgggcggcgggcattatcgagcaggcttaccttagtcagcaggagcaggtgagcaatctggcaaaacgcgccgccgcggacgggcggacggtgtgccgctaa

SEQ ID NO: 442095 - DNA, 1290 bp, Serratia marcescens
atgtggctggcgggcgcgatttttatcctgaccatcgtattggttatctggcagccgcgggggctgggcatcggctggagcgcctcgttgggtgccgttctggcgctgctgagtggggtggtgcagcttggcgatattccggtggtgtggcacatcgtctggaatgctaccgccacctttatcgcggtgattatcatcagcctgctgctggatgagtccggcttttttgagtgggcggcgctgcacgttgcgcgttggggtaaaggacaagggcggcggctgttcagctatatcgtgctgctgggggctacggtggcggcgctgttcgccaatgacggcgcggcgctgatcctgacgccgatagtgattgccatgctgctggcgctggggtttggtccggcggcgacgctggcgtttgtcatggccgccggctttattgccgacacggccagcctgccgctggtggtttccaatctggtgaacatcgtctcggcagacttcttccagcttggttttaatgactatgcggcggtgatggtgccggtgaatatcgccgccattatcgccacgctggcgatgctgcacctgtttttccgcaaggatattccggcccgttacgatgtggcgctgctgaaggcgccgcatgaggccattcgcgatgtgtcgactttccgcgccggctggggcgtattgctgctgttgctggtcggtttttttgtgctggagccgctgggcgtgccggtcagtctggtggcggcggtgagcgcgctggtgctgttgctggtggcgaaaagcggccggacgatcgctatcggcaaggtgctgcgtggcgcgccgtggcagattgtgattttctcgctggggatgtatctggtggtatacggcttgcgcaacgccgggctgaccgatctgctgtcggcagtgctgaaccgcctggcggaacaggggctgtgggcggcgacgttgggcaccggttttatcaccgctttcctgtcttcggtgatgaacaatatgccgacggtgctgatcggcgcgctgtcgattgacggcagcagcgctggcggcgtgattaaagaggcgatgatctacgccaacgtgatcggcagcgatctggggccgaagattacgccgattggcagcctggcgacgctgctctggctgcatgtgctggcgcgcaagaatatcaatatcacctggggttactatttccgcgtaggtattgtcatgacgctgccggtgttattcgtgacgttagccgccctggcgctgcgtttgtcggtctcatcgtaa

SEQ ID NO: 442096 - DNA, 426 bp, Serratia marcescens
atgaaaacgatcaccatctaccataatccggcctgcggcacgtcgcgcaatacgctggcgctgatccgcaacagcggcgtcgaaccgacgatcgtactgtatctggaaacaccgccgagccgtgacgaactgtgccggctgattgccgatatgggcatcccggtgcgggcattgctgcgcaagaacgtcgagccgtatgaacggctgcaactggcgctgacgcactggcgtgatgaacagctgatcgatgttatgctgcagcagccgatactgattaaccggccgatcgtggtgacgtcgctcggcacccggctgtgccggccgtcggaggtggtgctggatatcttaccggacgcacagcaaggcgagtttatcaaggaagacggagaaagggtggttgatgagcacgggcggcggcggcgttag

SEQ ID NO: 442097 - DNA, 783 bp, Serratia marcescens
atgctacagcaacgttttagcaacaaggtaatggccatcaccggcgcggcgcaggggatcggcaaagcggtcgctgaacaggccgcgcgggaaggcgcgaagttggcgctgatcgaccgcgcgccctatctgcaggaggcggccgcagcgctgcgggagctgggctgcgacgcgctggcgattcatgccgatctggaacgctgggaggagacgcaggcggccatcgatgaggcgcagcaacgcttcggccggctggatatactggtgaacaacgtcggcggcaccatctgggcgcggccgttcgccgagtatgcgccggcgcagattgaggcggagattcagcgttcgctgtttcctacgctgtggggctgccgcgccgtgctgccgcacatgctggcgcagggcggcggcgcgatcgtcaatgtctcttcggtcgccacccgcggcgtcaaccgggtgccctattcggccgccaaaggcggggtgaatgcgctcacccggtcgctggcgtttgagtacgccgacgccggcatccgcatcaacgccaccgcgccgggcggcaccgaagcgccgccgcgcctgacgccgcgcaaccgggacacgccgacaccgcaggaggaggcgtggtatcagcaggtggtcgatcagaccctaaacagcagcctgatgcaccgctacggcacggtaaacgaacaggccgccgccattatattccttgccagcgacgcggccagctatattaacggcaccgtgctgccggtggccggcggcgatttaggctga

SEQ ID NO: 442098 - DNA, 1020 bp, Serratia marcescens
atgagctataccgttgcgcttaactttgaggacggcgtcagccgttttatccagtgcaatcccgatgagaccgtgctcgacgccgcctatcgccagcaggtcaatctgccgatggactgcgccgacggcgtctgcggcagctgtaaatgccattgcgaacagggcgactaccagttgggcgatgactacctggatgacgccctctccgcagaggaagccggacaacgccaggtgctgacctgccagatggtgccgcagtccgactgcgtgatcgacgtgccgatggcctccacgcagtgtaaaaccggctgcgaaaccttttccgccagcgtggtaagcgccaccgcgctgtcggacagcgcgattgagttcagcctgcagttggatgacgcccacggcggcgtcgcctttttgcccggccagtacgtcaacattgaagtgccgggcagcgacgcccgccgcgcctattcgttcagctccctgcccaacgcgccccggctgtcgttcctgctgcgcaacgtgccgggcggcatgatgagcagctacctgagcggccgggcgcgccccggcgataaagtgcgtctgcacggcccgcagggcagcttttatctgcgcagcgtgacgcggccgctgctgttcctcgccggcggcaccgggttggcgccctttctgtcgatgctggagcaactggcgcaggacgacgtccggcagccggtgcggctgatctacggcgtcacccacgactgcgatctggtgaagctggaacagctggacagttatcacgcacggctgagcgatttcagttacctgacctgcgtcgccagcgacgcctcgcaggcggcgcgcaaaggctatgtcacccagcatcttgatgacagccagctgcacgacggcgatgtggacgtctacctgtgcggcccgccgccgatggtcgaggcggtgctgcacgacttccgtcagcgcgccttcacgccggccagtttccactatgaaaaattcgcccccagtcagacggcgtaa

SEQ ID NO: 442099 - DNA, 486 bp, Serratia marcescens
atgagccagcaacaacgtattgagcagtttttataccgcgaggcgcggctgctggatgaccgccagtgggatgagtggctggcgtgctacagcccgcaggtcgagtactggatgccctcctggggcgaggatgaccggctcacccgcgatccgcagcgcgaagtatcgctgatttactacccgaaccgcgaagggctggaagaccgcgtctaccgcatcaagaccgagcgttcagcggccagcacgccggaaccgcgcaccacccaccatatcagcaacgtggagctgatcggcgaaacggcggatgcagtggacgtacgctacaactggagcacctacagccaccgctatcagaaaaccgatctgtttttcggcagttgccgctgccgcatcgcgcttggcggcgaacagccgcagatcctgagcaaaacgatccgtctcaataacgactacatcagtcatgtgattgatatttaccatgtttaa

SEQ ID NO: 442100 - DNA, 1419 bp, Serratia marcescens
atggggaataaatttccccagggcaccctacgcaacgtgattaacgaggtcattagtatgaactcatcaacaactgctatttattccacgctggaacagaaaataaaaaatgcattgcgggtagataaagagcaaggcgtctaccagtgtcaccgcggcatatttaccgacccggcgatatttgaactggaaatgaaggctatttttgaaggcaactgggtatatatggcgcacgaaagccaggtcgccgagccgggcgactattataccctgacgatgggccgccagccggtgatcattacccgcgacaagcagggagaactgcatgcgatgatcaacagctgctcgcaccgtggtgcgatgctggccagccgcaaaaagggcaacaaagccacctttacctgtccgtttcacggctggacgtttaacaacgccggcaatctgctcaaggccaaagacgaaaagagcggcggctatcccccgtgcttcaaacaggccggctcgcacgatctcaagcacctgccgcgctttgcctcttaccgagggtttctgttcggcagcctgagcgacaaggtgctgccgctggaggaatacctgggcgatacccggcaggtgttggacctgattgtcgatcaggcggaagacggcatcgaactgctgaccggcgcctcctcgtatacctatgacggcaactggaagctgcagatggaaaacggcgtcgacggctatcacgtcagcgtggtgcactggaactatgtctcgaccatgtcgcgccgcagccacgacgccagcagtacccagacgctggacgccacctgctggtcgaaaagcaccggcggcgtctacggcttcgaacatggtcatatgctgctgtggacccgggcgctgaacccggaggtgcggccggtattcaaacacttccgccgcctgagcgaccgcttcggcgagacgcgcgccgattttatggtcaaccatacccgcaacctgtgcatttaccccaacctctacctgatggatcagttctccacccagcttcgcgtgatgcgccccatcgcggtggataaaaccgaggtcaccaccttctgcttcgcgccgaagggagaaagcgccgaggatcgcgccctgcgcatccgccagtatgaggacttctttaacgtcagcggcatgggcacgccggacgatctggaagagttccgcgcctgccagcagggctatctcgccggcaacatgccctggagcgatatcagccgcggggccacgcgctggctggaaggccccgacgacaacgcgcaggcgatggcgatccggccgctgatgagcggcgtgcgcgccgaggatgaagcgctgtatgtcccccaccaccatcactggcagcagaccctgctgcgcagcctgaacgacaccgaggtgcagtcatga

SEQ ID NO: 442101 - DNA, 930 bp, Serratia marcescens
atgtccgtatccttcaatcagtctgaagacgtcagcaagctgctggatatcagcagcggtttaaccggaaacgacggcgatccgcgttttaaagccatcacccgccagctgctgggtaatatctgtcagttgatcgacgactttgatattagcgccgaagagttttggcgggcgattaactatctgcatcagctcggcggccgtcaggaagcggcgctgctggcggccggcctggggctggagcactatctggatatgcgtgaggacgcgcgagaacgccagcagggtctgaacggcggcacgccgcgtaccatcgaagggccgctgtatgtcgccaatgcgccgctgagcgacggctacgcacggatggacgacggtacggacagcggcgaagtcatgtggctgcacggccaggtcagcgaccagcacggccgcccgctggccggcgccatcgtcgatatctggcacgccaatacgctgggcaactattcgttcttcgataagtcgcagagcaattacaacctgcgtcgccgggtgcaaaccgacgccgacggccgctacgcggtgcgcagtattttgccctccggttacggctgcccgccggacggcccgacgcaggcctggctcgatcgccttggccgccacggcaaccggccggcgcatatccacttttttgtttccgctcccggctacaagcacctcaccactcagatcaacctgaacggcgaccgctacctgtgggacgattttgccttcgctacccgcgatgaactgatcgccgatccgatcaaaatcagtgatccggcgctggccgcacagcgcgatctgcccggcgaacataccgaaatccgctttgatttcatgatttacgccgccggcgacagcgcagaggaacagcgaattaaacgcccgcgcgcgctggaaagttaa

SEQ ID NO: 442102 - DNA, 291 bp, Serratia marcescens
atgttgttcaaagttgaaatgtccgtgcaactgccgtccgatatgccggccgccgtcgccgatgagatcaaactgcgtgaaaagcgctatgcgcaagagctgcagacgcagggaaaatggcgccacctttggcgcgtggcgggaaaatacgccaacgtcagtatctttgacgtggaaagtaatagcgaactgcacgatattttatcggcgctgccgctgttcccgtatatggaaatgcatattgaggccttgtgccggcatccgtcatccatttacgacgacgataaataa

SEQ ID NO: 442103 - DNA, 1116 bp, Serratia marcescens
atgacgctgtgtattgaacgcattgaaagctggctgctggatattcccaccatccggccgcacaaactgtcgatggcgaccatgggctgccagacgctgaccatcgttcgcctcacctgtgcgggcggcctggtcggctggggcgaagccaccaccatcggcggcctgagctacggcccggaaagcccggaagggatcaagtccgccatcgatacctatctggcgccgctgctgaccggccagcagtttgacggcctgacgccgctggtcaatctgatgaacgccagcgtcaaaggcaatacctttgccaaatcggcgctggagaccgcgtttctcgacgcgcagggcaaagtgctgcgtcagccgctcagcaccctgctcggcggcgcgcagagccggcagctgccggtgttgtggacgctggccagcggcgacaccgagcgcgatatcgccgaggggcagcgcctgctggcggaaggccgccataacgcctttaaactcaagatcggcgccagaccgctggccgacgacctgcgacacaccgcggcgatcgtccgggcgctgggggccgacgccagtatccgggttgacgtcaatcaggcctgggacgccgccagcgcggtgcgcggcatggctgcgctgcaggagatcggcgtcgatctggtggagcagccggtggcgctgtgggaccgcgccgcgctgacgcagctgagtcaacggttcaccctgccgattctggccgatgaagcggtagccgacgcccatgacggctacgcgctggccgccggcggtttccgcggcgcctatgcgctgaaaatcgccaaggccggcggcccggcgcaggcgctgaaactggcgcacgtcgccgatgcggccggcatcgcgctgtacggcggcaccatgctggaaggcagcatcggcagcgtggcgtcgctgcacgcctggtcaacgctgaagctggcctggggaacggaaatgttcggtccgctgctgctaaaagacgacatcatcgccgaaccgctgaatttcgccgacggacaggtcacgctgccggacggcccgggcctcggcattgaggtcgatgaagacaaactgcgtttttatcagcgcacctag

SEQ ID NO: 442104 - DNA, 759 bp, Serratia marcescens
atggagattgaataccgccttgacggcccggccggcgcaccgctgctggtgctgtccaattcgctgggtactacattggatctgtggcagccgcagatggcgctctttaccgcccatttccgcgtgctgcgctataaccagcgcggccacggcggaacgccgctgcccgccgccccgctgacgctggagatccttggccgcgacgtcgtcgccctgctcgacaggctggacgttgaacgcgcccatttctgcggcatttcgatgggcgggctgaccggcctgtggctcaaccgctatcagccgcagcgcctgcagcggctggtggtggccaacagcgccgcgcgcatcggcagcgccaaaggctggcatcagcgcgcgcagacggtgcgccgtgacggcctggcggagattgccgccgcgtcgccggcgcgctggttcagcgaggaattccaacgccgcgaaccgcagcaggtggcggcactggccgcgcagctggcacagggcaacgccgccggttatgccgcctgctgcgacgcgctggcgcaggcggatctgcgggccgaagtccgccacatgccgcagccgatgctggcgatcgccggcgagctggatccggtcaccacgccggacgacgcacgcttcctgctggcgaacgcgccgcaggccgaactggcgaccctgcccgcctcgcacatcagcaatattgcgtgtccggcgctgttcgcccaccgcgtactcgactttctgacagaggtataa

SEQ ID NO: 442105 - DNA, 1203 bp, Serratia marcescens
atgactcacgcttatctgtgtgacgcggtgcgcaccccgttcggcaagctgaacggcagcctggccgggatccgcgccgacgatctggcggcgctgccgctgcaggcgctgcagcaacgccacccgcagttggactggagcgcgctggacgatgtgctgctcggctgcgccaatcaggccggcgaggacaaccgcaacgtggcgcgcatggcgctgctgctggccgggttgccggtttccgtacccggctgcaccgtcaaccgtctatgcggctccagcctggatgcgacggcgatggcggcgcgcgtgattaaaagcggtgaaggcgacctgctgatcgccggcggcgtcgagagcatgtcgcgcgcgccgttcgttatgggcaaagcggaaagcgccttcagccgcgccatgcggctggaagacaccaccatgggctggcgctttatcaacccgcagatgaaagcgctgtacggcgtcgactccatgccgcaaaccgccgaaaacgtggcggagcagttccgcatcagccggcaggatcaggacgccttcgccctgcgcagccagcagcgcgccgccgccgcgcaggaaagcggcttcttcgccagccagttgatcgcggtaaccattccgcagaaaaaaggcgaggcgctgagcttcagccgcgatgaacacccgcgcgccaccagccgtgcggcgctggaaaaactcaagccggtggtgcatccgcaaggcagcgtcaccgccggtaacgcctccgggctgaacgacggcgcctgcgcactgctgctggccagcgaacgcggtatgcgccggcacggcctgcagccgctggcgcgcatcgtcgccagcgcggtcaccggcatcgagccgtcgattatgggtttcggcccggcgcaggcggtgcgtaaagtgctggcaagcgccggcctgcgcctcgaacagatggacgtgattgagctgaatgaggccttcgccgcgcaggcactggcggtgacccgcgccctgtcgctgccggacgatgcgccgcaggttaacccacacggcggcgccatcgctctcggccacccgctgggcgcctccggcggccggctggtgatgaatgccgtctatcagctgcagcaaagcggcggacgctacggattgtgcaccatgtgcatcggcgtcggtcagggcatcgccatgattatcgagagggtgtga

SEQ ID NO: 442106 - DNA, 687 bp, Serratia marcescens
atgattaataaaagcgtgcagtccaccgacgccgccgttgccgatattcccgacggcgccagcgtgatggtgggcggcttcggtccggcaggccagccttatgccctgctggacgccctgatccgccgacgcccgcgtaacctgacggtaatcagcaacaacgccggcaacggcgatttcgggctggcggcgctgctgaaagccggctgcgtacgcaaaatcatctgctcattcccgcgccagtccgactcctgggtgtttgacgacctctaccggcgcggggagctggagctggagctgatcccgcagggcaacctggcggcgcgcattcaggcaggcggcgccggcctcggcggtatctataccccgaccggctacggcacccagttggcggcagataaagaggtgcgcgaaatcgacggccggcactatgtgttcgaactgccgctgaaggccgattttgccctgatccgggccgagcgcgccgaccgctggggcaatctggtctataaccagaccggccgcaacttcggcccgatcatggcgatggccgccggctgcaccattgccgaggtcaatcatctggtgcccctgggtgagctggatgccgaagcggtgatcacgccggggattttcgtgcagcgcgtggtcagcgcaccgtccaccccacaacggctttcggcctga

SEQ ID NO: 442107 - DNA, 966 bp, Serratia marcescens
atgaacaaccataattatgattcacaagcagtttttagcccgataacgcgcagcgccatttttattgtcgccacccttaaccccgcccctgaacactacgatacggtacgcgactggtgcgccgacgtcgctgcgctggtgcgttcggtcgggaaaagagcgccggccggaaaattatcctgcgtctgcggcttcggctccggcgcctggaatacgctgttcggccagccgcgccccgcgcaactgcacccgttccgcgaaataggcgccggcggacgcgtcgccgtcgccacgccgggggatattctgctgcatattcgcgccgatgatatggatctctgttttgaactggcgacccagctgctggacaaactgggcgacgccgtcagcgtggttgatgaagtgcacggcttccgctatttcgatcaacgcgcgatgatcggcttcgtcgacggtacggaaaacccggaaggccgagaagccgttgattttacggtgattggcgaagaagacgccgagtttagcggcggcagttacgcgctggtgcaaaagtatctgcacgatatgacgggctggaacgccctgagcgtggagcagcaggaaggtattatcggccgccataaacagtccaatattgaactggacgacgatgtgaaaccctcctcctcccacagttccctcaccacccttgaagatgaacacggcaacgaggtgaaaatcctgcgtgacaacatgccgttcggccgcccgggcatgcgtgaattcggcacctattttatcggctatgcgcgctcgccggaaccgattgaacagatgcttgaaaacatgtttatcggccggccggagggcaattacgaccggctgctcgacttcagccacgcggtgaccggcagcctgttctttattccgtcggcgacgctgttggagcagttatcaacgcgcacgctccccgtcaacctgcactga

SEQ ID NO: 442108 - DNA, 2316 bp, Serratia marcescens
atgaaattcaaatcaaaaataaagccgtataaagcggccgcgggcggttggggctcattggaggccaccacgcggtttgtttttgacagtaaacaagcactgaagaacatggtcaacctgatgcggatgaataaatccaaagggtttgactgcccgggctgcgcctggggtgacgataataaaagcaccttcagcttttgtgagaacggcgccaaagcggtgacctgggaagcgacgcggcgtcacgtcgatcgcgaatttttcgccgcgcaccgtgtcagccgcctttatctggaaagcgattattttctggagtatcagggccgggtgaccgagccgatgcgctataacgtcgccaccgatcattatgagcccatcagctgggatgacgcttttgccctgattggcaaacacatcaaggggatggagaatccgaaccagctggagctgtacacctccggacgcgccagcaatgaagcctcgtggctgtatcaactgttcggccgggtgctgggcaccaataatttccccgactgttccaacatgtgccacgaagccagcggcttcggcatgcggcaaagcctgggcgttggcaagggcaccatccgcctggaggatttcgaccaggcggacggcatctttgtcttcggccaaaaccccggtaccaaccacccgcgcatgctgcacagcctgcgccatgccgcagaacacggcgcgcgcatcgtcaccttcaatacgctgcgcgagcgtgggctggaacgctttgccgacccgcaaaaaccgttggaagtggtgacgccgatggccggcgaaatcagccatcgctattaccagccgaacctgggtggcgatatggcggtggtgcgcggcatggtgaaagcgctggcggaaactcaccacgcgcgcatcgccgccggggaacccggtctgttcgacacgcagtttatcgccgaccataccgagggcgtggagcgctatctgcaggaagtggcggccaccagttgggcgtttattgagcggcagtccggcctgagcgaggcgcaaatccgcgaggcggcagagatttatcagcacgcagaacgggtgatttgcacctgggcgatgggcattacccaacataaacattcgctggcgacggtgcgtgagatcgtcaacatgcagctgctgttcggccaactgggcaaaccgggcgccggtctgtgcccggtgcgcggccacagcaacgtgcagggcaaccgcaccatgggcatcgatgagcagcctccggccgcctttctggacagcctgggcgcgcactttggcttcgagccgccgcgcgcccacggccacaatacggtggatgcgctgagcgccatgctgcgcggcgaggttaaggtattgatcgcgctgggcggcaacctggccgcggcggctcccgatagccgccgtacggaagaggcgctgcgcaactgcgatttgaccgtgcatatcagcactaaacttaaccgcagccacctggtgaccggcaaaaaagacgcgctgattctgccggcgctggggcgcaccgagcaggatgttcaggccggtggcaaacagttcatcacggtggaagactccttcagcatggtgcacgcctccgaaggtattggtaaaccgctgtctgacagccagcgctctgaaacggcgatcgtcgccggcattgccaacgcggcgttcggcaatacgccgaccatcaactggctggaactggccggagattacaacaagatccgcgaccatatcgccgccaccattccaggctttagcgactttaaccacaagtgtgagcagccggggggcttttacctgggcaatgcggccgccgagctgcgcttcccgacggcgtctggcaaggcgcagttcagccatgcgccgctgccggccacgctgttcccgcagttggcgacgcagcaggacgtgccgttcgtactgcagacgttacgctcccatgaccagtacaacaccaccatttatggcctggatgaccgttaccgcggcgtttacggccagcgtgaggtgctgtttatgaacccggaggatatcgccgcggccggctatcaggccggcgatctggtggatattgaaaccatctggaacgacggcgtgcagcgagcggtcagcggcttcaaactggtgagctacgccattccccgtggcaacctggccgcctattacccggaaaccaacccgctggtgccgatgaacagcatcggcgacggtaccggtacgcctacctcaaaatccgttccggtaaaaattacccgcaccatgagcagatcaactcagcggattgcataa

SEQ ID NO: 442109 - DNA, 918 bp, Serratia marcescens
atgatcattcgtccaaaccagcactggtttttgcgcctgtttgactggcgcggctcggtgctgtcaaaaataacttttcgtctgggcttaaatgtcctgatgtcgattatcgccattgtcttttatcaatggtatgagcaattcggcattcatttaaccgttgcccctttcagtttgcttgggatcgccatcgccatttttctcggcttccgcaacaacgccggctacagccgcttcgtcgaggcgcgcatgctgtggggcacgctgctgatcgccgaacgcaccctgctgcgccagttgcaaaacctgctgccggaagagaaagcgctgcatcgccatatcgcccggtatctgatcgccttcgcctggagcctgaagcaccagctgcgccacaccgatgcgaccgccgatttgtaccgcattctgccgaagccggcgtttgcagaagtgaacgccagcccgatgccgaccaaccgtatcctgctgctgctcggccatgaaatcggccggctgcgtcaggccggccggctcagcgacatcacctacaggatgctggataataaactcgacgaactcgcccacgtactcggcggctgcgaacgcatcgccaatacgccggtgccgtttgcctataccctgatcctgcagcgtaccgtgtacctgttttgctccctgctgcccttcgcgctggtggccgacctgcactacatgacgccgttcgtctcggtatttatttcctacaccttcctgtcctgggactcgctggccgaagagctggaggacccgttcggcaccaccgccaacgatctgccgctcagcgccatctgtaatggtattgaacgcagcctgatggaaatgaacgatcagcagccgctgccggcgttgcataagccggatcgccacttcaacctgacctga

SEQ ID NO: 442110 - DNA, 840 bp, Serratia marcescens
atgaataaacatttaataacaaatgcgcctgaaaataacaccgatacgtgcatggttaaacgcccggtctggcagcgcgataatctgcaacaggcggaagaagactggctggcggaagaggtgccggtcgcgctggtgtataacggcatttcccacgtggtgatgatggcaacgccaaaggatctgccggcctttgccatcggtttttccctgtcggaaggcattatcacctcagccgacgagatctatgatattcagcagtaccctgcctgcaacggtatagaagtgcatatcgaactctccagccggcgctttatgcagctgaaagagcgccgccgcagcatgaccgggcgcacaggctgcggcgtttgcggcgtggagcagttgcaggaagtcacccgccccatcgccccgctgtcgttcagccaacgttttgatttaacacagcttgatgccgggctggcgcagctgaaaagctatcagaccgtcgggcagctgaccggctgcacccacgccgccgcctggctgcagccggacggtaacctgagcggcggctatgaagacgtcggccgtcacgtggcgctggataagctgctgggataccgcagccagcagggctggcaggccggcgcggtgctggtttccagccgcgccagctatgaaatggtgcaaaaaaccgcgatgtgcggcattgaaattctgttcgccgtctccgccgccaccagcctggcggttgaggtggccgagcgctgcaatctgaccctggtcggcttcagcaagccggggcgcgccaccgtctatacgcatccgcagcgtctgtggcgctccggcagcgcatag

SEQ ID NO: 442111 - DNA, 1272 bp, Serratia marcescens
gtgtcttacctgtccgggcgctcgttgctggctttactgttctggtgcgcgctctattttcttaccggctatatctctttgtatatggatgcgcccgtcagccgggtcgccgccgtctggttccctgccggggtagcggtcagtgcattcctgatcttcggccggggttattggccgatgctgtttctggtgctgttccttacccgggtgctgctggatgccacgttgcggcatacgctggaaacctccctgattctatccgcgatctccctgagtaacagcctggcggtggcgtggtgcgtcaggcatttttcctcaccgcaagatcaactgcgcagcgtgggcgtctggctgctggcgacgttgggcaccagcgtgctctccggtctgctgggcggtggctggctggcgttaaggcacgaggttgattttgtgcaggccgcttggacgtggtgggcgtctaacgtggtcggcaccattttgctgaccaccatcctgatggggctgcgctggcgttccgggccattaagcgttcgccaactgctgtccggcggtgtgctgtggttgctgctatgcctgagtgcctggtacgtttttcatcagccgatcggcggagcgcacggaacggcgctacagtttgccctggcctgcctgccggtgatgctgatgattgtgattccggtgatgagcggcaaccggttcggtgcattttccttcctgtgttttagcatcatcgtgatttattactcctggcagcgctatggcccattttttatccccgggctgcgcgacggtgaatcgttgctgctggcgcagtgttacctgtccgccacggcgctgctgctgagttttgtctatgtgcaaaagcgtgcggcggtaagcgcgtcagaggcggaagaacgcatggccggccccggacaggggaaggcggcctaccatctggagccgcagagcgggcggctgacgtgggatgaaaacatccataccccgctgagccaacaactggccgcgataagcaatgttgaacaattgtttgcgctgctgtcggcggaggacagcagcgccatgcagcagcgttggcagcaggtgttgcagcaagggggcaacagtgaaaccttccgcttccatctggcgctgccgccgtcaaaccggattgcggtcagcgaaaaccgtttgctcggcctgcgcgggcctgctggcgtggtgattgtcggctactggagcgaagagccgcacagcaaagtctctattcactcaccgcagggggcgtaa

SEQ ID NO: 442112 - DNA, 1284 bp, Serratia marcescens
atgttacagcttgccttgttgctatccggtgctgatttcgtaagaaggaatgccccgctgctggcggtaatcgggctgttgtggggcggactgggcgtctccatatttattgacggtttgcagggcattcgctatttccccctgcatatctttggcattctgctgctgattgagagcctggcgacgctgatgctggcccctggcggcgtcggtgcgcaaaaggcggtgctctattttaaaggcggcattttttgttttgttgcgctgctgattttatccgggcgtaacagcagtaatctgttactggcggtcatttttggttttgccttctttattaccgggctgtttgtgatggcctcggcctgggtagtgcgctatcacggctgggggcgggcgtttgccgccggcgttgcgcaactgctgttcgcgctgtttcttttcttcccgtacccgacgcaccatcatggcaccgtttcgcagtttcttggcgcgattatgatggccggtggcctgcagtgcctgcggctggcctggcgtgcattccgcctgcgcgacggcgcggcggtgtttaatttgctggcgccgggcgggctgctgccggaaacggcagcgccgccgcaggaaccagatccgttgccctatgacggctcgctggtggtgcatatctggacgccggaaggctcggcagccagtaaaccgatccgccggccggtgtttaaccgctatatcgctgcggttgacgccaacggcgtgatttctaccggccatgcggcgctggaaatgccgccggaactgtatatcagcctctatccggcggtggatatcgaccgctcgccgtcggaatttttcaacaccctgaaggcaattcaggagaacaacgtcgccgggcagtaccagcagagctacgccagcgagtcggcggcgtggtgtgagtccgaccgcaagattgtcttccacgactttaatcccgaagggctgcggcgctactgggccagctatcgccaggcggaggtgtacaacctgacctggcgcaactgttccagcagcgtggcctacgggctggaggcggcgttggacggcgtttttgcccgcggcggctggctgacgtttttacgcctgttttttattcccgaactgtggattgccgcccagctgcgcaagcgcgccaccaccatggcctggacgcccggcttggcgctggattatgcccgggcgctgcatgccattgtgcatccggcgcgcctgtcatggcgacgccggcggcgtcaggatgacgcttcctga

SEQ ID NO: 442113 - DNA, 756 bp, Serratia marcescens
atgcttcgcccggtggaaaacggtgcgccctggctggcggaatacgcccggctggccggcgtggtctggctggataatgaccgctttcagattcgcaacgtacgcaattttcgctaccgcagcgttgctgaaccgctgccggcgtgggacgatcgcagctttcgcctgagtgaactgaacgccaccgatctggtgctttcttactggggcggcaacgccattgcccacgtatttctcagttttggctttagtaacggggagtggctggcgatctcgattgagacccgtcgcagggaggatcagccgtggtcggccatggggggattttggcgcaactacccggtgatctatgtcgtggccgacgagcgcgatctgatcggcgtgcgcagcgatgtgcgccacgaacgggtctggctgtatggattaacgctgacggccgagcaacgtcggctgctgctgcgtgattacctgctgcgtattgagcaggtgaatgcacagccggagtggtatcacacactgtgcaataactgcaccaccaatattctgcgtcacggccgggcggtatcgccggcggtcaagtatgactggcggctgctgctcagcggctttgccgaccgttactgttaccgcatggggctgctggacagccggctgccgtttgccgatctaaggcgtcgcagccggttgcagcgtccgcccggcgcgctgattgacggcgagttttcccgggcgatccgccgcgggcgctcaacgtga

SEQ ID NO: 442114 - DNA, 1131 bp, Serratia marcescens
atgcaacaggcgcaccgtaacattctgtccgtcattttttccgtgtcggtcttcagcctgacctacgggctcagcgcaccgcttatcgcgctgcagctggcggataacgcctatggcgagaccactatcgggcttaacgccgccatgcacgcccttggggtattcgccgtcgccccgttcctgccgcggctgttccgccgcttcagcccgctggcgctgatgtgcgcctcgctcagcgccatcgcgctgctgtttctgctgtttccctggctgccgctgccggcatggtttgtgttgcgcttcgggctgggcatatttaccgaaatcattatggtgctgaccgaaacctggctgaatgacgccaccgtcgagcaggccagagggaaaaccatggcgctgtataccgccgggatgtcgctggggttcgcttccggtccgctgatcctgacgatgatgggcagcgacagcgccgggccgtttgtggttggcgcgctgatcgccctggccgccgtgccattgatcgccagagccggtatggtgcggcagccaggcgaggagctgacgccgatcgggctgcggcagagcctgcagctggccctgctggcgatcgtcgccaccgcgctcaacgccgcgattgaagtggcgggaatgaattttctgtcactgtacgccatcagcctggggtggagtgaatcacgggcgacgctgctgatctcggtgctgatgtttggcgccatcgtactgcagctgccgctgggctggatggcggacaaggtggatcgccgccgcctgatgacgctgctggcggcaatttcagccctcggcgcgctggtgtggccactgctgctgaccacgccgctgctggcctactgcctgctgtttgtctggggcggggtctttgtcggcatctataccgtcgccatcacctgggtaggttcacggtttcgcggcgcgcagctggcgggcatctatgccgccatgtcggtcgcctggggcgccggcgccctgctcggcccgctgctgggaggcgcagcgatggaagccgctacccatggtttgccgtatatgaccgcgctgctgtgcgcgctgtttaccgtgctgtcgctcagccgccggacggcatcacgttga

SEQ ID NO: 442115 - DNA, 429 bp, Serratia marcescens
atgagcagctaccagcatatcgccgtcgccacctcactgctggatgaggaacgcctgcttatcgacaaaggcatcgccctcgcctcggcgctcggggcgaagctgtcgctgatttatgtcgatgagcatcacgcctcttactattcggaactgggtcgcccggtggcaaacttctccgaaacccagtttgaggagaagatcagaacggagatgcagccgctgctgcaggccgcctcctatccgatcgcggaagttattatcagacgcggcgagctggcttatgagctgaaatacgccgccgcagaaaaaggcatcgatctgtttatcttcggccaccatcaggatctctggggcaacctgttctcttccgccagaaacgccattaataccctgcatacggatattctggtggttcccatcaggaaataa

SEQ ID NO: 442116 - DNA, 444 bp, Serratia marcescens
atgagctaccaacatatcgtgattgccgtcgaccttaacggcgacaaccggcaactgttagcaagaggtgcggcgctggccgacgcctgtgatgccaagctgtcattaattcacgtcgatattcaccacgcgccctactactcggcgttgggcctgcagacctaccactacagcggcgaggtgcccgccgaagtcaccgccagcaagcagctagccgccattgcccagcaatcgtcttatccgataccggattcgatcgtcgtgtcgggcgaacttctgccggaactgagaaaagaaatcgactcgcgcggtatcgatctgattattttcggccaccatcacgacgtgtggagcaacctgttctccactacgcggcaggcgattaatcatctcgacgtcgatgtcctcgttgtaccgttagtgaccaatcaggaggccttatga

SEQ ID NO: 442117 - DNA, 915 bp, Serratia marcescens
atgttgaatatgcagcgcctggagatatttgtggcggtggtggaagccggcagctttaccggcgcggcgcagacgctggggctgaccaaggcggtggtgagttttaatatcaagcagctggaggaaaagctgggcgtctccctgctcacccgcagcacccggaaagttgccgtcacggatgccggcgagcgtttttatctgcgctgtctgcagctgctgcaggatgcagaaaaaattctggacgatgtgcgcagcgaccatcgcggcctgcacggcatactgcgcatcaccaccacgccggaatatggcgccaacgtcgtggtgcccgcgctctcggcgtttgccgctctgcatccgcagctgcgcattcaacacgtctcctcgtcaaaaaacgacgatctgatcgccgggcgttttgacgtggcgatacgccttggccagctggcggactcgacgcaccatgcaaaactgttggagtggtttgatattttccctgtagcctcaacggattacttgacgacgcatcatgacgggacaatcgcggacctgcagcaattgcaaaacgcacgctggatcgcccatagccgtctggccacgccgctgagctggcaggtggtgacgccggccggcgacagcgtgctgttccgggccagcacccctgccacaatcatggcagacagcgcggcggcactgctggcgtttgcccgcagcggcgcgggtgtagcgttactgcccgcctggctggtgcgggaggacatcgccagcggcgccttaacccggctgctgctcgaccaccgttttcccagacagggcatctacgctctctatcccaatacccgccatgtctccgagaaggtgcgggcgtttatcgattttctgcaacgctgtattgacgctcccgatgcccccctttag

SEQ ID NO: 442118 - DNA, 1380 bp, Serratia marcescens
atgaattaccgggtgcgtgtcgccagcgtctatctgctgggattttttatcgatctggtcaacatgtttatcgccaacgttgcctatccggatatcggtcggcagcttgatgcgccggtcagtcagctggcgtgggtgagcaacggctatattctgggactgacgctggttattcccctgagcagctggctggcaaaacggatgggatcaaagcgcctgttgatgctctcgctgggggttttcattatcggcacctgcggcgtagccgccgccggcaatattggacagctgatagcctggcgcgtgctgcaggggctgggcggggggctgctgatcccggtcggccagaccatgacctacgccctgtaccgcagccatgagcgggccaggctctctgccgtcgtgatgctggtggcgctgatggcgccggcgctctctccggctatcggcggggcgctggtcgacaacgttagctggcgctgggtatttttggccagcctgcccctggcgttcgccgcattgattctcgccgcctgctggctgaagcccgacgccgaggccggcgcggccgaacggctggacttcagcggccttatctcgggttgcctggcgctgagcctgatcctgttagggctgaccaacatgggggagtctggccgtctgggcgtgggggcgatgctactgcttgccggtctggcgctgatgggcggttatgtgcgcgcttcattacgcaaaacgcagccgctgcttaacctgcgcctgatgcaggagccgatgctgcgaaccgcgatgctgatttatcagctgattcccggcatttttaccggcgtcagcctggttgcgatgctgtatctgcaaaatcagctgggtatgcacgccacgctggtgggggtgatgatgctcccgtgggcgatcgccgcgcttgccgctatctcccttacgggcaaaacgtttaatcagcttgggccgcgcccgctgtttatcatcggctgtctggtgcaggggagcggtatcggcttactgtcgctgattggcagcggcgatgacgtggtgctggcggcctccgcctacgcgttgatggggtttggcggcagtctgtgcagcagcaccgcgcagagttcggcgtttatacaggtagacgatactgaactggcggatgccagcgcgctgtggaacattaaccgccagctcagcttctgtttcggcgtcacgctaatcagcttattgcttaacgtattactcaatatgaccggtatgccgccagcgcgggcttaccacctatgttttgtcctggcggcggtcagcaccgtcatccccgttctgctctgcctgcggatcgccaatcgcagcgttattcttatgcttaatcaggagaaatga

SEQ ID NO: 442119 - DNA, 393 bp, Serratia marcescens
atgaaccgttattttcaggaagttttagatgcccatacgctgattcgccgctggcttggcgatggcgacagcccggtggccgtgtgtgacgatttattggcgcgtttcagtccggactattccatggtgacgccgggcggcgcactgcttgatttcccctcgctgactacatttttccgcgcccagtgcggcgcgcggccggggctggagattgaaattgacaacatgcagctgattgcagagagcgccgccggggcgaccgtgacctatcaggagcggcagcaactgccgggccaggaggcgacgctgcgcttttcgaccgtggtgtttgaattgggggcggataatcaggtggtatggcgtcatctgcatgaaaccatgcttcccctgtaa

SEQ ID NO: 442120 - DNA, 378 bp, Serratia marcescens
atgacccccatccccccactgagtaaagaagacatcgacgccgtgctggacagcgctgcgggcgttacgccgccgccggacgcccaatggcgatttgacgatgtacctcatgagcctctgctgcgccatattcaggccctgagccacagccggtttatctttgtctacgactggacgaatgagttttcccgcgggggcgatccgcgtttcacctgccagcgcacgctggcgcaggccgacctgacgctgctgcgcaaactaatgaccgcccatctccgcatggatcgcttctgcgaaaatcaccttgccagccttatcatctctggatactggcaggcctgtctggatcgcctgcaagaattgcgccgggcaatgtaa

SEQ ID NO: 442121 - DNA, 1092 bp, Serratia marcescens
atgattgacctgcaccaatgcaagaaacaacttgaagcctatgccgagcgctaccaacacttacgtccttttgtctcgcgagaattgcaacagaggatggagtatgactacaacacacctgtaggcccttcacctcgggctatgataggtaaccgtccagcatggtcagccagttatcagcaggcagtctcagacagccaggcgcttgataaggccaaaggcgcacttataggtctggctgtgggggatgccgttggtaccaccctggagtttttacctcgggataaaaaaaatattgatgatatggttggaggtggccccttcaatctcgcccctggcgaatggaccgatgacacctctatggcgctatgccttgctgaaagttatatcgagtcaggaaaattagacatcggtttattcagagaaaaattggtgcgctggtatcgttatggtgaaaacagctccaacggtcgctgtttcgacattggtaacaccactcggtatgctcttgagcaatatatacaacacggcaattcgtggtttggtaatacatccccggatacggctggtaacgctgctatcatacgtcacgcgcctgtagccattttctgcagaaattctttacataatacgtatctggaatcgaaaatgcagagcatggcaactcactgtgccgtcgagtcaatccacagctgccaatatctgggtttcatcctacactacctgctcaatggcgccagcaaagaggaagcattcgctcctcacgttatgcctttatcagtgcgtttattattaatcaatgccggtgagtataaagataaaacacgagatcagatccgttcaagcggctatgtcattgatactctcgaagccgccatgtgggccgtatggaatactgataatttccgtgatgctattttactggctgcaaatctcggtgatgatgcagacagcgtggcagcaaccgctgggcaactggccggggcgctttatggctattcgggtattcctgatgaatggcttgccaaactggctcaacgagaaagaatctcgcaattagccaagagcctatttgagttatcgccgaattga

SEQ ID NO: 442122 - DNA, 300 bp, Serratia marcescens
atggtgggcgagcacagtcccgaccagccgcagcgcagcacccagtatctgtacaaggaagacagctacgagccgctggcccgcgtcgatcgccacggcgacagcagcgaagtgtactggtaccacagcgaactgaacggcctgccggagcgcatgaccgacgcgcagggcaaggtcgtctggcacggccgcttctccgcctggggcgccaccgacgccgagagcggcaccctcgccacagcgcagaatctgcgctatcagggccagtatctggacagggacaaatcagccaacggctga

SEQ ID NO: 442123 - DNA, 594 bp, Serratia marcescens
atggtagataatgagagaataataaatttcccagttccagattggaataggatagtttctgataggtttgatagtatcataacttgcgtttgctatcagtatgacttcgatatcgatttttatgggccgtacggatttgattcacctgtagccaaagaaattatcaatgacttcatcaaaggcgcaagtttttatgacgccactgacaagcgtttatgcaaagccaatagcattaatagaaaaggattgtatatcttcccacaggatgggacgatagacaaagaaattgaaaattacgctataacctctaaaaaaaacgagctgagaaagaaaagaggtttagctgtaaatgatacatctgaaaagcctattttatttaacataacagatgaaagaaaaattcccgacagtgttatatcttacttaatttgtgaagatatcccattatttattgttaatcattacatgcctgaggcaggaagtagtattttgtttttcactgaaaaattagctgagaactttttaaaccatgcaaaaaaaagaggcattgtggtttatacggtggaaacaataaactcattaaaatcatggtag

SEQ ID NO: 442124 - DNA, 4596 bp, Serratia marcescens
atgtctgatttaaccgccgcgagtctcggcgacccgctggtgcacagctcgctgctggccgactttgtcagcggcctagttgagggcgccatctatgccggcatctacgccggcgccaccgcgctgatctcctccgggctcggcgcgccggtcggtttcgccctagtcgccggcgccatggtgtccggcattccggagaaaatcggcaccgccgccggcgcgctggtggatacgctgatcggcaccggcccgcccgacgcctttatcaccagcggctccgacaacgtccatatgaacggcaaaccggcggcccgcgccgccggcaccgtcgaccacgattttctcaacagtcccgacgttggcgctgaagaaggcccgggcctgatcgacagcgccctggcggtggccggcggcatcatctccagcgtgatgcatcccggcccgctgatcgacaagatcgccagcatcgacggcgaatcggtgaaaaactggctcggcgacgtctgggacgacatcacccagcccaccgtcgagagcgccagcccgtacgccaccccggccaacaaagacaccgtcgcctgcaccaagggccatatggcggagaacgtcaacttcctggccgaaggttcgaagaaggtgctgatcaacggccacccagccgcgcgcaacggcgaccgcagcacctgtgaagccaagatcgaggtggcggacaacccgcgcgtacgcattggcggcgacggcatcgtggtgcgcgatatccgcagcggtaaaaacgcgctggcctactttgccggcggcctgattggcggcctgggcaagcagggcctggcgctcggtcagtcgctgttccgccgcgtaatgccccgtctggcgctgaaggatgccggctgcgctctggccgccgtggccgccgccgatctggcgggcaacgccgccggcgctgccgtgggtacaacgctggtggccgccacccagaccggccacccggtgcatatccccaccggcgccaaaatcctcgccggcgaggaggagcttgacttcaccctccccgaccgcatcccgctttactggcagcgcctgtacaacagccgcaaccgcgccgccggcctgctcggcgtcggctggatgctgccgttcgaaacccgcctgctgcgcatgctggacgacagcggccagccgcagtttatcctgcgcgacgcctccggccgcgagaccggcctcggcaacgtcacccccggcgacgtcattcgctttaccgaagacggctttaccctctactgctcgctgcagggcgtgatgctgctgcagaccgccgagggcgaacaccagctgtacgagccggatcctgcccgcgtcggcgaatggcgcatcgagcgcatttatgaccgccacgagaactgccaccacttcgcctggaacagcgccggccagctggtcaccatctccagcgacaatcaggcgctggaggtcgagctcagctacgacgcgcgccacggccgtctgcttgcggtgcatcagcacgtcggacaggaaaaacgcctgctggtgcagtatgactacaacccgcaggggcagctgattgcggtgcgcgacgccgacgccatcgtcacccgccgttacggctgggatgacgccagcggcctgctggcctggcacagctacgccaccgatctgcgcgtcagctaccgctggcagcgcgcggcggacggcgaccactggcgcgtcagcgagtatcaggtgctggacgcgcagctgcagtgtctggagcactggctgctggaggcggacgaagccgcccgccgcgccagcgtcacctgcctgtccggcggcaccaccgaacaccgctgggacagcctgctgcgcattaccgactataccgacagctacggcgcccactggcgcttccgctgggccgccctgcgcgagaacctcagcgccgtcatcacccccgacgaccagcgctgggagctgggctatgacgagcgcggcaacctgatactggtgcgcgacccgctcggcaacaccacccagaccacctggcaccccgcctgggcgctgccgttaaaagaggtgctgcccgacggcgcctgctggcaatatcgctacaacccgttcggcgacgtggtggagatgaccgacccgctcggcaacgtcagccgctttacctggaacgaccagggcgacctgctgacccgcaccgacccgctcggcaatacccagcagttctggtggagcgccctcggccagctgacccgcgacgaagactgctccggccaccagagccgccgcgagtatgacgacgccggtaatctgctccgcacctgcgatgccgaaggcaacgccacccgctatcgctggagcgccgccggacgtctgcaggcgctggtgcgtcccgacggccgggaaacccgctacgactacgaccacgccggtctgccctgccgcgagaacatcgacgccttctccgaacaccgcgtcgagcgcaacgtgcgcggccagataacctgcgccgtcgacccggccggcatcgagacccgctatcagtacgaccgcttcggccgtcttaccgcgctggtcaaccccaacaacgagcgctggcagtttgactacgacgccggccaccgcctgctggcccagagcgactttgccggccgccgcaggcagtaccgttacaacccgcagggacaggtcagcgccataaccgagtacccgctggcgcaggacggcgacgcggcgcagccgctccacacccgcctgagctatgacgcgctgggccgcctgaccgccaaagagaccgccgacagccgcaccgaataccgctaccaggcgcgaacgctagaggtacggcgcaccccgctggcgctgtggcagcaggcgcaggcgcgcggcgagcagcccgactggccggagacgctgcgctttagccgcgacgccgccggcaacctgtgcgccgaagagaaccacagcggactctggcagcacagccatgacccgctcggcaacctgagcgccacccacatgcccgacggcagcaccctctcccagctgcgctacggcagcggccacctgctgcagaccgcactgcagaccgccggccagcggctcgatatcgccggctggcagcgcgacaagctgcaccgggaagtgacctgcaccctcggcgaagtcacccaggagacccgttacgacagcgtcggacgcatcaccctgcgccgcgccagcagcgaacgcagccacccgctggtgttcgaacgccgctaccagtgggaccgtcaggacctggtggtgcagcagaagctgattgagaacgacaacctcaccgacgggccgcagttccagcagcgccgcttcggctatgacgcccgcggacagctgacccacagtatcctgtcgcagcgtgaggaacgtttttactacgaccccgccggcaaccgcagcgacggcccggccaccaccgtctggcgtaacctgctgcagcgcctgaacggccaccgctggggttatgacggcttcggccgcctcagttggcgtcgcgacggcagcaccggcgtcgagcagcgttttcagtacgacgccgaacaccgcctgaccgccgtcaccttcgacggcgacagccgctaccagcgtgccgaataccgttacgacgcgctcgggcgccgtacccggaaaaccctctacccgcaccacggcgagccgcagactaccctgttccactggaacggcctgcagatggtcggcgagcacgaccccgaccagccgcagcgcagcacccagtacctgtaccgcgaggacagctacgagccgctggcccgcgtcgaccgtcacggcgacagcagcgaggtgtactggtaccacagcgagctcaacggcctgccggagcgcatgaccgacgtgcaggggaaagtcgtctggcacggccgcttctccgcctggggcgccaccgacagcgaaagcggcaccctcgccacacagcagaacctgcgctatcagggccagtacctggacagggaaaccgggcttcactacaatctgttccgctactacgatccgaactgcggcaggtttacccagtcagatccgattgggctggcgggtggggtgaatacctacgcgtataccccggatccgattagctgggtggatccgttggggttgataaagtgccacacacctcctaaaggcagaaaagttaatcgaacaatttacagatttgaagaaccagacagaataaatactacttggaccacacataaatggaatattatggcttctcatagatatactgatgaaggtttaggtggtgtatatggcgcaaactcacgtaaaaccgcgttatctgaggtgactcactggaatgttgacctatctcgtaggattttaataagtaaaaaagttcaattaaacaatgtgctagacttaactcgttctaacgtaagagataagttaggggtttccttaggcgatcttactagtaatgactatactattacacatcaaattggtcattgggcgaaaacacaaggttatgatggtatacttgcaccgtcagcaagaaatcctactggttctaatttaatatcatttttgggattttag

SEQ ID NO: 442125 - DNA, 438 bp, Serratia marcescens
atgacgcagcagacccgttacgccctgtccgaaggtaccctgacgctgccggaagcggcgcaggataccagcgtcaccatcctcaaactgccgcaggcgcgcgccacgctggtggtcacccgcgcctatgatgtcaaaccgggccaggaggaagcctacctgcaacagcagttggtcaaggtgaagcgtgatatgaagaaattcagcgcccgcgccgtggaggacagcagcttcggcccgctgccggcacgggcggtcagcgtgcgttttgaaaaccagggcatcgccatcgagcagcaactgctggtcgtacgcctggaaagccacctgatggtgctgaccttcagcaccagcgccgccttcgccgccgaggcgcaggccacctgggaacagatccgccagggatttattccggccggcaacgcagcggaggcgtaa

SEQ ID NO: 442126 - DNA, 1938 bp, Serratia marcescens
atgttagaccgcatcacagcttatacgccgcttggccctgaacaactgctgtttcgttcgctggaaggcaccgaagccctgtccacgccgtttgatttccgcatcgaactgctgagcaccgacgcacgtctggaccgcaaggcgctgctcggccagccgctgacgctggaaatcccgatccccggcctgctgcgcccgccccgctatctcaacggcaagatcaccgccatcgccgtcagcagcgaagagatcagcggcacccgctattcggtgtacgccctgcgcgtacagcccgacctgtggccgatgctcaaggatcgcaacttccgcatcttccaggaacagaccgttccggacatcgtcaaagcgctgctggccgaacagaacattcagctggaagaccagctgaccggcgagtatcgccaatggggctactgcgtgcagtacagtgaatccacctttaacttcatcagccgcctgatggagctggaaggcatttactactacttcaagcacgagcaggacaaacacaccatggtgctggccgataacccgcaccatcaccagccgttccccggctatgaaaccattccgtaccacgtcacgccgtccggcggcgtcaccagtgaagaaggcatcagccagtggacgctggccgatcaggtgaccccgggcatctacagcgtggacgattacgacttccgcaagcccaacgcctggctgttccaggcgcggcagaacccggcttcgccggcccccggccagattgacgtctacgactggcccggccgctataccgagcatcagcagggcgagttctacgcgcgcgtgcgtcaggaatcctggcaggccgagcatcagcaggtgaccggcaccgccaccgcgctgggcatcgcccccggcaacacctttacgctgttcaaagcgccttatatgtccgataacggcgaatacctgacgctctccgcccgctataccctgcgcgaaaacagctacgccagcggcgatacgcagggcagcctgcaccgtatcgacttcaccgtcatcccggccgatgtgcagttccgcccggcgcagagcgcgtcgtggccgaaaacccacggcccgcagaccgcccgcgtggtcggcccgcagggcgagtcgatctggaccgacaaatacggccgcatcaaggtgaagttccactgggaccggttggccaaaggcgacgacaccagctcctgctgggtgcgcgtctccagcgcctgggccggccagggcttcggcggcgtgcagatcccgcgcgtcaacgacgaggtggtgatcgactttatcaacggtgacccggaccggccaatcgtcatcggccgcgtgtacaacgaagccagcatgccgccgtgggcgctgccggccgccgccacccagatgggctttatgagccgctccaaagacggcacgccggacaacgccaacgccctgcgctttgaggacaaggccggctccgagcaggtgtggatccaggccgaacgcaatatggataccaacgtcaagaatgacgagagccactccgtcggcggccaccacaactttatcgtcactaaaaaccatgaaagccaggttaacggcgaataccgccagtcgacccagtacaaccgcagtgaactggtgggcggcgactatgcgatgaagacgcagcagcagatcatgctgagctccggcgaaggcatcacgctggtaagcggcgacagcaagctgacgctcaatccgaacggcaccgtctcgattcagtgcacccagtttgaaatcaacgccagcgcgcagggcgaaatcaacaccggcggcacgctggatctcaacatcaaaaaaccggccaaaggtaaaacgccgacgccaaccccggcggagatcacgcaggaagtcgccaaggtgttcaacagctcttcggagggcaacgcatga

SEQ ID NO: 442127 - DNA, 2709 bp, Serratia marcescens
atgtcagaaatcagccgctcggtactctttggcaaactggatagcctgcttttcacctccctggaaagcgccacggctttttgtaagctgcgtggcaacccttatgttgaactggcgcactggctgcatcagctgatgcaggcgcaggatggcgatctgcagcagattatccgccacttcgccctcgacgaagaccaactgacgcgcgatatcgtcgacgctctggatcgcctgccgcgcggcgccagcgccatctccgatctgtccgaacatatcgacagcgcggtcgagcgcgcctgggtctacggctcgctgaagttcggcgcgcacgccatccgtggcggccatttactgctggggatcctgaaaacctacagcctgcgccatctgctgaaagccatttccggccagttcgaacgcatcaacgccgatctgctgatggaccagtttgccgccattgtcggcaattcgtcggaaaacgctcaggcgcaaagcgccgccggcgaaccggccgccgtgtccgtaccgggccagtccggcggcagcgtgctggcgcaatatgcgcaggatatgacggcgcgcgcacgcaacggcgaaatcgatccggtcagcggccgtgacgaagagatccgccagatcgtcgatatcctgatgcgccgccggcagaacaacccgctgctgaccggcgaggccggcgtcggtaaaaccgccgtggtggaaggcctggcgctgcgcatcgtcgccggcgacgtaccgccgcagctgcgcgacgtgcagctgtacctgctggatatcggcatgctgcaagccggcgccggcatgaagggcgagttcgaaaaacgcctgcagacggtgattgacgaagtccagtccagcccgacgccgattattctgtttatcgatgaaattcatacgctggtcggcgccggcggcgcgcagggcaccggcgacgccgccaacctgctgaagccggcgctggcgcgcggtcagctgcgcaccatcggcgcgaccacctgggcggaatacaaaaaatacatcgagaaggacccggcgctgacccgccgcttccaggtggtgcaggtgcacgagccagacgaagagaaagcgctgctgatgctgcgcagcaccgtcagcccgctggaacagcaccaccgcgtgctgctgctcgacgaagcggtcgacgccgcggtgcgtctctcccaccgctatatcccggcgcgtcagctgccggataaggccgtggcgctgctggataccgcctgcgcccgcgtcgcggtcagccagcacgccgagccggctcaggtggaagattgccgccaccgcatcgacgcgctgcagattgaactggatatcgcccgccgcgaaaccaaggtcggcatcggcgatccgcagcgcccggcggcgatcgaagcgcagctgagcgagctgcagcagcagctgacgcaactgaccgagcgctggcaggaagaactggggctgattgcgcaaatcatcgatctgcgcgcccgactgcatcagcaggaagcggaaccggacgacgacgccacaaccgacagcgacgcggaaacgccggcggaaaccgccgaggcggctgaagccgcagaaccggcgccgtcggcagatgaactgcgcgcccaactggccgtgctgcaacagcagctggctacgctgcagggcgaagcgccgctgatcttcgccgcggtggacgccaatatcgtcgccgccgtggtcgccgactggaccggcatcccgctgggccgcatggtgaaaaacgaaatcgaagcggtgctgcagctgtccgacaccctgaacgagcgggtaatcggtcagcgccacgcgctggacctgatcgcccgccgcgtacgcacctcgcgcgcccggctggacgacccgaacaaaccggtcggcgtcttcctgctggccggcccgtccggcgtcggcaagaccgaaaccgcgctggcgctggcggaaacgctgtacggcggcgagcagaacgttatcaccatcaatatgagcgagttccaggaatcgcacaccgtatcgacgctgaaaggcgcgcctccgggctacgtcggctacggcgaaggcggcgtgctgaccgaagcggtgcgccgccgtccttacagcgtggtgctgctggacgaaattgaaaaagcgcacccggacgtgcacgaaatcttcttccaggtgttcgataaaggctggatggaggacggcgagggccgccatatcgatttccgcaacaccattattattctgacctccaacgtcggcaccgacttaatcgccggcctgtgcagcgaccctgacctgatgccggagccggaagcgctgagcggcgcgctgcgtcagccgctgctggaggtgttcccggcggcgctgctcggccgtctgctggtggtgccttactacccgctgaccgacgccacgctgggcaacatcgtgcgtctgcaactgggccgcgtccaacgccggatggcagaaaaccacgacattaccaccaccttcgacgacgcggtgatcgaacagatcgtcagccgctgcaccgaggtggaatccggcgggcgtatggtcgacgccatcctgaccaataccctgctgccgcagatcagccataccctgctgtcggccagcgccaacgaccagcgctaccgccagctgcatatcgcgctgcaaaacaacgagtttatttgtcaatttcaggcttaa

SEQ ID NO: 442128 - DNA, 1071 bp, Serratia marcescens
atgagtgaaagcgtaaccgaactgccggccggcgacgcgccgcagatcaacgcgctgcaccgcctgccggacgacttctggctgcggctgcgcgccgcgccttaccgttacgatctgttccagctgctgcgccggctggacgctcagggcggccaggcttatctgctggggcgcgccccgctgccgcgccatgaaatgctgcgtctggggcaggagccgtcgctctcttttgcaccgtcgacgctggccaaggtcacgccgcgcagcggcagcccgctgcatgacgtgtcgatcctcagcttcggcctgttcggccccaacggtccgctgccgctgcacctgaccgaatacgcgcgcgaacggatttaccaccatcaggacaccaccctgacggccttcgccgacctgtttcatcaccgcctgacgctgctgttttaccgcgcctgggccgatgcgcagccgacggtgtcgctcgaccggcccgacaacggcagctttaatgactacctgtcgagcctgatcggcaacggccagccggcgcagcgccagcgcgacagtatcaacgcgcacgccaagcattttatggccggtcatctgattcgccacagccgcgacccggaaggcctgagcaaaattttacgcggctatttccaggtgccggtgcgcatcgtggagaacgtgccgcactggctgcgcgtcgacccgcgagaacaggcgcggcttaaggccgggcgcggcgcaccgcggctgggcgagtcggcgtttctcggcgtggcggtgcgcgacgtgcagcacaagttccgcatcgagctaggcccgatgtcgcagcaggaatacgaccgtttcctgcccggcgccgaactatgcgaacagctgcgcgactgggtgcgccagtatctgggcatcgaatttgtctgggaagtccggctgattctggcaaaagaacagctgatcggcacccagctcggcggcgctcagcggctggggctcagcagctggatggccgccgaacggcgtcagcacgacgccggcgatctgactttcagcccggaaccgctggaagatatttag

SEQ ID NO: 442129 - DNA, 822 bp, Serratia marcescens
gtgaaatcattaaccgacgtattgcaaggcggctccgtcagcgcagccacccaggcggtggaagccgatatcaaagcgcgcccggccgacgccgatctgcgcgccgcgctggtgcagctgctgtgcctgagcggcaactggcagcgcgccaaagcgcagctgaaatcctggcaggcgctgaaaccgatggcgcagccgaccaccctgctgctgttgcagtcggtcgaggccgaactgcagcgccaggcggtgtttgccggccaggccgcaccggcgctgctgaagcaggatcagccttggatcggacagatggtcaaggccctgcagctggacgtcgccggcgacgccgcacaggcgcaggcgctgcgcgaccaggcgctggaagacgcgccggccagcggcggcagcctgctgctggcggacggcgatgatgaaaaaaccgtcgccttcgactggctgaccgacggcgacggccgcctcggcccggtgtgtgaattggcgctcaacggcgtgtactactggctgccgttctccgccatcgccgaaatccagttccaggcgccgcaaagcgccatcgatctggtctggagccacgcgctggtgcgcctgaccgacggccgcgagcaggtatgtcagctgccggcgcgctatccgctggcggcagacagcgacgacgccctgctgctcggcaagcgcaccgaatggcagccgctcggcgacagcccgcactatctcggttacggcctgaaaacctggctgagcgacagcgacgagtttccgctgcacagcctgcgccagttgagcttcgatcaggacgcctga

SEQ ID NO: 442130 - DNA, 1002 bp, Serratia marcescens
atgaaatattggatgcccggtgtgatcgccctgatggcggtacccgccgttcacgcggcaaattaccggctggtgtattctcccagccagaaactcgaagtctttatcgacaacgtcaaaaacaacaaaccggaaagctggtgtgcgccaagcatcccgctgcgtattgtttccgctaacgcaaaggacgccgccatcctggacggcttcctgccgcgggtaggcagcctgctggcgaaacaatgccccaaagtcagccagttgccgtggacgctgaccgataaggccggcaacacgctggcagccggcgatgcgctgaaaaaccagcgctggaagccgcaggttaaaacggcgccgcaggcgcagccggaaacaacgccggaagcacagcaggcaaccgccatgccgccggccgcggtcgccgtcagttcgccgcaggccgatgccgcgccgacgcaggtgttcgagctgccgaaaggctgcaagttccgcacttactggcaaggcaacgacgccggcagcgcgatgttcgtacctgccggcggtaacctcacctgccaaagcgacggctggctgagcggcagcgataaagtccagctgcagagcaatggcaaaagcagctcgccgaccatcagcttcctgcagggctacccgctgatgaatattgacgtggccggccagacgctgaccgtggtcagcgccaaccgccagcgcatggtgctggccaatccgcaggtggccggcagctatttggtgctgccgtttgacgccgctcagcacgcctggttcttcagcggcacgctgattgccgagttcccccgccagcaggccgccgatgccgatcgggtgaaacagcgcgtcgccaaagtgcgtgaaacctggctgccgctgctgagcgcctatcgcgagccgctcagcgtacggctggtggatcagctggccgccgaccgggttgacccggccagcggcagttatctgaccgtccagaacgccgcccactga

SEQ ID NO: 442131 - DNA, 330 bp, Serratia marcescens
atgagtaacgacgtcactctgtccacctattcatatggatttacgataacctatttcgttttatcattcctaatattacttggccttttcttcctcagaaaaatcgtaaaaaagaaacacagctatccactgtacattatggcaattctcataaatgtatgttttagcactatacaagggcttatttttagacatggtgattcttttattaatcacttttattccataaacttcattgaatacgatgttgtttggaaaagcagtcttgcctttatgcttgcatacttagtattaattccaggcaataactactataaaaaacggcattaa

SEQ ID NO: 442132 - DNA, 762 bp, Serratia marcescens
atgcaatataaaacaaaaaaagatgttgaagatgttatcaaagagctaagaaaaagagcgtttattttttccttgcagtatttatataccaatgagtcaaaagctgatttctctcttgaaattgaacgactcattcagcatgcggagcaagaaagccgtttacattgcgtatcatactatggtgcctatagtatgataaatgatgagttgagaaatttagaacaacaagctattgatcttaatttagctaaagctaaattctttttggctatagaaaaagagagacgaaaacaagactcggtcttagcattaaagcaagttggatttgtcagtggaggttctcaattttttgcaggtgttggtgcttgcgctgggactctagggttagggtgcggaaccttaggagcctcgctaatgctacaaggtgcgaataatatttacgagaatggctactacctactatttcgtgaggagaaagtaggtttagtcaaagatgcttatcgctatgccgcaagcaagttaggttataattcgcaagtcgccgatactgtatatggcagtgttgacctagctctatccggttatggaatggttcgtcaaatagtcagaccagatgcccgtcgtctatttaggtatatacaaagcgattatattcgtggttggaggcaattaggtgcgatcccattgggagcagagatcgtcggtgatgctattacaggctatacaatttatgatattaataaaggcggcaagcaacaatga

SEQ ID NO: 442133 - DNA, 822 bp, Serratia marcescens
gtgatctcgccaagaacacgaaaaataaaaagagcattgtcacttagcctagtttgctgcctgataccctatgctaccaatgcagcagataaaaatgctcgcgaagctatgaccaactcgattgaaggtcaatggcaagttaaccaggcaaatatcaataatgatgccacgcgcacacttagctatcagtttaacgatccgcgactggtcggtagagtcattactattagcaatagtaaaatccaaacaaacttgccagatggcagtaactgtctcaccccaaaacttgctgaaaagacaatcagccttgaccaatatattaccgacacgatggacggcgaacacaccatcacgactaaaagctatgaattaaacgaggatggtaacaagcatgttttggcccaagaaataacttgtgcctcaggctcattcggccctgccgacaacgccatgaatgcccgcattgccgtactcaacgcaaataaattactggtcaattggtatgatggttcgttattgcagcttaacaggttgcctgcaaaccctaaacccgttgcctcattcgagtgctctaatgctaaaagcaacgttgagaaagcgatatgttcggattttaatttagccgcttatgataaaagtgtcgctcgtgcctggttgctggctaaaaaacaatccaacaatatcggtgataaaaacttatccacatcattgatgaaatcacaaaaatcatggttacagcaaagagataagtgcatgaatgacaaaaagtgtctgactgacgcaatgtcgactcgtattgactcactttcatcatattggtaa

SEQ ID NO: 442134 - DNA, 435 bp, Serratia marcescens
atgaaaaaaacaatggcatttgcattatttgtatttgcaggttacgccacggctcaaaacagcatggctgattggccccctcaggcagcgtaccgtagttatttacagaactataaagatattgccctgacgtactgtatctctgttgcctataaaaaatcacctgaagccagtaaagatgccattacctcatccaacggtattgatgcatggtcagactacatcatccgtgatgaagcatctcctgttattgcattaacaaaagagtacctggcaaagacatatcacgctaaagatggcaagagtccgctaaacctcatgaaatgcatggatatgtaccacagcaaaaagttggatgcactggccaaagagtatgtggaaagaccttccgccaactgggtacaagacaaccctgagagagtaagccataaatag

SEQ ID NO: 442135 - DNA, 504 bp, Serratia marcescens
atgattatgaataatttaaggcccacgttttctgccgcttggaatgcagcagcaaagatatacaatcctaaaaaaccgacagaacatgtcgcaaagatcattggcggtagggtagctgccaatatttatcctaacggaagatgggaaaatacttgtgctgttcgcataagttatatacttaataagactggctttccagtcccatttattaaagataaaacggtttcgggcgcagatcgtcaatggtacttttatcgcgttaaagatctcattgcatacttgacacgtacatggggttcagccgatctctccgtcgccttcccaccgccaaacagcggtgagttaactggaaagaagggtattgttcttttcgatatttcaggctggaacgatgccaacggccacgccacattatggaatggcaatggtagttgctatgattactgctactttaacgaaccggcgcacgttatacgactaactatgcaaaattctggatgctga

SEQ ID NO: 442136 - DNA, 540 bp, Serratia marcescens
atggcaaactcgaaatcccgcagcggacagaagttcatcgcccgcaaccgcgcgccacgcgtccagattgaatatgatgtcgaaatctacggcgcagaacgcaaaattcagctgccgtttgtaatgggtgtaatggcggatttggtcggtaaaccggtagacccgcagccgagcgtcgacgaacgcaagttcctcgatatcgatatcgacaacttcgacgaacgcatgaagtcgttgaagccgcgcgtggcctatcaggtagacaataccctgaccggtgaagggaagctgaacatcgatctgtcctttgaaagcatggacgacttctcccctgccgccatcgcccgcaaggttgattcgctgggcggcctgctggaagcacgcacccaactttccaacctgctttcctacatggacggtaaaaacggcgccgaagagctgatctcccagatcctgcaaaacccggagctgttgaaatctctgactaacgcgccgaaaccggcggagaaaaaagacgacaataacgagcgtgaggattaa

SEQ ID NO: 442137 - DNA, 1026 bp, Serratia marcescens
atggctatcgaaaccctgctgaccccgattaacgcggattctccctgcggcgacaatctggaatatgacgctgactttttagcgatggagcaggcctgtgccggcaaggctgagcagcagttcggcgacaccattattccggctgaagcgccggattgggtgcaggtggagcgcctggcgaccgcactgctggaacgcaccaaggatctgcgggtaatgctgccgctgacgcgcgcctggacacagctgcgcggcctgcaaggctatgccgacggcctgacgctgattcatcaggcgctggatcgctactgggaaccgttgctgccgcagctggaatttgacggcgaagccgacccgctgttccgcattaacgtgctggcggatctcggcgacaagtccgccctggccggctgtgtacgatccgcctggctgctgaaaagcgccgccggcgagattatgctgcgcgacgcctgctcgctgctggacggcagcaagcaggagtgccctaccttccccggcggccgcgcccgcctgcaggatgagctgggccagccggaacagccggcggtggagctggtgcgcaccattcttcagcagctagccgccattcgcgacatcgtgacgcgccacttgggcgaaagcgcgctgccggaaatgcacaccctgctgaaaatgttcaacgtgattgcgcaggccggcggcaccacggcgccggacgtcgcaacgccggaagcacacgacgagcagcaacccgagcagcccgccagcgcccaaccggccgcagcggcggcgctcaactggcgcagcgcgcagattcagtcgcgcgacgatgcccaactgatgctggaaaaagtaaaaagctattttcagctgaatgaaccgagccatccggcgccgctgatgattgaccgcgtgcagcgcctgatcgctctggactttatgcaaatcgtccgcgacctggcgcccgatggtcttacccaactggaaaccattcttgggcgcactgataacgacgacaaccactga

SEQ ID NO: 442138 - DNA, 720 bp, Serratia marcescens
atgagcaacgaccaaagcccgacagcgagcatcggctggtatggaaagattcccaccgccggtgattttttacagcgccgcctgcccgacttagtggtcagcaactgggcccagtggtttcacaacggtttagtcaaccagaaacaaaacttgcccgataacgccagcaacccgttcagcaatgcgccggtgtggaattttgtgattcccgcaacgctcggcagccaatatatccagatgggctgcctgctgccggcgcgcgaccgcgtggggcgccactacccgatctgcgccatccgtctgtttacgccggaagagtggcatatccagcagttgaatatggcggcggaatggtatcggcaactgggccacaccctgctcaacggcgtgcgcaacagtttttccgccgagcagatcgaccagagcctgctgaacataccggcgctgccgacaccgccggaagagagcgagtccgaaatcctgtcgattatcggctttcgccatccggatctgccggggcttggctggcaacaggccgctgactgtttcgacccggcgcagtacaccagcttttggtggaccaatcaggccgatggtcatccgctttatacccatgtacacagcggtaacctgacggtgcagctgttctcgctgctgtttgagcctaacggctgggcgcgtcccggccgcggcgggcaatatccgcaaatgtttgattaa

SEQ ID NO: 442139 - DNA, 3648 bp, Serratia marcescens
atgcttagtacgttattctccatcatcaccagccgcctgttatggggttttgccggcatcagcgccatggcgttcatcatctggatgatcggcccgctggtggccatcggcgattaccgtccgctggagccggaactgaaccgcatcattactatcgcggtgatctatctgatttgggtgctgtgccgcattgtaccgcgcatctacagcgcctggttcaaccgtaagctgctcagcaacctgcgcgccagtgagcaggcgccggccgacgacgccgacgccaaggcggagccgcagcaggatcaactgctggcgcagcgctttgacgaagccgcccaactgctgaaaaaagcgcgttttgcccccggccagggggataaacaccgctggatgacccgtttcagccgccagtatctgtatcagttgccctggtatgtgattatcggcgcgccgggcgcagggaaaaccaccgcgctggtgaactccggcctgcacttcccgctggcggatcgcttcggcaaatcggcactgcgcggcgtcggcggcacccgcaactgcgactggtggttcaccaacgatgccgtgctgctggacaccgccggccgttacaccactcaggaaagccagcgggaagaagacgccggcgaatggaaaagcttcgtcaacctgctgaagaaataccgcacccgccagccgatcaacggcgtgatggtgaccatcagcgtcgccgacctgatgacggaaagcgccgaagcacgcaatgcgcaggccagcgccctgcgcaaacggctgattgaactgcacgaacagctgggcatccacttcccggtgtatgtgatggtgaccaaaaccgacctgctcaacggttttatggcctacttcagcggctttgacaaagcgcagcgcgaccagatctggggattcaccttcccgtatgagcgctcgcgccagcccgacttcaacctcagcggcgaatttgagcagcagtatacgctgctgcaacagcgtctcgacgcggcactgccggatacgctgctggtggaacacgatgcccgccagcgctcggaaagttacctgttcccgcaggaattcgccgcactgcgaccgttgctggcgcagtacctggacgtggtgttcgccacctccagctttgaaacgcgtttcacgccgcgcggtatttactttaccagcggcacccaggaaggcctgccgttcgaccgggtgatgggcgaactgaaccgctatctgcaactgccgtcagccggcaacggccagcgcaacggcgcgcagacctcctgggacagcgtcaacgacgatgcaccaatcccggcggccaaagggcaaagcttcttcctgaaagagacgctggaaacggtgatcttccaggagtccgggctggccggcagcaaccgctggtgggagtaccgcaaccgtgcgctgcactgggccggttacatcgctctggcggtggtgctggcgattctggggattttctggttcaccagctacggcaataacaaggcctatctggccgaagtctccgccaaggcgccgtcggtggagcgtcagggccaggggctgacccagctgaactccggcgatatgttcgccctgctgccgttcctgaacagcgtgctgcatctgccggacagccagaacttttcgctggacgatccgccgttcacctaccgcatggggctgtatcgcggcgatcaggtcagcgacgccagcaacgcgctgtatcagaaaacgctgcaagagctgctgctgccgcaggtggcgcaacagatcgccactaccctgcgcaacgataaccacagcgacgccgatttcagctacgaagcgctgaaggcttaccagatgctgtatctgccgaagcagtacgacggcaaattcctgcgcgcctgggtaatgctcaacctgcagcgcaatctgccgcagggcagcacccaaaaacagctgcagcagttggaatggcacctgagccagctgctcgacggccagattcaggcttcgccttacgccaaggatgaggcgctggttagtcaggcgcaggccgccatcaaccgcgctccgctgtcgcagcgcgtgtatggtcgtctgaagcgtctgttgctgaatcagaccgagattaaaccggttcgtctggtggatctcgccggcccgcaaaccgagctggcgttctcgcgcaaaagcggcaagccaatcaccgacggcatccccggcctgtttacgccacagggatattggaaagcgttcgacagcaatatcgacaaagtgaccgatacgctgcgccaagaagatgtctgggtgctgaacacccagacgccggagcagaaaagcgccgatctgacgaaaaccgtacgtcagctctatatgcaggattttatcgccgtctgggatgaactgctgggcgatattcagctggcccacatcggcaacctgacgcaacgcatcagcagcgcacgcctgctgtccggcaacccgtcgccgatgcgcaacctgctggtcaacgtcggtaaaaacgtcacgctgcgggaagagaaagagggtgaggaagcacgctcgctggcgaataaagccggcgaatccatcaaccagagcgccaaccgtacgctggaagccctgttcaccaaccgcccgagcaacgccgacggcgacgtctccgcccagccggaacaggtggtgatggcgcacttcgcaccgctgctggaactggcccagggccagggcgaaggcagcaaagcgattatgtttgacggcgttctgaaacaggtcgacgagctgtacagctatctgacggcagttcagggcgcagccaacagcggcatgtcggcgccgccgagcgacgtgatcccacgcctgcaggcggaatccggccgtttgccgacgccgtttaaacagatgctgttatcgctggcgatcggtgccagcagcgatacccaacgcaaggagatggagaacgtaaaaaagcgcatcagctttgaggtcggcagcttctgccgacaggcgatagctggccgctatcccctctcctcgcgttcaaaacgtgacgtcacgccggatgacctggcgcgcatgttcgcgcccaacagcgggctgatggacagcttcttccgtgaaaacctgcagggcaaagtggacacgacccgcgccaactggcgtttcactccgggcgtcgatggcaaaacgctgccgggcggcgaaggtatcttgcgttcgttccagcaggcgcagcgtattcgcgacgccttctttgccaacggcaccgctacgccgtcgtaccgcgtgacggtgcgtccggtgcggatggataacgatattctcaatatgacgctggatattgacgggcagctgttcaaatacagccatggtccgctggtgccgctggtggtcagttggccgggcacccgtaataccaatcaggtgcacctgcagctggcgctggcgaacggcaccaccgccagcctgctgaccagcggcccctgggcgctgaatcgcatggtcgatatggcgagcctgtcggccggcggcagcagcctgagccgtcaggcgacgtttaacctcgacggccaccgcgtcacgctggaattcaccgccaacagtatccgcaatccgttccagctgccggcattctcttgcccgtag

SEQ ID NO: 442140 - DNA, 528 bp, Serratia marcescens
atgaaatcatcattcgccccgcgtgcgtggggttttagcctgctgatgctgggcgcgctgctgctcagcggctgtatgtcttcggcaaaaagcgtgccgtcgcgctacagcctgacgtttgacgccgtcccgcaggtcaatgccgccgccggccagcgccccgcgccgatcaaggtgcgcgtgctgctgctgcgttctgacgcggaatttatggatgccgacttcttcagcctgcaaaacgacgccaaaagcgtactgggcaacagcctgctggacagcgaccagtttttcctgacgcctggccaaaatggtaaaaaactgaacggccaaagcactctggaaacgcgctatatcggcgtaatcgccgaataccagaatctggacggcaaagcctggcgcatttcactgccgctgcccgccccgaccgaaaccaatttctataaggtctggcaattctcgccggatgagctgcaagcgcacgttgtggccgatgttaacggtctgcgcatcgtcaaagacgaagactga

SEQ ID NO: 442141 - DNA, 486 bp, Serratia marcescens
atgacactgctttccgccctgatccttgccggttgttcgacgccgccgccgccgccggtcatcagttcagataccctggtcaccagcgaaatcaacggcgtgaagctgcagcaccgtatggcgatcgccgcaccgaaacagttcaaaccgattaatgaagagtaccgcagcctgtacgccgccagcgtcatgacccagccgggttacggtggtgccaccgttacgcgcctcgacaacgccgcttccttctacgcgctcggcgaagtggaaaacgactggctggccatctccgccgtacgcggcggcgacctgatgggttatatccagaacaacgccggcgtgcccgaaaacaaatacaaatcgaccttgcgaaaagaccgaccgcgccgtgcacgcgccgccgccaaaccgcaaaactgcgttcaggtcggcagcgacggcaaagcctgtaaagacgccaaatcggccacctggatccttgagtag

SEQ ID NO: 442142 - DNA, 1035 bp, Serratia marcescens
atgtctcaacaaccacaaaacaatcgccggatcgtgcttgcttcacggccgcacggcgaacccaccccggaaaatttacgtctggaaacgaccgacgtaccgcagcccgccgcaggccaggcgttactgcgcactgtttatctgtcgctcgacccttatatgcgcggccggatgagcgatgccccttcttatgctcccccggtagaagttgacgacgtcatggtcgccggcgccgtgtcgcgcgtcgtcacctcacaacatccggattttaaacccggcgactgggtgctgggcgccacgggttggcaggactactcgcttaccgacggcagcaacgtgcgcaatcttggcgcacacctggaacacccctcacgcctgctcggggtattaggcatgcccggttttaccgcctatatgggattactggacatcggccagccgcagcccggcgaaaccgtggtggttgccgccgccagtggggcggtcggttcggtggtcggccaagtggcgaaactgaaaggctgccgcgtggtcggcatcgccggcggcgcagaaaaatgccgctatgtgaaggatgagctgcagttcgatgattgcatcgatcatcgcgccgacgattttgccgaacggctcgcccaggcttgcccaaatggcattgacgtttattttgaaaatgtcggcggcgcggtgttcgacgcggtaatgcctttactgaacgccagggcgcgcattcccgtctgcggcattatcgcccaatataatgccactggcctgcccaacggaccggatcgcctgccaatgctgcaggcgctgatcctgcgtaaacgcattcgcatgcaaggttttatcatttttgacgactatgcgccgcgcttcactgagttcctgcagcaaatggaaacctgggtcaatcagggccacataaaattccgcgaagatatcatcgacggcctggagaacgccccgcaggcctttatcggcctgctcagagggaaaaacttcggcaaactggttattcgcgtcgcagaagagtaa

SEQ ID NO: 442143 - DNA, 420 bp, Serratia marcescens
atgggatatcaaaaggtgctggttgccgtcgccgtggccgccgacagtcaattattagtgcaaaaagcggtctccatcgtccgtccctacagcggacagctcacgttgttaagcatggtggcgaaccctgagctttataatagcttcgccggcccgatgctcggcgatctgcgcaacctgatggaagaagagacccgattgttcctggaacaactccgccagcaggccggctatccgatcgccgacttactggtggtgcagggagaactgggggacggcctcagctacgcctgccagcagcgcagttttgatctggttatctgcggcaatcacagcggccatctgatgaacaagctgagctgttcagccgcgcggtttatcgataccagccggacagatgtgctgatcgtcccgctctga

SEQ ID NO: 442144 - DNA, 216 bp, Serratia marcescens
atgacaactaccctagaatacctgatgacatttcgtaaatgctccagcctggacagcctggaaaaggtttacgacaagctacactactcgattgataatgatacagaaatgagcaacatgtaccgtgcggcagaccaccggcgcgccgagttggtttcaggtaaactgtttgacctgggaaaaattcctaaaacattatgggcccgcgtgctttaa

SEQ ID NO: 442145 - DNA, 1044 bp, Serratia marcescens
atgaagcagaatcacccggtcgtcctggttcgcaagcgtaaggcacaccataacgcgcatcacggtggttcctggaaaatcgcctatgccgactttatgacggcgatgatggcgttctttttggtgatgtggctgttggccattgccagtccgcaggagttaacgcaaatcgccgaatatttccgtacgccgctgaaagtggcgctgaccggcggcaacaaaagcagtgccgaaagcagcccgattcccggcggcggcgaggatcccacccggcaggacgggctggtaaaaaaacagccgaacgccgaacagcaggcggaagcgcggaggttcaataagttgcgcgagcggctggatcagctgattgaatccgacccgcgcctcagggcgctgcggccgcacctgctgattaacctgatggatgaagggttgcgcatccagattatcgacggcaagaaccggccgatgttcaaaaccggcagcgcgcaggtggagaattatatgcgcgatattctgcgggcaattgcgccgatcctgaatgacttacccaataaaatcagcctgtctggccatactgacgatctgccgtacgccaccggcgagcgctattacagcaactgggaactgtccgccgatcgcgccaacgcctcacggcgagagctgattgccggcgggctggcggaaggcaaagtgctgcgcgtggtgggcatggccgccaccatgagtttgaagcagcacggggcggatgattcgatgaaccggcgcatcacgatcttggtgctgaataaacaaacgcagcagggcatcgagcatgaaaacgccaaaagcgaggcggcggaaatcagccggccgcaggcgctgaagcaactggcgccgcagcctgttgccgcgtcgacacaaaagacgccggctggagaagcggcggttcagccgtcagcgccggaggctccacagccggaggcgccgacgacggacgtctcaccggcgccggcggcaggcccatcgactaacccacagcgtctcacagtagaggtgatcccgtga

SEQ ID NO: 442146 - DNA, 1605 bp, Serratia marcescens
atgtttaaccgagtccgtatttccatcagcctgtatctgctgatgttctgtttttgtctgatgcagctgatcagcaccggtctgtcgttcagcgccttccgcgccgacagccgcagctttgaggtgataacgcagggaagtcaacagcgtgacgtgttgacgatgagccggattgcattgctgcaggcgcgcaatagcctgaaccgcgccggcacccgtgctgcgctgcagctgccgcaggagcaggtgaaccccctgatggatgacgcccgccgttcgctgcagagcgccgagcagggttttggtcagtttcagacgcttgcgcccgccggcgagagtgaacgccgcctgatggcccgctatcagcggttgcgcgcagcgctgctggagctgatcggtttgttggagagcggcaacctgcaggcttttatggcgcagcccacgcagcaaatacaggcgcagtttgacacggagttcacgcattacctgcagcagttgaggggcgagatggcgcaggcgcagcaggccaatcagcgggcctacgccttgggcggctggatgctggcgggcgcggtgctgatgctgttcgtcgtcgccggcagcgccatttggtggcagcagaccgtgctgctggggccgctgaaaaccatgcgccgccattttgaacgcatcgccgccggcgatctggcgatgccggtggaggtgaaaggcaacaatgaaatcagcgcgctattcgccgggctgcggcagatgcagcagtcgctggccaataccgtcggcgcagtgcaggacgggacacaagccatgctgatcgggctgcaggagattgcggcaggcaataacgacctctcttcccgcaccgagcagcaggccgcctcgctggaagaaaccgccgccagcatggagcaattgacctcaacggtgaaacagaacgccgacaatgcgcgccaggccacgcaactggcgcgcgatgcgtcgaccatcgccgccaaaggcggcgaactggcgggcgaggtggtcgataccatgtgcgctatctccggcagttcgcagaaaatcggcgccattaccggcgtcatcgacgctattgccttccagaccaatatcctggcgcttaacgcggcggtggaggcggcgcgcgccggcgaacaggggcgcggtttcgccgtggtggccggtgaggtgcgcagtctggcgcagcgcagcgcgcaggcggcgaaagagattaaagatttgatcgatgagtcggtggcgcgggtgcagcaggggtcgacgctggtggaacactccggcgccaccatgcaggacatcgtgcgttcggtaacgcgggttaccgacatcatgggggaaattacgtccgcgtccgatgagcaaagccgcggcattgaacaggtgacgcaggcggtgacgcaaatggatcaggtgacacagcagaatgcggcgctggtggtcgaggcggcctctgccgccagcggtctggaagagcaggcgatcgccctggcggatgcggtgtcggtatttcgtctggcggacgcgcacgtcagcgtgccggccgcagagtggttacagaggcaaaaggagacgccagattgtcaaacagcataa

SEQ ID NO: 442147 - DNA, 1050 bp, Serratia marcescens
atgagtaaaatcagagtgttaagcgtagatgactccgccctgatgcggcagctgatgtgtgaaattgtcaacagccacgcggatatggaaatggtggcgaccgcgccggatccgttggtggcgcgcgatctcatcaaaaaatttaatccgcaggtgctgacgctggacgtcgaaatgccgcgcatggacggattggaattccttgaaaagctgatgcgtctgcggccgatgccggtggtgatggtgtcatcgctgaccggcaaaggctcggaaattaccctgcgggcgctggaactgggggcgattgatttcgtcaccaagccgcagttgggcatccgcgaaggcatgctggcgtacagcgagctgatcgccgaaaagattcgcaccgccgcccgtgcgcgcctgccgtcgcgtacgcgcgccgccgcgccgccgatcctcagtcatacgccgctgctcagcagcgaaaagctgatcgccatcggcgcctccaccggcggcaccgaggcgattcgtcaggtgctgcagccgttgccggccaccagtccggcgttgctgatcacgcagcatatgccgccggggttcacccgctcctttgccgagcgtctgaacaaactgtgccagattacggtgaaagaggcggaagacggcgagcgcgtgctgccgggacacgcttacatcgcgccgggtgatcgtcacctggagctggcgcgcagcggcgccaactatcaggtgaagctgcatgacggaccgccggtcaaccggcaccggccggcggtggacgtgctgttccgctcggtggcgaagttcgccgggcgcaatgcggtcggggtgatcctgaccggcatggggaacgacggcgccgccggcatgctggaaatgcaccgcgccggcgcctataccctggcgcaggatgaaaacagctgtgtggtattcggtatgccgcgcgaggctatcgccggcggcggcgtcagcgaagtggtggaactggaacggataagccagcgcatgctggcgcaaatcgccggagggcaggcgctgcgtatctga

SEQ ID NO: 442148 - DNA, 405 bp, Serratia marcescens
atgaggcgtctgtggctgctgctgtggttgttcggcgttcaggcggcgcaggcggtctccggctcctgggcggcggacgggctgggggcgacgctgagccacggtggtatcagcacgcagtcgtccgcgctgcggccgccgaatgtcttgccgagcgatgaggcgcgcatcgtcagcgtcagctggcgttatctgctgacatcaccgccgccggctggtttacaggtgcagctgtgcataccgggacgttgcgtaccgctcgcaggcgccagcggcaccacgctggcgttgcaggacgcgccggcggccagcgagctgcgcttcagctatgttgtgcagacgcgcggcgcgttgtttcctccgctgcgggtgctcagcaaccaggtgattgtcaattatcagtaa

SEQ ID NO: 442149 - DNA, 303 bp, Serratia marcescens
atgagcaaaattctgtctgagatccaccaggaagtgcagggactgcaccaaacgggcttcgtcgacgatgtgacaatgcgcaccttcgatatgctctgtttacacccggttaaacactactcgcccgccgacatccgcgccctgcgtgaacgtgaaaacgtcagtcagccggtgttcgccctgcacctcaacgtcagtaaaaaagcggtgcaaaagtgggagcgcggcgaggcaaaacccaactccgcggcgatgaagctgctgtcgctggttgaacgcagcggactggcgatcctcgcctga

SEQ ID NO: 442150 - DNA, 387 bp, Serratia marcescens
atgacggatatctacctgaccaaaacgtttcaggcttttgccgcgcgtgaacgcatcagcgacgccaccgtgatcaaagccgccagagaaatacggcatgaaaactacgaggccaacctcggcggctgcgtgtacaaaaaacgggtcgcgaaacacggcgggggaaaacgcggcggctaccgcctgttaatcgccttccgtgaggagaaccggctgttttttatgcgcgggttcgccaaaagcgagcgggagaacctgagccgcgacgaactggctgcattaaagtgcctggcggccctgtatctggatttctcgccttataggctttatcagttggttaacaacaaggaattaaagaggctgtgtgatgagcaaaattctgtctga

SEQ ID NO: 442151 - DNA, 435 bp, Serratia marcescens
atggaaagtctggcactgcacctggacaagctactggaaacgctcagcgagttggagagcgtgctggcggaagaacacgccctgctgtgcgccggcacgctgccggggcctgcgctgcagcgcgttaccgatgacaaaagccagctgctggcgacggtcaatcatctggaacagcagcgacagctgttggaaaacagcggcggcccgaaagcgccctatgccggccacgacgggctgaccgcgcgctggcggcaggttcagcagcaaagccagcaattacgtgagaaaaatcagcataacggcctgctgctcagccgccatatcgaccacaacgctcaggcactggcggtgctgaacaaacagaataaaaacctgtacgggccggacggacagtcgcgcggcggcagcctgctggggcgcaaaatcggcgtttaa

SEQ ID NO: 442152 - DNA, 312 bp, Serratia marcescens
atgagtatcgatcgcacccaacggctgcaggccattaccgccgtgcagccccgagaaacctcggcggaaacgccgctgaaaccgcgtaaaaacgcccaggcggaaaacggccagagcggtacgcaggtcaggctcagcgacgcgcaggcgcagctgatgcagcccggcagccaggatatcgacatgaaccgggttgaggcgatcaagcaggcgattcgcagcggcgatctcactatggacgccggcaagattgccgacgcgctgctgcaggaaatgcaaaacgacagccagtggacatccggaccgcgctga

SEQ ID NO: 442153 - DNA, 651 bp, Serratia marcescens
ttgcgattattactcatactgctggcgctgctgccgggcctgccggcctatgccgacgatctcgccgggcaaatcgaccgttttatccaggcgcagtttgccaacagcccagtgacggtcaacgtcgaggtgcgcacgccgaaggcgcaatggcccgcctgcgccacaccgcagctggcgctgacgcaaagcgtccgcctctggggcgccgtcaccctgtccgcccgctgcggcgatgaacgtcgctttatccagacgcaggttgcagcgaccggccgctatctggtggccgcacgcgcgatccgcgccggccatgcgctgacggcggcagacgtaaaagtcgtgcgcgggcggctggatacgctgccgccgcgtgcactcagcgacgcgcgccgcgccctcggcgccgtcagcctgcgcaatatcggccgcgcgcaaccgctaaccgccccgatgctgcgccgcccctggctggtgaaagccggccagccggtgcaggtgcgggtacagggcgaaagttttactatcagcggcaacggtaaggcgatgaacaacgccgccgccgatgacagcgtgcgggtgagaatgacctccgggcggatcgtcagcggccatgtcggcgaagatggcgaagtgcgtatcacgttataa

SEQ ID NO: 442154 - DNA, 411 bp, Serratia marcescens
atgctcgacaaactggatgccagcctgcgtttcgggcaggaggcgctgaacctgcgcgcgcagcgccaggagatcctggcgggcaatatcgccaacgccgacacgccgggttatcaggctcgggatattgattttgccagccaactgaacaaggtgatggcgcagggccgccctagcggcagcggcgtggcgctcagcctgacctcggcgcgccatattccggcgcagaacctgcagccgccgcagctggagctgttataccgggtgccggaccagccggcgagcgacggcaacacggtggatatggatcgcgaacgcaccaactttgccgataacagcctgaaataccaagccgatctgacgctgcttaccggtcagatcaaaggtatgctgtcggtgattcaaggataa

SEQ ID NO: 442155 - DNA, 690 bp, Serratia marcescens
atgggcattgccgcaaccaccaatgaaccactggacaacaccgtcgccggcgccaacgccagaagcggcgcggtcggcaacagcagccaggatctgcaaaacagtttcctgaccctgctggtggcgcagttgaaaaaccaggacccgaccaacccgatgcagaacaacgaattgacgacccagttggcgcagatcaacaccgtcagcggcatcgaaaaactcaacaccacgctgggatcgatttccggccagatcaacagcaaccagtcactgcaggccagcgcgctgatcggccacggcgtaatggtgccgggcaaagacatcctggtgggcagtaaagagggtcaggtcagcaccacgccgttcggcgtcgagctggaacgcgccgccagcagcgttaccgccaccatcagtgacgccaccggtaaggcggtgcgcaccatcgagatcggcagcctgggcgccggcgtgcacgcctttacctgggacggcaagctggaagacggcagcaacgcgccggacggcgcctataccgtcgccattaacgccaagggcaacggtgaacagttggtggcgaacccgctgcgcttcgccatggtgaacggcgtcacccgcggcgcagacggcgccaaactggatctcggcctggcgggcagcgccacgctggaagatgtgcgccagatcctataa

SEQ ID NO: 442156 - DNA, 1239 bp, Serratia marcescens
atggctttttctcaggcagtcagcggccttaatgcggcggcgaccaaccttgacgttatcggcaacaatatcgccaactccgccaccgccgggtttaaatccggcagcgtatcctttgccgatatgttcgccggctcgcaggtcgggctgggggtaaaagtggcgggcattacgcaaaattttaacggcggcacgccgaccagcaccaaccgcgcgctggatatcgccattaccgaaagtggtttcttccgcctgcaggacagcgacggcggcatcttttacagccgcaacggccagttcaaactggatgaaaaccgtaacctggtgaatatgcaaggcctgcagctgaccggctacccggcagctggtacgccgccaaccattcagcagggggcggatccgcagccgctgagcattcctgaagggatgatgaacgccagagcatccacttccggcgcgatggtggccaacctgaagtccacccacaaggtgccggaaaatacgaccttcgatccaagcaaaacggactcctataactacgtcaacgttattaccacctacgactcgctgggcaatgcgcacaacattaacgcctatttcgtcaaaaccgccgacaacaaatgggatgtctacacccaggacggcagcgttgacggcgctccggccgacaaggccggcagcctgaacttcaacaccagcggcaccctgactgaaaccctggacgccgacggcaacccgagcgccacggcgttcagcctgacgatcccgatgtcggccaaagacggcgcgccggcgcaggacttcaccctcagctttgccggcagcatgcagcagaacgtcggcagcgactcggtgagtaaagtgtcgcaggacggctacagcgccggcgaatacaccaacttccagattgagcaggacggcaccgtggtcggcctgtactccaaccagcaaaaacaggtgctggggcagatcgtgctggctaacttctccaatccggaagggctggcgtcacagggcgataacgtgtggcaggaaaccggcgcctccggtcaggcgcgtgtcggcgtggcgggcggcggcggcttcggcaagttgaccagcggcgcactggagtcctccaatgtcgatctgagccaggaactggtcaatatgatcgtcgcacagcgcaactatcagtcgaacgcgcagaccatcaagacgcaggactccatcctgcagacgttggtcagcctgcgctga

SEQ ID NO: 442157 - DNA, 756 bp, Serratia marcescens
atggatcacgcgatttataccgcgatgggggcggcgcgtcagacgctggaccagcaggcgatcaccgccaacaatctggccaacgtttcgacgccgggctttcgcgcccagctggcggcgctgcgcgcggtgccggtcgacgggccgagcctgccgacgcgtacgctggtcgccgcctcgacgccgggcgccgatatgcgccaaggggcgctgaactacaccgcgcgcccgctggacgtcgcgctgcagcaggatggttttctggcgctgcggctggccgatggcggcgaagcctacacccgcaacggcaatatccagatttccgccgaagggcagctgacggtgcaggggcggccgctgctgggcgacggcgggccaatcgaggtgccgccgcagtctgagatcaccatcgccgccgacggcaccatctcggcgctcaatccgggcgacccgccgaacaccatcgcgcagatcggccggctgaagctggtcaaggcggaggctgctgaggtggcgcgcggcgatgacgggctgttccatctgacgccggcaagccggcagcagcgcggcaaccagctggcgaacgacccgcaggtgcgggtgatgcccggcgtgctggaaggcagcaacgtcaacccgacggaaaccatggtcgatatgatcgccaacgcccgccgcttcgaaatgcagatgaaggtcatccacagcgtggatgagaatgcacaacgcgccaactcgctgctgtcagtgagctaa

SEQ ID NO: 442158 - DNA, 948 bp, Serratia marcescens
atgagcagagacgtcaccagtatggccggcgcggcctacgacgcccaggcgctgaacgggctgaaaagcgccgccgccgctgacccgcagggcaacctgaagcaggtggcccgccaggtggagggcatgttcgtgcagatgatgctgaaaagcatgcgcgcggcgctgccgaaagacggcatgttgagcagcgaccagacccggttgtacacctcgctgtacgatcagcagatcgcccagcagatgtcgcagaaggggctggggctggcggatatgatggtgcgccagctcggcagcgccggcaggccaccgagcgaaacggccggcacggtgccgatggcgttggacggcgacaggctgcaggctctgccgcgtcaggcgttggagcaactggtgcggcgcgcgctgccgccaatgccgtcggtgccggggaatcctgcaccgctgaacaacggcaactttgtcgcccggctgtcaacgccggcgcgccttgccagccagcagagcggtattccccatcagctgatcgtggcgcaggcggcgctggagtccggctggggacggcgtgaaatcccggccgccgacggttcgccgagccataacctgtttggcatcaaggcgggcagcggctggcgcgggccggtgacggaaattaccactaccgagtttgaacagggggcggcgaagaagatcaaggcgcgtttccgcgtgtacggctcctacgtggaggcgatcgccgactacgtcaaactgctgaccggcaacccgcgttacgccggcgtcgccgccgcccgcacgccggaacaggcggcgcatgcgctgcagcaggcgggttatgccaccgatccgcactatgcccgcaaactggtcagcgtgattgcgcagatgagaagcgccggtgagcaggtggcgaaggcctacagccacgatttgcaggatctgttctga

SEQ ID NO: 442159 - DNA, 1650 bp, Serratia marcescens
atgtccaatagcttaatcaataccgcgatgagcggcctgaatgcggcgcaggtggcgctgagcaccgtcagtaataatatttccaactacaacgtggccggctacaaccgtcagaccgccattctggcgcagaacggcggtatgggcaccatggccggctttatcggcaacggcgtcacggtcaccagcgtgaaccgtgaatataaccagttcatcaccaatcagctgcgtggcgcacagagccaggccggcgcccacagcgcctattatgaaaaaatttcgcagatagataacctgctggcggacaaaaccaacaacgtgtcgaccaatatgcaggattttttcaccagcctgcagaacgtggttaataacgccggtgatgacgcgtcgcgcaacgccgtgctgggcaaggccaacggcctggtgaaccagatcggtaatgccgataaatatctgcgcgatctggatgccggcgtcaatcagcaactgagcgaaagcgcggtacagattaataactacagccagcagattgcccgactgaatgatgaaatcacccgcctgcgcggcagcagcggcagcgaacccaacgctctgctcgatcagcgcgaccaactggtgaccgagctgaaccaaatcgtcaatgtgcaggtgacgcagcaggacggcgacacgtacaccgtctctttcgccaacggcctgacgctggtgcagggcagtaatacctatcaggtggaggctgttccctccagcgaggatccggcgcggctgacgctgggctataaccgcggtaacggcgccagcgagatcccgaccgggcagattaccggcggcagcgtcagcggcgtgctgaagttccgcagtgaggcgctggacggggcacgcaaccagctggggcagatggtgctggcgctggccgacagctttaaccagcagcaccgcgccggttttgatattcatggcgaaccgggcggcgatttcttcagcttcagcggcggccgggtggtggaaaacagtcgcaacagcggcgacgccgaactgagcgtgagctataccgataccggcaaagtgcaggccagcgattaccgcgtcgagtttgacggcagcaactggcaggtgacgcgcctgtcggacaacgtcaaagtgaacgccacccccggcaccgacgctgacggtaaaccgacgctggaatttgaaggactgcgggtcggcatcgacggcacggccaataagaacgacagcttcaccgtcaagcccgtcagcgatgtggccggcaacctgaaggtggtgattagcgacgccggcaagctggccgccgccggcagcgaggacggcggtagcggcgataacgacaacgtgaaaaagctgagcgacctgcagacgcaaaagctggtggacggtaaggccacgctgagcggcgcctatgccagcctggtcagcaacgtcggcaaccagaccgccacggcaaaaaccaacagcgttgcgcagggcaatatcgtcaagcagctgacggaacaacagcagtcggtatccggcgtcaacctggacgaggagtacggcgaactgctgcgtttccagcagtattacatggcgaacgcgcaggtgattcagaccgccagctcgatgttcgatgctctcctgtccatccgttga

SEQ ID NO: 442160 - DNA, 966 bp, Serratia marcescens
atgcgtatgagcaccagcatgatgtatcagcaaaacatgcagagcctgaccgaccggcagtcgctgtggatgaagtccgcccagcatctgtccagcggcacccgggtgttgacgccgtccgacgatccgctggcggcctcgcaggcggtgatgctgacgcagtcccagtcggaaaacagccagtatgcgctggcgcgtcagttcgccctgcaaagtatcaccatggcggagaaagtgaccgccagcgccgccggcagcatcaaggatatgaaaggcctgctggttaacgccggcgacggcgtgctgagcgataatgaccgcgcctcgctggcgacccagctgcaggggttgaaagaccagctgctgggccaggcgaacaactctgacggcaacggccgctatatgttcggcggttttaaggacgaccagccgccgtttgtccagcaggacgacggcaaggtggtgtatcagggcagcagccgggcgattgagcagaaggttgacgccaaccgcaccatgaccgtcggctataccggtgatgcgatctttatgtcgctgaccagcaacccgaagccggagccggacggaagcgcgccggtgagcaacgtgtttgacagtatcgatctggcgctcaaggcgctcaataccccgctgcaggacgccgacgacgcgacgcgtcaacaggtacaggcggatttggacaaggcgcagcgcggtctggataacgcttacaacaacgtgctgacggtcaattccaagctgggtacgcagatgcaggaaattgagacgctggataatatcggcaaagtccgtgatacgaacaatcaggtccagatgagcgcgctggtcgacgtggacgttgtcgaggctatctcgtcttatttccagcagcaggccgcgctgcaggcttcgtataagaccttcggcgatatgcagggcatgtcgttgtttcagatgaatcgctag

SEQ ID NO: 442161 - DNA, 783 bp, Serratia marcescens
atgctcaacctcgacagctcgcagttcaccctctggctcagccactatttctggccgctgctgcgtattctggcgctgatcgccaccgccccgctgctgagcgaaaagcaaatcagtaaaaaagtgaagctggggctgggcgggctgatcgtcatgctgattgcgccgacgctgccggccagcgagataccgattttctccgccgccggcctgtggctggcgctgcagcaaatcctgatcggcgtggcgctcggcctgaccatgcagttcgcctttgccgcggtgcgcaccgccggcgaagtgatcggcatgcagatgggcctgtcgttcgccaccttcttcgatccctccggcgggccgaatatgccggtgctggcgcgcttgctcaatctgctggcgatgctgctgtttttatccttcgacggtcatctgtggctgatctcgctgctggcggacagtttccacaccttgccgatcggcactcggccccttaacggcaacggcttcctggcgctgactcaggccggttcgctgatctttatcaacggcgtgatgctggcgctgccgctgatctgcctgctgctgacgctgaacctgtcgctggggctgctcaaccgcgtcacgccgcagctgtcggtattcgtgatcggcttccccgtcaccatgaccatcggcatcctgacgctcggcatgatgatgccgatgctggcgccgttttgtgaacatctgttcggcgaggtgtttaaccggctggcggatgtgctcagcggcatgcgcagttag

SEQ ID NO: 442162 - DNA, 396 bp, Serratia marcescens
atgagcgcgaccgtgcagacgcacaccagccagcctgccgaaccggtcttgccggccggttcggtgctgactcaggtcagcagcgcgctcggcggcgtgctgctgctgatcgtgctggcgggctggctgtttcgccgcctgggttttacgccgcaaaaacgccgcggcgcgctgctgaatctgcgcgccagctgtcaggtcggccagcgcgaacgcgtggtggtggttgaagtggacaacacctggctggtgctgggcgtcaccgcgcagcacatcaccccgctgcataccctgagcgcgccgccggccgcgcctgataccgccagcgccacgccgccggcggattttcgccagttgatacgcaatgtcctgcaacgcccggaaaaatcggcatga

SEQ ID NO: 442163 - DNA, 489 bp, Serratia marcescens
atgtcacaaaataccctgccaacagcgccgaaaaagcgcccgctattggtcatcctgttgctgctgatcaccgtcgccgcctgcggtgcggcgggttacagctggtggctgctgcaacaaaaaggccacggcgacggcaccgccgcagccaaaccgcagccgccggcggcgccggtatttatgccgctcgacacctttaccgtcaatctgctgacgccggacaacaaccccgaccgcgtgctttacatcggcctgacgctgcggctgccggatgaggcgacgcgccgccggatgaacgattttctgccggaggtgcgcagccgtctgctgatgctgctgtcccgtcaggaagccgcgcaactggccaacgaacagggaaaacagcagctggtggcgcagatcaaagaagtgctcagcccgccgctggttaacggccaacccaatcaggtggtcagcgatgtgctgttcaccgccttcatcctgcggtaa

SEQ ID NO: 442164 - DNA, 1182 bp, Serratia marcescens
atgaacctcacccttctgcccggcctcacgccggcaggcgacgccgcaaccgacggcctggtgccggctgccgataacgatgcgctgtcatcggcgttcgcgcagctgctcggcgagcgttttcgccccgccggacagcgctcgggcgtgccgcagcctttggccgccgatgcggagccgacgccgggcgatggtgcgctcagccaactgctgaacgtcccggaacagttcgaaacgctggcgaacctcaccgcacgagcgccggccgacgcggcggtggcgcaggatgatacgtcggaacccccgaccgtatccgcactgaaaacccatgacgcgccggatgccgctaccttacaggcgctgttggctatgctgccggcgattgcggcaccgcagccggatgaacaacgcgccgtcccagcgccggcggataaccgcccccccggcaggccgtccgccccggcggtctcattgatcggcgcattgcatgacgatgccgcgccgtctgccgagcgcttcgctacgccggtaacgcctcgtcagacgccggcagcgcaaaataacgaggccgacgccgcgccgctggcgatcaaaacggacctcttcaccgccgatcgcgtaccgctgagtaccgatagcgcatcgtcgccggcgccgcagcacgccatgacgccagccccgcagttcaccgcatcacaacagcccgcagcggcggtagcggctccggccgcgccgctgctgaacgcgccgctcggcagtccggaatggcagcaggcattaagccagcaggtgctgatgttccaccgcggcggccagcaaagcgccgaactgcgcctgcatcctcaggaactgggatcgctgcagattacgctgaagctggacgatcagcaggcgcagctgcacatcgcctcggcgcacggtcaggtgcgcgccgcggcggaagccgccataccgcatctgcgccatgcgctggcggaaagcggcatcaatctgggccagagcagcgttggcggcgacgcgacgccgcaacagtcgcagcagcaggcctcacaggagcacggccggtcgccttcctaccgtgagcagcacggcggtgcggatctgccggcggaagcgacggccgctccgccaaccctgcaggcgctggcgcgggcggttgacggcgtcgatatcttcgcctga

SEQ ID NO: 442165 - DNA, 447 bp, Serratia marcescens
atgaaatcagactcgccactgctgacgctgcgcgacctggcgcaagaggcggtggaacaggccactcagcagctgggccaggcgcgtcaggcgcagcaggcggcggagcagcagctttccatgctgcttaattaccaggatgagtaccggcaaaaactcaacgccacgctgagccacggcatgggttccgccagctggcaaaactatcagcagtttatcgccacgctggaacaggccatcagccagcatcgccagcagttacaacagtggagccagaaagtggaacaggcgatgaaacagtggcaggacaaacggcagcggctgaacgccttcgacaccctgcatacgcgcgcgctgcacgccgaacagcagcgggaaaataaacgtgaccaaaaactgatggatgagtttgctcaacgtcgttcacacaggaacagtaacctatga

SEQ ID NO: 442166 - DNA, 705 bp, Serratia marcescens
atgtctgacagcagctccccactcgcctggcagccgtggcagcttaacgatttagcgacgccgatgccgccggaggaggacgcgacggaagccgcgccgatgctggcggacacgacgcctgatgaggcggaaagcgagcggcagcatctggcagcgctgcgcctgcaggcgcagcagcagggccatcagctgggccatgacgaaggccggcaacagggctatcaggaaggctatcagcaaggccttgctgaagggcgccggcagggcatcgaacagggcgaacagcagcagcagccgctgaccgaacagtggcggcagatggtcggcgaattccagcatacgctggatgcgctggacagcgtgatcgccgcacgcctgatgcagctggcgcttactgccgccaaacaggtgctcggccagccgccggtctgcgacggcaccgccctgctggcgcagatccagcagttgattcagcaagaaccgatgttcagcggcaagccgcagctgcgtgtgcatcccgatgattatccgcgcgtggagcagcagctcggcgtaaccctgagcctgcacggctggcggctgctggccgacggcgatctgcaccccggcggctgcaaagtcagcgctgaggaaggcgatctcgacgccagcctggccacccgctggcacgaaatctgccgcctggcggcgccgggggacgtatga

SEQ ID NO: 442167 - DNA, 315 bp, Serratia marcescens
atggcgattcaggggattgaaggcgtgctgcagcagttgcaggcaacggcgctgcaggccggcggctcaggcgcggcgcagccggcgaagggcgtcagcttcgccggtgagctgaaggccgcgctgggtaaaatcagcgataaccagcaggcggcgcgcaaacaggcgcaggattttgagcggggcgtgccgggcatcagcctgaatgatgtgatggtggatctgcagaaatcatcggtgtcgatgcagttgggtattcaggtgcgcaacaagctggtggcggcgtatcaggatattatgaatatgcaggtgtag

SEQ ID NO: 442168 - DNA, 1767 bp, Serratia marcescens
atggcagttattagtggagttttacgtagcccgcatggtggcgttaaaacggaagtaaccatcgtaataaagccgaaaaaaccggattcatatgtactgggtaacagtgagttatcgacaatgacagacgttgacggtagatactcaatggacgttttacccggtcactatgaagtcattattttagaagaggctacgttaaccaaactcggagagattaaagtcaacaccgactccgaagctggaactttgagcgattttttattacaaccaggagaaagtgaattaatttcagaaagcctgaaaactgttgatgattatcaatacggaggtgttatatcagcagcagaggaagaaaaaactgatgtgcaacctgcacacgattctattggtgagggcacagtgagtggtgttattgatgcgaacaacactccgcttttttgggacaactcggaagatccaaaagtcattaccgcactgcgtaatgggttgcttgaggtattctcaggaatttcctttaactctgcagttaaagttgatgatgctgtcggaagagaaatacgaataagcagggtgtttaatccagagacagacacgccggtattgtgggattcatcagaagatccaaaggttttgttattcatagataaggatggaaaaatacaagctccgaaaggtttcggttcacctggtggtaatattcctgtttcactcgaaatgacagccaatagttatgtaagccaaagtatcagagcgatattacattcggtggcaagtaatatggtgggtgatagaaatgtgagaatattactcactgggcattcgtggacagatttccttgaaattcctaaggcttatcgggatatgctgcagtcgaaatatggcgatggcggcattggttatcagtcattcaatccaacgcgcattcctgatggaatgacgtgtgtacaaacagggtttaccgcgcgaacaatttataacgcagtaacttcagagggaacaggggttaatggcaggagtttatataccacaactaatacgtcaatggtgaggtttgatggactgaagggcaccagaatgaccgtatattatcaggatctgaacggttcatttaaaatcaaggtgagtgatggtggtcgtgataaattagtcgccgttattggcgggagtactaataaatttaaatcggttgttatcgatctcgatactgaagaacattgctgtgaaatcgatacatcatcaaatgtcgacggaaataaagtaaatattttcggtgtggatatgtcgtatcaatcgggagttggggtgagtgtctatagtatggggaatgcggggtgtcatgcgcacgattatgacaagtgcacgccgaattatgcggatgtcgtccctgtcgtgaggccggattgcgtgctgattttacttggcaccaatgaagcgatcaacaaaatccctcctgccacttataagatttatttaagacgtctggttaatgcatggaaaaacaacctgccaaaaggagttggggttaatattgtttcatgtgcacacacactgaatacatctaattcagtaacgcaggataagtatccggctattgaacgtgagttggcattagagttgggggttggttatgttgatgggtatcatatatttcctcaaccaccgatttctaatgatgccagattgttcgctaatacagagcatcttaatgataatggtgctagatatttttcagagaatgtaattaacaaattattggagatttga

SEQ ID NO: 442169 - DNA, 765 bp, Serratia marcescens
atgccaagtattggaaacggtgttgttattcctggtgatggttaccctagactgtcaacttttactactccactgatgacacctccgggagctaatattatttccgcgtattttctcggcggaattgcaaaaaaaggtgttttgcataattacgccgatccggacagaccactcgtgatgaaaggtaatccggaaattttcaggaattttgcacgctgcgattttagtaactgttttgatacgggcatgcaatttccgaccaatgccgtgcgttttatcgtcattgcccgaccgtcaccagaagcgaaccgtgggttagcattcagtgattatgattctgcggggaagacggttgcagctaaagggagttatatggatgcttcactatctgggaaaactgttacagggacatttctatggtcgagttcgacgaccggttctgtatctaaacagattgagcagcctaacgctgaaggttttcagattttctcaggcgcgcattatccgaaaagtcatatcttgacctcaatgtataacatgacgacgggagagaacgatggcggttctggcagtgcgacatcaacaaacgcgtatacctcatcgggccgaaatatcctgataggcgggcattacgacaacacaggcaaatatcttggcacggttgacgttgcaggctttatgattgtgtcctgggggacgaacgtgaatgatgcaatgaaatggctatacgccactcaaggtccgcagcttggcatgtggagataa

SEQ ID NO: 442170 - DNA, 183 bp, Serratia marcescens
atggctgaaatacaacgatggtttatccggggtgtgagtatcgtttgcgttgctaatctgttgtttatgttagttttcccggataagctcgatattacggtactattggtagacattatgatgattggcgcagggattaatgctgagtggaaacgctatttagaaaactcctataacaagtag

SEQ ID NO: 442171 - DNA, 453 bp, Serratia marcescens
atgaaaataatatccgtacgggaacaccctgagttagccgaaaccgccatcgcctattttcaacgccagtgggccacgccagaaacgatgatgatgtaccgcgacgccattatccatgccatcaacgctgaaaatccgctgccgcagtggtatctgctgatgcagaatcaggaagttatcggctgcgcagggttaatcaccaatgattttatcagccgtggcgagctttatccctggctatgcgcgctgtttattgaagaacagcatcgcggccagggccacgccacccggctgattcaacatatcgcggcgcagaccaggacgctggggtttactcaattgcacctgtgcagcgacctgacaggcttttacgaaaaactgcagttcgtttccaacggcatcggctaccatccgtggggagaaagctcgcgtatttatacgctgaaattatag

SEQ ID NO: 442172 - DNA, 909 bp, Serratia marcescens
atggttgcagtaattatcatcggcatttttattatcagctttatttacgcccactcccgcgggcaggaaaaacaaaaagttagcagacaacttttcgatcactccacctttatggggccgatcaacatgtttatgaccggtttctcccgcctgccggccaaacagccttactttgcgccgcagacttttcccgagctgcagcacctgactgacagctggcaggtgattcgcgaggaagccctgcgtttgcaggaccatatcaaggcggcgcaaagccacaacgacgccgggttcaatacctttttcaagcgcggctggaagcgtttttaccttaaatggtatagcgatacccatccttcggcgttggaactgtgtcccaacaccgtggcgttgctaaaccagatcccgtcggttaaggcggcgatgtttgccgagttgcccgccggcagccatctgggcaagcaccgggatccttatgccggatcggtgcgctatcacctggggctggtgacgccgaatgacgaccgctgttttattgaagtggatcgccagcgccacagctggcgtgacggtcaggcggtgatttttgacgaaacctacgtgcactgggcgcaaaacggcacggatcagacgcgcatcatcctgttttgcgatatcgagcggccgatgaaatggggctgggcgcaggcggtgaaccactgggtcggcaagacgctgatgtcggcggccagttcgcctaatgacgaacaggatcgcaccggttttattaaccgtattttcaaatacgtcaatgcaatccgcgatgcagggcaacggctgaaaaaacgccaccgtcgcggctattatctgctgaaatggctggttattgccgccgtctttgccgccattattatcccgagcctgagttaa

SEQ ID NO: 442173 - DNA, 831 bp, Serratia marcescens
atggaacgcacaattaatctttgtcccgggatcggtagctcggcgcatattattcaacatactgaattattactcccttcagtgtatttcgaacaacctcacctgtacctgattcaggaggggtgcaaacgcatccgttggcaacagcaggaagtggtggcgaacgccggcgatctgctgctgattgatggcggacagaccgttgacattattaacagtatttccgataagggccgcttcagctgccatttgatcacctgcgatccgttgctgttcagcgcctcgcctgcgccggttgatttatctgcagccagcgcgttttccggcgtccggacgctgccggatatcccctgcggatttattcacagctttgaaaccacacacctggcactcacgttacaccacagttttcctcaggcgatcacccgccataaactgctggaaattttgctctggctggcgcaatacggcatcaaatttgtccacggcgaagtcaaagatctgacgcagcgcgtacgccgctgcctggcgaccgatccgcacagcatctggagcgcggcaaaggtggccgccagtttatcgatgagcgaagtggtgctgcggcgtaagctgtcagcagaaaataccgctctgcgcaacctgatgatcgacgtgcgcatgagcagcgcgctggcgttgctgcaatccaccgactggccgatctccgccattgcccaacacgtcggctatgagagcgcctcccgctttgccgagcgtttccgcaaacgcttcggtttcgcccccaccgccatccgcgggcatcagcgcgttatggaggcggcgaccggctga

SEQ ID NO: 442174 - DNA, 369 bp, Serratia marcescens
atggaacgccaacagcaactgttatccgtctatcagcacattgccggcctcagcgcacaaatgctcgcgctggcgcaaaacggcgactgggatcgcttggtggaacttgagctgacctacgtcaccgcggtggaaaaaaccgcagacttttctgacgtgatggcttcatccatggcgctgcaggaactgctgcgccataagctgcagcagattctggataatgaaacccaactgcgcgccttattgcagcagcgcctgacagagctaaagtctttaatcgatcggtcaacgcggcaaagcgccgttaacgccgcctacgggcaattccacgaccgcgccctgctgttaggggagccgcagaacccataa

SEQ ID NO: 442175 - DNA, 411 bp, Serratia marcescens
atgtataaccgtagcggaacacaggcctacgcacaggtcggtttagaaagcggcgtcatgagcgccagtccgcatcagttaatcgtaatgctattcgacggggcgcaaaatgccctgtcgcgcgcgcgcatactgatggaacaaggcaatatcaccggtaaaggccaggcgttgtccaaggcgataaacattatcgacaacggcctgaaaagcgggctcgaccaccagcagggcggcgagatcgccgcgcagctcgacgcgctgtacgactatatgaaacgccgtctgctgcaggctaatctgcataacgacccgcaggcgctcgacgaagtggcgaagctgctggagaatatcgccgacgcctggcgacagattggccccaattatcaacccgcgcaggacgccatttaa

SEQ ID NO: 442176 - DNA, 1398 bp, Serratia marcescens
atggcatcgatcagttcattaggcatcagtaccggcatggatctgaatggattactggacaaattaagccaggcggagcagcagcgtctgacgccctacaccacacagcaaagcagctacaacgccaaactgaccgcttacggcacgctgaagggcgcgctggagaagttcaacaacctgagtaaagagctggctaaacccgagtttttcaccaataccaccgccagcaagcacgatcagtttaatgtcaccaccaacgccaaagcggtgccgggcaactacaccatcaccgtcgaccagctggcgcagccgcaaacgctgactaccgacgccaagattgccagtcagacggagaagctgggcacaaccggcgccggcgaccgctccctcaccctgaccaccggcaacccgccgaaagcggtgaacatcccgctcagcgacgaccagacctcgctggtggagatgcgtgacgccatcaacggcgccaaggcgggcgtcaacgccagcatcatgcgcgtcggtgataatgagtacaaactggccatcagcgccagcaccccgggcgcagagagcaaaatctccgtgcaggtgaataacgacgacaaactgggcgcggtactgaactacgacggcgtcagcggcaaaggcgcgctgcaggaaacggtgaaaggccaggatgccaaagtcaccatcaacggcacgcagattcagcgcagcaccaacgctatctccgatgcgctgcagggcgtgacgctggatctgaaaaccctcaccaagcccggcgaatcgcagaatctggtgattgaagccgataaaggcggctccgccgataagatcaaagagtgggccgacagttacaactccctgctggatacctttaactcgctgaccaagtacacgccggtaaaaagcggcgaggcgcagtcaaacagcaacggcgcgctgctgggcgacaacaccctgcgcggcattcagtcatcgatcaaaaacgcgctgagcgccgcgcaggacaacccggagctgaaggggctcggcaacctgggcatcaagaccgatatcaaaaccggcaagctggaagtcgacagtgaaaaactgaaaaaagcgattgaggaaaagccggatcaggtggcgaacttttttgccggcaacggtaaagacagcggcatggcgacggagattcataacgaaatccagaactatatcaaggccggcggcattattgagaactctaccaagagcatcaacagcagccttgaccggctgaatacgcaaatcacccgcgtgacggaaagtattcagaacaccatcgaccgctataaacaacagttcgtacagctggacaccatgatgtcgaaactgaacggcaccagtaactacttaactcagcagttctcttaa

SEQ ID NO: 442177 - DNA, 507 bp, Serratia marcescens
atgtctggaacagtattgaaaaagcggccgctgagccgttatgtaaaagattacaaacacactcagacccactgcggtcagtgcggtaaacagctggaccgcatggcgctggtgtttcgcggtaaaatcatcaacaaagaagccatcgcccgcatggaccagccgatcgatgaacaggtgtggcagagcgtgcagcaggagctgaccgcactatgccgtttctgcagcgaaatctcctgcaacagccacccgagctacttcgacattatggcgttcaaacaatatctgttcgaacagaccgaaatgagccacagcaccgtgcgtgaatatgtggtgcgcctgcggcggctggacgaaatgctgagcgcgcgcaattatccggctgagaaactcagcaacggctgctgccatcacctgattgacgacctgcccagcgccggacataacaactatcgcattgccctgcgtaaatacgatcagtaccttgcctggcagaagagttactaa

SEQ ID NO: 442178 - DNA, 990 bp, Serratia marcescens
gtgaatctgcaacagcaactggcgcaattcccgcgcctcgatttggttggctccgccacgccgctggagaaactgtcccgcctttctgactaccttggccgtgaaatatacgttaaacgtgacgacgtcacgccgatggcgttgggcggcaacaaactgagaaaactggagtttttggccgccgatgcactcgagcagggagccgacacgctggtgaccgccggcgccatccagtccaaccacgtccgccagaccgccgccgtcgccgccaaacttggcctgcactgcgtggcgttgctggaaaatcccatcaatactcaagctgaaaactacctgaccaacggcaaccgcctgctgctggatctgttcaacgtggaagtggtgatgtgcgatgaactgcacgcgccgcagcagcagttggaggcgctggcgacgcgcctggaagcgcaggggttccggccttacgtggtgccagtgggtggctccaacgcgcttggcgcgctgggctatgtgcagtgcgcgctggaaatcgccagccagggcaaggacgttgccttcagctccgtggtggtggcctccggcagcgccggcacccacgccggtctggcagtcgggctgcagcaactgctgccggagagtgaactgattggcgtcaccgtttcacgccgcgccggagaacagctgccgaaagtcgaacagattcagcaggcgctggcccgttcgctggggctggaacaggtgctggcgccgattacgctgtgggatgactatttcgcgccgcagtacggtatgccgaatgacgaagggatggcggcggtgcaactgctggcgcagcaggaaggcctattgctcgacccggtgtataccggcaaggcgatggccggactgatcgacggtattgcccaagggcgcttccgcgatgacggcccgatcctgtttgtgcataccggcggtgcgccggcgctgttcgcttatcacccgcaggtgtag

SEQ ID NO: 442179 - DNA, 801 bp, Serratia marcescens
atgctcttttctaacgttcgacgccagctggttctggggatgatggcggtggcgctgaccaccggcctgagtgcaaacaccttcgcggcagacaatctgctggatcaggtaaaacacaacggtacgctgaaagtgggcctggaaggcacctatccaccgttcagtttccagggggaagacggcaagctgaccggcttcgaagtggacttcgccaacgcgctggcgcagcatctgggcgttaaagccaaactgagccctaccaaatgggacggtatgctggcgtcgctggattccaaacgtatcgacgtggtgatcaatcaggtcactatttccgacgagcgtaagaaaaaatatgatttctctacgccgtacaccgtgtccggtattcaggcgctggtgaagaagggcaacgaagggcaaatcagcaagccgcaagacctgaagggtaaaaaggtcggcgttggcctcggcaccaactacgagcaatggctgcgcgaaaacgtgcagggcgttgacgtgcgcacctatgacgacgatccgaccaaatatcaggatctgcgcgtaggccgcatcaacgcgattctggtggatcgtctggcggcgctggatctggtgaagaaaaccggtaacacgctggcggtcgccggcccggcgttctcccgtcaggagtccggcgtggcggtgcgcaaaaataacccggagttgctgaacgccattaaccaggcgattgccgagatgcagaaagacggcacgctggcgaagatctctgacaaatggtttggcgcggacgtaacgaaataa

SEQ ID NO: 442180 - DNA, 1050 bp, Serratia marcescens
atggcgagcattgggacgccttttgattttccggcaatcatggaaaccaaagccagggcgaataaatttacgcttgattccgatcaacgacaggttatttccagcttaaacgcgctgattgctgccaacctgaatccgcagaacggtcacgctcaccgcgacggcgtttatatttggggaaaagtagggcggggaaaaacgtttattcttgacgctttttatgacgcggcgccgataaaaaataaacgccgcgtacactttcatcattttttccgcgagttgcatcaacgacttgccgcgcaggatacccaagggcagccgatagccgaggtattaagcgctcagttgggcgactgccggttattgtgtttcgatgaatttcatctgcacgatattggcgatgcaatgttaatcaaacccctgctggactttatttttcaccagaaaatcctgctggtggtgacttccaactacccaccggatgaattgttagccaatcccctttatcaccaacggtttgtgccttcgatcgccctgataaaacagcatatggagatttttgcgttggccggcgggcgggactaccgttcgctgggcgcgaatgacagcacgccgttttgccaaggcgtctatttgtgtcccggcaatgcagcgcagcgccgggagtgcgggctgccggagcctgacggcctgccgcatgcccttgaggtcggttaccgtaccctgacggtgctttctcccgccggggatgttctgcacttttcctttgccgcgctgtgcgcggcgcctacggcggtgatggactatctggcgttatgcgagcgctgccgctgctggattattgaggatgttccggcgctggcgacccagtctccggcggcgcagcagcgttttatcaacgtgattgacgtgctctacgaccagaattgccggctgtatgtgatcagcgactatccgctggcggtgatgaccgacggcgtcgaactggatgatatccagcgcacccgcagccgcctgagccagctgaaacactacctgcccgcggtatag

SEQ ID NO: 442181 - DNA, 756 bp, Serratia marcescens
atgcaagacgcactgcagctttcccactatctggtattggccggtgcactactggtggcttatgtcatcttcggcattgccggcttcggcactgcgctgatcgccagcccggtgatggcgctgtatatcccggtagcgaaaatcgtgccgttgctggcgctgttggatatgtgcgcggcgatggtcaatgtgagccgcgacgggcgcaatgcacaatggccggaattaaaacggctggtgccgctgatgatcgccggcagcctgatcggcgcgctcattctgctgagaacccggcccgatatcctgctgttggcgctggggattttcgtggtgctgtatgccgcctacgcattaagcgggctgaagccggatcgccgtttctctgccagagcttccgttccgtttggcctgctcggcggggtgttcagcgcgctgttcggcagcggcggctttatttacgcgatttacctcagcggacggattgaaagcaaagaggcgatgcgcattacgcaaaccacgctgatcggcctgagcacgctgacccgcgtggtgatttttgcgctggccggggtctattttgatgccgatctgctgctgctggcgttggcgctggtgccgggtatgctgttagggatcacgcttggccgctatttcacgctgaacatgtcgcgcgaacagttcctgaagctgattaatgtgatcctgctggcgtcgggcagtatgctgatcttccgctatctgaccacctcgctgtga

SEQ ID NO: 442182 - DNA, 183 bp, Serratia marcescens
atggcctttcctccccgtcaacgtattgagcccggttattgcgtcgttgaaacgccgggtacgctctcttcacaaggcaatattctgttcagaaacccacgcagcgaagccgcccgttattttatgcagcttaatgccgatacgccctgggtgaaacccggacatatcctgatcgttatctga

SEQ ID NO: 442183 - DNA, 279 bp, Serratia marcescens
atgaacgattttaatcaactcgcggtatattttggctactttggcagctatttccccaccgtgtttttttatcagttgctaaaagataaaaaaataaaaatcgggaaagatacctttgcacccgcagatgcttatgcctttatgcagtccctgcctcgcgaactgacgggatggatcacagtatactactggatgcattttatttggatgaacacgattgcggttggcggcgtcatgttggcgattgccaaactcgcgggcgtcgatcctaatgcctga

SEQ ID NO: 442184 - DNA, 1254 bp, Serratia marcescens
atgagccgcaattccgcctttccgcccagcgccgccgatttcctgctggcgtcgaaacgctgtgagatcgccgtactgcaacagctgctgcacatggggcagctggtgggacaggtgagccaactgatccatatgctgcagcgcgagcggggcacggtaaatatttatctctgctcgcagggtgcgctgttcggcgatcggctggcggcgcggcgcgacgatgtggcgcaggccgagcgggcggtgcaacgtctgctggcgcagatggatgccaccaccgcgccgctggcggcctccggccggctgttcggccgtatcgccggcgcgctgcagcatctcaccgctttgccggcgctgcgtcagcaggcggatgcgcgcagcctgacgcccgccgaggcgatgcagcattttaacgcgattattcacagcctgctggcgctggtgtatgaagcgacggatgcctgcctggaaccggccatggcgcgccggctgatcgccatgttcagctttatgcagggtaaagagctggccgggcaggagcgggcgctgggggcggcgggctttgccgccgggcagtttgacgacgcggcgcagcagcggctgccgcagctgatggacggccaggatcgctgttttcacaccttcgccgagtttgccgaccccgcgtcgctggcgcagtggcggcggctgcagcagcaggacgatcgcgagtttgaacgcctgcggcgcgttgcctgcacccagcggcagcccggcggcgatctcagcctgcgctggtttgatatcacctcggcgcgcattgatgcgatgaaacagattgaggatcgcctggaggttgcgctgatggacggctgccgcgccagcctggccgcggcgcagcgggcgctgacgcagcaggagccgacgtggcccgcgccggagcagggctatacggtgtttgtcagcgcagcggccgacggcgacgcactgctcgacgacggcgttaatccgcagttggggcgttcgctgatggcgatgatccggcagcagtcgcagcgcctgcaaacgctgtcggaggaactggcggcgacgcgcgccaccctgcaggagcggcgggaaatcgatcgcgccaaaagcctgctgattcagtatcgcggtctgacggaagagagcgcctaccagctgctgcgcaaaatggcgatggaccagaataagcgtctgattgatattgcccgcgccatgctggcggtggcggatatcctgccggggaaatag

SEQ ID NO: 442185 - DNA, 1278 bp, Serratia marcescens
atgacgcacaccaaatcgccgggaatggcgctgtcgcgccgccgctttctgctcggcagcgcggcgttgggcggcagcatgatggcgccgggtctgttcaatgtcgcctgggcggcagggtcggacgcgccggagaaaaaacggctgcgcgtcggctttattccgctcaccgactgcgcctcggtggtgatggcggcggtgaaaaagtttgatgagaaatacggcatcgaaattattcccagcaaagaggccagctgggcagcggtgcgcgacaagctgctgtccggcgagctggacgccgcccatgcgctgtacggcatgatttacggcctgcagctgggcgccgccggcccgcagcgcgatatggcggtgttgatgacgctgaacaataacggccaggccatcaccctggccaaccagctgaaacaggccggcgtgcgtgacgccgccgcgttgaaaacgctgatcgaccgcgaggaaaagggcgcctacagcttcgcgcagaccttccccaccggcactcacgccatgtggctgaattactggctggcccacgccggcattcacccctacaacgacgtgcgcaatctggtggtgccgccgccgcagatggtggtgaacatgaagatcggcaatatgagcggtttttgcgtcggcgagccgtggaaccagcgtgcgattgccgaaaacatcggctttaccgccgtcaccacgcaggaaatctggccggatcatccggaaaaggtactgggcaccaccgacgactgggtgcgcgcccacccgaacagcgcgcgcgccctgacggcggcggtgctggatgccgcgcgctggatcgacgcctccgacgccaaccgtgtggcaagcgccaaccggctggcggggcgcgcctacatcaacaccagcgcggcgtttcttaccgggcgcatgctgggcgactaccagaacggcctgggcaaacgctggcaggacgcgcatgccatgcgctttttccacgacggcgaggtgagtttcccgtatctgtccgacggcatgtggttcctgacccagcagcagcgctgggggctgctgaaggccgaaccggattatctggcggtcgccacgcgcattaaccgtatcgatatctatcggcaggcggcgacggcggtcggcggcgtcagcctgccgggcagcgcgatgcgcgccagcaccctgatcgatggcaaacgctgggacggcagcaacccggcggcgtacgccaacagttttgctgttaaacgtgacgtgagaggtaggcaatga

SEQ ID NO: 442186 - DNA, 903 bp, Serratia marcescens
atgaaaaatctggctgaacgtatcgacgccgccgccgagccggtgagcgcgcagattgtcccgttgaaagaggtgcagactgcggctgccccggttccggaaaccaagacaccgccgcgccgccgcctgcgctggcagccgctgctgcggcgtgcgctgccggcgttgctgggcctgctgctggcgatcgccgtctggcagattgtcgcgcaaaacagcgagggcatcccgacgccgctggctacctggcaggcggcgctgacgctgtttgccgacccgttttattatgccgggccgaacgatcaggggctgggctggaacgtgctggcgtcgctgcagcgcgtggcgggcggctttgcgctggcggcgctggtgggtattcccgtcggctttctggtcggccgcttcgcctttatggcgcatatgctggggccgattatctccctgctgcgtccggtcagcccgctggcctggctgccgatcggcctgctgctgttccagcgttccgaaccggcgtcgacctggaccattttcatctgctctatctggccgatgatcctcaataccgccgagggcgtcacgcgtatcccggcggattacctcaatgtggcgcgggtgttgaaactgtcggagtggacggtgatgcgcaagatcctgttcccggcggtgctgccgtatgtgctgaccggtgtgcggctgtcgatcggcatcgcctggctggtgatcgtcgcggcggagatgctgaccggcggcgtcggcatcggcttttggatctggaatgagtggaacaacctcaacgtcgaaaacatcatcgtcgccattctggtgattggcgtggtcggcctgctgctcgagcaggggctgatgtggttggcaaagcgttttagttatcagagccattaa

SEQ ID NO: 442187 - DNA, 789 bp, Serratia marcescens
atgaaaccgattatccagatccagaacgtcagccagcgctttgatacgccgcagggcgagtttgtcgccctgcatcaggtcagcatcgatattcagccgggtgaaaccgtcagcctgatcggccactccggctgcggcaaatccacgctgctgaacctgattgccgggctgacgctgccgagcgacggcgtgctgctgtgcgataaccgccagatcgacggccccggcccggagcgcggggtggtgttccagaaccactcgctgctgccgtggctcaccacctacgagaacgtggcgctggcggtgcatcaggtgttccgcggccagatgacccgcgctgaaatgcgcgactggatcgaacataacctggcgctggtgcatatgagccatgcgctgcataaacggccgcatgaaatttccggcggcatgaagcagcgcgtcggcattgcccgcgcgctggcgatgaagcccaaagtcctgctgatggatgagccgttcggcgcgctggacgcgctgacccgcgctcacctgcaggatgcggtgatggatattcagcggcggctgcataccaccatcgtgctgatcacccacgatgtcgacgaagcggtgctgctgtctgaccgggtgatgatgatgaccaacggcccggccgccacggtcggtgaagttctgcaggtagcgctggagcgcccgcgctctcgcgtcgcgctggcggatgacccggcctatcaccgttaccgccagcaggtgctgacgtttttgtacgaaaagcacgccaaggcggcgtag

SEQ ID NO: 442188 - DNA, 4143 bp, Serratia marcescens
atggcaacgcagcaacgcctggtggtgatcggcaacggcatggcgggtatgcggctggtggagacgctgtgccggctggcgccgcagcgctacgccatcacggtaatcggcgaggagccgcgcggcaactacaaccgcattctgctgtcgccgctgttggcgggtaagaaatccttcgacgacgcgctgttgcatccgctggcgtggtatcgccagcagggggtcgcgttgcggcatggcgaaacggcgctggcgctggatcggcagacgcggcgggttatcacccgcgcgggcagcgtcgcctatgacctgctggtgttcgccaccggttcgcggccgtggatgccgccgacgccggggattgaactgcccggcgtgtacggcttccgcacgctggatgacgtcgaggcgatgctcggccgctgccgtctgggagcgcgggcgttggtggtgggcggcggcgtgctggggattgaggcggcggcggcgctggccgcccgcggcgtgcgcagcgcagtggtgcaccggggcgagtggctgatggagcgtcagctggatgcccgcgcggcgggcatgctgcagaacaacctggcggcacgcggcatcgacagccatctggcgacgcaggtcagcgccttttacggcgacggcgaactgcagggcgccagactgagcgacgggcgcgaactggcctgcgatctggcggtcattgctgccggcgtgcggccggccatcgcgctggcgcagcaggccgggctggcctgtcagcgcggcatcatggtggacgagcgccagcagaccgacgatccggcgatctacgccgtgggcgagtgcagccagctgggggaaaccaccttcggtctggtggcgccgtgctggcagcaggcgacgctgctggcgcagcggctggccgggcaggcgagtgaacccttccggcccgcgccgctgaacactcgcttaaaggtcagcggcatcgacatgctgtgcgccggcgaggtacagccggcagagggcgatgagcttcattacgccgaagatccgcaggcgcagcactaccgccgcctgctgctgcgcgacggcgtactgcacggcgtgctgctgtatggcgacgccggcgacgcgcaattttatctgcaacggctgggccgcccggtgacggatccggcggcgctgctgttcggcaggacagagtgtgaagccgcagtgacggcgaacgagaggaaaagcgatatgcacaaacccgtattgttggtcgccggtcacggcatggtgggacatcacttcctggaacagctggtggcgcgcgagctgcatcagcgctaccacattgtggtgtttggcgaagaaccggtggcggcgtatgaccgcgtgcacctgtccgaattctttgccggccgcagcgcgcagtcgctgtcggtggtggaagatggcttttttgaccgctacggcattgaactgcggctgggcttgcgggtatgcgccatcgaccgtcagcgcaagtgcgtcacggatagcgaagggcgggaaaccgcctatgaccaactggtgctggctaccggttcttatccgtttgtgccgccgatccccggtaaccagcggccggactgtctggtgtaccgcacgctggacgatctggcggccattgcggccagcgcggagagcgcccgggtcggcgtggtggtgggcggcggcctgctggggctggaggcggccaacgcgttgcgtcagctggggctggaaacccacgtggtggaattcgcgccgcgcctgatgggcgtacagttggatgacggcggcgccgccatgctgcgtaaaaaaatcgaggcgctgggggttaatgtgcataccggcaaggaaacccgggcgatagaggacggtttgttacaccgtcacagcatgcactttgccgacggcgggcggctggaggccgacctgatcctgttttccgccggcatccgcccgcgcgaccagctggcgcgggatgccgatctggcgctgggcgaacgcggcggcatcgtgattgatgaccagtgccgcaccagcgatccggcgattttcgccatcggcgagtgcgcgctgtggaacgggcagatttttggtctggtggcaccgggctatcagatggcgcgcacgctggcggatacgctggccggcggcgtcgcgcagttttgcggtgcggatatgagcaccaagctgaaactgttgggggtggaggtggcgtcaatcggcgacgcccacggccgcagcgccggcagccagagctacagctgggttgacggaccggcggaggtctacaaaaagctggtggtctccgccgacggcaaaaaactgctgggggcggtgttggtgggcgacagcgccgaatacagcacgctgttgcagatgatgctgaacgatctgccgctgccggcggcgccggaaagcctgatcctgccggccgccgccggtggggcgccaaaagggctgggggtggccgcattgccggccggtgcgcagatctgctcctgccacaacgtcagcaagggcgatatcggcgcggcggtggaacagggctgcggcgatctggcggcggtgaaaagctgcaccaaggcgggcaccggctgcggcggctgcgcggcgctggtgaaacaggtgctggagcatgaactggcgcagcgcggcgtcgaggtgaaaaaagacgtctgcgaacatttcgcctattcccgtcaggagctgtaccacctggtgcgggtcggtaatatccgcagcttcgacgaactgatggcaaaacatggccgcggccacggctgcgaaatctgcaagccgctggcggcgtcgattctggcctcctgctggaatgaatacctgctggagccgcagcacctgccgctgcaggacaccaacgatcgcttcttcgccaatattcaaaaggacggcacctattcggtcgtgccgcgggtgccggccggcgaaatcacgccgcaggggctgatcgccatcggacagatcgcccagcgctatcagctgtataccaaaataaccggcggccagcgggtggatatgttcggcgcgcgcctggagcaactgccggagatctggcaacaactggtggaggccggttttgaaaccggccacgcctacggcaaatcgttgcgcacggtgaaatcctgcgtcggttccagctggtgccgctatggcgtgcaggattccaccgggctggcgattgagctggagaaccgctacaaggggctgcgttcgccgcacaaaatcaagatggcggtatcgggctgcacgcgtgaatgcgccgaagcgcagagcaaagacgtgggggtgatcgccaccgacaagggctggaacctctacctgtgcggcaacggcggcatgaaaccgcgccatgccgatctgtttgccagcgatctggacagcgctacgctgatccgcaccatcgaccgtttcctgatgttctatatccgcaccgctgaccggctgcagcgcaccagcacctggatggataatctggagggcgggctggactatctgcggcaggtggtgctggaggacagcctcggcatcgccgcggaactggaaaacgagatgcagacggtgatcgccagctaccagtgcgaatggcaaaccacgctggccagcccggagaaactgcgtcagttccgcgcattcgtcaacagtgaccagccggacgaggcggtagtgtggcagccggagcgcggacagcgccgcccggccgaggtgcgcgctcaggtgattgaggtgcagccggcgcgggaacctggggcgcagtgggaagacgtgtgtgcgctgggcgatattccgccgcacagcggcatcgccgcccgggtggccggacggcaggtggcgctgtttcacctgccgggcgccggcgtgtacgcgctggccaaccgcgagccgggcagttcggccaacgtactggcgcgcggcctgctgggtgacgcggcgggcgagccggtggtgatctcgccgctgtacaagcagcgcttccgcctgcgtgacggcgtcagcctggaggacagcaatgtgcgcctcgaggtctggccggtgcgggtggatcaggagcgggtgtgggtgtacggcgagcctggcccgctgctgccgcaggcgcaggagatggcgggggcggcgttatga

SEQ ID NO: 442189 - DNA, 2649 bp, Serratia marcescens
atgaacgcgccgcactgcaccacctgcccgtattgcggcgtcggctgcggcgtggcggtgacgacgcagggcgacgctatcagcgtcagcggcgatgcgacgcatccggccaacggcggccggctgtgtgtcaagggcagcgcgctggcggaaacgctggatctgcaggggcggctgctgcagccgcaggttgacggtcatcaggtcgattggccccaggcgctggagacggtcgcccggcgctttgcgcagatcattgcgcagcacgggccgcaggcggtggcgttttacgcgtccggccagctgctgacggaggattactatgtcgccaataagctgatgaaaggttttatcggcgcggccaatatcgacaccaattcgcgtctgtgcatggcgtcggcggtggtgggctacaaacgcgccttcggcggcgatgcggtgccctgcagctatcaggacgttgaactgacggatgtggcgatcctgtgcggatccaacgccgcctgggcgcatccgatcctctaccagcgcctgatgcgcgcccgtcagcagcggccggcgatgaaggtggtggtgatcgacccgcgcgccaccgccagctgtgacgacgccgatctgcatctggcgctgcgtcccggcagtgacgccgcgctgtttaacggcgcgctgcactggctggcgcagcagggcttgctggatgagacatttttacaacgccacaccgaaggcgcatcggcggcgctgcaggcggcgcaagcgtggacgccacagcgggtggcgcaatactgtcagctgccgctggcgcaggtgacggctttcttccacctgctggcggaggcgaaaaactggctgacgctgtattccatgggggtgaaccagtcgtcgagcggagcggataaatgcaacgccattatcaacctgcacctggccggcggtcgcatcggcagggcgggctgcgggccgttttcgctgaccggtcagccgaatgccatgggcgggcgcgaagtgggcgggctggccaaccagctggcagcacacatgggctttggcgaggaggaggtcgaccgcgtgcggcgtttctggcaggcgccgaacattgcgcgccggccggggctgaacgcggtggatctgttccgcgcggtggccgacggtacggtgaaggcggtatggattatgggcaccaacccggtggtgtcgttgccggacgccgatcgggtgcgtcaggcgctgaaagagtgcccgctggtggtggtgtccgaggtgatggccgacaccgataccgccgcgctggcgcatatccgcctgccggcgctggcatggggggagaaagagggcagcgtgaccaattcggagcgctgcatttcccgccagcgcgcttttctgccgccgccgggcgaagcgcgcgccgactggtggatcctcagccgggtagcgcagcgcatgggctacggcgcggcgttcggctaccgccatccggccgagattttcagcgaacatgcggcactgtccggttttgagaatcaggggacgcgggcgtttgatatcagcgggctggccgggcttgaccgccaggcctggcggcagatgacgccgctgcagtggccggtgaacgcgcaatacccggcggggtgtcagcggctgtttgccgacgggcgtttcttccaccccgacggcaaagcgcggctgctgccgatcgctccgcgtctgccgcagcatgcgccgacgttgcgctacccgctggtattgaataccggacgcattcgtgaccagtggcacaccatgacgcgtaccggcaaaacggcgcgactgatgcgccatatcagcgagccattctgcgcgctgcacccgcaggatgcggcggcgctggacattgccgacggcgagctgacgcgccttgccacgcgccacggttggatgatcgcgcgtgcgcagctgacgacggaccagcggcgcggcagcgtcttcgtaccgatgcactggaatgaccgtttcaccgcgcaggggcgggtggacagcctgatcccgccggtggtcgacgcgctgtccggccagccggagagcaagcatgcgccggtacgcgtcagccgctggcctgcctgctggcaggcggagatctttttgcgcggcacggcgacgccgccggcaggcatctactggagccgggtcacgcagacgcaggcgacgcattttattatggccggccagcagccggtggcggattgggaagcctggctgcaacagcactttggcctggagggggtgacgctacagagtgcgtcgctgtcgcagcacggctatcacctgatcggctggcggcggggagaggtgcaactggcgttttacgtgcgccggcaggcgctggcgctcgatcgggcggcaatcctgacggcctttgagcaggcgccgccgtcggggccgccgcggctggcgctgctggccggccgcgccgcgccggggcaggcggcgcaggggcggacggtgtgcagctgttttggcgtcggggagccgcagattatggcggcgatcgctcagggctgcggcagcactgaagcgttgggcgaagcgctgcggtgcggcaccaactgcggttcttgcctgccggaattgaagaagctgctggcgcagcacgccggccggcaggtggcctga

SEQ ID NO: 442190 - DNA, 1254 bp, Serratia marcescens
atgccaaactcatccgccgcggccgcaggcatgccggaaacgcgctttcccgcgctggggtggctgttgccgccgctggctttgtgcgtctggttcgcgccttatatctcgctggtagcgggctgcgggctgatcgccgccgtgatgctgctgcgccagcggcccagccgcagcctgagcctggccgcctttctgatcctgacgctgatatcagcggtgccgctggcgaccaaaacgctggagccgcggatgaacgacaaggtgaattactaccttgagatgctgcaggccagcggctacggcctgacggagtggctgatgcagttttccggcgcggactttctctcgcacctgctgttcaaactgagcgccatgttgttcggcagcggcaacgccgccttcgccgctttctttattgtcagtttctcgctgctggccctgggcgtctatcgtctgacgcgggtctactttgccgtcatcctgtttctgttctgctgtcagtacaattttcaggggctgtacggcaatctgctgcgtcaggggctggcgctgtcctttctggtgctggcggcggcagagcagcgacgcgcgccaatgctgctgtggattatcctggcctctctgagccacttttcgtcctacctgtttctgcctttcctgctgctgccggcgcgctggcgcactatcggcaccctgccggcgctggcggcgttcgccgcctgctacctgggcggcgcgctgctgatgcctaaactgctggcgctggtcggcaacgactttctggcgacgcgcgccgaggcctacgtcagcggcagcttcggcaataatccgctgcggaaaattcagataacgctgctgtatatcgccgtggtggaggcgctgtatcagttttcccgcttttacttccgccaccgcgaccacccggcgctgcagagcgcctacgcggtgcggctgatgtttctctatacctgcgccatcttcttcgccaccagcagttttgaagaggtcgctaaccgctactcgttcaatatgatgattttcgtgctgatcttcatcgtcattatctgcggccagttgaaagacgccgtcagccgggtgctgctgacgctgctgtgtttcagcctcggcgtcgcttcctatctgtacatcaatctgattggcgtacagcagttttggtacggcgatctgcaggcgctgctgaccgacagcctgccggcggtgttcgccaagctacagatcagcggtgcgctgtag

SEQ ID NO: 442191 - DNA, 1290 bp, Serratia marcescens
gtgagccagaaacaaccaagtaaagagcgctttatcggcctggagtggctgagatttctgctggggtgctatgtgatggtgtaccacaccgcccaccagtacccgcaaatccgtagtattcccatgctgccggaattcaccagcatgggttttttcgccaccagtaccttctttatcctgtcgggttttctgctgagccacgtctatttcaacggcaatcaaatgcgcgaaccggcacgcactttctgggccaagcgcttctttaacctgtatccgattcatattgcggccttgctgattgccatcctgacggtcacgctgatgcagtggtgggcgattccgccggaaggccccgccgccagcctgcgctttgtgatttacgacaccaatgaagagctggggcggaccaacccggaaatgttccgtcactatatgaccaacccgcagctggcgtttaacacgctgctgcaactgctgatgctgcaggcctggaacccctacttcctgacctttaacgccccgctgtggtcactgtctaccctgttcttcttttacctgctgttcccgctgctggcgccgcgtctgctggccgtacgcaataaaaagctgtggtttgtgctgctgtgggggctgtatctgctgccggctatatgggtgatctggcagcagcaatatggcatgccgtataccggcctgttgcagcgcggcccgctgttccgcctgccggagtttctggccggcatcgtctgttacgccatcttccgtcagcgacgcgccgatgcggtgccgcacggcgccgtctggcgctggggctgcgtcgcctttatcgccgcctgctttgtcatcgccaccttcctgttcacccacggcggtgccaaatactggtacttcctgctgcataacggcctgctgctgccggcgcagtgcgcgctggtctatctgagcgcgctggcccgcaccccggccagccactgggtacagcactggtcgccacggctgggggccgcttcgctgtcgatcttcgcgctgcacgtgccgctgtttaacctgttccgcaccgttgaacagtggctgcgcggcgatccgctgggctgtttcagcagttggagcgcctgtatcgccgccgccggcgaggtgaaactgtcgattaccggctatctgctgtatctgttgctgagcgtgatgctgtgcctgctgttccaggagcgtttcgtcgtgccgctgcgcaacgcgctgacccgccgcttcctgccggccaagcgccagccggccggcaacggcggcgcataa

SEQ ID NO: 442192 - DNA, 1485 bp, Serratia marcescens
atggcagttttgattcaacatttccgcaaagttagacctatcgctgacggcagtgcggcccgccgggtttcgctgctgtgtctgttagttcctctgcttcccatcctgcctgtcgcggcggagtcgccgccggcgcccgactccgtggtgaaccggaataaaaacgccgccgccgacctgccggagctgggcggcagcacgctgctggaaagcgcgcgggaaaaagagtgggcgaccaaggccaaatcctttggtgagagtaacctgaacaaggtgtcgagggagcaactgcgcacccaggcggagaactacgccatcggccaggcgaccggtctgctgcagcagcaggcgcaggaactgctgtcgccgctgggaacggcgaatgtctcgctggcgctgacttcggacggcgacttttccggcagtaaagggcaactgttcagcccgctgtacgatgttaacggtctgctgacctacagccagctcggtttccagcagcgcaccgacagttcattggccaatctggggctgggtcagcgctgggtcagcggtgactggctgctgggctacaacacggtgtttgacagcgatctggagaaccagcgcaaccgcgccagcgtcggcgccgaagcctggggggattacctgcgtttttccgccaattactatcagccgctttcggcgatgcgtgagcagcaaagcgacggtgttttcctcagccgtccggcgcgcggttatgatattaccacccagggttatctgccgttttaccgccagcttggcgctacgctgagctatgagcagtatctcggcgacaatgtcgacctgttcggcagcggcaataaacagcgcgatccgcgcgccatgcagctggggctgaactatacgccggtgccgctgatgacgctgaaggcgcagcacaagctgggcgacggcggtgaaacgcaagacagggtggagctgtcggtcaattaccgtttcggcgtgccgttgtcgaagcagatctcgccggaatacgtggcgcaggccaagtcgctgcgcggcagccgctacgatccgatcgaacgcaacagtgtgccggtgctggagtttaaacaacgcaagacgctgcaggtgtttttggcgacgccgccgtggaacctgcagccgggtgaaacgctgcagctggtggtggatattcgcgccagcaacaagattacccgcgtcagctggcagggcgatacccaaaccctgagtctgacgccgccgcgcaacaataccgatccgcacggctggagcgtgattatgccggcctgggacgatacgccgggagcggaaaaccgttaccggctgtcggtgacgctggaagatgaaaaacagcagcgcgtgacttccaactggatcacgctgcagctgacgccgccgctgagcgccggcggcggccgggaagacgaactgtccgagccgaaaatgctgcagacgccgcaggtgccggcgcttaactga

SEQ ID NO: 442193 - DNA, 660 bp, Serratia marcescens
atgaccaccgaaactgaaggtgccgccaccatactgctgattgacgatcaccccatgctgcgcaacggcgtcaaacagttaatcagcatggattcccgcttgcaggtcatcgccgaagccagtaacggcgcgcagggcgttgagctggcggaacagtttgacccggatctgatcctgctggatttgaatatgcccggcatgaacgggctggaaaccctcgaccagctgcggctgaccgccctgtccggccgggtggtggtgttcagcgtctccaatcacgaagacgacgtcgtcagcgcgctcaaacgcggcgccgacggctatttgctgaaagatatggagccggaagtcctgctgaaggcgctgcatcaggccgccgccggtcagatggtgctgagcgaaaccctaacgccgatcctggccgccagcctgcgcgacaaccgtccggccaccgaacgcgatatccagcagttgaccccgcgcgagcgcgatattctgaagctgatcgcccaggggttaccgaacaaactgatcgcccgcaaactgatgatcaccgaaagcacggtgaaagtgcacgtcaaacacctgttgaaaaagatgaagctaaaatcccgcgtcgaggccgccgtatgggtgctgcagggaaaaaccgtcagttaa

SEQ ID NO: 442194 - DNA, 1767 bp, Serratia marcescens
atgaaatcattactggctccgctctccatcgttaatcaggtcgccgtgctgatgctgctgctggcgctgcttggcatcggcggcatgagcatctccgcctggatggcgcaaagcattcagggcaatgcgcatgccatcaacaaggcgggatcgctgcgtatgcagagctatcgtctgctggcatcgttaccgctggatgcgcgcagcgagaagctgattgctgaactgaaccgcgatgccgacagcgaggatttactacgttcggtggcgcaggaaggccttacgccgcaattttatgcgctgcgcgactactggcagcacacgctgcagccccgcctgcgccaggcacagcgccccgccgacgccgccgcgcaggtggcgcacttcgtcggcctgctggacgcgctggtatcggatatcgaccgtcagaccgaacgccggctgctggcggcaacgctggtgcagtgggtgtttatcgccctgacgctgctgctgctggccggcaccatctgctacctgcgccgccgcctgctgcacccctggcgtcagctggtcaccatggcgatggcggtcggacgcggcgatttcagccggcgcttcccccagcgcgggcggcaggatgaaatggcctcgctcggcggcgccttgaacggcatgtcggatgaactgtccaccatgtacgcacgtctggaacagcgcgtggcggaaaaaaccgccgatctgcagcagaaaaaccaggttttgcgctttctttatcacgccagccgccagttgcataccagcgatccgatgtgcagccggctgatgccggtgctcagccagctgcaaaccctgacgccgctgcgcgccatgcaggtcagactgtacgaaaacaacagccaggagcagttccagcagctcagcagccatgagccgctgcgcccggagcactgccacaatccggcctgccgcgcctgcctgagtgacgacgacatagtggatgaaggcccgacgctcagctggagcctgagcgataaactgggtaactacggcctcctgctggcgcaaagccggcagccattaagcgatgaacaccaacaactggtcagtacgctggtcgaacagcttaccagcgtattggcgattgagcggcaggtcgaccatcagcagcaattgattctgatggaagagcgcgccgccatcgcccgcgagctgcacgattcgatcgcccaatccctgtcgtgtctgaagatgcagaccagctgtctgcagatgcagggagcgggcctgccggccgacagtctgacgctggtgcagcagatgcgcgaggagctgaataccgcctaccgccaactgcgcgaactgctgaccacgttccgtctgcagctgagcgagccaggcctgctggcggcgctgcagagcacggtgcgggagttcaacacacgcctcggcatcgacatcgcgctggattatcagctcgggccacgcaccgtcccggcttaccaggcaatccacctgctgcaaatcgcccgcgaagccctcagcaatattcacaaacacgccaaggcgacggaagtccgcattcaggtgaccaaccgtcagggggaagtgacgctgaccgtcagcgataacggctgcggactgccgcccaacagcgaacgccccgaccattacgggctgataattatgcgcgatcgcgccaaaaacctgcacggccgctgtgagatcgtctccggagacgcaggcggaacaacggtcagcgtggtattccgcccggagatcccctga

SEQ ID NO: 442195 - DNA, 1395 bp, Serratia marcescens
atgtcgcacatagcaacgtcatcaaacaaaaaaacgggcgcggttattcaggactggcggcccgaggacagcgagttttggcagcagcgtgggcagcgtatcgccaaccgcaacctgtggatctcgattccctgtctgcttctggggttctgcgtctggatgctgttcagcgccgttgccgtcaatctgaacaaggtcggttttaacttcaccaccgatcagctgtttatgctgacggcgttaccttcggtatccggcgcgattatgcgcgtgccttactccttcgtgataccgattttcggcggccggcgctggacggcgatcagcacctgtctgctgatcgtcccctgcctgtggctggggatggtggtgcaggatcccgctacgcctttccacatctttgtgattatcgcgctgctgtgcggcttcggcggcgccaacttcgcctccagcatggcgaatatcagcttcttcttccctaaagcgaagcagggcggtgcgctggggctgaacggcggcctgggcaatctcggcgtcagcgtgatgcaactggcggctccgctggcgattacgctggggatgtttacgctgtttggcggcagcggccatcagcagccggacggcagccagctatggctggaaaacgccgcctggatatgggtgccgtttctgctggtcgccaccttggcggcctggttcggcatgaacgacctggcggcatccaaggcgtcgttgcgccagcagttgccggtcctgaagcgcgggcacctgtggttgctcagcctgttgtatctgtccaccttcggttcttttatcggtttttccgccgggttcgccatgctgtcgaaaacccagtttccggatgtggtgatcctgcactatgccttctttggcccgttccttggcgcgctggcgcgtccggtcggcggtgcgttgtcggatcgctttggcggcatccgcgtgacgctgatcaactttgtactgatggcgctgtttgccgggctgctgttcctgacgctgccggacgccggttcatccggttcctttatcgccttttacggcgtctttatgctgctattcctgacggcagggctggggagcggctccaccttccagatgatcgcagtgattttccgtaaaattaccgtcgaccgcgtcaaggccgccggcggcagcgatgaagaggcacagcgcgaagcggtgaccgactctgccgccgcgctgggttttatttccgctattggcgcggtgggaggattctttatccctaaagcctttggcacctcattggcaatgaccggctcgccagctggggcgatgaaggtattccttgtgttttatattctctgcgtggtgattacctggttggtatacgggcgtaagccgcgcggataa

SEQ ID NO: 442196 - DNA, 168 bp, Serratia marcescens
atgccgaatgcttattgttttcacttgattgattttatgatgaaattttatgatttcattgtcttttttttgtttgtgttggtctgcttttcttttttaattcatctggttgggtgcggtgttgtgccgggtgattgcgcagggaaacagttttccaccgggggttaa

SEQ ID NO: 442197 - DNA, 903 bp, Serratia marcescens
gtggatctcgataaaagaataacgattaggaatctcaatgtattgatcccttccaggaaaagcacccgcctacgttggaaggagtatcaaatactctcactgttggttgccaactcccccgaactggtgactcgggcagagattatagaaagcatatggaaaggtacttactgctctgattcaacgataaatcagaccattaaatccattcgccagaagatcggcgatagcgatcataccattatcagaaccatccctcgcttaggttacagggttgaaaaccgtgcaatatttaatttcttgagcgatgacagccatgatgatgaagctattttagagcacgaatctttggtgggagaggatattcaacaggaatcatctgaaagtgttggtcgggggagtttttctgaggatatggcaataagcgccgagcgcgattctgagatgaatcaagaaaaaatagcggctcagcatccgctttggcatacgcagccgtttaaaccgcaaaagagacaaacggggactttttccctgttgattacccgcggcgtcaaactggtatccgtgctggcgttattcgcggttatcgcaaatgttttcttttacctgggaagtcaggcgcgtccgctcgcggaaggaagccgtatatacagcccgacgcgggtgatgctgacgttaaagttcagcaatgccgataatcctgatgcaccttcgtcgcgctcgctgctgtgcatgtatcagggaaataagtccttgcaggtgacgattgaatgcattgatcccaagaaggggcggttccggcagcaatatcgttatgatgaaataaaggagagcagcgaaattcagcttaccctgccggacaatctgatgaactcatttgtttctcgcgaaagagagaattag

SEQ ID NO: 442198 - DNA, 963 bp, Serratia marcescens
atggatgagcgtaaagtagctattatcggtggctccggctttattggcacacggttagtcaaacgtctgcgttcgcgcagcgatctcacgctgcgcattattgataaaaatccgagtgaggattaccccgaactttatcaatacggcgatatcacgcaaccgcaaaccctgcgctccgcgctggacggttgtgacgtggcgatcaatctggcggcggagcacaaggataacgtgcagcccagttcgctttattatcaagtgaatgtggagggcgcacgccacctttgccaacaggctgcggcgctgggtattcgtcagatcatttttacctcttcggtggcggtatatggctttgtccagcaggaaaccggcgaagacggcgcctttgatccttttaaccactacggcaaatccaaactggaagcggaatatgtttatgaagcctggcgcaaggcggataagcaaaacaaattgacgataatccggccgacggtggtctttggcgaaggcaaccgcggcaatgtgtataacctgctgcgccaaattgccggcgggcgatttgtcatgattggcagcgggaataatttcaagtcgatggcgtatgtcgagaatatcgccgcccggctggaacacgcgctcgatcaacagcccgcctatcagatctgcaattatgtcgataaacccgatttgaccatgaatcagctggtgaccacggtgtcggcttcgctgggcaaaaatagcaaaacgttacgcatcccttattggttgggattgtgcggcgccggcgctctggatttggtgagtaaagtcacccggcgtcagtttcccgtcagccgcatccgcgtgcagaagttttgcgccagaacgcagttcaaaagcgatgtgcgcactgattttgttgcaccggtgcctttggaggatgcgattgccaaaaccatcaggcatgagtttcgcgcgcgctga

SEQ ID NO: 442199 - DNA, 1050 bp, Serratia marcescens
atggtttatcaactgggagtgatattttttctggcgttgctgctgatggcgatcgccaggggagtggcgctgaaactggcgctggtcgataagcccagcgcccgcaaacagcatcagggccatattccgctgtgcggaggcatcgcgatttatctgtcggtggctctgttctcgctctggcagccggacggcgtgcctcatatggcggtctacctgtgctgcgtgacggcgctgctgctgctgggcgtgctggatgaccgctttgagctgtcggtcgcgccgcgtatggcggtacagggcgggctggcgctggtgatgatgctggcggccggcatgcggctctcttcgctgggcagcctatggggcggcgaagcgttgcagcttggctacggcgccttgctggtgacgccgctggcggtgtggggcgcgattaacgcttacaacatggtcgacggtattgacggtcagttgggcatacagtcctgcgtgacgctggccggactggcagtgctgttcgctctgggcggccgtctggacacggcgttctggtgcctgagtctgattgtcaccctggcggcctacttgttgtttaacctgggtttttttgggcaccgcaaccgaatctttatgggcgatgccggcagcatggtgatgggatttaccgtgttgtggctgttgttgagcgcgacgcagggcgacggtgcggtgatgcgtccggtcggcgcgctgtggctgattgccatgccgttgatggatatggtgagcgtcatgctgcgtcgtatcgcccggcgtcagagcccgtttcgagccggtcgcgatcatctgcaccatattttgatgcgccgtggtcttagcgcccgccaggcattggcggtaagcggtctgctggctttggctctggccgttgtcggcctgtccggcgagctgatggcgtggcaggaaagcctgatgctggcggcatttatgctgtgttccggcggctatttcctgctggtacgtgaacctcggcggacaacaatggccgccggctcgccggcagccgaccgttaa

SEQ ID NO: 442200 - DNA, 129 bp, Serratia marcescens
atgaattttgattttacccgcctggcgcgggctgtagaggatccgtcggtggatgccactttcgccgcatttcactatatcaccggtgaagctgggccgcgctgcggctgcgtaattggtaaaaggtaa

SEQ ID NO: 442201 - DNA, 2187 bp, Serratia marcescens
atgataaaaaatagtgcacaacccggtgcggtggccgatgtggaagagaaactggagtgggagcgcctgatcggcctgctgtgggataaccgttggcgtctggcgctggcgaccatcttggcggcgttgctgggactgctgtacgcgctgctggcgacgccgatctatgaggcgacggcgatggcgcaggtggagcagccgaccaccggcgcgtcgctgctgcgccaatcgctggacaatgccggcgagcagttttccgctacgcaggatgagattgcgctggttaactcccgctacgtgctggggaaaaccgtggacagcctgggactgacggtgcgggtcagcgcggatgctttcccgctggtgggcaaaggcgtagcgcgtttgcttggccggccggtcccacagttggcgattgccgaattggcggtgccgacggacatgttgggtaaagtcctgaccctgagcgtgcgggagaaccagcgctttacgttgagccaggacgggcggacggtgctgcgcggccgggcgggggagacgctgcaggacggcgcatggcgtctgcgcgtgacgacgctgtccgccgagccgggcgcgacgtttagcgtggtaaagctggcgcgtcagcaggccatcgacgatctgcgccgcaatctgagcatcaccctggcgggtaaagagagcggcatcatgaccttcaaactggagaatgaagatccgcagtacgccagacggattctgcagagcatcaccgaaaactatctgcaacagaatgtcgaccgcaaaaccgaagaggcgcagcgcatgctggcgtttttggcgcgtcagctgccgcagactcaatcttcgctgaatcaggcggaaaaccggctgaaccagttccgccggcaaaatgattcggtggacctgtcgctggaagccaagtcggtgctggatacgctggtgcagctggaggcgcagcttaatgaactgaccttcaaagaatcggagatttccaagctgtatacccgcgcgcacccggcatatcgcgccctgttggaaaaacgcgccacgctggagcaggaaaaaacgcgtctgggcaaacaggtgcagaacctgccgaaaacccaacaggaggtgctgcgcctgacgcgtgatgtacaggttgatcagcaggtgtatatgcagctgatgaacaaacagcaggagttgaacatcagcaaggcgggtacggtggggaacatccgcattatcgatgcggcggaaacgacgattaagccggtaaaaccgcaaaaaatgctgatcgtcatactgtcgctattgagcggcgggacgattgccgccgcggtggttctgttgcgcggtgcttttcaccggggcattgacgatagcgccgtgttggaaaagcgcggtatcaatgtgtatgccacggtgccgctgtcattatggcagacgaagcgcaaccgcagtcagcagctgttgctgacgcgctccggcggtgagcggctgccgaccctggcgctggaacagccggaggatctggccgttgaagcgctccgcagtctgcgcaccagtctgcacttcgtgatgatggaggcgagcaacaatatcctgatggtgtccggcgccagtccggccagcgggaaaagtttcgccagcattaatctggcggcggtgctggctcaggccggccagcaggtactgctgattgacggcgatatgcgcaaggggtttttgcatcgctggctgagcaacgacgcacggcacgggttgtccgacgtgctggtcggccgcactgagccgagcctggcggtgcgcaccacggcgcaggccaatctggattttgtcccgcgcggtcaggtgccgccaaacccttccgaactgctgatgcacccgcgttttacggactttttgcgctgggcagggcagcgttacgatatcgtgctgattgatacgccgccgattctggcggtcaccgatgcggcgattatcggccatcatgcgggaacctctttgatggtggtgcgtttcgcggttaacagcataaaacaggttgaagccagcctgcgccgctttgaacagaacggcgtatccgtcaaaggcgtgattctcaacggcgtggtgaaaaaggccgttaccgatgtcggttattacaactttgcctaccccagccaccgggaagagggcgacacggtgcacaggacctag

SEQ ID NO: 442202 - DNA, 1284 bp, Serratia marcescens
atgaaggcgattttgcacaatgcgttctggctgatgctggagcgggtatcgctcagcctgtcgggcgtgttcgtttccgtctatgtggcgcgttatctggggccggcgcagttcggcgcgctgaactatctgctggcgacgatcgctattgtggtgccgctggtgcagctgggcgccgacagcgtgatcttcaaccgcgttgcccgccgccctgacagcggcgtccggctgatgatggcctctatgcagctgcggcggcggctgtttttactgctggcgctgccgctgtggttatggagtttttatcaccatccggcgccgcaaacctggatgagcacgctgctgctggcaagcgcctatttttccgtccaggacgtttacaagatttactacgatgcccggctgcaggcgaagcgcaatacgctgattaacaacctggcgttagcgctggcgatcgtcctgcggctggctttgatcggcgcggcgctgccgctggtgtggtttgccgtgccgtatcttatcgccagcgcgctgccttacctgacgcgtctgtggctgtttcgtcgcggctcaccgccggcgccgtttaacgcgcgcgcgacgcggcgctatggccgctacctgctgcgtgtcggtctgccgctggccgctgccgggctgtcgatcgtcatctatacccgcatcgatcaaatcatgctcggcaatctgctcgggccgcaggcggtaggctggtacagcgccgccgtaacgctgggccagggctggatctttattcctctggcgctggtgacgtcgctgatgccggagattgcccgctgcgccgccggtgcggaacgggaataccgtatccgtctgctgtgcctgctggcgctgctgatttctctgccggcgctgctgatactgggcggctacgccacgccgctggtgacgtggctgtatggcgaggcattccgcccggccgccgatgttttggcgatgagttccctgaccgcgctgttttcggtgctggggacggtggcgtatcgcagcatggtgctgttggccggttaccgttttattgcgctgaagatgccgctggtggcgttggccaacgtggtgatgaacgccatgctgatcccgcgttacgggttgcccggcgcggcgctgtcgacgctgctggctgaatttttctcactgtttgtgttaaacgcttttttccgcggcggacggatcgtccgtttgcaactgacctgttattacgctctgccacgttttattcgcacgctaaggaggcggcatgcttaa

SEQ ID NO: 442203 - DNA, 849 bp, Serratia marcescens
atgcttaatcgtttattgaaagggatcgttcggtgcttgcccgatgcgctgcaccatcaggtgaaatatgcgatgtactttaagcggtggccgcgtctggcgcacccgcgcggctatagcgagaagttgatgcggcgcaagatttatccgcgcagcgtttacaccatgctgtcggataaatacaaagtgcgcgagtttatcgccgggctttggggtgacgcctatctgattgaactctacgcgcacggcgcggaactgagttatgacgtatttcgccgtctgccacgccagttcgtgctcaaggccaaccacggcagcggttataaccggctggtgtttgataaggaacaggtcagctacgccgaactctacgatcaaacccggtgctggatgcgcgccaatttttatcagcaaagccgtgagcggcactaccgcgatattgagccatgcatcatggtcgaacggttgctgctggaaaacggcgaggtgccgcacgatctcaagtttcactgcttcaaccgcgatggcgtgattcgcatttttattcaggtggattaccagcgctttggcgaacaccggcgggatgttttcgatgaaaactggaaccgcacggaaattcgccttgtcctgcctaacgccgagcagcctctggccgcaccgtcgcaattggcggacatgctgcgcctggcgcgcctgacggcgcagcagttttcctatctgcgggtcgatttttatcaggtgggggagcgggtctatttcggcgagctgacgtttacgcccggcgcaggtttatcccgcctgatgccggagcgcatcgagcaggaatggggcggctactttaccgagtaa

SEQ ID NO: 442204 - DNA, 906 bp, Serratia marcescens
atggatttctcaattgttatgccaatttataacagcgcaggatttttaccgaagacgctctcccgcatttttgccgcctgtcggggattcgactaccaggtgattctggtggatgacggctcggatgcgattgatatcgctcaggtgcggcaaattgcctgcgcccacagtcaggtaatgctgcatgagaagaagcaaaagagcaatgcggcggtatcgcgcaatctgggcgtgcggctggcggaggcggaggtggtgttttttctcgacgccgacgactacttcaccaccaactatattatccgccgtctgaaataccacgaagacgtcagtattgacattatttttggtaattacgccgaggtgagcggcgtatcggtgcgcgactataccttccagtatcagagcggcagcgccggggaagatttcctgttcctggagatgggcgacatccgttcttccaccatcagcatgcgtaaaaaaagcgatcgacgctttttgtttcccgaatttctgtataagcaccaggactggggttttctggtcaacgccaccaatctgggggcgcagattgcccacgatgccggcggaggagtgtatctggacgttggccgcgccagtcggatgagcacgcgactgaacctggaagccagcgatctgtttatcgacgcgttcctgtcctcaagcgcgcagcatatcagcggcttcgcctgcaaacatctgctggcttccctctacagcgagaatcagcaggcgttcagttattactcttcgcgcactcttcagcactcgctgagcggcaaattcaaactgatcaagctgtacggcgactgcctgacgcggttaggtctttttccgctgggcggtcgtctgctgcgccatgcccgcaacggttttcggaggtga

SEQ ID NO: 442205 - DNA, 1056 bp, Serratia marcescens
atgacgtcacgcaatattgccattgttattgagaatatcgccgggaaaggcggaaccgaacgcgtcgccagtggcctggccaatgctctggctgacagcgacgacatgcgggtcacgctgttctctttcggcggcgagcgggcgttttttccgctgtcgcagtcggtgacgctgcgcccgatcggcagccgggcaccgtgttggccatggcggctggcgtgggcgctgcggcgcgggcgttacgacgccatcattgtcgtctcgatggggcgtttgtcggtggtgatgacgccgtatttgcgcctgctgtgtcccgatagccggctgctgctcagtgaacacgtcagttttcagcagtatccgtggccgatgcgctggctgaaactgctgatttatgccttgggcgaccgggtgattttgctgacgcaccgagatcgggcgcggatcggccgctggatccggcaggataaatgcctggtgatcgagaacgtttcgccgtttacgccgcagccgcccgactgcggtcaacggcgcaacgtcgccttggccatcggccggctcaccgaacagaaaggctttgaccggttgattgacgcctggcggcagatcgcccgtcaggcgccgtcatggcagctgttgatcgtcggtgatggcccggcgcggccggcgctgcaacggcagattgcgcaggcggggttggagcgtcaggtctctttgctgccggcgacgccggacgtggcgcgctattaccgtcaggccagtctgtatctgatgacctcccgttacgaggggttgccgatggtgctgattgaagcgctgagttttggcctgccgctggtggcttatgactgtcaaaccgggccggcggaactgattgagtccggggtgaacggctatctggtgccggacggcgacagcccgcagttctgcgaacgggtgctggcgctgatggcggataatgcactgcggctacgctttgcgcacgcttcgtggcggcaggcgcagcgctttacgccggaacgtatttaccccttgtggcaacggattatcacgtga

SEQ ID NO: 442206 - DNA, 744 bp, Serratia marcescens
atggaaaaagtatcagttattatgccggcctataacgcagcggcatccgtcagggcatcgattctgggcgtgctcaaccagagctttaccgactttcagctgtatgtgattgacgacgcctccaccgatgagacggcggacattgtggcgtcgctgaggaatgagcgtgtgacctatattcgcaacccgcgcaacctgggggtggcggccacgcgcaatatcggtatcgatatggcccgcggcgactacctggcgttttgcgacagcgatgacgtgtggctgggcaacaagctggcgcggcaggtggagattttgcagtccggccgctacgacgtggtgtgctcgcactattacacctttgagcaggatctgcatcaggtgaagaactaccgcggcgcggcggaggttatcgactacccggcgatgctcaggagcaaccgcatcggcaacctgaccggtatctacaatcagcggcgcaccggtaaggtctatcagcagccggtggggcatgaagattacctgatgtggctggcggtgctggaacgggcatacaacggcctggcgtactgcgtgccggaaccgctggcattttaccgggtttccgaccattcgctgtccggcaataagctgcaggcggcggactggcagtggaaaatctaccgtcagtatctggggctgtcgtaccagaaatcttgttacctgttttttgcttacctgttgaatgcggcgatgaagcggcaatga

SEQ ID NO: 442207 - DNA, 1821 bp, Serratia marcescens
atgccggcgattgccgccgccgcgctgctgcaggggatgccgccgcaggagtgtgcgccgaatctactgcaaaaccccggtttcgaacaggggctgcagggctggcgcggcgaaggtgccggagaggatagcgcggcgcacggcggcagggccagcctgcgctatcacaatcaggatgccgcccgttaccacacctttagccagacggtcgcggcgcagcccggacaggctatcgcgtttggcgcctggctgaaagggcgcgggctgcagggggcgccgcaggatcgcggcgccagcgtgtatatccagagttttgatgcacaggggcgttttctggaggggcgctacccgacgggaatcgtcggcaacagcggttggcggcatatctcggccttgtatcgcgtgccccggcgggcggcgcgggtgacgctggggctgtatctgcgccgtggcaccaccgggacggcgtggttcgacgatgcgtatgcctgcgtgctgtcgccgcaggcggcgctctatccggcgggcggtcgcacgctgattgaaacgccgcatccacagtgggtgacggtcagcagcgtgctgctcgatcggcagcgcaaagttgtcgaccagacgaaccagcggcgctatatcgccgggcgctattggctgggttatacgccgccgccgttgccgccgggggaatatcgcctgcgtcagcaggtgaccgaagcgccgacggggcgcagccgcagcagtgagatcgcgctggatatcggtcagccgacgccgacggtggcgattgacggacaggggtttacccgtcgccgaggcgaacggatatttccgctggggatttacaccacccgcagcggcgatgatgatctggcgcgtatcgccgccgccggtttcaacagcgtgctcaattaccgttatggcgttggcaaggacgccgacgctttttttcgccgcagccggcgtcacgggctgcaggttatctacgccatcaaagatctctatgccggcagccgttttgcgccggcgacgcgcggcagctatgcggcgttggccgccgcccagattaaccggctgaaaaaccagcctaatttactggcctggtatatcaatgatgagctggggctggagtttctgccgcagattgcggccaggcaccagcaggtgcagcggcttgaccgccaccacccgacgtttcaggtgctgaataaaaccgccacgctggatgactatttcaacagtgcggatattttggcgaccgatccctatccggtcggttcggagcctcacctgcgccgcaccctgcatgatacgcagcaaaccgtgcgcgcggcgcgcggggtgaagggcgcctggatggtgattcagattatggatcatgccgcctatgatgaccggcgttctgcgcgggcgccgacggaagatgaagtccgcacccaggcctggctggcgctgatcggcggcgcgcgcgggctgctgttttattcctataacgacctgttttatcagcagcggcgtggccattttgaccgcgcggcgtttgagacgcagtggcgcggtatcgcccgtgtggcgcgtcaggttaacggtttcagcccttacttgcttacgggtgacggtgtaacgctgaaattgccgggatccgcagcggcggcgcgaatcttcgtgcgtggcgaccgtgcgctgctgctggtcgccaatccggaggcgcgcccggtgacgctgcgtctgcagttgccggatggctggcgtcatcagacacgccgcgagctggagataccactgccgccgctgggcagcacccatcggtggctgcatcgctga

SEQ ID NO: 442208 - DNA, 726 bp, Serratia marcescens
atgatgacattacggattatcgcccgcctgctggactatcccgatcaggcgttgtgggatcatcaggatgagctgctggcggcgctggagccggcctgcgagctggatctgcactacagcgcgctgctgatgcagtttatccgcgagttgtgcgcccgcccgctgctggacacgcaggccgactattgcgagctgtttgaccgcggccgcgccacctcgctgctgctgtttgagcatgtgcacggcgaatcgcgcgaccgcgggcaggcgatggtcgacctgatggcgcagtatcgcgccgacgggttgcagatcgacagccgcgaactgccggattttctgccgctgtatctggagtatctcgccagccgcagccatgaggcggcgcgcgaggggttgcaggacatcgcgccgattctggcgctgctgggcgcacgcctgcatcagcgcagcagcgcatacggcgtgctgttcgacattctgctggcgctgtccggcagcgatattcaggcgcaggcgctgcagcagcaggtggccgcagaggcgcgcgatgatacgccgcaggcgttggatgcggtatgggaagaggaacagattaagtttctcggcgaaccgcagggctgcgcttccgcgcagcaaaccgcacaccagcggcgcttcgccggtgcggtggcgccgcagtatctcgatctgtcggatgcgttaaccggaaccaaaggacgctaa

SEQ ID NO: 442209 - DNA, 225 bp, Serratia marcescens
atgcgtcgtttgccgttactggtttccaatgagattgatgacagtttaaacgccatggccgcacgtcatggattagccaaaaccgaggtgattgtgaaagccttttcgttactggcgcttgccgaccatcattggttaaggcaggacggcaccacgcttgccgtggtgcgcgacaccgacggcggtgaactggaagtgatcggcaaggtgcaggggctgttttaa

SEQ ID NO: 442210 - DNA, 270 bp, Serratia marcescens
atgtgcgcgcaacggcgggagaagctggtggacgtcggcgcgctgtaccttgacgccacggcgacatttgacgaaatggagcggttgcgcctggccaggcaggtattgagcggtctgtttgtgattagcgccggcgtatttgccgcccatgcctactgggatgacaaccagccgctgcggcagatgttcgaactgctgaaaatcggcgcattgccgttggtgacgctggtggtgtcgttttactttccgaacggcgccgccggcaaatag

SEQ ID NO: 442211 - DNA, 141 bp, Serratia marcescens
atgaaagagaaagacgccgccccctggtggaaacgcgtcggctggctggtgatcatctggagcgccagcgtgctggggctgtttgtggtggcgacgattttccgcatgctgatgactgcagcggggatgaagtcgcactga

SEQ ID NO: 442212 - DNA, 1008 bp, Serratia marcescens
atgggtatcgatcttccgcttatctggtttttgattatcgtgttcagcaccatgatgtacgtggtgatggacggtttcgatctgggcatcggcatcctgtttccatgggtcaaagacagcagagaccgcgacgtgatgatgaacaccgtcgcaccggtctgggacggcaacgaaacctggctggtgctggggggcgccgcgctgtacggcgccttcccgctggcctattcggtgatcctcgacgcgctggccattccactgacgctgatgctgatcggcctgattttccgcggtgtggcgtttgaattccgcttcaaggccaccgccgacaagcgtcatatctgggataaggcctttattggcggctcgctgctcgccaccttctgtcagggtatcgtggtcggcgccattctgaacggcttcccggttgagaaccgcgcctatgccggcggcccgctcgactggctgacgccgttcgcgctgttctgcggcctgggactggtggcggcttacgccctgctcggctgtacctggctggtgatgagaaccgccggcgaactgcaggcgcgtatgtaccgcctggcgacgccgctgctgctggccctgctggtgattctggcgctggtaagcatctggacaccgctggcgcatccggaaatcgccgaccgctggttcagcctgccgaacctgttctggctgctgccggtgccgattctggtgctgctgagcgcctggggcatctggcgcggggtgaatcacgacgcgcactactcgccgtttctgctgacgctgttgctggtgttccttggcctgagcgggctgggcatcagcatctggccgctgctgatcccgccgtccatcagcctgtgggaagcggcatcgccgatgcagagccagggctttatgctggtaggcgcgctgttcatcatcccgattattctggtctacaccttctggagctactacgtattccgcggcaaggtgagccatgagcagggttaccactga

SEQ ID NO: 442213 - DNA, 1035 bp, Serratia marcescens
atgatgattattcgccccattgagcgtcgtgatttgtcagatctgctgacgctggccggtaaatccggtattggcctcacctctttgccgcaaaatgaagataccttgtcggtacgcattgagcgggcgctgaaaacctggcaaggcgaacttccccccggtgaacagtgctatctgtttgtgctggaagacagcgagcgccagcaggtggtgggcgtcagcgccattgaggtcgcagtgggactgacggagccgtggtacagcttccgggttggctcacaggtgcatgcctccaagccgctgggcgtctacaaaacggtgccgacgctgtttctcagcaatgaccacaccggccattccgaactctgcacgctgttcctcgatccggactaccgtcacggtgaaaacggcaaattattgtctaaagtgcgtttcttgtttatcgccgctttccgcgagcgcttcgcgcgcaaactgattgccgaaatgcgcggcttttccgatgaagacggccgttcgccgttttgggaaaacgtcggcagccacttcttttcgattgagttcgccgaggcggactatctgagcggcaccggccagaaagcgtttatcgccgagctgatgccgaagcacccgctatacgttgattttttgtcgcaggatgcgcagcaggtgattggcgaagtgcatccgcacaccgtgccggcgcgccgtttactggaggccgaaggcctgcgctatcagggttatgtcgatatcttcgacggcggcccgacgctggaagcggaaatcgacgatatccgcgcggtgaaacacagccggctggtaaaagtggtgctggatgagaagccgatgcgcgccgatgcgccgctgctgctggtggccaacgaaaactatcaacactatcgtgcgctgctggtcgcggccgatctgtatgacgaccgtctgcacatgaacgccgccaccgctgcggcgctcggcgtggagcagggcagcccggtgcgcgtggtggccctttttacacaggagaaagtttaa

SEQ ID NO: 442214 - DNA, 1473 bp, Serratia marcescens
atgtcacatgcggcacagttaattaatggcgtctggcgcccgggacacggcgcggcgttcagtaaaaccgacccggttgataatcaaccgttgtggcaggccaacggcgccgatgccggcgacgtggatgccgcctgcgaagcagcgcgcagcgcgtttcctgcctgggcgcgcacgccgtttgccgaacgcgagcggctggtgaagcgcttcgctgcgctgctggaagaacataaggcgcagctggcggaaaccatcagccgtgaaaccggaaaaccacgctgggaaacgctgaccgaagtacaggcgatgatcggcaaggtgggcatttccttgcaggcttaccaggcccgcaccggcgaaagccgcagcgaaatggctgacggcgcggcgacgctgcgtcaccgtccgcacggagtgttggcggtgttcggcccttacaacttcccggggcatctgcctaacggccatattgttccggcgctgctggcgggtaacagcgtggtgttcaagcccagcgagctgacgccgttaacggcggaggtgacgctgaagctgtggctgcaggccgggctgccggacggggtgatcaacctggtgcagggcgggcgggaaaccggtgaagcgctggcggccaacccgcagattgacggcctgttatttaccggcagcgcaggcaccggttaccagctgcatcgccagctggcggggcaaccggagaagattctggcgctggaaatgggcggcaataacgcgctgatcgtggaagagatcgacgattgcgatgccgcggttaatctggctatccagtcggcgttcatctccgccggacagcgttgcacctgcgcacggcgtattctggtgaaacgcggcgcgcagggcgatgcttttatcgagcgtctggtgcaggtagcggccgcgctgcgcgtcggccgctgggacgccgaaccgcagccgtttatgggcggggtgatctcttcgccggcggcagagaaaatgctggcggcgcagcaccacctgctgtcgctcggcggcaaggcgctgctgaccatgcagcggctggaaagcggcagcgcgctgctcagcccgggaatcatcgatgtcagcgaggtgccggctctgccggacgaggagtacttcgggccgctgaccaccattattcgctatgacgacttcgaccaggcgctacgcatcgccaatcagacgcgttacggcctgtcggtgggactgatctcgccgcagcgcgcccagtttgagcaactgctgctggaagcgcgcgccggtatcgtcaactggaataaaccgttgaccggcgcatccagcgccgcgccgttcggcggggttggcgcgtcgggcaaccatcgccccagcgcttactacgcggcggactattgcgcctggccgatggcgtcgttggaaagcgaaaccttgcagatgccggccagtttgtcccctggcgtgtcctttaattaa

SEQ ID NO: 442215 - DNA, 1341 bp, Serratia marcescens
atggcgggatatgaggtcaatttcgacggattggtggggctgagtcaccattatgccggactgtcgtttggtaatgaggcatctacgcagcatcagaacagcgtttccaatcccaaactggcggccaaacaggggctgctgaaaatgaaggcgctggccgatctcggttttcagcagggcgtgctgccgccgcaggagcgtccgcatttaccgacgctgcggcgtttggggttcagcggcagcgatgaagcggtgctggcgcaggcgcagcgcacttcaccgcgtctgctgtcggcggtaggttcagcctcgtcgatgtggaccgccaatgcggccaccgtatcaccgtcggccgacagcgccgatggcaaagtacatttcacccctgccaacctgaataataagtttcaccgcgcgattgaggcggacaccacgtccgccgcgctgcgggcgatattcagcgacgcgcgccattttgtccatcacgatccgctgccgcaggtggcgctgttcggcgatgagggcgcggctaaccataaccgcctggggagcgactaccaccggcgcggggtgcaggtgtttgtctatggccggcaggagtttggcggcgaatgtgagccgacacgctacccggcgcgtcagacgcgtgaggccagcgaggcgattgcccgtctgcaccagttggatgagcagcatacggtctttattcaacagaacccggcggtcatcgatcaaggcgtgttccataacgatgtgattgcggtcagtaatcagcaggtgttgttccatcaccagcaggcgtttttgcatcagcgacaggcgctggacgagctgcgacgtaaaatggccgctgtcgacagcgaactgatggcgattgaggtgccgacggcgcgggtttccgtcgcagacgcggtggaaacctacctgttcaacagccagctgctgaccaagcccgacggcaaaatgatgattgtggtgccagaagagtcacgtgagcacgccggcgtgtggagctatctgaatgatatggtggccggagcagggccgatcgaccagatccaggtgtttgcgctgcgcgagagcatgcgcaacggcggcggcccggcctgtctgcggctgcgggtggcgctgaacgaggaagagctgcgcgccgttaatccgcgggtgatgatgagcgatcaactgttcgccacgctgaatgactgggtcgatcgctattaccgcgaccgcctgacggccgccgacctggccgatccgcagctgctgcgcgaagggcgggaggcgttggatgcgctgacttccatcatgggattaggatcgatttatccgttccagcagtga

SEQ ID NO: 442216 - DNA, 984 bp, Serratia marcescens
atgtttgatctattggccatgaccttggcgggtgaagtgcctgcggcgcagcagggggagacggcgacgctgcgctggcgctggttaggggaagggctgctggagatctgtccgcaacagggctaccaacaggcggtgctgctttccgccgggattcatggcaatgaaaccgcgccgattgagctgcttaaccaactggtcagcgatgttttacgcagcgtgcggacattgacggtgcgtttgttggtggtgctgggcaacccggcggcaatgcgcgccgaccggcgctatctgcatgccgatatgaaccgcatgtttggcggccgctaccgtgattttccggccagcggcgaaacggcgcgcgcgcagcagctggagcagctggcgacgaacttttttcagcatgaaacggcagagcgcttccattacgatctgcataccgccatccgcgaatcacgcctgccgcgctttggcattttaccgttccagacgcgtagttatcatccgcagctgctggcccggctggatgcggcagagctggacgcgctggtggttcaccgggcgccgggcggcaccttcagccactttaccagcgagcacctgacggcggccagctgtacgctggagttaggcaaggcgcgtccgttcggacagaacgatctggcgcagtttgccgccatcaaccgtgcgttgcaggggctggtcagcggcgaagcgccgtcgccgcgtcaggggccggcgatccgcgttttccacgtagagcagtcgctgattaagcgccagcaggactttgtgctgcacctgaacgatgatacagccaactttaccgagctggagcagggccggctgatcagcgagcagagcggtgaggcctatcgggtgcaacatgccaaggaatggattttgttccccaatccgcaggttgcgctggggttacgggccggtatgctgctgacggaggttgaacgcagtacgctattttag

SEQ ID NO: 442217 - DNA, 1080 bp, Serratia marcescens
atgatgaaacgcagtgtattaagcgcggcgcttgcgctgggcgcaatgtcttcattagccaatgcggcagaaatctataataaagacgggaataagctggatctctacggccgggtcaacgccaagcactactttattcataacgatgagagcggcggcgataagacctatgtgcgtttcggtttcaaaggtgaaacgcaaattaacgatcggctgacggggtatggccagtgggaatacaatgtccaggcaaacaactcggagggcagcgacgccagcaacggtactaaaacccgcttgggctttgccggtttgcgcttcggccaatacggctcttttgactatggccgcaactacggcgtggtttacgatgcggaatcctataccgatatgctgccggaattcggtggtgattcctacagctataccgacaactttatgaccgcccgctccaccggcctggcgacttaccgcaaccgcgatttctttggcctggttgagggactgaacattgcgctgcagtatcagggcaaaaatgaaagccgcgagctgcggcggcaaaacggcgacggctacggcctgtcgctggactatcaggatatcggcggcagcggcatcggctttgcggcggcctactcggattccaaccgtaccggcgatcagaaacgcgcgaaaatcggtgagggcgacaaggccagcgcctggacgacggcggtaaaatatgacgccaaccaggtgtatctggcggcgatgtatgctgaaactcgtaatatgacgccaatcagcgtcaacggtgagcagggctttgccaacaagacacagaacattgagctggtggcgcagtaccagtttgagaacggcctgcgtccgtcactggcctatgtgcagtcgaaaggcaaggatatagaaggaataggggatgccgatctggtgaaatattttgatgttggcgcgacctactacttcaacaaaaacatgtacgcctatgtggattatcagattaaccagctgagcgatgataacaagctgaagctcagcaacgatgatatcgtggcggtcagcctgacctatcacttctga

SEQ ID NO: 442218 - DNA, 192 bp, Serratia marcescens
atgtacgctctggtgatgtttgtctgctatctggacggcggttgcaccgatatcatggtggatattctgcgtgacgaacagcagtgtctggtggcaatgaaagaacagaacctgcgccacgccggctgctatccggtggaggactttattgacggcttctggctgcccgccaatgagtatgccacgttttga

SEQ ID NO: 442219 - DNA, 447 bp, Serratia marcescens
atgggattgtttaacttcgttaaagaagcaggcgaaaaactgtgggacacagtgaccggtaatgcagacgcggccgatcagagcgctaaactgaaagagcaccttaacaagagcggcctgccggataccgacaaggtagatgtacaggtggttgatggtaaggcggtggtcagcggtgacggtatttcgcaggaactgaaagagaagattctggttgccgtgggtaacgtggccggcatcagcggcgtggaagatcacatcaccgttgctcaatcagcgggtgaaagcacgttctataccgtgaaaaaaggcgatacgctgagtgcgatctcgaaagaggtctacggcgatgccaaccagtacaacaagatttttgaagccaataagccgatgctgtccagcccggacaaaatttatccgggacaggtgctgcgtattccgcagtaa

SEQ ID NO: 442220 - DNA, 165 bp, Serratia marcescens
atggagcatgaactccataacgaaaccaaactgattgccattatcgggctgctggtttccgctttgctggtggtatccgttctgtttggcatgacctacttttccgatctaaaacacaccgatgataaattggatgtgaaaggctgttatatcaaaaacccatag

SEQ ID NO: 442221 - DNA, 240 bp, Serratia marcescens
atgtccaatgcgttaactcacgatcaggaaatcgcctccgatctggtcgcctgccagctggtgattaagcagattctggatgtcattgatgtgattgcgccgaccgaggtgcgtgacaaaatggccggccagctgaagagcattgatttttcaacgcatccggcgggcgccgatccggtgaccaagcgggcgattgaaaaagccgttgccttgattgagctgaagttcaagcaggattaa

SEQ ID NO: 442222 - DNA, 234 bp, Serratia marcescens
atgagtaagttaatcaaactggtggtggtggtggccgtgctgtacggtgcgctgctgttttccggctatggggtactgatcggcagtcaacaaaacgtcgccgggttgggattacagtgcaaatatctcaccgcgcgtaatgtggtaaccgcgcaatatttacacggcgacaacggggttatcggcatttccgactgcccgctgttcaagaaaatagaaacggtggtggactaa

SEQ ID NO: 442223 - DNA, 273 bp, Serratia marcescens
atgtctgatgcagggttttctccgtcgctgctctctttggggattgcgctggtcgcgctgttgctgggattgtgggtgtggtttttggtaaaccgcgccagcgtgcgggccaacgaacaggttcgtctattgcaggaaatcgccgagcagcaacagcagcaaacggcgctgctgaagcagatagcgcgccagtcgcgcggtgaatcggtgtctgctgtcgatgacgatttcgggccggcgatggaattcaaagatgtcatccccgagcgctaa

SEQ ID NO: 442224 - DNA, 426 bp, Serratia marcescens
atgatcgccggactgaaccacctgacgctcgcggtacgcgatattgaacgcagttttcacttttatgtacgcacgttggggttaaaacccctggcacgctggcgacagggggcatatctggccgccggcgacctttggctatgcctgtcgctggacgacgcagcgtcaccctcgcccgattacacacattatgctttcagcgtcccgcaggcggattttgctaccagcgtcgcgcgtttgcgtcaggccggcattcgcgaatggaaaagtaaccgtagcgaaggcgaatcgctctattttctcgatcctgacggccaccggctggaactgcacgcaggcgacctcgccagccgtctggcggcctgccggcggcaaccctatcaggagatgactttttttgaggatggtgagaaggctgatggttaa

SEQ ID NO: 442225 - DNA, 315 bp, Serratia marcescens
atgattaaatggtacgaagaaagtgacgccgaggtaaaccgcagtattgcaaggcttaccggagaaaatccggacaaatggtacccttacggcggcgtaaaaggtaaagactactgcaagaacccctccgatgcctggccgattatctgcgccaacaaaatcagtctgaatcccgccgaacactgcgaccaatcgcagtggcaggcgcgtatctccaccgctcacggagaatggcaggcggacagcagcagcccgctgcgcgccgcgatgatctgctttctgctgagccagcagccggacgacgcgtcttactaa

SEQ ID NO: 442226 - DNA, 297 bp, Serratia marcescens
atgggtcgttcatcatcacgccaatcacgcagccgtctggggcgccttcgcagcgcgatgcgggcgcaggcgcagtattggaaaatgtatgccgccatgaaactgcgccgcctgcgcgttccgacgccgctggtgctgctggccggcgccgtcatgagcttttttgttctggggctgatgatggccagcgtcgtggcgatcgatatcatcaccacgctgttcctgctgtgtagaaaagtgttcggtgcgggccgtcatccgcagggcaaacgcactatgcccgccggcagccgctaa

SEQ ID NO: 442227 - DNA, 1011 bp, Serratia marcescens
gtgaagcgagcagcaaacaggaaaggggcggttaaccgctactatgacgccggtaaggcgcatcatacgccgcaagggtttcgcaacccggaaccgtcgctgcggcgcgaaggggatttacgccgctggcaggacgagcgtaagcggctcggtttgccgtcgccgccgcaggccggctaccggcgttttgttgagcagtggtggcaaccggcggatctcggcggcgcacatgacggcgtctggtggctggggcatgcggcgttgctgctgcgactgtctgggcgttatatcctgatcgatccggcgttgtcggagcgggcgtcgccgctgagtttctacggcccgaagcgcaaaacgccggcgccgctgtcggtggcgcaactgccggcgctggacgtgctgctcatctctcacaaccattatgaccaccttgaccggcgcactatccggcaactggcgcggcgcttcccgcaggcgaccgtggtggtgccgctggggctgaagcgctggttccgccgttatcgctttgcccgggttgaggagcttgactggtgggacagcctgactctgggggagacggcgctgcacgccgtgccggctcggcactggagcatgcgctctctctgggaccgcaaccggtcattgtggtgcggctgggtgattcaccacccggcgctgcgcttttatttttccggcgacagcggttattccgaacgcctggcggagataggccagcgactggggccgtttaatctggcggcgctgccgattggcgcctatgcaccgcgctggtttatgcaagagcagcatatggatccccagcaatcggtgacgttgtatcaacaattgggcgcgccgcgcgccattccgatgcattggggcgtttttgaactggcggatgagtcactggatgaaccgcctgagcagcttaggcaagcgctgcaggctgccggcgttgaaccggacggcttccggccgattaaaatcggcgcgcagatcgcattgccctga

SEQ ID NO: 442228 - DNA, 390 bp, Serratia marcescens
gtgccaaatgttgcccagcagataattattatacaacaagagaaattatgcatcactgaagactcccgtggctctagctcgcgtgcgatggccgaatgcgccgatcttttgctgtcagactctcaacagcagctggataaccgaatggccgaagtcaaagactacctggcttattacgaccgcagcaccaagggctatgaagacaacggaaaagagtacctggcagcgttcaataaatatttggcaacgtggcgtgagtatgtcagcgccaaatgcggttttctgtattttgaattcaatgatcctggtaaatatatagaaacgcatacctgccaggcagcagaaaactaccagctggaaacctcactgcgtcgctttggctcaagttaa

SEQ ID NO: 442229 - DNA, 588 bp, Serratia marcescens
atgtcagagccaacggtggcgagaggaaagtttacttatgataacgagggtaatgattcaggaaaatggaattcacgacatttacattggccagaaaaatactctggcgtcactatcggccacggctacgacttaaaacaccgccaaagggaacaggtcattcgcgatcttacctgcgcaggcatcagccaggagaaagccgaactgattgccggtggcgtcaaactgacgcgcgacgcagcgcgaaattttgtacgtactcatcgcgatcaaatcggagagatcaccacaagtcagcagattctgttatttaaccgagtttatgctgaatatgaacgagtggcaaaacgtgtatataaacgtcacgcagcatcagaaaatggttatatcctttgggaggacttatcatctgaaaccagagagattattacagatatggtgtatcacggcgtcgccaacataaaaacatatagatcagcagcgagagataacaaagaggaactgattaaccacattctggataatattaatggagacctggcaagacacaacgccagaatcaattacctgaggaacagtaaacagtaa

SEQ ID NO: 442230 - DNA, 714 bp, Serratia marcescens
atgaccgattattccgcactgctcagcgccatcccggccattcagcacggctttggcaacaaaagcgcgctgctgcccgaatcgctgctgccctaccgcgatacgctgcccgagaaaaagcaggtgcacggcacacgcatcgtcgatgtgctgcagccagggcagctctgcggcgaggcagacggattttacaccacgcagccgggcattttgctcagcgtgctgaccgcagactgcctgccggtgatattcagccgccgcgacggtgcggcgatcggcgctgtacacgccggctggcgcggcctgctggacggtattctggaacagatggcgcagcgcatcgcgcacgatgacgatcccgccaactgggtggccgccatcggaccggctgccggcccctgctgctatgaagtcaatgaagagctggtagcgcagtttcagcagcgtctgccgcagccgcccgcgctgatcagcccgcgctttcgtcacctggatctggccgccatcgcccacgataagctgacggcgctgggtttttccgccgtcgatcacaccggcagttgcaccatctgtacgctcaacgatgagccacaacagccgcagcgctttaaatacaccagttttcgccgcaacagccaacgtcgggcgcaggatccgcaacatcccgatatcaaagggcgtaatcagtacgccgccatcattatcaatccctga

SEQ ID NO: 442231 - DNA, 819 bp, Serratia marcescens
atgtcctatctttgcccgttgtgccagttgccgctgctgctcacccagcaacagtggcgttgtgaaaataaccatcagttcgattgtgcaaaggaaggctacgtcaatctgttgccggtacagcacaagcgctcgaagcagcctggcgacagtgcggagatgatgcaggcgcggcgcgcctttctggagggcgcattttaccagccgctacgtcagcgagtggctgagctgctggataatgcgctgggcgccgatgcgcagacgctgctggatatcggctgcggcgagggctattacaccgccgcggtggctgaacggctgcgagagcagcgccagatggccgtttatgggctggatgtggccaaggtagccattcgctatgccgccaagcgttaccctgaggtggcgttctgcgtcgcctccagccatcgcctgccgtttgccgatgcatcattggacgcggtattgcgcatctatgcgccttgtaaggcggccgagctggcgcgcgtggtgcgtccgggtggggtggttgtgacggtgtcaccggcgccgcgccatttatatcagctgaaagagcaggtttatcaacaggttcagctacatgacgagcatgatgagacgctgagcggttttcaacgtgaacacagcgaacggctggcgtatacgatggcgctgccgggcgagcaggcggcgaatttgctgcagatgacgccatttgcctggcgcgcctcgccggaggtgcagcagcggctggcggccagcgacgtctttgattgtgagacggactttgctatcagcctgtaccgccgcgaggcgtag

SEQ ID NO: 442232 - DNA, 471 bp, Serratia marcescens
atgtcgctgacggatatcgccatcgtgctgtttattgtcttgctgttgctgtacgccatttatgaccaaatcatccaggagcggctcaaaggccctacgctgcttaaagtaaaactcaaacgtcgccaccgcatcgacagcctgatttttgtcgcgctgctggcaattttactgtaccgcaatctggtcaatcagggagcgccgctgaccaactggttattaatctctttggcgctggtcgccatatatcttgcttatattcgctggccgacattattatttaaaacgcaaggtttcttttatgccaatgcctttattgcctattcccgcatcaaggcaatgaatttaaccgaagatggcattctggtgattgcgctggaacagcggcgcttattgattcaggtcacccagttagacgacctgcaaaagatttataattttttcattgaaaatcaaaacattaaaacgtag

SEQ ID NO: 442233 - DNA, 1548 bp, Serratia marcescens
atggaatttttaatggacccctcaatttgggcagggttactgaccttagtggtattggagatcgtactgggtatcgacaacctggtgtttatcgccattttggcagacaaactgccgccgaagctgcgggataaggcgcgaattctgggcctgtcgctggcgctgattatgcgcctggggctgttgtcggtgatttcgtggatggtcacgctgaccacgccgctgttcagcgtggcggagttcagcttctctggccgcgatttgattctgctgttcggcggtgtgttcttgctgtttaaggccaccatggaattgcatgagcggctggaagggcactcgcaccaggatgagggcaaccgcggttatgccaagttctgggcggtggtggtgcagattgtgatccttgatgcggtgttttcgcttgatgcggtgattaccgccgtcggcatggtgaacgatttgccggtgatgatgaccgcggtggtgatcgccatggcggtgatgctgctggcgtccaagccgctgaccaatttcgtcaatgcgcacccgaccattgtggtgctgtgcctgagcttcctgctgatgatcggcctgagcctgatcgcagaaggtttcggcctgcatattccgaaaggctacctgtatgcggcgatcggcttctcgattctgatcgagctgtttaatcagattgcgcgtcgcaactttatcaagcatcaggaacgtcggccgatgcgtgagcgtacggcagaggccattatgcgtttgatggggcagcagcgtgctcagcagcaggcgacggaagacgtactgctgccggcggatgaagccttcgcggaagaagagcgctacatgatcagcggcgtactgacgctggcctcgcgctcgctgcgcagcgtgatgacgccgcgtactgagatctcgtgggtcgattgcgatcgctcacgcgacgaagtgcgggcgcaattgctggatacgccgcacagcctgttcccggtgtgccgtgatgagctggatgaagttatcggcgtggtgcgcgccaaagatctgctggtggcgttggaacagggcgaggatatcgccgagtttgccgcacgtacgccgccgatcgtggtgccggaaaccatggacgtgattaacctgctggcggtactgcgccgtgccaagggccgtctggtggtggtcaccaacgagtttggcgtggtgcaggggctggtaacgccgctggatgtgctggaggcgatcgccggcgaattcccggatgaggatgaaacgccggatatcgttgccgacggcgacagctggctggtgcagggcggtgcggatctgcattctctggagcaggcgctgaactgtcaggatctggtgagtccgacggaggattatgcgtcgctggccggtttcctgctgtcgcattacggccagatgccggcggtgggcgaagtgctggaacagaacggtttacgctttgaaatcctggcggcgtccgaataccgcattgaactggtgaggatcagtcaggtaatgccggaacaggcagaccccgagtaa

SEQ ID NO: 442234 - DNA, 1611 bp, Serratia marcescens
atgttaatgacccaatttgctgtcaacaagtaccgccattatcgctggttgctcgccggcgcggttgggttggctatcctgttaatctcattatacattcgctactatcaggaagttaaaaccatcgaacgcagccaacagcggctggcggcgcacaccattaccaaaatagaacgccttttgcagccggccagcgagcaggcccggcacacgatggcgctggtcggccgcccctgcagcacactgaccgcgacgctgcgttatcgcgcggcgcagaaccaggcgctgcgctccgtgctgttggtcaaagataacgacatttattgttccagcctgttcggccaacgtcagtatcagctcgacgccctcttgccacaactgcgcccgaccgccgagacgcagttggtgctgcgtccgtcgctgtcggtgaccaaaggcctgccgacgcttgtcatgtggacgccgcaggctcaggacgtccacagcggcattctgcacgtgttcaatatcgacctgctgtcggattttttgctggagccgcaacagccctacggccagcgtatcgtgcttaacgtcggcgcacagagcctggagtatgccaaacgagaaatcatcgacagcaacaccctacgcggtaacctgcgctatacctcagcctccggactgtatcccttcaccatctcgctgttcggtccctcaacccagcgaatggcgctcgacgcgctgcccgcccatataccgctggcattgctgatcagcctgctggctgcctatgtggtctatctgattaccgccaatcgcatgagcctgtcttaccatatcagtcatgccatcaaccgccgcgagttccaggtttactgccagccaatcattaacggcgccagtggtcgctgtctcggcatagaaattctgttgcgttggaacagcaaacgacaaggctggatctcgccggacgtgtttatcccgctggccgagcagcacgggttaatcacccccctgacccgctttctgatgaccacggtggtggaaaatctggcgctgttcccgccgcgtccttcgttttatatcagcatcaacgtcgccgccgagcacttcaacgcgcagacgatcctcgccgatatccgccgcatctggctgccggccaaccccatgccgtcgctgatgctggagctgaccgaacgcaccgcgctgtcggagattcaatacgaacatattcgcgcgctgaaagaactgggcgtcatgctggcgattgatgatttcggcaccggccacagttcgctcagctatctgaaaaagctgagtccggacgtattgaaaatcgaccgcgcctttaccgccgcgatcggcaccgatgccatcaacgccaccgtcaccgataccatcatcacgcttgcccaccggctgaagttaaaactggtggccgaaggggtggaaacggccgaacaggccgactacctgtgcctgcgtcaggtctatgcgctgcagggctattactttgccaagccgatgccgattcaggagttcccgcagtggctgcagcactatgaaacgcaccagcgtgcagcgtcggaagtcccccacgcggggggagaaatgaaaccggaggcctga

SEQ ID NO: 442235 - DNA, 192 bp, Serratia marcescens
atggctgcagcggttaaaaaccgcgcagggaacagcgatattgtaaagaggccttacgggtttggcgctctttttcgcatgaaattaaataatccgtggcgtcacaaaatgggtgatggctacgggcatggcgcctgccgtaagcagcgtcgtaccgagcgtctctcgggccatcgcgccggcgttccttaa

SEQ ID NO: 442236 - DNA, 579 bp, Serratia marcescens
gtgaacccaccgacctatcccgattcgctggccgcctttatcagccgttttcagctacagctgccgcaggcggtacaaacgccgcacggcgtacgcgccgccgccgtgctggtgccgatagtatgccgtgaggagcctatgctgctgctgacccgacgcgccgatacgctgcgcaaacatgccggacaggtggcgttccccggcggcaaggccgatctgcaagacgcctcactgattgccaccgcgctgcgtgaagccgaggaagaagtcgctattccgcccgccgcggtgcaagtacttggtcagatggcgccgctcgacagcagcagcggttttcgcgtgacgccgatcgtcggtctggtgccggccgatatccgctttcacgccaatgagggcgaagtggcggacgtgttcgaaatgccgctgcacgaagccctgacgctgtcacgctattacccgctggatattcaccgcaacggctaccgccaccgggtgtatctgtcctggtatcagcgccgcttcgtctgggggctgaccgccgccatcatccgtcgtctggcgcagcaggtcagcctgtaa

SEQ ID NO: 442237 - DNA, 1374 bp, Serratia marcescens
atgactgctaccgctccgcaccttaaatccttgccttatacccgcgacatgctgctgcagctgttttccccgttgtccgcacagccgtgggccatgctgctgcattccggctttgccgagcactcccataaccggtttgatattttggtggccgatccctgcgttacgctgaccacccgcggcgcggcaacggacatccgccatggcgacgactgtctgagttcgacggacgacccttttactctgctgcaacagcagctgtcagcgctgcctttcaccccgtcagccgatgacaatctgccgtttcaggggggggcgctggggctgttcggttacgatctgggacggcgggtagaaacgctgccgacgctggcccgggcggaactgacgctgccggatatggccgtcggcatttatgactgggcgctgatcgccgaccaccagcaacagcggctcaccctgctgagctacggcgatattgaacaacgctggcagtggctaaacagccaacggccggtgccggcggcgacgttccagctcaccggcagttggcaggcgaatatgacgcgggcgcagtacggcgagaaatttcagcgcattcaacattacctgcgcagcggcgactgctatcaaatcaatctggcccagcgcttctccgcgccttatcagggcgacgaatggcaggcttttctgcggctgaacgacagcaaccgcgcgccgttttccgcctttttacgtctgccgcacaatgcggtgatcagcatttcgccggagcgctttttatggctggagcgccagcaggtacaaacccggccgattaaaggcacgctgccgcgactggccgacccgcaacaggacgcggctcaggcgcagcggctggccgagtcgccgaaggaccgcgccgaaaacctgatgatcgtcgatctgctgcgcaatgatatcggccgcgtcgcgcagcccggcagcgtgcgcgttcccgaactgttcgtcgtcgaacccttcccagccgtgcaccacctggtcagcaccattaccgcccgcctgccggccgccacgccggcgagcgaactgctgcgcgcctgctttcccggcggctccattaccggcgcgcccaaggttcgggcaatggaaattattgaagagctggaaccacagcggcgcaacgcctactgcggcagcatcggctatatcagcgcctgcggcaccatggacaccaatatcgccatccgcacgctgatgactgaaaacggtcacattcactgcgccgctggcggcggcatcgtggccgacagccaggaacaggcggaatatcaggaaacttttgataaagtaggcagaatcttaccgcttctgggggagtttaacccttcgtga

SEQ ID NO: 442238 - DNA, 1011 bp, Serratia marcescens
atgtcgttaatgctgagcgttatcgtcccgatgcataatgtgggcgaattactggtgccattccttgagtctttattggcgcagcaggaacaacgtctggaaattattatcgtcaatgacggcgctaccgatggttccgcggaaatagcacacgactatgccgcacgttatgaacatattcaggtcatcgatcagaataatgccggcgtttcagtggcgcgcaatcgcggcctggcggtggcgcgtggtaaatatgtcgcgttccctgatgccgatgatgtattgtcgccggagatgtacgcaacattaatcgagcaggcggaaaaacatcagctggatgtgatgcagtgcaacggcgagcgttatttcgagcacaatggtgagctgctgccgattattccgccgcagcgtttggcatccaccgacgttattagcggggttcggtggtttgaacgcgcattaaattcgcggaagtttattcacgtggtatggctggcgatttatcggcttgattttattaaacaacaccggctctattttgaaccgggtttacaccatcaggatattccgtggactaccgaggtgatgtttaacgccaggcgggtgaaatatctcagcacgccgctgtatcgccagcgcgtacatggccagtcgatcagtaaccgccgccgcaccggcgcggcgaacgtcgactatcagcgtcattatatgaagatcatcgatatgctggtggcgttgaatcaacgctacgccgatcgtattgccatccgcccggcgtttcactggcagattacccgcgaggcgctgggaatttgccacagcgttcgccgcgagccggaaccggcagcgcagcagcaaatcgtacgtgagttctatcagcgtggtatggacgtagtgatggcggccaatgcgcgcggaattaaacagggctggcatgtgctgctgtggcgccatcgtctgaagcggtggcgaagcgaggatgtcggctattcacaggccgcgcgaccctaa

SEQ ID NO: 442239 - DNA, 255 bp, Serratia marcescens
atgcttggaatgccgtcgctgaaccaccaggaacagcaggaagccgcagagcgcatccatcagctgatggagcagggcatgagcagcggcgaagctatcgcccgcgttgcacaggaaattcgtgaaaagcatcagggagaacgggttgccgtgctgtttgatgaggaagacgaggctgatgatagcgcgcccgatgggcaggatacgtcccgtcaggatgccgacccgcaacacgaagacgacgacgattattga

SEQ ID NO: 442240 - DNA, 1179 bp, Serratia marcescens
atgctaactattggaaccgccctgcgcccttccgccacccgtgtgatgctgctcggatccggcgaattggggaaagaagtggctatcgaatgccagcgtctggggctggagacgatcgccgttgaccgctacgccgacgcaccggcaatgcacgtggcgcaccgcagccatgtgatcaatatgctggatggcgaagcgctgaagagcgttatcgaacaggagcgccctgactatatcgtgccggaggttgaagccatcgccaccgcaatgctggtgcagctggaacaacaaggccaccgggtcgtcccctgcgccgaagccacccgccttaccatgaaccgcgaaggcattcgccgtctggctgcggaaacgctcgggctgcccacctccacctaccgctttgccgatgatgaagagagctgccgacaggcaatcgcacatatcggctacccttgcattatcaaaccggtgatgagttcctccggcaagggccagagcctgctgcgcgatccttcccaactgagcgccgcctgggactatacccagcggggcggccgcgccggcggcggccgggtgataatcgaagggctggtcaaattcgattttgaaattaccctgctgactatccgcgccgtcgacggcgtgcatttctgcgcgcctatcggccatcgtcaggaagatggcgactaccgtgaatcctggcagccacagcagatgtctgccctggcgctggagcgtgcgcaacagattgccgcccaggtcgttacagcgctcggcggttacggcctgttcggcgtagagctgttcgtctgcggtgacaacgtcattttcagcgaggtttcgccgcgtccgcacgacaccggcatggtcacgctgatttcgcaggacgtctcacagtttgcgctgcacgtgcgcgcctttctcggtctgccaatcggcgccatccgccagttcggcccggcggcatccgccgtgattttaccgacgctcgacagcggcgatctgcgctttagcggactggataaggcgttggacggcaccaatcagctgcggctgttcggtaaaccggagattgccggacggcgtcgtttaggcgtcgcgctggcctgcggcgacagcaccgagcaggcagtggagcgcgccaaacaggcggctgcagcggttgtggtgcaaggttaa

SEQ ID NO: 442241 - DNA, 1383 bp, Serratia marcescens
gtgagcacagtttccttttcttccctgtcgctgccagccgcacagttggccaacctcaacgaactggggtatgccgccatgacgccagtgcaggccgcggcgctgcccgcaattttgcaagggcaggacgtacgcgccagagcaaaaaccggcagcggtaaaacggcggcgttcggcattggcctgctggataaaatcaatgtcgggcaggtggcgacgcaggcgctggtgctgtgcccgacgcgcgaactggccgatcaggtcagcaaagagctgcgccgtctggcgcgctttacccagaatattaaaatcctgacgctgtgcggtggccagccgatggggccgcagctggattcgctggtgcatgcgccgcatatcgtggtgggaacgccggggcgggtgcaggagcacctgcgtaaaaaaacgctgcagttggacgcgctgaacgtgctggtgctggacgaggccgaccgcatgctggatatggggttcgccgacgatatcgacgatgtgattgcctatacgccgccgcagcgccagacgctgctgttttccgccacctatcctgacggtattgagcgtatcagcgcccgcgtacagcgtacgccgctcagcgtggaagtggacgacgatgatgcgccgcttaccatcgaacagcgcttctatgagacgacgcgcgaccagcgtccggcgctgctgctggccgccatccggcattatcagccggcttcctgcgtggtgttctgcaacaccaagcgcgactgtcagagcgtgtgcgatgcgctggaagcacgtgatatcagcgccttggcgctgcatggcgacctggaacagcgcgaccgcgatcaggttctggtgcgttttgccaaccgcagctgccgcgtcttggtggcgaccgatgtcgccgcgcgcgggctggatatcaaagatcttgagctagtggtgaactacgaaatggctttcgacccggaagtgcacgtgcaccgcgttggccgtaccggccgcgccggcatgagcggcctggcgatcacgctgtgtacgccgcaggaaatggcgcgggcgcatgcgttggaagagtatctgcaactagatctgaagtgggcgcgggtaagcgaactgagcggggcgagcaacgcgccgctggaagcagagatggccacgctgtgcatcgacggcggccgcaaggcgaaaattcgtcccggcgatattctgggagcgctgaccggcgaagcggggctgactgcggcggaggtcggaaaaattgatatgttcccgatgcatgcttatgtggccatccgcaagaacagcgcccgtaaagcgctgcagcacctgcgtgaaggcaaaatcaaagggaaaaactgcaaggcgcgcctgctgaaataa

SEQ ID NO: 442242 - DNA, 321 bp, Serratia marcescens
atggcggttgaagttaaatacgtagtggtcagaaacggtgaggaaaaaatgacgttcgccagcaaaaaggaagccgacgcttacgacaaaatgctcgatctggccgataatctcggtgaatggttgcagcaggcgccgctggtgctggatgaagaacagcgtgacacgctgagcttcttcctggcggaacataaagagatgctgacgcacattctgcgcggcggtgcaccacagcaggcggacgctaaggcggcaaaaccgaagagtgacaagaaggcggcgacaaaagcgggaagcgcgtcggaaaaacaggctgcttaa

SEQ ID NO: 442243 - DNA, 309 bp, Serratia marcescens
atgggcggtgaaatcacgttcttcagccgtttcgagcaggatattttagccgaacgtaaaaccatcaccctgcgtgatgccagcgaatcgcatttccagcccggcgacgtattacgcgtcagtcgccacgaagacggagcgtttttctgttttatcgaggtgttgtcagtgacgccggttcgtctggacgcgttgaccgaacagcacgccaggcaggaaaacatgtcgctcgatgcgctgaggcaggttatcaaggagatctatccgggggtggatgaactgtttgcgatcgtgtttcgtaaacgttga

SEQ ID NO: 442244 - DNA, 366 bp, Serratia marcescens
atgagagcaacaggattggggctgaccaccgtgctggcggttattttgggttttaccggcagtgctcaggcgcagcagcatgagcagcggacggcgaaggttggtctgtgcgccgggctgcaggcggcggacgtcgccgcacaggtaaagcgcgatttcctgcaaaaccgcatcacgcgttgggcatcggataaaaaactgctcggtaccgcaacgccggtcgcctgggtcagcccggatgcggtcagcggtgaggacgacctctggcaggtgccgctaacggtgcgcggcagcaaggcggataaaacctatcgcgtcacgcttaactgcaagaccggcgatatcgcttacagcgaaccgcagtaa

SEQ ID NO: 442245 - DNA, 654 bp, Serratia marcescens
atgaaaaacagttggatgcagcagattcaatcgctgttggggcaaaaaaaaggcgcgaacagcagtacagaaggcatcggcaaattgttggcgcccggtgcgctgggcggattggttggcgtattactggcgaataaatcctcgcgcaagctggtcggtaaattcggtaaaaacgcactgattatcggcggcagcgccgcggcaggcgcggtgctgtggaacaaatacaaatcacgggtgaaagatacccatcaggatgagccgcagttcggcatgcagtcgacgccggtcgatctacgcgccaagcggctggtgcaggcgctggtgtttgcggcgaaaagtgacggtcatattgatgatgacgagcgtcgtgccattgacgacagcctgacgcagctgcagattggcgacgaagcgcaggcctgggtgcagcaggcgatagaacagccgctcaatcccgatgcgctggcgctaggcgtaaagaacgaagaggaagcgttggaagtgtattacctcagctgtatggtgatcgatgtcgatcactttatggagcgcggctatcttgacgcgctggcgcgctcgctgaaaattcccgacgatgtgaaacagggcatcgagggcgatgtgaatcagaaaaagcgtgagttggcgtaa

SEQ ID NO: 442246 - DNA, 669 bp, Serratia marcescens
atgacgttacgcattattgacactgaaacctgcggcctggacggcggcattgttgaagtcgcctccatcgatctgatcgacggtcaactggccaatccgatgagtgatttggtatgcccggaccgccccatcagcattgatgcgatggccatccatcatattacggaggcgatggtcgaggataaaccccgtatcgccgtcgccattagccgctatctcggcagtgattactacgtggcgcataatgccgccttcgatcgcggcgtgctgccggagatgcggggccgctggatctgcaccctcaaactggcgcgcatgctgtatccggatatcaagtacggcaaccagtatctgcgctatgcgctgaatctcgacgtgcagctgccgcaggacaatacgctgtatccgcaccgggcactgtatgactgctacgtcaccgccgccctgctgcagcgtattatcaaggactcatcctggagcgccgaagagatggccgatatcaccgagcggccgtcgctgataaaaacgtttaagttcggcaaatatcgcggccggctgattgagcagatcgcccaggaagatccgggctatttacagtggatgctgaaaaatctcaccgatctcaacccggatatgaaacacacgctgaagtactatctgattggctga

SEQ ID NO: 442247 - DNA, 384 bp, Serratia marcescens
gtgatcggtaaaattcgctcctcatctcgtctgctcgccacgctgttcgcgctgtttgtcggtttgtcttcgcagcaggttttagcgcatgcccaccttaaattgcaaacgcccgcggcggatgccaccgtcagcccggcgccgcaggcgttgacgctcagcttctcggaaggtattgaaccgggcttcagcaaagtcaaactgatcggcccggataataaagcggtcaaaatcggcaaactgcaactggacgccaaggataatgccaaagccaccattccgcttccggaagcgctgccggcggggaaatatcaggtcgactggcacgtggtttccgttgacggacataaaaccaaaggccaatacagttttaccgtaaaataa

SEQ ID NO: 442248 - DNA, 882 bp, Serratia marcescens
atgaccctggcgactctgtttgtcctgtgtcgcttcgtgcactttacggcggtgatgctgatgtttggcattggtttgttcaccgccttactgtcgccgcagcggctctctgcgttactttcccgcgatttgcgtccctggctgacgatgtcggcgctggcggctgccgtttctgccgtggcgctgctggccgtgcaggccggtcagatgggcgacggctggcaggatacctatcagtgggatgtctggctggcggtgctgggcaccacctttggtgaagtgtggcgctggcatctggcgttgtcggcattatcgctggcggcgctgtggttgccgctgcgcctgcgcgccggggcgagcaccctgttgggcgggctgctgctgatcagtatggcttttatcggccatgcggcgatgcacaccggtctgttcggcacgctgcatcgtgttagccatgcgctgcatctgcttgccgccggctactggtttggcagcctgctgccgctgctggtctgcctgcgttatctgcacccggcagcgtggcgtgcagaagcggtgagcacactgatccgtttttcccgctggggacatctggcggtggcggtggtgctgataaccggcgtcctcaacagcctgatgatcgtcggcgggtggccgctggacgtgtcatcgccgtatcagcgtttgctgctgataaaaagcgcgctggtgctgctgatggtgggcgtggcgctgaccaacaggtatgcgatcgtcccggcgatgcgcagcgtgcccaaccttgcccagcgcggcgtggtttgggcctgctggagcgagctggcgctgggcggggcggtgttgctgctggtcagtctgtttgccacctatgcgccaaattga

SEQ ID NO: 442249 - DNA, 342 bp, Serratia marcescens
atgaaacgtgcattattagccctcgcactgctggcgggcgcaggcggcgcactggccgcggaaggtctggaaaatgtcaccaagctggaattcggcaagcagtgggcgtttaccaaagaggaagtcaccctgcagtgccgtaaagacggcgcgctgtttgtgctgaataacagcacgctgatgcagtatccgctgaacgatattgcgcaggcacaggtggcatccggccagcagcgcgcacagccgctggcaaccatcctgctggatgacgccaacaaccccggggaaaaaatgagcgtcgagccgttccgcgagcgtgcacaaacgctgtgcgccaagtga

SEQ ID NO: 442250 - DNA, 312 bp, Serratia marcescens
atggatacggtgaataatgtccatcagctacttaaaaaacacttctgggaaatgacgaatgatacttcgctgagcactggtaacaagatcgtgctgcctgaagatgcccacaattttctggcagagtatgccgatctactgcatattgatatgggcaattttgagtttcgccaatattttccaaacgcggggatttggttcctgcctaatataattctccccaagtacatgcagacagataaccacgaacccgaagcgttaaccgtcgatatgctgattgaatccgccaaggctggccgctggctatattag

SEQ ID NO: 442251 - DNA, 1092 bp, Serratia marcescens
atgaacgatattcaattgaatcaggcaagcgtcaaggcgcatcccccgaaggcatacgacgcaacaacatccgtggccgcaagctggtacgttgcgatacgctcaagcgacctcaaggacaaaccgaaggcgctaacgctcttcggccgtccgtgcgtggcgtggcgcggcgcgacaggacaggccgtggtgatggatcgccattgctcgcacctcggcgcgaacctggccgacgggcaggtcaaggacggctgcatccagtgcccgtttcatcattggcagtacgacgagcaaggccagtgcgttcacattcccggccacagtcagacggtgcgcagcctggaacctgtgccacgctcggtgcgccagccgacgctggtcaccgccgaacgatacggctacgtgtgggtctggtacggctccccggagccgcagcatccactgcccgacatcgccgccgccgacgtcgacaacgatgattttatgcacctgcatttcgcgttcgaaaccacgacggcggtcttgcgcatcgtcgagaacttctacgacgcgcagcacgcggccccggtgcacgagctcccgatctcggccttcgaactccggctgttcgacgattggcgccaatggccggaggtcgggccgctggcccagtcaggcgcgtggttcggcgctgggatcgacttcaccgtggaccgctacttcgggcccttcggcatgctggcgcgtgcgctcggtctgaacatgtcgcagatgaacctgcacttcgatggctaccccggcggatgtgtcatgaccgtctctctggacggagacttcaaatacaagctgctccagtgtgtgacgccggtgagcgacgacaagaacatcatgcacatgcttatttcgatcaaaaaggtgggcggcgccctgcgccgcgcgaccgactacatgctgttcggactgcagaccagacaggcggcgcagtatgacgtcaaaatctggaacgggatgaagccggacggcggcggcgcgtacagcaagtacgacaagctggtgctcaagtaccgggcgttctaccggggatgggccgaccgcgcggtcagcgagcggtga

SEQ ID NO: 442252 - DNA, 1704 bp, Serratia marcescens
atgactcagaagagccccgcagacgggcgcgataacaaccactttgacgtgatcatcatcggttcgggcatgtccggcacccaaatgggagcgattctggccaaacagcagtttcgcgtgctgattatcgaggcgtcgtcgcacccgcgcttcacgatcggcgaatcgtcgattcccgagacgtcgctgatgaaccgcatcattgccgatcgctacggcattccggaactcgatcacatcacgtcgttctactcaacgcagcgttatgtggcgtcgagcaccggcatcaaacgcaacttcggcttcgtgttccacaggccgggtcaagaacacaacccgaaggagttcacgcagtgcgtcattcccgagctgccctgggggccggagagccactattaccggcaggacgtcgacgcctatttgttgcaagtcgccattaaatacggctgcacggtcctccagaatacgaaagtgaccgacttccacgccgataaagacggcgtcgcggtaaccaccgcgcagggcgaacgcttcaccggccgctacatgatcgactgcggagggccccgcgcgccgctcgcggtcaagttcaatctccgcgaagagccgtgtcgcttcaagacgcactcacgcagcctctacacgcacatgctcggggtcaaaccgttcgacgacatctttaaagtcaaaggacagcgctggcgctggcacgaggggaccttacaccacatgttcaagggcggctggctctgggtgattccgttcaacaaccacccgcgctcgaccaacaacctggtgagcgtcggcctgcagctcgacccgcgtgtctacccgaaaacggacatctccgcgcagcaagaattcgacgagttcctcgcacgcttcccgagcatcggggcgcagttccgcgacgccgtgccggtgcgcgactggatcaggaccgaccgcctgcagttctcatcaagcagctgtgtcggcgaccgctactgcctgatgctgcacgcgaacggcttcatcgatccgctcttctcccgtgggctagagaacaccgcggtgactatccatgcgctcgcggcgcgcctcatcaaggcactgaacgacgacgacttctccccggaacgcttcgaatacatcgaacgcctgcagcaaaaacttttggaccacaacgacgacttcgtcagctgctgctacacggcgttttcggacttccgcctgtgggacgcgttccaccggctatgggccgtcggcacgatcctcgggcagttccggctcgtgcaggcgcacgcaaggttccgcgcgtcgcgcaacgaaggcgatctcgaccaccttgacaacgatcccccgtacctcgggtacctgtgcgcggacatggagggctactatcagctgttcaacgacgccaaagccgagatcgaggccgtaagcgccgggcataagccgcccgaggaggccgcagcgcggatccacgccctcatcgacgaacgggacttcgccaagcatatgttcggcttcggctactgcatcaccggggaaaaaccgcagctcaacaactcgaagcacagcctgctgccggcgatgaagctgatgtactggacacagaccagcgcgccggcagaggtgaaaaagtacttcgactacaacccgatgttttcgctactcaaagcgtacatcaccacccgcatcggcttgatgcagaagaagtag

SEQ ID NO: 442253 - DNA, 1086 bp, Serratia marcescens
gtggagcgcactctggagcgggcacgtgcattcgcggccacgcacacggccgtggcggcctgcgatcctctacaggccagctcgcttgttctgcaactgccagggttgaaccgtaatcaggacgtgcccggcatcgtcggcctgctgcgcgatctcctgccggtgcgcggcgtgccctccggctggggcttcaccgaagccgccgccgcgatgcgggacatcgggttctttctggggtcgctcaagcggcacggacacgaacctgcggacgtggtgcccgggctcgagccgctgctgctcgacctggcgcgcataaccgacctgccgccgcgggagacgctcctgcatgtgacggtctggaaccctgcagaagctgacgcgcagcggagctataccgggctcagcgacgaagtgcacctgcttgagagcgtgcgtatctcgatggcggctctcgaggccgccatcgcggtgaccgtcgagctgtccgacgtgcctctacgctcgcccgcgttcgcacaagaatgcgacgagttggcagcctatctgcaaaaaatggttgaatcgatcgtctacgcgtaccgctttatctcgccgcaggtcttctacgatgagctccgccccttctacgaaccgattcaagtcgggggccagagctaccttggccccggcgccgtagaaatgcccctcttcgtgctggagcatgtcctgtggggatcgcaatcggatcatcccgcctatctggaattcaaagagacctatctgccctatgtacttcccgcgtaccgggctgtctacgcccgttttgccgggaagccggcgctcgtcgaccgcgcgatcggcgaagcgcgagcggccgctacgcaggacgagcacgtccgggccgggctggcggctctcaaccgggtcttcgtgattctgctgcgcttccgggcgccgcatcatcaattggcggagcgggtgtacgaagccgggcgcagcggccccgctgtcggcagtggcggatacgcgcccagcatgctcggcgatctgctcacgctcacgcttgccgcacgcacccgcatccgcgccgccctcaacccgtcctga

SEQ ID NO: 442254 - DNA, 1587 bp, Serratia marcescens
atgagcaaaccgatcaagaatatcgtcatcgtgggcggcggtactgcgggctggatgtccgcttcgtacctcgtccgggcgctccagcagcaggcgaacattacgctcatcgagtctgcagcgatccctcggatcggcgtaggcgaagcgaccatcccgagtttgcagaaggtgttcttcgactttctcgggataccggagcgggagtggatgccccaggtgaacggcgcgttcaaggccggcatcaagttcgtgaactggagagagtctcctgatcgctcgcacaacgattatttctaccatttgttcggcaatgtgccgaactgcgacggcgtgccgcttacccactactggctgcgcaaacgcgagcagggttttcaacagtcgatggcgtacgcctgctatccgcagcccggagcgctcgatggcaatctggcaccgtgcctgcacgacggcagccgccagatgtcccacgcgtggcacttcgacgcgcatttggtggccgacttcctgaaacgctgggccgtcgaccgcggggtgaaccgcgtggtcgacgaggtcgtggaggttaacctgaacgaccacggcttcatctccagtctatccaccaaggagggccggaagctggaggcggatctgtttatcgactgttccggcatgcgcgggctcttgatcaaccaaaccctgaaagagccctttattgacatgtccgactacctgctgtgcgacagcgcggtcgccaccgccgtccccaatgacgacgctcaagcgggggtcgaaccctacacctcctcgatcgccatgaacgcgggctggacctggaagattccgatgctgggccggtttggcagcggctacgtcttctccagcaagttcacctctcgcgatcgggccaccgccgacttcctcaagctctgggacctttcggacaatcagcctctcaaccagatctcgttccgggtcgggcgcaacaagcgatcgtgggtcaacaactgcgtatctatcgggctggcgtcgtgctttttggagcctctggaatcgacgggtatctacttcatctatgcagcgctgtaccaactcgtgaagcatttccccgacaccgcgttcgacccgcggttggccgacgcgttcaacgccgaaatcgtctacatgttcgacgactgccgagactttgtccaagcgcactacttcaccacgtcgcgagaagacacatcgttctggctcgcgaaccggcacgacctgcggctctccgacgccatccaggagaagattgaacgctacaaggcggggctgccgttgaccaccacgtcgttcgacgatgacacgtactatgataccttcgactacgaattcaagaacttctggctgaacggcaactactactgcatctttgccggcctggacatgctgcccgaccggtcgctgccgctcttgcaactgcggccggagtctgtcgaaaaagccgaggcaatgttcgcccgcattcagcgcgaggccgagcgcctgcgggcaagcctgccgacaaactatgactacctgcggtcgctgcaccaaggcaacaggcccgcatcgacggagagcctgtag

SEQ ID NO: 442255 - DNA, 132 bp, Serratia marcescens
atgcaacagataactaaacaaccggaaggtagcattatgagattagcggtaatagtgatagtcggcgtactggtttgcctcggtatgatgagcttcttacaatatatcagcgagcagccctgggggcagtaa

SEQ ID NO: 442256 - DNA, 375 bp, Serratia marcescens
atgtttgaccacgttaaattcggcgttagcgactatgccgccagcaagaccttctttctcaacgcattggcgccattgggtgtaagcgtggttgctgaaggaacgccggactacggcgtagagttaagttctcccggcaacgcatcactgtgtctgtaccaaaccgcagaacggccggcgcacctgcacctggcgtttgtcgccgacagccgtcggcaggtggatgatttctaccgcgcggcgctggcggccggcggtacagataacggcgcaccgggcctgcgccccaattatcacaccaattactacgccgcctttgtgattgcgccggacggccataatattgaaatggtctgccatcggcctgatgaatga

SEQ ID NO: 442257 - DNA, 522 bp, Serratia marcescens
atgttcgacaagttcgaaaatgaagatgatttcctgagttcgttaccgaaatatttgcgcgatcccattgttaaatttcataccgctattaaagaaacaatcgatagtttatcgcctgaatcctctgagcttttccaatccacgctgaaacaaatgaaatcattatcccatgaggtaggggagtttattcacattcgtgccagtcatctttcagatttatttagcaaaccgctcacgtttttcaaggataccttggaaggcgctaagaaccttgctgataaagtggggaattctttccatgagattaaggaaaagtatgatcagctgacggataaacccagccatattttcgaggggatcaaacattggttcgatggcctgctgggggataagcaggaaaaaaccagtgctgcggaatttaatttgtaccttgatggacacgatcatgcggcaccggcgcacagcgctatcgacgttaacggcattgcaacgtctcatgcggatatgcattcagtgatgtaa

SEQ ID NO: 442258 - DNA, 1029 bp, Serratia marcescens
atggtcgacgaggccccaccgctcagcctgcccgccagggtaaaatacatccgccaacagattatcgcggcaggtaatgacgttaagctgcgcttccccgtgttgaaatatcagaacgccatcggcttaggcatcttgctcttctcgatattttcactggttgccgtctcgacgctctatattcatcagcagatttcctggtggttatgcctgctgctgaatgcactgtgtctctctttagcccatgaaatagaacacgatttaattcataacctctattttaaaaaaaatcgctttatgtatcacctgatgatgaccttagtgtggatcgtcaggccaagcagcgctaacccgtgggcgcgtaaaacgctgcaccttaaacaccaccagtattccggctcagagcaggatcttgaagaacgtgcgctcagcaacggcactcgatggggagtgctccggctgctgatgacggcggatctgatggtggcactggccgtcgtcgcctggcaggacaaaggcaaaggcgacctacgaggggtattactgaccggcctcaaagcgttcttccccgtcgcttttcttacctgggggctgtggtatctgttcctgatcgtacacggcatcgattttgctgctacgctgagcggcatgccgattacctggtccggcgcagcacaagcgccgatcggctatctcgacatgttggtggtggtactgattggccccaatattctctggagcttttgcctgcacttcgtcagttcaaatatgcattatcatggcgatatagagcacaacaatatcctgcagcagacgcaggtgatgaacccttggtggctatggccgctgcagctgttttgttttaatttcggcagcacgcacagcattcaccacttcgtggttaatgagccgttctatatccgccagttgactgcggcaaaggcgcaccgcgtaatgagagagatgggcgtcaggtttaacgactatggctcattcggccgggccaaccgttggggagccgcggagtaa

SEQ ID NO: 442259 - DNA, 1134 bp, Serratia marcescens
atgctgaaaaaaacgcttcccctgcttcccctgtgcctggctttactgccggcgttcggtcacgccgtcgataaggcagagatcgataaagtcgtacaaccattaatggaaaaatacgcggtgccgggtatgaccatcgccgtttccgttgacggcaaaccgcaattctacaattacggcgtggcatccaaacagagcaagctgccggttacgcagaacacgctgtttgagatcggctcgctgagcaaaacttttaccgccacgctggccgcctatgcgcaacacgccggcaagcttgactgggcgcaaccggccagccattacctgccgcaactgcaaggcagcgcctttgaccgcgtcagcctgctgaacctggcgacccatacctccggtctgccgctgtttgtgccggatgagatcaccaatgaacaacagctgatggactattaccgccagtggcagccctcgcacccaataggcagctaccgggtatattccaatctgggaattggtctgctgggcatgatcaccgccaaaagcctggcgcagccgtttaccaccgcgatggagcaacgtttgctgccagctctgggcatgacgcacagctatgtcaatgtgccgccggccgctcagaaagattatgctcagggctacaataaagaagataaaccggtgcgcgttacccccggcccgctggatgctgaatcttacggcttgaaatccagcagcagcgatctgatccgttacctgaacgccaatatggggctggtcaaggtagcgcctgactggcggcaggcgctggatggcgttcatcgcggctactaccacgccagcgagttcacgcaggacctgatgtgggaaagctacccttacccggtcacgctggatacgctgctggcgggcaatgatgcgaaagtgatcatgaatggcgtgccggcacaggcaataaccccgccgcaggctcctcagcagcaggcctggtacaacaaaaccggctcgaccaacggttttgccacctacgcggtatttatccccgcgcagaaaaccgccgttgtgatgctggcaaataaaaacttccctaatgatgagcgtgtaaaagcggtataccagattgtacagagcctgacgcgctga

SEQ ID NO: 442260 - DNA, 321 bp, Serratia marcescens
atgtcgctgcactccattgttaccggcatgattatcctggccgccggcacctacctgctgcgcctgagtggcgccctgctcggccaaaaaatggccttttccaccaccacccgcgacctgctggctgatgccgccaccacgctgttgctggcggtcgccgttatcgccacgctgttcgaagatcagcatttcgccggcgcggcgcgggtggttggcgtcttgaccggcttactgctcacctggcgtaaagtaccgttaattatcgtgctggtcgccgcggccgcagtgaccgcactgctgcgctggcttggcctgccctga

SEQ ID NO: 442261 - DNA, 669 bp, Serratia marcescens
atgaagttcaaccgcttgagcgtgctaaacagtgaggtggtcaaaggcatcgtgctggtctgcctcgccgatgggatcgtgggcgtctcttacggctcgctggctaccggctacggcttcccgctgtgggtgccgctggcgctgtcagtattggtgctggccggcgcatccgaatttctgtttatcggcatcgttgccggcggcggcagcccatttgccgcagcgaccgccgggctgttggtcaacgcgcgccatatgcctttcggcatggcggtgaaggatttgatcggccacggcccggcgcgctttctcggctgccatattatgaacgatgaaagcgtggtgttcggcgtatcgcaaccgacgctgccggcgcgcaaggcggcttactggctgtgcggactcggtatcgcgctgtgctggccgctgggggtgattgtcggcggttcgatcggcaatttaatcccggacgtgcacagcattggtctggatgccgtcttcccgacgattttgctggcgctgatcgtctcagcgttaaaaaaccgccgcaccctgctctccgccgtttccggcacggcgttcgcgctggcggccgtaccctgggcgcctatcggcatgccggtattgtttgccctgctgggcctgctgatcagaaagaggacgcattga

SEQ ID NO: 442262 - DNA, 549 bp, Serratia marcescens
atgacgcaaccgataaccattattgccgatgcgctggtgcgtgaacgccagcgtgcgggcctctctctggctgaggtcgcacggcgtgcgggcatcgctaaatcgacgttgtcgcagttggaggcggctaacggcaaccccagtctggaaacgctgtggtcgttgtgcgtcgccctggatattccgtttgccagactgatggagccacagcaaaacagcacgcaggtgatccgccgcggcgaagggccgacggtggtggcggaaatggccgactacaccgctgcgctgttggcgacctgtccgccgggggcgcggcgtgatatctatttgctgacggcccagcccggcgccgaccgcatttcgcagccgcactcgcccggttcggtggaacatatcatcatcactcaaggacgggcgctggtcgggctgattgatacgccggtcgagctgtatgccggcgactatatctgttatcccggcgatagggcgcatatcttcaaggcgctggagcctgatacgctggcggtgctggtttcggagcagaattga

SEQ ID NO: 442263 - DNA, 423 bp, Serratia marcescens
atgaaacggagcttaccgctactgacggcggtgctgatgggcgcggcgtctgcggccgcaggcgcgacctttgatttacaatatcacccgccggaagcggccgatcggaaagcgggtaatgcgcagcagcccctcaagcctgtgccgcgccaccaaatatggaatgcggaaaaactggcgcaggacaatcagcgggcggagagtgaagagcaggctcaggcactggcggattaccagcgccagcggcaacgcgcgcatattctgggggagcagcgggagcggattcgacggcacccgaacagcacgcggccggcggccagagactatctggtgaactgtatgccgccgggggaccgcggcagcctgaaatgggatgatgaaggacgcgacccgagcctgtgcgggcgcatcagctgggactga

SEQ ID NO: 442264 - DNA, 780 bp, Serratia marcescens
atgtaccccggcgtcacggattccgtcatctgcgttaatggatctttttcaaccacgctggcttttcgcagctgcgtacgaaacttcaagaaccgggttaacgtcattctcttcgatttaccgttccttggtcagtcccgtcagcacaatgatttaaccaaaccgctggcgaaaagcgatgaggttttcattctgcagagtttgattaaccattatgaaccgtcttatctgctctctatctcctggggcggactggcagcactgatggcgctctcctcccgcccgcgctccatccgcaaagccgtcgttgcttcgttctccaccaaggttaacgacgcgatgaattactacgtcagccagggtaaaaaactactggatgaaggcaaaggcgatgaagcggctatgctgctgaacaccgaggtcggcaaatatctgccgaatctgttaaagcaggtgaactacgaacatttgcggcagtttgatgagtcagcgcaaaagcaggttcgttaccacgttgcgcagattaccgagtttaatcaggcggattatatcgataccttccgacaaatcgatacgccgatactgttcattaacggcgagcaggacgaatacactacagcgcaagatattaaggaactcagtaattatatcaataactgcgaatttattaccgtaccgcaggctggccactttatttatatggaaagccgctttgcggcagattatttcaacgacgtgatgaacggttttctgttggttgaagaggcgatggcatcctga

SEQ ID NO: 442265 - DNA, 576 bp, Serratia marcescens
atggctgataatatcgtgaaagacgtcgctgacaccgcaagcgatctggttggttccgttaccggtactgcgggcgatctggttggcggcgtgtctggcaccgtaggcgatctggtcgactctaccgttgacaacgctaccggcgctatcggcggtgtcgttgacgctgtaacttcaggcagcggcggcctgtggggtgtgattagcggcgtagccggcagcgttggcggcctgctttccggcgtagcaggctctctgctgggtctggtgggtgatgtggctggcaccgtaggcgacctggccggcaatgtgactgattttgttggcggcgtactggataaaatcagcgacctgggcggcgatgtcggcaaagttgttgaccacgtcaccgacggcgtatctggtgtggttgaccacgtcaccgacggcgtatccggtgcgactgacgcaaccgacgcgctgatctctgcactggagcagaccggtggcgacgttgccgctgctgctactcctgctgctgtagaagttaacggcgtgactgacgccgcagacgctgccgtacaccacgcagcgtaa

SEQ ID NO: 442266 - DNA, 717 bp, Serratia marcescens
atgattaacgtactgattgtcgatgacgatcccatggtggcggaactcaataaatattacctgagccaggtcaagggctttcactgccaggccacggtggcaacgctggcgcaggcacatgccctgctcaccgacgccagcgcccgtatcgacctggtgctgctggatatttatatgaagcaggagaatgggttagacctgctgccggcgctgcgcgaactgggggagaaaactgacgtcatcgtcatctcttccgccagcgacgtcgacacggtgcaaaaagcgctgcattacggcgtggtggattatctgatcaagccctttcagttcacccgtttcaaacaggcgctgagccactatcagcagcagtcacagctgttggcgcagcgtacattttgcgcgcagtctgacgtggataatctgctgcgccgccagccgaacggcagcgaaaacaagaaactgccgaaagggttaaccagcattacgctgcgcacggtatgtgagtggattgaacagcagcgtgatgaggagttttccaccgacaacctggccaacgccatcggcatatcacgggtctcatgccgtaaatatttaatttatctggctgacagcgagatcctcagcacccgcattatgtacggcaccaccggccggccggtgtatctctatcagctcaacgccgatgcgctgggcctgttgcaatcgtattgccgctga

SEQ ID NO: 442267 - DNA, 1602 bp, Serratia marcescens
atgtcacagccaaggcttccgctgaagctcagcacctcggttacgctgatggtgtccgccattatcgcctcggtgctgatggtggtttacgcgctgttttttgtccagatggaccatgaaggacaaagccagctgcagcgtaaagccatggctatcgccgaaacgctggcgttgtccgacaccatcgtcgacgggctgcagaaccggcggcaggacggcgctattcagcgcttcgccgagcaggtgcgtcagcataatgaactgctgttcgtggtggtgctggatatggacggcatccgctattcgcaccccaaaccggcgctgatcggccatcattttatcggcaacgacctggcgccggcgctgcgcggccagttaaacagcgccattaaccgcggcgcgctggctccggcgctgcgcgtgtttgtgccggtttataacgcccgccaccagcagatcggcgtggtagcgctgggcattgcgctggataccgtcgagcgggttatcgacgagagccgctggatcatctactggacgctggccttcgccgcactggtcggctcgctgggcacgttctgtctggtaaaagcgctgaaacgcattatgctcggttttgagccttacgaaatttccaacctgttcgaacagcgcaatgcgatgctgcaatcgattaaagaaggcgtgattgccgtcgataatcaatcacgcatcagtatcgtcaatgatgaggctaagcggctgctgcggcagagcgggccggttgaaaacctgctgctcagcgccgccagcaaacactggccggcgcaattgcatctggcagaggtactggccagcggtaaaccgcggcgcgaccggcagatcgcctttaacggcagtgaactgctggtcaataccgtgccggtgatcgttcagggacaggtggtcggcgcgattgcgacctttcgtgacaaaaccgaggtcagccaactgctgcagcgcctcagcggcatgacgcaatatgccgatgcgctgcgggtgcagtcgcatgagtttatgaacaagctgcacgtgatcctcggcatgctgcatatgaaggcgtatcagcagttggaaaactatgtgatcaataccgccagcacctatcaggaagagatcggcaccctgctgcgccggataaaatcgcctgaagtcgcaggcttttttatcgccaaaatcaaccgtgcgcaggaggccggcatcgatctggtgattgatgaggacagcctgctgccggaagcggcagaggcggaaaccacccatgtgctgatcagcgtgctgggtaatttaatcgaaaacgccattgaggccatcgacggtgaggaaggacatgaaattaccctgagcttccatcacaatggcaatcatttacactgtaccgtcagtgacgacggtccgggcatcgatccgatcgtcggctcgcgcatttttgaacagggattttcaaccaaagggtcaggacgcggcatcggcctggcattaattctcagccacctgcaaaagctgggcggcagtattgattttgactctgaaccgggtgaactgacccagttttatgtgcatattccctatcaggccaagagctga

SEQ ID NO: 442268 - DNA, 324 bp, Serratia marcescens
atgtttgtatttaaacaagatacccggctggaaacgctgggcgatggcgtatcgcgccgtattctggctcacggcggcggcatgatggccgtggaggtgcactttctcgccggcgcggtggggccgttgcacagccacacccatgagcagctgacctacgtgttgtccggccgttttgaattcaccatcggcgaggagacgcatcaggtcagcgccggcgatacgctgtataagcggcctcacgtggtgcacggctgcgtctgtctggaagccggcgtcctgctggatacttttaccccgcagcgggaggatttcctgacctga

SEQ ID NO: 442269 - DNA, 555 bp, Serratia marcescens
atgcaagttacacgtcggttattaccactgatgatgcttataccgctgtcggcgccgttactggcgatagcgcagcaggagccgctgccgaagagccatgccgcgtctgcgtcgcaaagcaaagcgccaatccccagcctgctgcttggccggtggcgcgtgacgaagacgctgccgacacaggccgccgtctgctgggatcggcagcagatcgacagcgtgctgaatacgcagatcagctatcagccggacggttttagctggaacaaccagcagcggcgcagtctgggcgtggtaagcagtacggttgaggagcaggagtttgtcgaggataactcggatgccgattccgagacgccggccgtcgatttcgccatgcttggcatcattgcgccagcggtggagcggatcgccatcatgcataccgcgaaagactcagcctccaatacgccggatgacgacgaattccccggcgcgacggtgctgatcaagaacccggacacgctgatcttctcaatgtgcaaccagtactttgaggcccagcgtcagcgctaa

SEQ ID NO: 442270 - DNA, 813 bp, Serratia marcescens
atgagcagcagcagcgacttttccgccgacaagcgcgccaccggcaccagcgaacggcgtgaacagattatccagcggttgcggcagcaaggaagcgtgcaggttaacgatctttccgcctggtttggcgtctcaacggtgaccattcgcaacgatctggcattcctggaaaaacagggcattgccgtgcgcgcctacggcggcgcgctaatctgcgacggtacgctccccgcagccgaacccagtgtcgcagcgaaaagttcgctgaatacggcgttaaaacacggcatcgcccaggtcgcggccgatatgatcctgcccggcagtcgggtgatactcgactccggcaccaccacctgcgaaatagcccagctgatgcgtcaccaccatgaggtgatcgcgatgaccaacggcatgaacgtcggcaacgcgttgctggaggcggaaggcgtagagctgttaatgaccggcggccacctgcgccgccagtcgctctcgttttacggcgaccaggcggagcaggcgctgctgaattaccacttcgatatgctgtttctcggcgtcgacgctatcgatccggagcgcggtatcagcacccacaatgaagacgaagcgcgcctgaaccgccggatgtgcgaagtggcggaacgtatcatcgtggtgaccgactccagcaagttcaaccgttccagcctgcacaaaatcatcgatacccagcgtatcgataccattatcaccgatgagggcattcccgcagacagcctcggcgagctgcaaaaaagtgggatcgaggtagtgcgggtgaaggtctga

SEQ ID NO: 442271 - DNA, 1296 bp, Serratia marcescens
gtgaagcagctaaccgagatggtaaacaggcacaaacaagggcagacgaacggcatttatgccgtgtgctctgcgcatccgctggtgctggaggcggcattgcgctacgcccggcagcggcagacgcctttactgattgaggcgacgtccaatcaggtcgaccagtttggcggttataccggcatgacgccggcggactttcgcggctttgtctgccagctggcgcagaagctggatttccccgcatcgcagattattttcggcggcgaccacctcggccccaaccgctggcagagccagcctgccgagcaggcgatgacgcaggcggaaacgctgatcgaaagctacgtcgccgccggctttaaaaagattcacctggattgcagcatgccctgcgcggatgatccgcagccgctgagcgatgcgatcgtcgccgaacgcgccgcgcggctggcgcaggtggccgagcgtacctgccgcacgcagtttggcgtttccgatctggcgtatgtgatcggcaccgaggtgccggttcccggcggcgcgcatgaaaccctgacgacgctggcggttaccgccccggacgccgcacgggcgacgctggccgcacatcgtcaggcgtttgaacggcaggggctgggcgacgtctggccgaggattatcgcgttggtggtgcagcccggcgtcgagttcgaccatacgcaggtaattgattaccagccgcaacaggccgtggcgctcagcgccatggtggagtcctgcgatacgctggtgtttgaagcgcattccaccgattaccagacgccgcaggcgctgcgtcaactggtgaaagaccatttcgcgatactgaaagtcgggccggcgctgaccttcgccctgcgcgaggcgctgtttgcgctggcggcgatcgagcaggaactgctgccggcgaacgcctgctccggcctgcgtcaggtgctggaacaggtgatgctcaaacggccggaatactggcgcagccactatcacggcgatgagtccgcccgtcggctggcgcgcggctacagctactccgaccgcatacgctattactggccggacgaacagattgagcaggcatttacacagctgctgcgcaacctgacggacacgccaatcccgcagccgctgctcagccagtatttaccgctgcagtaccccaaggtgcgggcgggaacgctggctgccgcgccgcgtgcgctgattatcgaccatatccagaacgttttgggccagtaccacgccgcctgtcagggcgaggccctgcgttccgcataa

SEQ ID NO: 442272 - DNA, 474 bp, Serratia marcescens
atgccgaacattgtattaagccgtatcgacgaacgtttgattcatggtcaggtgggcgttcagtgggtcgggttcgccggtgcgaatctggtgctggtggccaacgacgaggtggctgcggatccggtgcagcaaaacctgatggagatggtgttagcggagggcattgcggtgcgcttctggtcgctgcagaaggtgatcgacaacattcaccgcgccgccgaccggcaaaaaatcctgctggtctgcaagacgccggcggattttctcacgctggtgcagggcggggtgcccgtgacgcgcatcaacgtgggcaatatgcattacgtcgaaggtaaacggcaaatcgccaaaacggtctccgtcgacgccggcgatatcgccgcgtttcacggcctgcaaaccgccggggttgagtgctttgtgcagggcgtaccgacggaacccgcgttggatctgttcaaacaactgtga

SEQ ID NO: 442273 - DNA, 780 bp, Serratia marcescens
atggaaatcactctgctgcaggcctgcgcgctgggcattctcgcctttatcgccggcctggatatgtttgacggtttaacccatatgcaccgcccggtggtgcttggtccgctggtggggctgatcctcggcgacctgcataccggcattctgaccggcggcacgctggagctggtgtggatggggctggcgccgctggcgggcgcgcagccgcccaatgtgattatcggcaccatcgtcggcaccacctttgccatcaccaccggggtaaaaccggacgtcgccgtcggcgtcgcggtgccgttcgccgtggcggtgcagatgggaatcaccttcctgttctcggtgatgtccggcgtgatgtcacgctgcgacaggatggcggccaacgccgataccaaaggcattgagcgggtgaactacctggcgatgctggcgttgggatgcttctactttctgtgcgcgttcctgccgatttactttggcgcggaacacgccaaaaccgcgatcgatgtgctgccggcgcggctgattgacggccttggcgtggcgggcggcattatgccggccatcggcttcgccgtgctgctgaagatcatgatgaaaaatgtctatatcccctattttatcatcggctttgtggcggcggcctggctgaagctgccggtgctggcgattgccgcggcggcgctggcgatggcgctgattgatttgtaccgcaaaggccctgaacccaatgcgccggccccaaagcaggaggaattcgaagatggcatctaa

SEQ ID NO: 442274 - DNA, 882 bp, Serratia marcescens
atggcatctaacccgaccacgctgccgaacaacgtttcagacggagaggagacgctgctgaccggcgctaatgagaaccggtatgaagaccagcgcgtcggcgcggagctgagccgcaaggacatcaaccgcgtcgcctggcgctccatgctgctgcaggcctcgttcaactacgaacgcatgcaggccgccggctggctgtacggtctgctgccggcgctgaaaaaaatccataccaacccgcgcgatctggcgcgggcgatgaaaggacatatggggttctttaacacccacccgtttctggtgacctttgtcatcggcattattctggcgatggagcgctccaagcaggacgtgaacagcatccaaagcaccaaaatcgccgtcggcgcgccgctcggcggcatcggcgacgccatgttctggctgacgctgctgccgatttgcggcggtatcggcgccagcctggcactgcagggttcgatcctcggcgcggtgatcttcctgctgctgtttaacgtggtgcacctagggctgcgctttgggctggctcactatgcctatcgcatgggcgtggcggcgatcccgctgctgaaagccaatacccggcgggtcggccatgcggcgtcgatcgtcggcatgacggtgattggcgcgctggtggcgacctacgtacgtttgtcgacgacgctggagatcaccgccggtgacgcggtggtcaagctgcagagcgacgtgattgacaagctgatgccggcctttctgccgctgatgtataccttgctgatgtactacctggtgcggcgcggctggagtccgctgcggctaatcgcgatcaccgtggtgttggcgatagtcggtaagttcgctcactttctgtaa

SEQ ID NO: 442275 - DNA, 435 bp, Serratia marcescens
atgataggcattattctttgcggccacggcggcttcgccagcgggctggcgcgggcgatgacgcagatactgggcgagcagccgcagtttatggcgatcgattttaccgaaagttcgagcacatcgctgctgaccgcacagttggagcaggcggttgcggcactcgatgcgcacgaggatctggtgtttctgaccgacctgctggggggcacgccgttccgcgtcgcgtcgacgctggcgatgcagcagccggggcgggaagtgattaccggcaccaatctgcaacttttgttggagatggtgctggagcgtgaggggctgagcagcgaagcatttcgccggcaggcgctggcgtgcggacgccgcgggttgaccagcctggcggatgagctggggcgctgccgagaggaaaagccgctggaagagggcatataa

SEQ ID NO: 442276 - DNA, 1155 bp, Serratia marcescens
atgccacaaaccgagacttgcccgaccgttgctacgggcacctggacagaagccgagatccgccagcagccggccagttggctacgggcgttaaatgctatcgataacctgcgccagtcgcttgagcagtttcttgcgccgctgctattgaatgaggatttacgcattgtgctgaccggcgccggcacctcggcgtttatcggcgagattatcgccccctggctgacgtgctacacgggcaagaatttcagcgcgttgcccaccaccgatctggtcaccaacccgatggactacctgaacgccgcccacccgctgctgctggtctcctttggccgctctggtaacagtccggaaagcctggcggccattgagctggcgaatcagcttgtgccggaatgccatcacctggtgattacctgtaatgagggcggcagcctgtatcaaaacgcgcgtgacgacggcaatgccttcgcactgctgatgccggcagaaacgcacgatcgcggttttgccatgaccagcagcatcaccaccatgatgctcagctgtctggcggcgtttgcgccggcggtatttaacgtcggggcgttccgcgacgtagccgagcgctgccgcagcattctggcgtcgctggacgatgtccgcgagggcgtgttcggcagcctgccgtggaagcgcgtcgcctacctcggcagcggcggcctgcagggggcggcgcgcgaagccgcgctgaaagtgctggagctgaccgccggccggctggcggcgttttacgattcgccggccggcttccgccacggcccgaaatcgctggtggatgacgagacgctggtagtggtgtttatttccagtcatccctatacgcggcgttacgacctggatctgctggccgagctgcggcgtgataaccaggcgatgcgcgtgctggcgatcgcggcggagccggacgcgatggttgagcaaggcccgcatatcctgctgccgccttcacgcgggttcaacgatgtggagctggcgttctgtttcctgatgtatgcgcagatgttcgcactgagcgaatcgctgaaagcgggcatcacgccggatacgccttccgccagcggcgcggtaaaccgggtggtgcagggcgtggttattcatgcatggcaagcgtag

SEQ ID NO: 442277 - DNA, 123 bp, Serratia marcescens
atgagcattatttccaccaagtatctgttactggacgcgcaggccaacggctacgccgtgccggcgttcaatattcataatgccgagactattcaggcgattttgggtggtgcatccaattag

SEQ ID NO: 442278 - DNA, 159 bp, Serratia marcescens
atgtcagtttacatgtatgtggcaatcccaatgttttgtgttgcggcactaatgttctatctggcgcgaaagaggcgcgagaagaactttctgattccggggcttgccatgcttgtggcgggcttcgtgaacgcagtgcttggattggctttaggttag

SEQ ID NO: 442279 - DNA, 321 bp, Serratia marcescens
atgaatatacttggcgtaagagcagccgatgatgtgaaggtgatgacagttgacggggatagcatgtcacctactgttaattctggcgacaggttgttctttgacgtatccgtgagggatttcaggactgatggtgtttatgcgttcgtgtacggaaaaaccttccacgttaagcgattgcagatgcagggcgagaagctagcggtgctgtctgacaacccaacgtatgaaaaatggtacgtaattgacacaacgcaagatcagttctacgttatgggtaaagcgctgatccatgagtcgctgaagtacaacaagctctga

SEQ ID NO: 442280 - DNA, 669 bp, Serratia marcescens
atgaaaatacgtcctctcttcactatctgcatgcttctctctgccacgatttacgtgccgtccgctgccgctgagtccgggctgttttgccacggcatgcaagatgagcagccgcaagatcgtgcgcaactggctgaaattactgctaagagttatttcttcgactaccgctatccggatgactggaacgagaatccaaaactggaaaacggccatctgcagcaggggcgtagctatctgattgccggcgatcgcctggtggttgggccggaacagagaggttaccgttgcggttattacatcaatggcaaaggtatccaaacggctaactggataaaagcggatacgctgcgggtgctgtccgatgtcaccccggccgattggcgcggcgtctggacgagcaatgacagccatcgccagctgaagataacaagtcggcaggcggtgtatcagtttatcggcggcggcagcgatcctagccgtatcggcacaatatttccgtttaccgtaccggcgaatcaacaagatgcgctgttgattgcaccgcagccgacagatgcgccctgtgaactgaaactgcatcgtttgggggagtatttaatcatcactaatggcgaaagctgcggtctgataaacgctaacccggatggcgtactgcgcaaacgctga

SEQ ID NO: 442281 - DNA, 1599 bp, Serratia marcescens
atgacgcaacagacagtaggcacggagttaacgtttactcagggattgagtgcggcagaccgactgatactgaccgatggtgcggtcgagtttctggccgaactggtcagcaagttcacaccgcagcgtaatgaattgctggctgcgcgcgttgacgtacaggcagcgatcgatcgcggtgggctgtctggttttatttcggaaacggcttccattcgtgaaagtgactggaaaatacgcggtatccctgaggacctgcgcgatcgccgcgtggagatcaccgggccggttgaacgcaagatggtgatcaatgcgctgaacgccaatgtgaaagtatttatggcggactttgaagactcgctggcgcccagctgggacaaggtgatcgacggccaaatcaacctgcgcgatgcggtgaacggcaccatctcctataccaacgaagccggtaaaatttaccagttgaagccggatccagcggtattgattgcccgcgtgcgtggcctgcacctgccggaaaaacatgtgcagtggcggggcgaagctattccgggcggcctgttcgattttgcgttgtattttttccataactatcgccaactgctggaaaatggcagcggcccctatttctatctgccgaaaactcagtcgtggcaggaggcggcctggtggggcgaggtgttcagctttaccgaagatcgtttcgacctgccgcggggcaccatcaaagcgaccctgctgattgaaacgttgccggcggtgttccagatggatgagatcctgtatcacctgcgcgaccatatcgtcggcctgaactgcggccgctgggattatattttcagctatatcaaaacgctgaagaatcacgccgatcgcgtattgccggatcgccagtcggtcaccatggataaacccttcctgagcgcctactcccgcctgctgattaaaacctgtcaccggcgcggtgcctttgccatgggcggcatggcggcgtttataccgagtaaagatgcggaaaaaaatgcctgggtgctggacaaggtgcgggcagacaaacagttggaggcggacaacggccatgatggcacctgggtggcgcatccggggctggccgataccgtgatggcggtgtttgaccaggtgctgggcgagcgtcgtaaccagttggaggtgatgcgggaacaggatgcgccgattactgccgagcaactgctggagccatgcgagggcgaacgtaccgaagccggtatgcgcgccaacatccgggtggcggtgcagtacatcgaagcgtggatttcgggcaacggctgcgtaccgatctacggactgatggaagatgccgccacggcggaaatctcacgtacttccatctggcagtggatccatcatgaaaaatctctcagcgacggacaactggtcaccaaggcgctgtttcgtcaaatgctgaacgaagagatgttggtcattcgtcaggaagtgggagaagcgcgctttaacgccggccggttcgacgaggcggcgcgcctgatggaacgcatcaccacgcaagatgaactgatcgattttctgaccctgccgggttatgagctcttggcctga

SEQ ID NO: 442282 - DNA, 540 bp, Serratia marcescens
atgaccaataatcaaaaccgtatttacgtcatcatgggcgtttccggcagcgggaaatccgccgttgccgccgcggcagcccgccaattgtctgccggtttcctcgacggggatttcctgcatccccgcagcaacattacgaaaatggccgaaggcgttgcgctgaatgatgacgaccgcgccccctggctggccgcgctcaacgacgccgccttcgccatgcagcgcaccaacaacgtctccatcatcgtctgttcggcgctgaaaaagcattatcgtgaccgcctgcgcgccggcaacgccaacctgtcgtttatctatctgcatggcgatttcccggtgatcgaagcgcgcatggccgcgcgtaaaggccacttcttcaagccgcagatgctggtctcacagtttgacgcgctggagcaacccggcgccgacgaaagcgacgtgatggccgtggacatcaaccagccgcttgaggcggtgatcgccgatacgctgcagcatatccgcagctttatgccgcaggaggcgtgcgcgtga

SEQ ID NO: 442283 - DNA, 747 bp, Serratia marcescens
atgagcagactggagaataaaaccgcgctgatcaccggcggcgcatcgggcatcggcctggctatcgcccaacgctttctggaagagcaggcgcaggtgatcatcaccgatatcgccccgcgtcgcgggcagcaggcgctgacgcagcttgccgcctacggcgggaaaatccgctatctgccccacgacgtcaccagcgagaaggagtggcagacggtattcgaacagctgcgccactgggcgccgcgcctggatattctggtcaataacgccggcatcagcctgtacaaaagtatcgagcagacctcctaccgggagtggaaaaagatgctggcggtcaatctggacggcgtgttcctcggcacccgacagggcattatggcgatgaaggcgcacggcggcagcattatcaatatcagctcgattgagggactggtgggcgacccgaacctgccggcctacaacgccgccaaaggcggcgtgcgcctgctgaccaagtccgctgcgctgcatgccgcccgcagccgctacggcatccgcattaacagcattcaccccggttatattcatacgccgatgatcggcaatgacccggaaatgctgcggcagttaacggcgctgcacccgatcggccatctgggcgaggcgcgggatatcgccaacgcggcgttgtttctggccagcgacgaatcggcattcgccaccggcacagaactggtgattgacggcggctacaccgcgcaatag

SEQ ID NO: 442284 - DNA, 1368 bp, Serratia marcescens
atgaatcaagcagcaccccaatcttcccccgtggtggccaagttcggcggcaccagcgtcgccgattttgaggccatgaaccgcagcgccgacgtggttctgggtaatcctgacgtacgactggtggtgctttccgcctccgcgggcgtcaccaatctgctggtggcgctggccgccggcagcgaaagcgagcagcgcagctatcagctcgacgaaatccgccgtatccaatacgccattctcgatcgcctggacaaccccgccgtcgtccgcgaggagatcgaccgcatgctggaaaatatcgccatgctgtcggacgcggccgcgctggccacctccagcgcactgaccgatgagctggtcagccacggcgaactgatgtccaccctgctgtttgtagagattctgcgccagcgccaggcgcaggccgaatggttcgacgtgcgcaaggtgatgcataccgatgaccacttcggccgggcgacgccggacggcgcggtgctgaaagagctggcgcagacgctgctgcagccgcgcctgcaaacgtcgctggtggtcacccaaggctttatcggcagcgaagcgaaaggccgcaccaccacgctgggccgcggcggcagcgactataccgccgcgctgctgggcgaagcgctgaacctcagccgggtggatatctggaccgacgtacccggcatttacaccaccgatccgcgcgtggtgccggccgccaaacgtatcgataaaatcgcctttgaagaggcggcggagatggccaccttcggcgccaaagtgctgcatccggccaccctgctgccggcggtgcgcagcgatattccggtatttgtcggctccagcaaggatccggccgccggcggcacgctggtgtgcaacaccaccgaaaatccgccgctgttccgcgcgctggcgctgcgccgcaaacaaacgctgctgacgctgcacagcctgaatatgctgcacgctcgcggcttcctagcggaagtgttcagcattctggcacgccacaatatctcggtggacctgatcaccacctctgaagtcagcatcgcgctgaccatggacaccaccggctccacctccagcggcagcagcctgctgaccaccgcgctgctgaccgaactctcctcgctgtgccgggtggaagtggaagaagacctggctctgatcgcgctgatcggcaataagctgtcgcgcgcctgcggcgtcggcaaagaggtgttcggcgtgatggatccgttcaatatccgcatgatttgctacggcgccagcaactacaacctgtgcttcctggtgccgggcagcgatgccgagcaggtggtacgcaccctgcaccataatctgttcgaataa

SEQ ID NO: 442285 - DNA, 1014 bp, Serratia marcescens
atgaaagctgcagttgttaatcaggatcactcggtcggcatcgtggataaacagctgcgcccgctggaacacggcgaagcgctgctcagtatggagtgctgcggcgtctgccataccgatctgcacgtcaaaaacggtgatttcggtgataagaccggcgtcatcctcggccatgaaggcatcggcgtggtgaaggcgatcggccccggcgtcagctcgctgaaagttggcgaccgcgccagcgtcgcctggttctaccagggctgcggacactgcgaatactgtaacagcggcaacgaaaccctgtgccgcgaggtgaagaacgccggctacagcgtggacggcgggatggcggaagagtgcatcgtggtggccgactacgcggtaaaagtgccggatgggctggattcggcggccgccagcagcatcacctgcgccggcgtcaccacctacaaggcggtgaaaatatcgggcattgcccccggccagtggattgccatttacggcctgggcggcctcggcaacctggcgctgcagtatgcgaaaaacgtctttaacgccaaggtgatcgccatcgacgtcaatgacgcacagctgaaattcgccagcgaaatgggcgccgatttggtgattaactcccgtacggaagacgcggcacagattatccaggataaagtccagggcgcgcacgccgcggtagtgactgcggtagccaaggcggcattcaactcggcggtggacgccatgcgtgccggcggtcgcatcgttgccgtcggcctgccgccggagtcgatgagcctgaatatcccgcggctggtgctggacggcattcaggtggtcggttcgctggtcggcacccgtgaagatttaaaagaggcgtttcagtttgccgccgaaggcaaggtggtgcctaccgttaccaaacgtccggtggaggatatcaacgccattttccaggaaatggaacagggcaagatcaaaggccgcatggtgattgacttcctgtcccgctga

SEQ ID NO: 442286 - DNA, 1437 bp, Serratia marcescens
atgcgcgctaaactcaatggactggtcgccgcaggcttgtttacctgtgccttgaccagccacgccagcggtctggtcactcctgataacgatctgcgcaacgatctggcctggctgtccgatcgcggcgtgatcaacgtcagtctgtccacctggccgctcagccaggaagagatcaactccgtactgtcgcaggccaaaccggtcactaataccgaaaagaacgtgattgaccgcgttcagcgccgcgtcggcgaactgaaatccaatatccgcatcagcggctacgcctccaccgataaacccggcactccgcaaggcttcggccagagtgagtatgctgacgatcgcctgaccgtcggcgtcggcggcagcggcgaatattgggatgtgcgcctgcaaggttcagtggaaggcgaccagcgcgtcagcgacgggtccaagtttaatatgcaaggttcctacggtgcggtaaaaatttggaaccagtggctctccttcggtgaagtctcccagtggtggggcccgggctatgacggcagcctgatccgctctgacgccgcgcgtccggttaccggctttatgctgcagcgcgccgaccagtcgccgtttgaaaccccgtggctctcctggattggccgctggcagtatcagatcaccgccggtcagctgtcacaatactccgccgtaccgcacaccaagctgatcggtggccgtttcaccatgatgccgaccgactttgtcgaactgggcgcatcccgcatcatgcaatggggcgggcaaggacgtccggaatcctggagctcattctgggacggctttaccggcaaggataacgatgactccggccagggtaacgacccgggcaaccaactggcgggctttgacttcaagctgaagatgcaaccgctgatcggcctgccggtcagcctgtacggtcagttgatcggtgaagatgaagccggcctgctgccatctcagaatacctacctgctgggtctggaaggccaccctgagtggggcccgaacaccatcaactggtatatcgaaggcgccgatacccgcgccaacatgaaacgtaaaagttatgtgtataaccactacacctataaaggcggttattaccagcagggctatccgctgggtcacgcgatgggcggcgacggccagatgctgtccggtcgggttgaactggtgctggacgacggtcaacgttggagcacccgcgtggtatatgccaaagtgaacccgcagaatcagtcaattaaccaggccttcccgcactctgatacgctgaaaggcattcagttcggctggggttacgacttcgattcgcaggtgaaattcgataccagcctgtggtacaccaacaatgaccacagtgccgcagacgacgttggcgccggcatcagcctggaagtgccaatcaatctgtaa

SEQ ID NO: 442287 - DNA, 894 bp, Serratia marcescens
atgaacaaaactctgttgtcgttttatctgtccgctgcgctggccgtcagcctgtcgccggccaccaatgccgcgacgccagccgatgtcgccgttgcgccggccatcagcgccgccgcgctgcaaaacctgccctggcagccgctggtgccgccggtgaaacaggacgtgacgctgaacgacgccagcccgcagattcgtcagggcgatattcagggcgcggtagcagcgtatacgctgccggccgaccgtggctcactggagatcaccctgagcagcatcgccagggataatgcgctgtatgcgccgagcgtactggtgctggatgagcagcggcgcccggcggcctactatcccagcagctattttccgtaccagccgccgggcgtgatgtcggcagaccggctggagggcaccatgaagctgacgccggcgctggggcaaaagcagatttacctgctggtgtacaccacgcggcaggatctggctaacaccacacggctgaccaatccggcgaaagcctatgcgcgcggcgtcggcaacgcggtgccggatattcccgatcccattgcccgccacgccggcggcggtctgctgaagctgaaggtcagcgccgagcagggcagcggcaatatcatgatcggcatgctgcctgcggcgtcgagcacgccgccggtcacggtcggtgccacggcgcagccggccagggcgacggcgtccgcaccggcggaaccgatgctgaatgacaccgaaagttacttcaataacggcatcagacaggcggtgaaggcgggagatatcgacaaagcgctgaagctgatgaatgaagcggaaaaattgggttccaccactgcgcgtaacacctttatcagcagtgtgaaaggcaaggggtaa

SEQ ID NO: 442288 - DNA, 525 bp, Serratia marcescens
atgccaggcaatagcgaatccattttgcccccgctggaatggctcaccgagcagcattctcccgtgcccgccgcgatcaatgactggctgatggagctgggatcgatgacgcagcgcttcgagaaacactgtcgctgcgtgcgggttgagccgcagcgcgagggctttgtcagccgcgaggagctgggagaagaggcggaacatctgccggacagcccgcgttactggctgcgcgaaatcgtcctgctgggtgacgaccggccctggctgcttggcagaacggtgatcccgctggaaacgctgaccggccccgatcaggcgctggttgatttgggcaccgtgccgctggggcgttacctgttcagcagcgatgcgctgacccgcgactatattttggtcggcaggcaggatcggttgtgggcgcggcgttcccgcctgcggctggcgggcaaaccgctgttgctgaccgaactgtttttacctgacgcaccgctgtatgaagcggacggcagcgaaccggcctaa

SEQ ID NO: 442289 - DNA, 867 bp, Serratia marcescens
ttggaaggaagcattagccaaagtaaatggcgggcctattgccacctgatgcgcattgataaaccgatcggcacgctgctgctgctgtggccgacgctgtgggcgctgtggctggcgggcgagggcgtaccgtcgttccccattttgctggtatttgtactgggcgtatttttaatgcgcgcggcgggctgcgtggtgaatgattttgccgatcgcgcctttgacggccacgtgaaacgcactgccaaccgtccgctgcccagcggccgggttacggagaaagaagcgaaaattttgtttgtggtgctggtgctgatctccttcgcgctggtgctgacgctcaataccatgactatcgccctgtcgctggccgggttggcgctggcgtggatctatccgtttatgaagcgggtgaccaatctgccgcagctggtgctgggcgcagccttcggctggggcatcccgatggcctatgctgcggtgagcgaatcgctgccgctgagctgctggctgttgctgctggcgaatatctgctggacggtggcttacgatacgctgtacgcgatggtggaccgcgacgacgatctgaagatcggcgtgaaatccaccgcggtgctgttcggccgtttcgacaaactgattgtcggcctgctgcagttcgctacgctgctgctgctgttgtggattggttacctgtcgcagctgggcggagcgttttactggtcgctgctgctggcgggcgcgctgtttattcatcagcaacagcagatcgccggccgcgaccgtgacgcctgtttccgcgctttcctgcacaacaactacgtcgggctggtggtgtttatcggcgtggtgctgagctttatctga

SEQ ID NO: 442290 - DNA, 369 bp, Serratia marcescens
atggcaaatcaaacaaccggcttgacccgtatcattaaagcagcgggttactcgtatcaaggattaacggcggcctggcgcaatgaggcggcgtttcgccaggaggcggtggcggtggttatcgccgtgattgtggcgctgtggctggatatcgacgccgtggcgcgtattctgctgatcggctcggtgctgctggtgctgatcgtagaggtgctcaacagcgccattgaggcgatcgtcgaccgcgtcggcaccgactaccatgagctgtccggccgcgccaaggatatgggatcggcggcggtgtcgctgagtattatcctggcgctgttcgtctgggtaacgctgctgtggcggcatttcgcctga

SEQ ID NO: 442291 - DNA, 1347 bp, Serratia marcescens
atgcgcctgcttgcctccttgaccagcgacacggacaaagccctgtggcgtttggcgctgccgatgatcttctccaacattaccgtgccgctgctggggctggtggataccgcggtgatcggccacctcgacagcccggtctatctgggcggcgtggcggtgggggcgatggtcaccagcttcctgtttatgctgctgctgtttttgcgcatgagtaccactggactgacggcgcaggcgctgggggcgcaaaacccgcaggcgctggcgcgcgcttttatgcagccgctgctgctggcgctgctggccgggctggcgattgtgctgctgcgccacccgctgatcgatctcgcactgcagatcgtcggcggtgacggcgaggtgctgacgcaggcgcgcgcgttcttggagatccgctggctcagcgcgccggcggcgctggcgaacatggtgctgctgggctggctgctgggcgtccagtacgtgcgcgcgccggtgatcctgctgattgtcggcaacctgctgaatatcgtgctggacctgtggctggtgatggggctgggctggaacgtgcagggtgcggccacggccaccgcggtatctgaatacgccaccctgctgctcgggctgtggctcagctggcgcgtgatgcgcatgcgcggcatttcgccgtcgatgctgcggcacgcctggcgcggcaacgtgcgccgtttgctggcgctcaaccgcgatatcatgctgcgttccctgctgctgcagctgtgcttcgcttcgctgaccattttcgccgcccgcctgggcagcgaggtggtggcggtcaacgcggtgctgatgaacctgctgacctttaccgcctacgcgttggacggcttcgcctatgcggttgaggcgcactccgggcacgcctacggcgcgcgtgacgacagccagctgcgtctggtctggcgcgccgcctgtcgtcagtcctgcctggtggcgctgggctttgcgctggtgtacgcctgcgcggggcagcagatcgtcaatatgctgacgtcgctgccggagctgcgcgcactggcggcccactatctgccgtggcagatggtgctgccgctgattggcgtatggtgttatctgttggacggcatgtttatcggcgcgacgcgcggcgcagagatgcgcaacagcatggcggtggcggcggcgggctacggcctgacgctgctgagtttgccgctgttgggcaaccacgggctgtggctggcactgtgcgtctttctggggctgcgcggcgcggcgctcggttggatttggcaccggcaccgcgtcaacggcacctggtttgcgcaggggaaggcggcttag

SEQ ID NO: 442292 - DNA, 219 bp, Serratia marcescens
atgctagaaattttcttttttatcggcttcgtgctgatgctgctggtcaccggcgtttcgctgctgggtgtgttggccgcgctgctggtggcctcggcctttatgctgctgggcggcctgtttgcgatggtgattaagctgttgccgtggctgattctggcggtggttggcgtgtggatttatcgctcgttgcaaaagccgcagatacggcgctattga

SEQ ID NO: 442293 - DNA, 1005 bp, Serratia marcescens
gtgagcgagatcggcaaaaacaagaaaaccaccatctacgatctggctgcgctcagcggcgtatccgccagcgcggtcagcgcgatcctgaacggcagctggaaaaaacgccgtatcagcgccaacctggcggaaaaggtgacgcggattgccgaggagcaaggctatgcggtcaaccgacaggccagcctgctgcgcagcgcgcgctccaaaaccatcggcatgatcgtaccgaagtacgataaccgctatttcggctcgattgtcgagaaattcgaggagatggcgcgcgaacgcggcctgttcccggtgattacctgcacccggcgcgatccggcgctggaggcggaagccgccaaaaccatgctctcctggcaggttgactgcatgatcgtcaccggcgccaccgatccggacagaatcgccgagatctgcgccaatgccggcgtgcccacgctgaatctggatctgcccggcagccgcgcgccgtcggtgatttccgccaacttcgacggcgcccgcgcgctgacccgccggctgctgcaacacagtccggcaaatgccccgctgctgtttatcggcggccgcggcggcgatcacaatacccgggaacgcctgcgaggctttctggccgcgcatcaggaagctggcctgacggtgcccgagacgcatattttgctgtgcggctatcgggcggaaaaagcggaagcggcgctggagaactattttcacggccaccgcgacgcccagagcgggtttttcgttaactccaccatttcgctggaaggcgtggttcgctttctcagcggccagggcatgctgcgcggcgagccgcggcgggcaatgggctgttttgactgggatccgttcgtcgccatgctgggggacgatatcatgatggtgaaacaggacgtcggcgcgatgatgacggaagtgttccgtcaggtggaaagcggcatcagcggcacggcgctgacagagatcccggtggagctgatggtatga

SEQ ID NO: 442294 - DNA, 750 bp, Serratia marcescens
atgaacgcttctgtcttctctatgaatacttccctggcgggcaaagtcgccgccgtcacaggcgctgcgtccggtatcgggctggagtgcgccaaaatcatgctgcaggccggcgccaaagtggtgctgatcgatcgcgatgcggacaaactgcacgaggtggtcggcgagctgggcgagcaggcgctgccgctgcaggttgacctgatggacggagcccaggtggacggcattctggcgcagatcctcaaactggccggccggctggacattttccacgccaacgccggcgcctatatcggcggcgcggtggaagagggcgacccggacgtgtgggagcgggtgcttaagctcaacaccagcgcggcgtttcgcagcgtgcgcgccgtgctgccgcacctgatcgcgcagaagtccggcgacattatttttaccagttccatcgccggcgtggtgccggtggtgtgggaacccatctatactgcttctaaattcgccgtgcaggcgttcgtccactcgacccgccggcaggtggcgcagcacggcgtgcgcgtcggcgcggtgctgcccggcccggtggtgacctcgctgctggatgactggcccaaagagaaaatggaagaagcgctggcgaacggcagcctgatgcagccgattgaggtcgccgagtcggtgctgtttatggtgacgcgctcgccgaacgtgacggtgcgcgacctggtcattctgccgaacagcgtcgatctctga

SEQ ID NO: 442295 - DNA, 1617 bp, Serratia marcescens
atgagcagtaaagccagatacctgattggcgttgacgtcggttccgccagcgcgcgggcgggagtgtttgatgcagacggtaatctgctcgcctccgccaaaaagaacattgccacctttcacgccagcggccaccgggttgaacagtccggcaatgatatctggcgcgcggtgtgccactgtgtcaggcgcgcggtgacgcagtccggcattgagccggccgcggtggcgggcatcggctttgatgccacctgttcgctggtggtggtcggtgaggagggcgcgccgctggcggtcagcccgggcggtgaggcggagcgcaatatcatcgtctggatggatcaccgcgccgcacaacaggcggacgccatcaacgctacggcgcatccggtgctgaaatacgtcggcgggcgcatctcgccggaaatggaaatacccaagctgctgtggctgaagcagcatcacccggaaaccttcacgcaggcctggcagttcttcgatctgacggactatctgacctggcgctctaccggcgatctggcgcgttcgcagtgtacggtcacctgcaagtggaactatctggctcatgaaaaccgctgggatgccgactatttccataccgtcggtctgcccgaactggcggaggcgtcgttcggccgcatcggccagctcatcgtggagccgggaacgccgtgcgggcaggggctgtcggcccaggcggccgaggatatggggctgccgcaacatacgccggtggcggccggtatgatcgacgcgcacgccggcggcatcggcacgctgggggtggacggctcgccggaagagaagctggcctacgtgttcggcacctcctcctgcaccatgacctccacccgcacgccggccttcgtgccgggcgtctgggggccgtattatgcggcgatggtgccgggcttctggctgagcgagggcgggcagagcgcggcgggcgcggcgattgatcgcctgctggagctgcatccggcgtcggcgcaggtgaaggcgcaggccgaggcggaagggttgccgctgccggtttatctggcggatctggcgatgaacaggttcgatgcgctgtccgacgcggtgcagtgcgcccgtgagatgcacgtggtgccggagtttgccggcaaccgggcgccgctggcggatccttatgctcgcgcgctgatctacggcctggatatggatcgcgatctggacagtttgattgcgctgtatatcgccggcgtgtgcagcctgggctacgggctgcggcagatcatcgatgcacagcgtgagaacggcattgcaacgcgtgatatcgttatcagcggcggcgccggccagcatccgctggtgcgtcagctgattgccgacgcctgcggctgctcggtgctggcgaccaaatcggaggagccggtgctgctgggctccgccattctggccgcggttgccggcgggctgcgtgcctcggtgagcgacgccatgcaggcgatgaccgcccgcgagtgcgaatattcacccaacgcggcgtatgcggcgctgcatcgccgccgctatcaggcgttccagctgctgcagcagacggcgaaaaatatccgcgaagatcgctattaa

SEQ ID NO: 442296 - DNA, 768 bp, Serratia marcescens
atgaaaaaattagcgcctctcgccttactgctcgccgccggcggcgccagcgcccagtcgcacctggataaggtgacacagcaaaagcagctggaagtgtgcaccaccggcgattacaaaccctacacctttctgccggaaaaaggcggctatgaaggcattgatatcgagatggcccagtcgctggccaaaagcctcggtgccgaggtgaagtgggtcaaaaccagttggaaaaccctgatgcaggactttaacgccggcaagtgcgatatcgcgatgggcggtatctccgttacgctggagcggcaaaagcaggccttcttcgcggaaaaactggataccgacggcaagatcccgctggtgcgctgcagcgacgtgaagaaataccgcaccatcgcccagatcaacaaaccgtcggtacgggtgatcgaaccggccggcggcaccaatgaggccttcgcccgcgcgcacctgccgaaagcgaagctgacgctgtcgcacgacaatatggggatcttccagcagctggtcgatcgcaaggccgacgtgatgatcaccgacgcctccgaagcgctgtatcagcaaaagcgctacccgaagctgtgcgccgttaacccgaaaaagcccatgcagtacggcgagaaggcctacatgctgccgcgtgacgacttaagctggaagctgtacgtcgaccagtggctgcacctgaccaaagccagcggcgagtaccagaaaattattgataagtggctggcggtgaagaaataa

SEQ ID NO: 442297 - DNA, 468 bp, Serratia marcescens
atgtacaacattgacgattttgatatgaaaatcctgacgctgctacaagccaacggccgactgaccaaccaggaactgagtgagctggtggggctgtccgcgtcgcagtgttcccggcggcgcatcagcctggagcaggcgcagctgatccgcggctaccatgcgcggctggcccccgaggcggtggggttgggcatggtcgggctgattgaggtgagcctgaccaaccacggaccggaacaggtggacagttttcattacatgctggagcatacggaagcggtgctcgacgcctataagaccaccggcgacgccgactatctgctgaaagtggccgtcgccgatctggccgcgctgagtgagtttatcagccagacgctgctgacccaccacagcgtggcgcacgtcaagacggcggtggtgctgaaccgcattaaagaaaacggcctgctgccggtggcgcgttaa

SEQ ID NO: 442298 - DNA, 1194 bp, Serratia marcescens
gtgttccagaacgttgatgcctatgccggcgacccgatactgtcgctgatggagaagttcaaacaggatccgcgcgagcataaggtaaacctgagcatcggcctgtattacaacgagcaggcgattatcccgcagttgcaggcggtcgccgccgccgaggcgcagctgagcagcgccgatcacggcgcctcgctgtatctgccgatggaaggcctacagccttaccgcagcgctatccagcagctgctgttcggcgccgatcacccgatgctgcagcaggagcgcattgcaacggtgcagaccgtcggcggctccggcgcgctgaaggtgggggccgatttcctgcattactatttcccgaattcgcaggtgtgggtcagcgatcctacctgggaaaaccacgtggcgattttcagcggcgccggcttcaaggtgaatacttacccgtacttcgacagcgaaagcctgggcgtacgtttcgacgctatgctgagcacgctgaaaacgctgccggcgcagggcatcgtgctgctgcacccgtgctgccataacccgaccggctccgatctgacgccggcgcagtgggacgaggtggtgaaggtgctggccgagcgcgagctgatcccattcctcgacatcgcctatcagggcttcggcgccggtatggagcaggacgcctacgccattcgcgccattgccaccgcagggctgccgtgcctggtgagcaactcgttctcgaaaatcttctcgctgtacggcgagcgcgtgggcgggctgtccgtggtgtgtgagagcggcgaagccgccggccgcgtgctgggccagctgaaggcgaccgtacgccgcaactactccagcccgccgaacttcggcgcgcaggtggtggccaaggtgctgaacgacgcgcagctgaagcagcagtggctggatgaagtagaaagcatgcgcgcccgcattctggagatgcgccagacgctggtgaatgcgctgaagagcgcgctgccgcagcgtaacttcgattacctgctgcaacagcgcggcatgttcagctacaccggcttaaacgcgcagcaggtcgaccgcctgcgtgaagagttcggcgtgtacctgatccacagcggccgcatgtgcgttgccggtctgaaccaccgcaacgtgcatcaggtggcggaagcaatcgccgccgtgcagtaa

SEQ ID NO: 442299 - DNA, 1323 bp, Serratia marcescens
atgaaaaaaatcaaaattgcgggcgggatcgccgtggtcgccgccgccgtggtggttgggctactgtggaaaaacggcgatgccagcgccgataacgtggcggacgaccggacgctgaccagccagccgccgtccgcggcggacgcgcaggcggtgatacgcggcaaatacgtggcgattgccggcgactgcgtggcctgccataccgcgccgggcagcaagcagccgttctccggcggctatcggatcgacacgcctttcggcggtatttacgccagcaacatcaccccggacgttgaagacggtatcggcagttggagcgaacgcgactttttccgcgcggtgcgccacggcaagggcaaacagggggaaaacctctacccggcgatgccgtacaacgcctatatcaaagtcagcgacgccgatatgcacgacctgtggctgtatatgcgttcggtcaagccggtgaaaaacaaggtgccggaaacccggctgccgttcccgtacaacattcgtctggcgatgatgggctggaacctgttgttcttcgacaacagcggctttacgccggatgccggccagtcggcacagtggaaccgcggcgcctatctggtgcagggactggagcactgcgcggcctgccacacgccgaagaacctcatcggcggggatacctccgcctatctgcagggcggcaatctgggcgagtggtacgcgccggaaatcaccggcaaccgctacaccggcatcggcgagtggacggaagatcaggtggtggactacctcaggctgggcagcaaccacgtcgccgtcgcctccggcccaatggcggaggcggtcagcaactctacccagcacctgacggagcaggacctgcgcgccatcgccgtgtatcttaaatcccagccgggatcggatcggcaaaaaccggcaccgctggccgcagacagcgcacagatgaagatgggcgccaacgtctatgccgctaactgtaccgcctgccataacagcgacggcaaaggcatcccgaacctggccaccagcctggccggcaacccggcgattatggcgccggacgccgcatcgctggtgaccaccgttctgcagggcggccgtggcgcggtgaccgtgggcaatcccaccagcggcgcgatgccgagctttgcctggaagctgtcggacgaacaggtggcgtcggtgacgacttacatccgcaatagctggggcaatgcggcgccggccataacgaaggatgaggtcgcagagaaacgcagcctgctgcagctgccgccgcagatggcgcaaggcagcgccgacaaatag

SEQ ID NO: 442300 - DNA, 1773 bp, Serratia marcescens
atgaaaaatgtacgtccaaaagccgatgtggttatcgtcggcctgggatggtgcggttctttgatcgccgaagagctgacccgcgccggattaaacgtcgtcgccatcgaacgcggcccctggtttgaaaccgccaccgattttccaccctccatcgataccgatgaactgcgttgggatacccgccgcagcatgctgctgccgcctgcggtggaaaccaccaccttccgcaaccaccgcagcgaaaaagcgctgccgacccgcgactggaacctgaacgagctggggtataacgtgggcggttcaggcacccactgggcgggcatggcctggcgctttacgccgttcgacctgcagccgtatacccagaccgtcgagcgctacggcaaacagcagatcgccgacggtctgattctgcaggactggggcgttacctatgacgagctggagccgttctacgaccgcttcgagaagatcgccggcgtctccggcaaggccggcaagctgaacggcgaaattatcccgggcggcaacccgtttgaaggcaaccgcagcagcgaatacccgctgccgccgctggaaggactgcgcctgaccgacctgttccgcgatgcggccacgtcgctggggctgaacccgtttatggtgccggcgggccagacctcccgcgcctacgtcaacccgctgggggtacgcatgggtccctgcacctactgcggctactgcctgtactacggctgcggcaacttctccaaatccagccccaacgcctgcgtggtgccggccctgatgcagcgtgagaactttaccgtgctcaccgactcggcggtggtgcgggtcaacaaggccgctgacggcaaaaccgccaccggcgtcacctatctggaccgcaataaaaaagagtgggaacagccagccgatatcgtagtgctgtcggcgttccagatgcagaacgtgcgcctgctgctgctgtcgaaaatcggccagccttacgatcccgtcagtaaaaccggcgtggtcggccgcgcctacagcttccagacggtggccggcgccaatttgttcttcgaagacgaaaaccttaacccgtttatcggcgccggcgcgctgtcgcagcaggtggatgactataacggcgataatttcgaccacagcggactgggctttatcggcggcgccggcctgttggtggtcgcccgcggcgcacgcccgatcggcaatgccgacgcgctgccgcccggcacgccacgctggggcaaggcatggaaaaaagcttacacccacgccttccagaacggctcctttatcttcggccagggcaccagctactcgcacgaagattactacctcgatctggatccggaatacacggacgataacggcaacccgctgctgcgcgtcacctttgactacaacgaaaacgaccgccgcaccgcccgctttatcgaagagaaaagcgtggagctgggcaaggcgatgggcgccaagatcgtcatcggcaccaactccgcctccggccgttactcgccgtacaacctcgccagcgatcacaccatcggcggcgcggtaatgggcaacgatccgaaaaccagcgtgctgaaccgctatcagcagtgctgggacatgcataacctgttcgtgctgggcgcttcctccttccctaacaacgccggttacaacccgacgggcaccatcggcgcgctgagcctgtggacggcgaaagcgattatcgaacagtacgtcaaaaaccccggcccgctggtaaaggtgtga

SEQ ID NO: 442301 - DNA, 717 bp, Serratia marcescens
atgaaacgcagagaatttctcacctcagtggtcgcgctgggggtggcttcgtcgttgcctacggcacaggccgacgtcatcaacggcgggcaaccctggaaccccggcgacatcaacacgccaccagcgccgccgcgccaaggcggcctgcagtacttcacgcagcatgaattcgataccgtcgccatcatcgccgagcgctttattccggccgatgaactgagcctcggcggcaaagaggccggctgcgccacctttatcgaccgtcagctggcgggcgactacggcaacgccgtcgctctctaccggctgggacgttttgtcaaaggcaccccgcagcaggggccgcagtcgccgctgacgccggcgcagcgttaccgccagggcctggcggcgctggatagcgccaccagggcgcagttcggtaaggactttatcgccctcgaccaacagcagcaggagcgcatcctgcacgccatggaggccgaccgctacgatctcggcccgcaggtggaaaccaaggtgctgtttgagctgctgctgcaaaacgtacgcgaaggcttcctggccgatccgatttacggcggcaataaagacatgaccagctggaaaatgattggtttcccgggcgcgcgctatgacttccgcgatctgctcggtaagaaagggcaaaagctgaacatcatccccaccagtttaatcgataacacgctttga

SEQ ID NO: 442302 - DNA, 1053 bp, Serratia marcescens
atgtttcccaccgccttacctcagccgaagcggctggcgcctgaaagcattcccgttctgcgctgggggattatcggccccggctggattgccgaccatttcgctgcggcgctgcgcggccagacccggcagcagctggtggccgtggcgggacgcagcgccgagaaaacggcggcgttcgccgcgcgctgggatattccccagacctgtcagagccttggcgagatgctggcgctgaaccagctggatgtggtttacgtcgccacgccgcacaaccatcacttccctgacgccatgcaggtgctgcaggccggtaaacacgcgctgattgaaaagccgctggcgcttaacgcccgtgaggggcgggcgctgcgggatgaagcgcgggcgcgtggccttttctgtctggaggggatgtggtgcgactttacgccgaaatatgatgtgctgcgccagctgctggccaacggcgatctgggggatctgcacaccctgattgccgatcacggtgagtttttcaccccggaacaccgtatttttaatgccgacctggccggtggtccgatgctggatctgggcagttacctgatatcattcagcatcggcattgccggcgatgtgccggaggcgatcgtcgcgtacgggcagcccgcgccgggcggggtaaacggccaggcgtcgatgctgtttaactacggcaacggcatgcaggcggtgctgaataccacgctgttcagccatacctccggtgcggcgacgatcgccgggcgcgacgccacgctgtatctggacgggcagttttacgcacccggcgacttcacgctgcagtccagccagggcaaccgacggctgcattggcaggaccggggcggacgctatgtacaactgagttatgaaattgagcacgcggcatggtgcatcggacaggggctgacggagtcgccggtgcgtccgctggatacctcgctgatgacgctgcgcacgatggatgaagtgcgccgccagctgggtatcgtctttaacgaagagcgcgcggcggcacggctggcttag

SEQ ID NO: 442303 - DNA, 1020 bp, Serratia marcescens
atgaagaagttaaccatcggcaggctggcgcagctggccggcgtcggcgtggcgacggtggatcgggtgctgaatgaacgcggcggcgtagcgccggagacggcgcgcaaggtattgctggccgcgcgcgagcacggttttaaccgggtattgcccgaggcgtaccagcacccctggcgcatcgaggtgattctgagcggcaacggctcattttttttcaaaaagctcgataacagtttcagcgaactggccggcgcgctcggctaccgccgggtgacgctgcaccggacgtttatctctgaatcccacccggtcaggctggccgagcatatcatggcgtgcagccgtcaacgggacggcattatcgtgtttgcgcacgaccaccctgcggtctatgcggcgctggccgactgccgggcgcgggatattccggtgatcaccatcgtgaccgatctgccgcatgccgagcgcctgtgccacgtcggcgtcaatcagctgcaggcgggccgcaccgccggtttgctgatggggcgcaccctgaaggcgccgggcgaggtggtgatggtcagcggccgcagcgactacagcgcgcaccgccagcgcattgagggcttccgggcggtgctgcgccagcgcttcccgcagattgacctgaaagaggtgctggtggggcgtgacgaacgccataccatccggcgtctgctggcggaaacgctgaacaaaaacggccatatcgtcgggctgtataacaccggttccggcaacactgaaatcagcgccgagctggcgaagcaccggctgctgggagagtgcgtctatatcacccatgagctgtacagcctgacgcgccggctgttggataacgacagcctgtcttatgtgatcgaccaggatgcccgccagcatgcgcagctggcgatcgacctgatgctgggccagctgggaggcggcgacgccgtcgacatgtaccagagcggcaaggtagattttaaaatcttcaccgcagaaaattgcgagtag

SEQ ID NO: 442304 - DNA, 354 bp, Serratia marcescens
atgaattcttcagcattattgcaatattgcatggcgaaaccgggcgcgcagcagagcgaccagaatcagtggcaggccagccaggtgaaggtcggcgaggtgatgtttgccatggtgtgggagattgagggccgcccggcgctggcggtgaaatccagcccggagcaggcggaaaatctgcgtgagctgcatccggaaattgtcccctgcgagcatctgaacaaggcgcactggaatgcggtctatctggacggcggcctgccggactcgcagttttataccctgattgacggttcgtaccagctggtgctgtcggggctgccagagcaggtgcgccaggggctgcaggcctga

SEQ ID NO: 442305 - DNA, 558 bp, Serratia marcescens
atggctacaagtgaagaaaaacgcaagatgatcgccggtgaactgtatgacgccggcgatgagctgctgcgcagtgaacgcctgcgggcgcgccaactgctgcatcagtacaaccattgcgcaccgcaggagggcgagcagcgcaggcagtggctgacgcagctgctggggcagtatcagggcggcaccatcgaacccagcttccgctgcgactatggttacaacatctatctgggaaaaaatttttacgccaacttcgactgcgtgatgctggacgtctgcgaggtgcgcatcggcgataactgcatgttggcgccgggcgtgcacatctataccgcgacgcacccgctggatgcggcaagccgcgtcggcggcgccgagtacggcaaaccggtgaccatcggtgataacgtgtggatcggcggacgggcggtgatcaaccccggtgtggccatcggcgataatgcggtgattgcctcaggcgcggtggtgaccaaagacgtgccggccaactgcgtggtgggcggtaatccggcgcgtatcctgaagcggctgtaa

SEQ ID NO: 442306 - DNA, 306 bp, Serratia marcescens
ttgtacgcgctgaatggtaaactggacggtatcaagatcgtgccgctgtccgaggtcgccaccaaggacgattttttcaacatcaaaaacgtcagccgtgatgacctgttgagcgcacaccgcgtgccgccgcaaatgatgaggattatccccagcaataccggcggttttggcgacgtcaaaaaagccgctcaggtattttttcgtaacgagttaatcccactgcaggaacgcatcaaagaggtgaacgactggttaggggaagaggtgatcaacttcaaagattatgagttgccctctgaatga

SEQ ID NO: 442307 - DNA, 465 bp, Serratia marcescens
atgacagaaattaataaagcagtaaatttatttaatggggtttgccagcaactaggaggggagcctaacccgccttaccaaggcgaagttaataattatcactttagccggggtattgaagacgaacagccggagttttggaagcaatacggcgattttgtccgtatcagtgatgggattgattttgatgggataatctttcaccctttgagcaaagaagacgagaataatattttcttgaataatgatattttgtctgaggaaaaaggtttttataatgaagccctggacggatttattgttattggctcaaatgatactgatactttcgtttttaatactgaaaataaaaaatgggaagctcgagaccgtatagcggtcgattatgtttatgattcctgtgatacgttaagtgatttgattatagttcaaatggaaaggttaaaaaaacgtcatggcttgtag

SEQ ID NO: 442308 - DNA, 1152 bp, Serratia marcescens
atgaagaaattacccggcaatctgtatcacctgttttatgacgagttaccgcccgaacgctatgacaggatcatcaccccccgtgaagcatggcgcgaggtatgccgacattatgtgttggattctggcagctccggcgggtttaacatgttcggggatgacatacagccccgctccccgtgggacacccagacagtgattgaaaccggtagatacgccaataagttaaagggcgatatagagtgcggcaatattgtttacattgatgataaagaaatgtggagcagcacccgttttgctttttatatcaatgataatggtcgtttggtaggttgtggtggggctaattcattcatgttgggcggtggtaaccgcatcactgactactacgaacaggcgataaggcacaggggagaacgctcgcgacctttgccaacggtaaagcctgcggaatattacacgcccctccagtacgctcaagcagcaaaaaagcagcttagcacgttgaacagtaaagccgttgggcggttgctggctgccggggggatatacaatcagaacgtggaaggtttcgcacagacggctaagcagcttggcggcgatgcggccgaaggttttacccaggtggctaaccctcagtcaataggttcgctggttgcactatcttcaatagctgctgttactcgtatgcccggcggcaacattgctaacatgaagtcgttagaagaacttcagcattttctagggacttacaagggcgataaaaaattactcaacaatattgatgttattaaaatggattatattcagaggccgagaggtgagttagtggcgttacgctctgaatttgataataaagtaagaggtaaatttataaagagcattgccgacagtcctgatgttatttctaggttcgataatgattttagatctaatatgctaaaaggcattgttccaaaaggctatcaggttcatcataaactaccgttggatgatagtgggacaaataactttgataatcttgtgttgattaatagggcgcatgaacatgcggtgtttacgactgcgcaaataagagtaacaaaggctcttggtacatcagaaagcaaatcgattttatggcctgttccaaagggtatagtctatccttaa

SEQ ID NO: 442309 - DNA, 417 bp, Serratia marcescens
atggctattgtggaaaccctgatgactaactcgaagtcctttttgctaacgctctgcttatcccgtgttttattgacttttttcttctggatggccggtgtttttggcgtattcaattttggggtgatcgtccaggaaatggcgacggtgggtcttccctggccggttctcttcgcggttgccaccatcctgtgccagctctgtggttccgcactgataatttttaattgtgcaggctatggctggattggatcggtaatgctgattgtgtttacactgctgactatcccggtgggacatccattctggacattcagtgagccagaacgaacgcaggagttccatattgctcttgaacacattaccgttatcggggggttaatcatgagcgccctcctttcaggccataaacgatga

SEQ ID NO: 442310 - DNA, 627 bp, Serratia marcescens
atgaacgaaaaaaaccgccaaaaaggtcgccctaaagatccgctcaaagaacgcgcgatacttcaggctgcgcgaaaattatttctggaaaaaggactggacgtcaccacggaggaaattgcccgtgtcgctggcgtggcaaaggccaccctgtacgcaaactttgccgacaaagacatcctcattgaagcggtattacggcaggaatcagatttaacaatcagtgatgaagatttttcaaaacggcataaccattcactgacggatacgctgactgcatttggaaaccgattcgtccgttttataaatcagcgtgagctgaccggatgggatcggctgattgcctctgctgccattcgccatccggatttaccacggcgattttacgtcgcaggccccggcagggcgcagcagatgttggaatctattattgctgaagccgttgacgaaggcgtgctgatatcatgtaacccgcgcgaagccgctgatgatttagccggattatggttgggcatgacgagtctggagataaagctcggcgcgagaaagacactgtctgatgaggaaattaagcatcgggtgtcgcatgcgctcggtgtttttatgcgcttttattcagtcaaatag

SEQ ID NO: 442311 - DNA, 1377 bp, Serratia marcescens
atgttacgaaaaaaggaagatctattttttttatccgtcatgattgtgacattcatgatcggtttcgataccaccggtttaggcgtcgccattcctgacattgccgtcagattaggttttggcataaaggaaggcacctggttaagcatttcatacacggcaggttttgccgcctttctattgccagcaggaattattaccgataaaactggctaccgtttaaccttgttatcttcattatctgtttttgtgctttcatccgtttattcaacgtattgtgaaaccctcacggaattcaccaccataagattgattcaaggaatttctgcagcattcctgaatacttcagcaatggcactacttaacgtactgtatcccgttggcggcccccgtaaccgggcaggtgcatttaaaaaatggtcaatgtttcttggcttaagttttgctcttgggcctattttaggcagcctgattgtctcctacctttcatggggatggattatgcttatcaacatcccgctgagcttggtagtactgttcccatttgttggcagtactgccatggagacgttcaaaaaaggggctcttggtcaggtatcgttaacgagcacgcttcctgcgacaattatccttctgttcatcaccatgaatccgtatttcaatcagacattctccggccttggtcggcatcttttttacgctataatcatagcttgccttattgcacttggatcattacatctattttcttcaaagagttttactcgactgcctgaactgaagaacggaaattttcttatttctttattgctccctattttcttttctatctcttactggagtcttttcgtgactctccccggatacatcacggtgaaatttaattattccccgatgatggtcatgacgtctatgctatgtctttccattcctttaacactcatccctgtttttacactgcaagataaactaaaactaaatgccatgagtgggtttgttttcatcgctctcggtttgctggcattggcataccttttcaataccaatgtgaaacaccaggggttactattggatatcactcttttcattatggggtgtggggcagccatattgaatccgattatggcacgagtagtgatggataatgtcgcgccagagaactcaggccttgctgccgcgataacaagtacattacgccaaatgggttttgctgtcggggtagcattttattctttaatgaccgattctagtatttcgaacggcctgaacattagcgaatcgcatgcatttattgcatcatccatcctacctctgattgctctttctatctgtatttacttaaacaaacgcagtcaattattatcaaaagcacattga

SEQ ID NO: 442312 - DNA, 1104 bp, Serratia marcescens
atgagtaatattgaatatgagattttaaagccgaccttcacccgccgtgtcattactcaatccagcgtggtgatttccccttcaatactctcgcaggccgttgatgtaagttcgcatgtagataaaaatgcacaaaagccagcaaaaggcctcccgggatatttcacgtatggctggaagagagcagcagaggaaattataaaaacacatgctatgggggtgaaaaacatttcacttcgctttgtctctaacgcatcaaaacatgatgatattaatgccgggttatcggagttcgaaacgctgatttctcttattctacgcgaactggtggggttggacataaacctgatcgttgatccttttggtcttgcgttaacgcaggacggccaatggggcgttcaaaattcacagggagagtttgataaagagagaacgtatgagcttctggaaaaagtcggatacatcctttccatcaataaaattcatggtgtcgttacacttggacggattcctgaagaagtcaagatgacaaaaaaaggaattgtttcaggaggcggaaacacgaaaatttactcattctcacaaaatagtgagacgagtacagcctatgtataccttgatagcgtcggtcataatacgggacaaaagattctacctggaaacatcatcgaaatggacttatgggccctgatggatatatggcatggtgctgatgtttcggtcataaaacccatggagagctatcacttgatgagttcattaaagcacttcatcagtgatgaaacggcacgctcacttttccttaattctgaacaagttagcgccatcgcatctcgccatcggttcattcaagaaacgataaaagaaatgacagccaaccctgccatattatctgaaaaatgtgaacgattgcagcttgccggatacacagtttcaggaacaacatatatgctgtcattactggcacatgaaaaaggccccgatatggcaagagccagactggaggagatgtggttgacggcattaggcgtaatgggggatcgttgcgcctgtctgattgacagaaatgtctctcgcttccttgatggcagtattctttgctga

SEQ ID NO: 442313 - DNA, 261 bp, Serratia marcescens
atgaaaaacatcaaaaaatttgctactgctttactgctgaccggcgcagcctttaccgcaacggctgccgaacaacctgctgcacagcctgccgctaacgcgcagaaaatgggcgtgatttccgtcagcggcgccgccagcctgagcgcgctggaagacgcactggccagtaaagccgccgcggcaggcgccagcagctatcgcatcacctccgccggcggtcagaataaattgcacggcaccgcagagatctttaactaa

SEQ ID NO: 442314 - DNA, 444 bp, Serratia marcescens
atgacgacaaatgcatttgttggcagttggtcactggtgtcttcggtatttaagagtgaagcaggcacgctaagctatccgctcggcgcgcaggtggtgggccgcatcaactacgaagccaacggcgccatggcggcgcagctgtatagcgcggtgcgtccgcgttttgcctcggaagatctggcgcagggcagcgaccaggagctgcgggcggcgtttatcaatatgatttgctactttggccgctaccagattgatgagccggatcagcgggtgatccaccaggtcgaaggttgttcgtttcccaactgggtgggcagccgtcaggtgcgcttttatacctttgccggcgataagctgacgctgcgcaccgcgccgctgcagatcggtaatggcgtgcagattggcgagctggtctggcaacgcatcggggacgccggatga

SEQ ID NO: 442315 - DNA, 669 bp, Serratia marcescens
atgattaccgttcaccacctgaataactcgcgctcgcagcctattttgtggtttttagaagagctggcgcagccctatcaggtgcagcgctaccagcgtgaggcgggaagcctgctggcgccgccggcgttaaagaaaatccatccgctgggtaagtcgccggtgattgtcgacggcgatctgacgctggccgagtccggcgcaatcatcgaatatctgcaggaagcctacgatgcgcaggggcagtttatgcccaccgactttcatgcgcgtcagcagtaccgctattggctgcactatgcggaaggatcgctgatgccgctgctggtgatgaaactggtgtttggccgcctcggtcagccgccggtgccgctgctgctgcgcaagctggccggcgccatcggtaaaggggtgcagcgcaactatctcgataggcagatcgccgtgcaccgcgactatctggaacggcacctgcgcgctaacacctggtttgccggccatgacttcagcgccgctgatatcaaaatgagttttccgctggaggcaatggccgcgcgcggcgggttggacggctgtccacagctgcgtgattttctgcggcgcattcatcagcgcccggcttatcagcgggcgctggagcagggcggcccttatcatctgctgctttaa

SEQ ID NO: 442316 - DNA, 405 bp, Serratia marcescens
atgacgactcaaatctttgtgaatttgccggtcagcgatttgcccgcctcgatggatttctttggtcagctgggttttgcattcaatcagcagttcaccgacgacagcgccgcctgcatggtggtgagcgacaccatttatgtgatgctgttaacccacgataaattcaaaatgtttacccccaacccgatcggcgatgccaaacgggccacggaggtgctgctttgtctgtcgcggcccagccgtgcggcggtggacgatctggttcgcaaggcaatcgccgccggcggcaacacctataaccagccgcaggaccatggttttatgtacggccacggctttcaggatctggacggccatatttgggagctgatgtttatggatccgcaggccatgccgtcctga

SEQ ID NO: 442317 - DNA, 888 bp, Serratia marcescens
gtggatgttcgtaccctacgctactttgtcgaagtcgtgcgtcagcaaagctttacccgcgcggcggaaaaactgttcgtcacccagccgaccatcagcaagatgctgcgccatctggaggatgaactggagtgcaccctgctgatccgcgaggggcgcaagctgcacctgacggacagcggccaggcggtctatcagcgcggcgtggcgatcctcgacgaattccgccagttggaggccgagctggaagacatcagcgcggtaagaaaaggcgtgctgcggctgggcatcccgccgatggtcggccggcaaatcgccgatctcatccgccactttcgccacgcctatcccggcattgaactgcgcatctccgagctgggcggcctgtccggtgaacagcgggtgctggcgggcgaactggacttggcaatgacggtctactcgcccgataccgaccggcagctgacctttctgccgctgctgacccacccgatgtccgttgtggtgccgcgcaatacgcactggcaacagcggagccacatcagcattcatgagctggccgaatggccgatactgatttataacgaagattttgcgctgtataagatgctgatggcggcctttcgtcgcgccgaactggagccgcgcatcgcggtgcgcagcggccagtgggattttctggcctcaatggtgcaggccggcgtcggcatcgccgccctgccggagccggtctgtcaatggctggatgaggaaagcctaatctggctgccgctggaaccgctgatggagtggaaggtcgggctgatctggcgtcaggacagttacctgtcccacagcgcccaggcgtggatcgcctgctgccgcgaccacctgtcgatgatgaaataa

SEQ ID NO: 442318 - DNA, 420 bp, Serratia marcescens
atgtccctggcgttacgtcgtgctgcgccatccctgctggctcgcctgcaggttcccgttcaggttgttttgtatgcgctgctgtttttgcttgccgagcagttggtggcgcatttccatctaccgttgcctgccaatattgtcggcatgctgatgctgctggcgttgatcgtgctgcgcgtgctgccgctgcgttgggtacaggccggcgcgcgctggctgctggcggagatgctgctgtttttcgtcccggcggtggtggcagtggttaactacgcgcaactgctgatggtggaaggctggaagatttttctggtgatcgccgtcagcactatgctgacgctgggggccaccgggctggtggtggaccgcgtctatcgcttcgaactctggctgcagcggcgcaaacgtcatgaatga

SEQ ID NO: 442319 - DNA, 690 bp, Serratia marcescens
atgaatgattttatcctcagcctgctctgtctggccgctacgctggcgctctattttgccaataagcggctctatcgtcgtcgccgcagtctgctgctgatgccgctggtgctgacaccgatgattctggtgctgttgctggtggtgacgcatatctcctatcgggactatatgggggagacccactggctgctgtggctgctcgggccggcaaccatcgcctttgcggtgccggtgtatgagaacctgcatattatccgccgtcactggctgtcgctcagcgccggagtggccactgcagtatgtgtggcggtgtacagctcggtctggctggcgcggctgctgacgctgcctgaagaggtgcagcgcagcctggcggtgcgttcaatcaccacgccattcgcgctggaggcggcgaagcagatgggcggccagccggatctggtggcgctgtttgtggtgatcaccggggtgttcggtatggcggtgggggatattctgtttttgcggctgtcggtgcgcagccgtctggcgaagggggccggcctgggggcgtcgtcgcacggcgcaggcaccgcgcgcgcctatgaaatgggacaggaagagggcgtggtgtccagtctggtgatgatgctggccggcattatcaccgtgctggccgcgccgctgattggcctgtggatgtggtaa

SEQ ID NO: 442320 - DNA, 693 bp, Serratia marcescens
atgaaatctcaggttcgcattgcactggtcggcgactatcgccccgaagccgtcgcccaccaggcgattcccaccgcgctcacgcttgccgcttcccaccttgatattgacgttcagtcccgctggctccctaccgaaaccattaccgacagcgccgtgttgcaagactatgatgcgatctgggtggtgcccggcagcccgtaccgtcatgatgccggagcgtttaccgccatccgctacgcccgtgagcatgacgtccctttcctcggctcctgcggcggttttcagtacgcggtggtggagtatgcccgcaacgttatgggctggcatgatgcgactcacgcagagaccgacagcacggggcggttggttatcaccccgctgagctgctcactggtggaaaaaaccggcaccgtgctgctgcagccaaacacccgcattgcgcaggcgtacggcggtcttgaaacccatgaaggctatcactgcaacttcggcgtcaacccggactttgtcggccagctgcaacagttcccgctgatcgtcagcgcacacgacagcgaaggcgacgtgcgcgccatcgagctgccgacgcaccgcttttacgttgccacactgttccagtctgaacgcgccgccctgcgtggtgcgcactcgccgttggtggtcgagctgatcgatacagcccgcagctaa

SEQ ID NO: 442321 - DNA, 243 bp, Serratia marcescens
atggaaaaacgctttattcaggctcaccgcgaagcgcgctgggcgctgggtctgaccctcttctacgtgctggcctgggcgctggccgcctatctgccggacagccaaatcggcgtcaccggcctgccgcactggttcgaaatggcctgtctgctggttccgctgctgttcattatcctgtgctggctgatggtgcgcgtcatcttccgcgatattccgctggaggaccgcgatgaaaactga

SEQ ID NO: 442322 - DNA, 600 bp, Serratia marcescens
gtgcgtttaaaacctgtgcatatcaaatggctgaaagccgcgattcatctggccgccttcctgccgctggcgtggctggtgctggcggtcgatcagggctggctgagcgccgatccggccaaggacatccagcattttaccgggcgtatggcgctgaaactgctgctggtcaccctgctggtcgccccgctggcgcgctacagccgccaggcgatgctgatgcgctgccgccggctgctggggctgtggtgttttgcctgggcgacgctgcacctgttaagctacgccacgctggaactggggctgaataatattgcgctgctcggacaggagctgatagaacgcccctacctgacgctcggcatcgtcagctggctgctgttgctggcgctggcggcgacctcgacccaacgggcgatgcgcagcctgggcaaaaactggcagcggctgcacaatttcgtctatctggtggcgattctgacgccgatacactacctttggtcggtaaaaatcatttcccctcagccgctgatctacgcgctgctggcattgctgttgttagcgtggcgttacccgaaattccgcgcctggtggcgttag

SEQ ID NO: 442323 - DNA, 978 bp, Serratia marcescens
atgcgcgcattattactggaacaacacggcgagcaaatcatcagccaggtgcaggatatcgacgacgaccgcttgccggaaggcgacgtaacggtcgatgtgaactggtccagcctcaactataaagatgcgctggccatcaccggcaaaggcaaaatcgtccgccactttcctatggtgccggggattgatttcgccggtacggtacgcagcagcaaagatccgcgctttagcgagggagacagcgtggtgctgaccggttggggcgtcggggaaaaccattggggcggcctggcagagcaggcgcgcgtcgccggcgaatggctggtgcccctgccgaaagggctggatgaacgccaggcgatgattatcggcaccgccggcctgaccgccatgctgtgcgtgatggcgctggaggacggcggcgtgcgcccggatgacggcgaggtgctggtgaccggcgccagcggcggcgtcggcagcaccgccatcgccgtgctgtcggcgctcggttaccgggtgaccgccatcagcggccgcgacagcaataccgactacctgaaggcgctgggcgccaaagaggtgctgccgcgcagcgactacatcgaaacaccgcgtccgctggagaaacagcgctgggccggcgccgtcgataccgtcggcgataaattgctggccggcgtgctggcgcagatgaactataacggcaccgtcgccgcctgcgggctggccggcggttaccagctgccgaccaccgtaatgccgtttatcctgcgcaacgtacgcctgcaggggatagactccgtacatacgccgctgcatcagcgccagaccgcctgggaacgcctggccggcatcctgccggacagcttttaccagcaggccacgcaggagatcgccctggagcaggcgcccgccgccgcccgcgacctgctcgacaataaagtcaccgggcgcacgctggtaaaaatccgctga

SEQ ID NO: 442324 - DNA, 1935 bp, Serratia marcescens
atgcgatttaccaccaaactctctgcactaatcaccctgctcgttgcgctggccatgttttttatgctgatggggtgctcatacagttttttttatgtcactcaggagcgcatggagcgccgcttcgatgcgctggtcacttcgcttgaccagtcgatgctgcatagctcgctgcaggcgcagacgcagtggctgccgctggtgatgaggccgctcggcattgtggaactgcgcgttgaaagcgccagcggcattctgttcaactatgaactgcccgtgttaacggacgagccaagagccgcgcccagcagccatcgctatgcctctttgccgctgatgcaacaccccggcagtacgctgaatatcacctatctcgatcccttcgccagcgatggctattcgctgcgttcgaccctggccgtcacgctggcgattgtcgtcatgctggtggtgctgctgttcagcctgcgctggctgcgtgagcaggccgccggcgaggatcgtctggcctggcgggcgcgacgcattctaaacggcgagcgtgaagaggtgatgcagggtgatatgcgggagtggccgccgagcgtcagcagcgcgctggatcgcctgctggcggatctggccgaggcgcgtgaggagcggacgcgggtggatacgctgatccgcgcttttgccgctcaggatgcgaaaaccgggctgaataaccgcctgtttttcgacaaccaactgaccacgcaactggaagaagaagggtcgcacggcattgtgatgatggtgcgcctgccggattttgaaacgctgcgcgaaacccatggcgccgcgatggtgcaggagctgatgtattcgctggtcaatctgctgtctacttttgtgctgcgctatccttcggcgctgctggcgcgctatttccacagcgattttaccgtgctgctgccgcaccgcacgctgaaagaggcggacggcatcgccgcgcagttagtgaatgctatcgatgcgttgcctgcgacgccgatgattgaacgggaagcctttttgcatatcggcattgtcgcctaccgcagcggccagacgaccgagcaggtgatcgaccgtgccgaacaggcgacgcgtcacgccacgctgcagggcgaaaacggctggtatgtgtacgacagtcaggtaccggagaaggggcgcggcagcgtgaaatggcgtaccttgctggaacaaatgctggagcgcggcggcccgcggctgtatcagaagccggcggtgacggtgaaaggcgaggtacaccatcgggaaataatgagtcgtgtttatgatggctctcaagagctgcttccagctgaatatattccgctggtaaaacagttcgggctggcggagcgctacgaccgtctgcaggtgagccgaatcataccgctgctggcgctgtggccggaggagacgctggcgtttccgctgtgcgttgactcattattacagcgctcgtttcaatactggctgcgcgatacgttattacagtgtgaaaaaagtcaccggcgacgtattctgattgaacttgcagaggcggatgtgtgtcaacatatcgaccgtttacgtccggtgctgcgtctgattgccgggctgggctgccgcctggcggtgtcgcaggcggggttaaccgtggtcagtaccgcgtatatcaaatcgctgcaggtggagatcgttaaactgcatcccggtttggtgcgcagtattgataaacgcgacgagaatcagctgtttgttcagagcctgtccagcgcgtgcgaaggcaccagcgcgcagctgtttgctgccagcgtacgcacgcgcggcgaatggcagacgttaaaagagcgtgggatccacggcgggcagggcgacttttttgccccgccggagcctattgacgtcgggcgcaaaaaatattcgcatcgttatcgcgtttaa

SEQ ID NO: 442325 - DNA, 585 bp, Serratia marcescens
atgacttcgctctatttggcttcaggttccccccgtcggcgtgaattgctgacgctgcttggcgtacagttcgacattattctgacccataccgaagaactgcggcagccgggggaaagcgcggaggcctatgtacgccgcctggcgcaggataaagcgcgggcgggcgtggcattggctgaggaagatcggccggtgctcggcgccgacaccatcgtggtgctgaacggaagagtgctggaaaagccgcgcgacgcggcgcatgccgcagagatgctgagcctgctgtccggtaaacagcatcaggtgatcaccgcggtggcgattgccgaccgtcaggacctgctgtgtcagcaggtggtcaccgatgtgaccttccgcacgctgtcgcagcaggatatcgccgattatattgcaacgggcgaaccgatggataaagcgggcgcctatgggattcagggaaagggtggttgtttcgtcagaaccctcaccggcagttatcacgccgtgatgggattaccgctggtcgaaacacatgagctgctcagtaattttgtcgcattacgagatgtaagaaccggttga

SEQ ID NO: 442326 - DNA, 3813 bp, Serratia marcescens
gtgaagcgactgcctgggattttgttggcaacaggcgccacgttaattgtcgccgtggcgttgctggtcagtgggctgcgcctggcgctgccggaactgaacagctatcgcccacagttgctggcgaaagtttcggcgctctccggcgtgccggtgcaggccgattttattcagggcagttgggagagcttcggcccgcggctggaggtgcgcaatctgcgcgccgcgatgaccaaaagtgacctgcatatcgatcgggttacgctggcgctcgacgtctggcagtcgctattacactggcgctggcaattccgcgatctcaccttttatcagctgcagctggatatcaataccacgctgggcggcgataaaaacaagggcagcaccgttcagcccggcaccgtcagcgatctgctgctgtatcagtttgaccacttcgacctgcgcgacagccgcgtctctttcctgacgccgtccggcccgcgcgccgaggttgccattccgcagctgacctggctgaacagcgatcagcgtcaccgtgccgaggggcaaatcagcctgtcgacgtttaacggccagcacggtgcggtgcaggtgcggatggatctgcatgataacaaagggctgctgaataccggcacggtgtacctgcaggccgatgatatcgatatgaagccgtggttcagccgctggctcaagtccaataccggtctggaaagcgctgacttcagcctggctgcctggctgcaggtgcagcagggtgaaatttatggcggcaacgctttgctgaaacagggcgcagcccgctggacggtcggcggcgacgcgcaccggctggaggtcgataatttagcgctggcggtaaaacgtcagggcggcggctggcagctggatgtgccgcagctgaatattaaaaccgacggtcaggcctggccgcaggggatgttgtccgggctgtggctaccggaaaacagccggtttatcgggccggaacagcaggaagagctgcgtatccgcgctaccgacatccagctggagcggctgtcgtcgctgctgccgacgttctcgttcctcagcccggatatgctggagcgctggcaagatatccggccgcaggggcgggtggacgcgctggcgctggatattccgctgaaacagccggagagaagccggtttcaggcgcgctggcgcgacctgagctggcagcactggcagctgttgccgggggtaaaccacttcagcggcgcgctcagcggcggggtggaaaacggcagactggatctcgacctgaaaaacagcacgttgccgtatggcgatatgttccgggcgccgctggaaatcagcagcgccagcggggcgctgaactggcgctatggcgcgcagggctgggagctttccagccagaatctggatgtgaaagccaaatcgctgtgggcgaatggtgacttccgctatcggcagccggccaagggcgagccttggctgagtattctggcgggcattcgtctgtccgacggcgccgacgcctggcgctacttcccggagccgctgatgggcactcacctggtcgattacctgagcggcgccattcagggcgggcaggtggataacgcctcgctgatctatgccggcaacccgcatcagttcccctataagcataatgaggggcactttgaggtgtatgtgccgctgcgccactcaaccttccagttccagccgggctggccggcgctgaaagatctggccatcgatctggatttccgcaacgacggcctgtggatgcaggcgcctgccaccaggctgggcaaggtggacggcaaaaacgtccgcgcggtcatcccggactacagtaaacagcgtctgctgattgacgccgacgtggcgggcgccgggccggatgtgcgggactactttatgcaaacgccgctgcatgattccatcggcggcgcgctggaacagctgcaggtcggtggggatgtcagtgggcgcttacatcttgatatcccgttgaacggcaagcaggtggcggctaaaggtgaggtcacgctgaacaataactcgctgttggtgaaaccgctggacagcacgttggaaaaggtcagcggcaaatttaccttcgataacggcaacctggccagtaacaccctgacggcgaactggtttggtcagccgatggcggtgaacttcaccaccgaagaaggggcaaaggattataaggtcaatgtcggcctgaagggcgactggcagccgggcaagatcccggaggtgccgccggaggtggcgaaagcgctgtccggcagcgcgccgtggaacggcaaggtggcgattaccctgccgcacggcggggcggccagctacgatatcggtcttaacgctgacctgaagagtgtgagcagtcacttacctccaccgctagataaaccggcgggtgaaccgttgccggtgaacgtcaaggtacagggcggccttaacggtttcaaactgaacggcagcgccggtaaacaaaactacttcaacagcgcctggtccttcggccggcagcaggtttcgctggaccgcgccgcgtggcgcaccggcggcggtgtgccgccgctgccgcaaagcccgtcgctgacgcttaacctgccgccactggacggtgaaaaatggctggcgctgctgtcgcctgcgctgaagcagtccggcggcgctcagggcaaggtcggcagcttccgcttcccgaccacggtggcgttgagcaccccgcagctgctgctgggcggccaggcctggcatcagctggagctggcggcgcgccagcagtttggcggcgtcagcgtcagtgccaaaggtaaggagatcgacggcagcgtattgatcgccgataaaggcccgtggcgcgccgatatcaattacctgtattacaacccgcagtttgccgacgacaagccggcaccgctcgcggcgcagccgtcagcgccggcgcagcgcgtctccttccgcggctggccgtccgtgatgctgcgctgccagagctgttggctcctcggacagaagctgggcaaggtcgaggccgatgtgaaaaacgccggcgatacgctgacgctggagcacgggctgatcgataccggtaagggacgcgtcagcgccaccggcctgtggaagcagaatgcgcaggaagagcgcaccgcgctgaaggggaaactgctggggcgcaaaattgacgataccgccagtttcctcggcatcaccacgccgctgaaagacgcgccctatgatgtggacttcgacctgcactggcgcgggcagccgtggaagccgaagctgaacaccttcaacggcaccatgaagctggcgatgggcaagggggagatcgacagcatcggcggcggccgggccgggcagctattgcgcctggtaagtttcgatgcgctgctgcgtaagctacagtttgatttcagcgacacgttcggcaacgggttctactttgattccatccgcagcaccatctggatgaaagatggcataatgcataccgacaacctgctggttgacgggctggcggcggatatcgccatgagcggccaggtcgatctggtgcagcgccggcttgatatgcaggcggtggtggcgccggagatttcagcgacggtcggggtggcgacagcgtttgtcatcaacccaatcgtcggcgccgcggtattcgccgcgtcgaaggcgctggggccgctgtggaacaagatttcgctgattcgctaccatatcggcggcagcctggatcagccgaccatcaatgaggtgttgcgtaagccaaaagaggataaggcgtcatga

SEQ ID NO: 442327 - DNA, 861 bp, Serratia marcescens
atgaaaaatgccaatattgcgttgttacaactgtgcagcggcgatcgtgtccgggataacctggcgcagattgagcagcagatcaagcagctcaataccggtgtgaaactggtgatgacgccggaaaatgccttgctgttcgccgacgccgaggcgtatcgtcagcatgccgagcaggaaggcgatggtccgctgcagcaggcggtgcgcgatctggcgcgccgctacggcgtctggttgctgatcggctcgatgccgttaatcagccgtgaagatccgcagcgcatcactaccagcagcctgctgttcgacgaacagggcgagctgcgcgggcgttacgataagctgcatatgttcgatgtcgatatcaacgacgtacatgcgcactatcgcgaatcagatacctatcagcatggccggcaactgacggtggtggatacgccggtcggccgcctcgggatgactatctgttatgatctgcgttttcccgggctgtatcaggcgctgcgcgatcagggggcagagctgatttccgtaccttccgcctttacccgcgttaccggcgaggcgcactgggagattctgctgcgcgcccgggcgattgagaaccagtgcgtgatcctggcgcccgcgcaggttggccgccatggccagacgcgccgtacctggggacataccatggcggtggacggctgggggaatattatgaaagagaaccccgacgccgtgtccgccattaaagtgcgcgtcgacaccgaggtgctgaagaccatgcgcgcccagatgccggtgcggcagcacaacagattccagacgtcgctgcaggcgccgtctgaacataaatcctccaatcaagagtga

SEQ ID NO: 442328 - DNA, 912 bp, Serratia marcescens
atggaaagactaaaacggatgtcggtatacgccaaagtggttgagtgcggttcatttaccgccgccgcgcgccagttaggcatgagcgtatcctccatcagccagaccgtgtccaaactggaaaatgatttgcaggtcaagctgctcaaccgcagcacgcgcagcatcggcctgacggaagcgggtaaaatctattatcagggctgccgccgcatgctgctggaagccaacgaagtgcacgagcagctgtacgcctttaataataccccgaccggcaacttacgcatcggcagctcttcaaccatggcgcaaaacgtactggccaccatgaccgccgatatgttgaaagagtatcccggcctgaaggtgaatctggtcaccggtattccggcgcccgatctgatcgccgacgggctggacgtggtgatccgcgtcggcgcgctgcaggattccagcctgttctccaagcggctgggctcgatgccgatggtggtatgcgccgccaaaagttacctggccgcgcacggcacgccgcgcactcccagcgatatggtgaatttttcctggctggagtacagcgtgcggccggacagcgagtttgaactgattgccccggagggcatcagcacgcgcatttcgccgcaggggcgctttgtcaccaacgattcacaaaccatgatccgctggctgaaagccggcgccggcatcgcctatgcgccgttgatgtgggtgatcgacgaaatcaaacgcggcgaagtggagattctgttcaaacgctaccattccgatccgcgcccggtgtatgcgctgtataccgaaaaggacaagctgccgctgaaagtgcaggtctgtatcaactacctgaccgaatacttccaaaaggtcggcgaactttatcagggctaccgctga

SEQ ID NO: 442329 - DNA, 936 bp, Serratia marcescens
gtgaaaacattttcaataaaaatagccagaatcgcgatcactctgatccttgtcctgctggggattatcgccgtcttcaaggcctgggtgttttataccgaatcgccgtggacgcgtgacgccaaatttaccgccgatgtggtggcgatcgcgccggacgtcagcggtctgctgagcgatgtgttggtgacagataaccaactggtgaaaaagggccaggtgctgtttgtggtcgatcagccgcgctatcagcaggcgttggcggaagccggcgccgacgtggcgtattaccaggcgctggccgcagagaaaaagcgtgaggcgagccgccgcgtgcgtctgggcgttgacgccatgtcgcgcgaagagattgaacaggccagcaacgcgctggaaaccgtacagcaccagttggcgaaggcgatcgcggtgcgcgatcaggccaagctcgatctggagcgtaccacggtgcgtgcgccggcggacggttggataaccaacctgaccgtgcacgccggcgattttatcacccgcggttccaccgcggtggcgctggtgaaaaagaacaccttctatattctggcctatatggaagagaccaagctgcacggcctgaaccgcggcgatcgcgcggagattactccgctcggcagcaaccgtattatgcacggtacggtggacagcgtggcggcggcggtgaacaacagcagcagcagcaatgacagcaaaggcctggctgccatcgacagcaacctggagtgggtgcgtctggcgcagcgcgtgccggtaaaaatcatgctggatgcgaaagaccagcagcatccataccctgccggcacgacggccaccgtggtgatcaccggtcagaacgaccgcgatagcgaccgtgagtcgccgttcgtcaagctgatgcaccggctgcgtgagttcggttaa

SEQ ID NO: 442330 - DNA, 474 bp, Serratia marcescens
atgtcagggaaagtcatgaacaagcggattctcgtggcgatagcgatcgccgtggcggtggccgggtttaacatgctgcgcgataccggcgatcgggcgatttccaacgtaccggcggtggccgagaaggcgtcggcaagtatcgaccagctgacgcagcagcagcgggtagtcagttatttgcagcggcatcagcgtttgccggactattacatcagcaagagacaggcgcgggagcagggctgggacgcacgcagcggcaatctgtgcagcgtgctgccgggcaaggcgattggcggcgatcgcttctcgaaccgggaaggacggctgccgagcgcccacaaacgggtatggcgtgaagcggatatcaattaccgctgcggtcgccgcggcgccgatcggctgttgtattccagcgacggcctgatattcgttacgcgcgatcactacaaaaacttcattcgggtggagtga

SEQ ID NO: 442331 - DNA, 303 bp, Serratia marcescens
atggggaaagtagagtttgatttcagccagatccctgacctgccggcgttttatcgcgattttgccgataagtttgcgctgggggacggtttcggcgccaatctggatgcgttgtgggacgtggtgaccggggagatcggtctgccggtcgagattgagttcaccaatcttgataaccgtcgcaaacgtcgttttggcgcgatcattctgctgtttgaggaggcggaagaagagctggaaggcagtctgtatttcaatatgcgtgaagccgacggcgtcgccgccgcgcatcatcggggatga

SEQ ID NO: 442332 - DNA, 549 bp, Serratia marcescens
atgaaaaaacaacctgaagactggctcgacgatgtcccggacaatgaaaacgaggacgatgacgagattatctgggtcagcaaaagtgaaattaaacgtgacgccgaagcgttaaaagacctgggcagcgagctggttgatttagggaaaaacgcgctggaacgcatcccgctggatgacgatctgcgcgccgccgtcgaactggcgcagaagatcaagaaagaaggccgccgccgccagatccagctgatcggcaaactgctgcgcgcccgtgacgtcgagccgattcagaccgcgctggacaagctgaaaaaccgccataaccagcaggtttcactgttccataagctggagtcgctgcgcgatcgtctggtagaggaaggggatgaggcgatcccggcggtgctggagctgtatccgcaagccgatcgccagcagctgcgctcgctggtgcgcaacgcgcagaaagagaaagccgccaacaaaacgcccaaggctgcccgtcagatctttcagtatctgcgcgacctggctgaagccgccgagtaa

SEQ ID NO: 442333 - DNA, 387 bp, Serratia marcescens
atgaataatacactgaaagcgctggcggcgttggcactgctgggcgtcagttctctggcaacggcggccgatcttgatgaaaatatggatatcatcgccggcaactataaaaccgcgttaaaaaccgattccgccgacagtttcaaacaaagcctgcaaaatatgcgcgcggccgcgcaggacgccaagcagggcacgccgcccaagctggaggataaagcgccggacagcccggaaatgaagggcttccgtcacggtctggatacgctgatcggccagattgacgcctcgctggcgctggcgaatcagggcaaattggccgaggcgaaaaagcaggcggaagcctttaaaaccacccgcgacacctatcaccaaaaatatcgctaa

SEQ ID NO: 442334 - DNA, 786 bp, Serratia marcescens
atgcacaatgtcccgatcgacgaagtcgatcacctggcgcgtccggttatcgccctcgccagaaattatccgtccggctatctgctgccgatgcacagccaccgccgcgcccagctgctgtacggcgccactggcgtcatgcacgtcacgacgcggcagggcaactggctggtgccgccgcagcgggcggtatggctgccgccgggcatgccgcatcaggtgacgatgatcggcgtgacgacccacagtctgtatctcgagccggcagccctgccggagacggtgcgtgcggcgccctgtcgggtggtcagcatctcaccgctgatgcgccagttgctgatggccgccgtggagatgccgcttgaatacgcacagcacggtcgcgacggcgcgctgatcgtcctgctgctgcatgaaatcgcgcgcatgccggcattgccgctgcacattccgctaccggccgatgcgcggctgcatgcgctgtgccacgcgtttttacaacggccggatattcatctgccgccgcagcagtgggccgaacggctatatatgagcctgcgcagcttcagccgtttctttcagcggcaaaccggcatgtcattttcacaatggcggcagcgggcggcggtggtgctggcactggcgcggctggccgccggcgacagcgtgacgcagatagcgctggatctgggttatgagaatagcgcggcgttttccgccatgttccgccgggtgctggggcagacgccctccagctttctgcagggcggcacggcggagcgataa

SEQ ID NO: 442335 - DNA, 783 bp, Serratia marcescens
atgacggacgctgttattctgctggccgccggttttctgaccggcatcagcaccattttgtttggcttcggcggtggatttgtggtggtaccgctggtctaccatctgatcgccggcgagcagcacgaactggcgatgcatatcgccgtcgcgacttcgaccacgctgatgattctcaacgccggctacgccagctatagccaatggcgtcgcggggctttacggcgggaaacggtaataccgctgttttacgcgctggcgggcggtgcgctgatcggcgcgttgatcgccacgcggctgacggacggcctgatccgcttgctgtttatcctttatatgctggtgaccatcatcgattgcgtatggcgtaaaggtttcctgcagaaaaccgcgcgacgtccgttgtccgccgcgacgttatggctgggcgggccggctatcggcgtgattgccgccatgctcggcgttggcggcagcgtgatgacggtaccgctgctgcggcggcatggttatgagatgaaatactgcgtcagcgcggccaatccgctgtctatcgccatcgcggtgatgggcgccggcatgtacggctggctgggatacggcaaggtcgccggcgtgggctatctgggctatgtcaatctggggatgctggcctggctggcgctgtccggcatgctggggatggtatttgcccgttatgcgctgccgaaaatgcacgatgggctgcatgcgcgggtatatgtatggctgctggttctggtgctggtatcgatgctgttgtaa

SEQ ID NO: 442336 - DNA, 252 bp, Serratia marcescens
atgttaaacgcagagaacatttataccaacgaggtgcaacagcaaatgctggaatcacacgtacgcgcgatggtattacgctctattaccggcgaaccgctgccggaagtggataaatctctgtttgatgaaatttcgcagcactcgatgcagctggcgcagcgggtggtcgatcaattaaaaaccttgcccatcgaggaagcctatttgctttccgtgcatttcgaagtggcaaaagataataaccaataa

SEQ ID NO: 442337 - DNA, 297 bp, Serratia marcescens
atgaaggaacaatataccacctcagtcaccgttgcgggcaaaggcgatacgaaggctaaagcctttgcctccgcattggcaagcgtacagggcgcggtattaaagtccaccagtaatattctgctgcgtatcgaaccgcaggacgtcagcgtattaagtgcggaagaaaaaataacaaaagaaaggtttctctttttcttcctgccgcgggaaagaaaaagctatgcagtttcattggaagtaaccataaatgtgacggtcatcaacactgaaaaggtggtcttcactacaagataa

SEQ ID NO: 442338 - DNA, 1140 bp, Serratia marcescens
atgtatgacttgataatccgccgcgcccgactggcggacgataccctgacggacgtagcgatcgccgacggtaaaatcgccgcggtcggccagctgtcggcggaaatgtccgccaggcgccagtgggatttggcgggcaactatcgtctgagcgccggttggatcgacgcccatgtgcactgctacccctcttcgcctatttatcacgatgaaccggatcgcgtcggcatccatagcggcgtcacctcggtggtggacgccggcagcaccggcagcgacgacattgatgagttctatacgctgacgcgtaacaccaaaaccaacgttttcgccttcctgaatatttcgcgcatcggtctgctgcggcagaacgaactggccgatctgagcgatatcaacaagcaaggggtgaagagcgccatcgagcgtcacagcggctttgtgatcggcattaaggcgcggatgagcagcagcgtggtagggccaaacggcattaagccgttggtgctggcgaaagagattcagcaggaaaatcagcagctaccgttgatggtgcacgttggcaacaacccgccggatctggatgagattgccgatttgctgacgcgcggcgacatcattacccactgttataacggcaagccgaaccgcattctgacgcctgcgggcacgctgcgtgagtcggttcagcgcgcgctgaagcgcggcgtgctgctggatgtcggccacggcaccgccagcttcagctttgaggtggcgcgccaggcgatcgcgctgggcgtgctgccgcataccatcagttcggatatctattgccgcaaccgcatctccggcccggtacacagcctggcgacggtgatgtccaaattcttcactctgggcatgacgctgccgcaggtgattaattgcgtgacggaaaacgccgcctcggcgctgcgtctgccgagcaaggggcaactcgagccgggcttcgatgccgatttaaccctgtttgaggtgcgtcaggggccgcaggtgtttgccgattccgaagggcagtccgccacgggcgagcaactgctggttccgctggccgcagtggtggccggggaagtcttattaaccgatgaagggaaggccgatcatgtcttcgatctatga

SEQ ID NO: 442339 - DNA, 1116 bp, Serratia marcescens
atgtcttcgatctatgaaaaatataatttaaaacaggtgattaacacctccggccgcatgacgattctcggcgtttccacgccgagccagacggtgattgatgcggtggattacggcctgaaccattactttgaaatcaaagatctggtggataaaaccggcgcgtacatcgccaggctgctgaatgcggaagacgcggtggtggtgtcctgcgcttcggcgggcattgcccagtcggtggcggcggtgatcgtgcgcgacaacgccaacctgctggtgaacctgcattcggcgccggtcaatgaaccgcgtgagatcgttctgccgcgcggccacaacgttaatttcggcgcaccggtcgacaccatggtcgccctgggcggcggcaaggtggtggaagccggttacgccaatgagtgctcgccgcagcagcttgcggcctgcattacgccgcagacggcggcaatcctgtacgtcaaatcacaccactgcgtgcagaaaagcatgctgtcggtcgagcaggccgccgaggtggcgcgtcagcataatctgccgctgatcgtcgacgccgccgccgaagaagatctgacgagttactaccagatgggcgcggacctggtgatctacagcggcgcgaaggcgatcgaagggccgaccagcgggctggtgcttggcaagaaacagtacgtttcctgggtgaaacagcagtccggcggtatcggtcgcgcgatgaaggtcggcaaagagggcatcctgggcctgacgcaggcgattgaaagctacctgacgcaggaaaaaaccagcggtgcgcagatggtcgagcgtatgtcggcgtttatcgccaatctgaatacgctgcacggcgtcagcgcgcagaccgtctgggacagcgccgggcgggatatcgcccgtgcggaaattacctttgacgaagccgcgatcggcatctcgacctcggaactggtgcaggcgctgaagaacggcgaaatcgccatttatttccgcggttacaaggccaacgaaggcaagattgaagtggacgtgcgcagcgttgatgaagcgcagctgatgaccgtatttacctgtattaaacatttattggagaaacaagcatga

SEQ ID NO: 442340 - DNA, 1224 bp, Serratia marcescens
atgcgaaactgggttaccctgcgaagcgctccgttattgggcgcagtatccctggcgctgctggcgatggccagcccggcgctgcaagctgaggacgccatgacgaccacctcatcccgttttgcctacatcggcacctacaatcccaacggcgaaggcgtgtaccgattacgcgttgacgccgccagcggcgcactgagcaataaaacgctggtcagcacgctggccaatcctgcccaactgacggtcgatgcccgcggcagaacgctgtacgtcgccagcgaagtcggcacggcggatgacggtaagcacggcacgattgccgcgctgcgcattaatggcgaggacggcagcctgacgccgctcaatcaggtggattcacagggcgcaggcccggtatatctttcgctgacgccgaacggccgccatctgctggtagccaactaccagagcggcagcgtggctgtcttcccggtggatgcggaaggcaaactggcggcggccagctcggtgcggcagcagcaaggcccggccggcgcggcaaggccggcggcggcggtagccggcagctttgccgtcagcgatcataacggaccgcatgcgcatatgatcgccagcgatccgagcggtaagttcgtgttctcgaccgatctgggactggatcggatctatcagtggcgttttgacgatgccagcggtcaactgacgccgaacgatccgccgtggatcgccgcgtcgtcggcgggcgcggggccgcgtcatttcgtcttccatcctgacggtaaaacgctgctgctggtgaatgaagaggcgtccacgctcaccagctatcgttttgacacgcagcggggcacgctgagccagctgcacgcggcatcgacgctgccggcggattatcagggcaccagcttcgccgccgggctggcgctgagccgggatggtaacaacctgtacgtcgccaatcggttgcacaacagcatcgcacaatttagcgtcggcaaggcgggcgagctgacgccggtggcggaaacctggacgcggggtgattacccgcgcactatcactctggatcccagcgggcgctatctgtatgcgctcaatcagcgcagcgacaacgtgacgcgtttcgccgtggatccacacagcggcaagctcagttttattgcaggatatacgccggtgggcagcccatcgcagatggtctttgcgccggcgacgcagtaa

SEQ ID NO: 442341 - DNA, 1038 bp, Serratia marcescens
atggccacgtttccccgccgacccgtagagcccggctactgcgttgttgaaacgccgggttctttagcctttcaaggaagtacgctgttcgccaatccacgcagtactgcggcccgctattttatgcagatcaatgcggatacgccgtggctgaagcccgggcagatagtgattgttgccgatcccgaacattcacgtcaggatgcgttgctacggcagttataccaggcgaagcggacggttaaccgggctatggagccggttaacgttgagcaggcgaacttcctccagcgccactatgccgctattgcgaccatacttaacggcaccagccgagggctggggatggccagcgatgccggcaagcagtactttatgcgcatcgacacgattcttaagcagattgaggccagctatcaaaaccagttccgcactcagggaacgctgatcggccagcagttttttgtggaaagacagcggttgtttaacgagttgaaagcattgttggataaaccgatcttcagtcggctcacgcgtaacctccttaacctgcacccttatgagagcatcaaacgagcgttgaatctctccagccgttccattgtgcatgagtggtcaacggcgggcgtcggggcgataaagggctatgcgagctacctggagggcgccggcaaggcggtgaagtttatgaaaggcgcgggctggattggtattgcgaccgccggggccagcgcgaccaatgatatttatcatgcctgcacccttggccgagagaaggaatgtacgcgggtggcgttaaaagggtatggtgcttttggtggcggagtatggcttggtgccgttggcggtacttggggagcagcagccggaggtgggatttgcctggcattaggtattatcagtgccccaacggcaggtgccgcgggtttggcctgcggacttataggcacggccgcaggaggattggccgggggatatgcgggagaaaagttgggagaatacggtggtaataagatggctgatttactactgaaataa

SEQ ID NO: 442342 - DNA, 417 bp, Serratia marcescens
atgtatacctttattactacgatgttcttggtcctttttttcggtggtatcgtgcttggctttgtcagtatggtgtattttgcgtttatccgccggcgctatgagcagttgatttccctgtatcaacagcaaggtttttttatgcccagttaccatgcttttatggtgcatttgggctatttcggtagtttttatcccgtacgctttttttatcatttactgacaggtaaaaagattaaaacgggccgcaacagctatctctccaacgagccttatgtttttttaagctcacgccctgcggcggaggttgactgggtaaaaggctactattatttttcgttggcctggctggtttctgtcacgataggcgcggtgtttggggggattgatatgctattgagtcatatgtcgccatag

SEQ ID NO: 442343 - DNA, 273 bp, Serratia marcescens
atgaccatcaaacaaacggtcgaaatcaagaaccggctgggcatgcatgcccgcccggcgatgaagctgtttgaattggtgcagagttttgacgccgaggtgattctgcgtaacgacagcggtaccgaagccgaagccagcagcgtgattgcgctgctgatgctggactccgcccagggccggcatattgaggtcgaggccagcggcccgcaggcgcagcaagcgctggacgcggtgatagcgctgtttaattccggcttcgacgaagattaa

SEQ ID NO: 442344 - DNA, 537 bp, Serratia marcescens
atgaaattcaaactcaaaaaaccactccgtagtctgttgatcggcagcttagttttggccgccagcgcccctgctctggcgctgaagtccgacgccaaccagccggtgagcattgactcgctgaaccagtctctggatatgcagagcaacgtcagcacctttaccggcaacgtggtgatcaagcagggcaccattgagattaaggccgataaagtggtggtcacccgtccgggcggcgatcagaacaaaacctatatcgaagccttcggcaagccggtaaccttctaccagatgcaggacaacggcaaaccggtgaaaggacactcgctgaaagtgcgctacgacgtggcgccgcagctggtgaccctgaccggcaatgcctatctggagcagctcgacagcaacgtgaagggcgagcgcatcacctatctggtgcagcagcagcaaatgcaggcatacggcgacaagggcaaacgcgtgaagaccgtgctggtgccgtcgcagttgcaggataaaaacggtcagaagagtaactaa

SEQ ID NO: 442345 - DNA, 579 bp, Serratia marcescens
atgagcaaaaccaaacgctggatcaccattatactggcgctgatcgttctggccctgatcggctggaatatggcggattacgatgacgaacccacggccgggccggtaaactcggaagatccgacctaccagagccagcaaacggtcaccgtcgtctacaacccggccggtaaattaaattataagctggtggcggagagcgccaagtactataccgccgaagagctgagctggttcacccagccggtgatgacgctgtttgacgaaaacgccgtcgccacctggtcggtacgcgccgaccgcgccaaactgaccaaagaccgtatgctgtacctgtacggccatgtcgaggtaaacagcctgaccaccacctcgcagctggaaaaaattaaaacggacaatgctcaggtaaatctggtgacccaggatgtgtcctccgatgacgaagttacgctttacggcgcgaattttaattccaatggcatgaaaatgcgcggaaatctgcgggacaaaaccgctgagctgattgataaggttaagaccaactatgaaattcaaactcaaaaaaccactccgtag

SEQ ID NO: 442346 - DNA, 978 bp, Serratia marcescens
atgtttctcgcaatagcattatttatcgttggcttgtttttactggtatatggcgccgaccgcctggtttatggcgcggcggtgatttcccgttcgctgggcgtgccgccgctgatcatcggcatgacgatcgtcggcatcggcacctcgctgccggagctgttcgtgtccgtcaccgcagcgctgaacggccagagcgatatggcggtcggcaacgttctcggctccaatattaccaatatcctgttgattttaggcgttgccgcggtgattcacccgctggcggtccgctcagaggtactgcggcgcgaactgccgctgatgttggcggtcacagtattatgcggtctggtgttgatgaacagccagctcagccggctggacggtgcgctgctgttggtcgccgccgccggctttatcactctgatgctgaagatcgcgcggctggcccagcgcgaaggcaatgacagcctgaccagggagcagatggccgagctgccgcaaagcggcagcgccaccgtcgccacgctgtggctggtgctggcgtttattatcctgccgctcgcttcgcggatggtggtcgataacgccacggttatcgctcactatttcggcatgagcgagctggcggtcggtctgacgatgatcgccgtcggcaccagcctgcccgagctcgccacgtcgatagccggcgcgctgaaaggcgaaggcgatatggcgatcggcaatattatcggctcgaatattttcaatatggcgatcgtactcggcgtgcccgccctgctgtcgcccagccggctcgacccggccgccttccagcgcgactactgggtgatgctggcggccatcatcgcgctcagcgcgctgtgcatcgggcgtaaacatcgcatcggccatctggcgggcgctctgttattatgtggttttattgcgtatcttgcgctgctgtttttcaacccattcgttacctttggctaa

SEQ ID NO: 442347 - DNA, 303 bp, Serratia marcescens
atggctgagtctctgcgtttcgatgaccagcagcagacgctggtgctgcacggcgacctggaccgggaaacgctgctgccgctgtggcggcagcgcgccgagctgctgaaaggcaaaacggcgattgacgtggcgcagctgcgccgcgtggactcttccggtttggcgctgctggtgcatctgcgtgccgaacagctgcgcaacggcgtggaattgaaaatttccggcgccactgaccgtctgagaacgctgatcgctttgtacaatctgcaggagataatgcctgtcgagacacggagttag

SEQ ID NO: 442348 - DNA, 255 bp, Serratia marcescens
atggaaaatagcgaaattaaagacgtgctgatgaacgcattggcgctggaagaagtgcaggtgacgggcgacggcagccactttcaggtgattgcggtcggtgaactgtttggcgccatgagccgcgtcaaacagcagcaggcgatctatgcgccgctgatggaatacattgccgacaaccgcattcatgccctgtcgatcaaggcatacacccctgaagagtggaagcgggatcgcaaactcaacggattttaa

SEQ ID NO: 442349 - DNA, 276 bp, Serratia marcescens
atgcgtgaattaacgaataaagaactgactgacgttagcggtggtactcttgacggcatgctctggggcatcatggacggcatcgctacaggcgcgggtatggttaaatacgcgaccggcggcggctggcttgctggcggcgtagctcagctgattggtatcgttgtcgctccggctatcggcgctattgctgccggcattctcggcttactgaccgatcgtcagaccgttgccgattacgcagcacaatatcgtgagtcaatgggtcagcgttaa

SEQ ID NO: 442350 - DNA, 1368 bp, Serratia marcescens
atgaaaaaaaagtcgttaattcttagtgcattagcaatgagtattggcctgacgcttacctccgtaccggtggccaatgcggccttgccactcgccgtccaggggcagcagttgccaagcctggcgccgatgctggaaaaagtcttacccgccgtggtcagcgtgcatattgaagggactcaggtgcagcgccaacgtttgccggaagagttcaaatatttcttcggccctaatttccctacacagaagcaaagttctcgtccgtttgaaggcctcggttcaggcgtgattattgacgcagccaaaggctatattcttaccaacaaccacgtcatcgccaacgctgacaaaatcaaagtgcagctgaatgacggccgcgagttcgacgccaagctgcttggccgcgacgaacagaccgacatcgcgctactgcagatcaccgccaagaacctgaccgcggtgaaaatggccgattccgataaactgcgcgtcggtgacttcgccgtcgccgtcggcaacccgttcggcctggggcaaaccgccacctccggcattatctccgcactggggcgcagcggcctcaacctggagggcctggagaactttatccagaccgacgcctcaattaaccgcggcaactccggcggcgcgctggtgaatctgaacggcgaactgatcggtatcaacaccgctattctggcgccgggcggcggcaatatcggcatcggcttcgccatccccagcaatatggcgcagaacctgagccagcagctgatcgagttcggcgaagtgaaacgcggcctgctgggcatcaaaggcagcgagatgaccgccgatatcgccaaggcctttaataccgacgcgcagcgtggcgcctttgttagcgaagtgctaccaaaatccgctgcggccaaggccggtatcaaagccggcgatattctggtttccgtcgacggcaagccaatcggcagcttcgctgaactgcgcgccaaggtcggcaccaccgcgccgggcaaaaccatcaagatcggcctgttgcgcgacggtaagcagcaagaggtctccgtcacgctggataacagcgaaaccgcttccaccagcgcggaaaccctgtccccggccttgcagggcgcttcgctgagcaacggcgcgctgccgggcggcgagaaaggcgtgaagatcgacaacgtcggcaaaggtacgccggcggcgcagatgggcctgcaaaaaggcgatgtgattatcggcatcaaccgtcagcgcgttgaaagcatcaccacgctgcgcaaaatcctggcggcgaaaccgccggtaatggcgctgaatatcgtccgcggcggcgaaaccatttatctgttaatgcgttaa

SEQ ID NO: 442351 - DNA, 480 bp, Serratia marcescens
atgacgccgcgccgcccttatctgctgcgggcgttttatgactggctgctggacaaccagctgacgccgcatctggtggtcgacgtaacacgcccggacgttcaggtgccgatggagttcgcgcgcgatggtcagatcgttctgaacattgcgccgcgtgcggtcggcaacctgcagctgggcgacaacgaagtgagctttaacgcccgcttcggcggcgtaccgcgtcaggtgctggtgcccctggccgcggtgctggcgatttacgcccgtgagaacggcgcgggaaccatgttcgaaccggaagccgcttacgatgaaggcgaaggtgctttcgacgagctggagacggtgccttctgaaagcctgatgtcggttatcgacggcgatcgtcctgacaacggtgacgataacgatccggatgatgaaccgccacagccgccacgcggcgggcgcccggcgttgcgcgtggttaagtaa

SEQ ID NO: 442352 - DNA, 927 bp, Serratia marcescens
atgcagttgccacaattagtcaatatgtttggcgctgacctccagcgccgctacggggagaagatccataaactgacgctgcacggcggcttcagctgcccgaaccgtgacggttcgctggggcgcggcggctgcacattttgcaacgtggcgtcttttgccgatgagcagatgcagcggcagagcattgccgaacagctggcggcgcaggcgcataaaacgcagcgcgccaggcgttatctggcgtattttcaagcctataccagcacctatggcgaagtggagcggctgcagacgctctacggccaggcgctggcgcagagcgagatggtggggctgtgcgtcggcacccggccggactgcgtgcccgctgcggcgctcgatctgctggctggctaccgcgaggccggctatgaagtctggctggagctggggctgcagagcgcgcacgataaaacgctgaaacgcatcaaccggggccatgatttctgctgttatcagcaaaccgtcagactggcgcggcagcgggggctgaaagtatgctgtcacctgattgtcggcctgccgggcgaggcgccggccgaccatctggatacgctgcgggcggtggtcgacagcggcgtggacggcatcaaactgcatccgctgcatatcgtcagcggcagtattatggcccgcgcctggcaggccggccggctgacgacgctgacgctggacgagtacgccgccagcgccggtgaactgatccgccatacgccgcgcgaggtggtgttccaccgtatttcggccagcgcgcgacgcccgacgctgctggcaccattatggtgcgaaaaccgctggagcggcatgcaggcggtcggcggctatctgcagcagcatggcggccagggctcggcgctgagccccacctgccgttaccgcccctga

SEQ ID NO: 442353 - DNA, 654 bp, Serratia marcescens
atgaaacaggttggggtagtactcagcggctgtggggtttatgacggtacagagattcatgaggcggtgctgacgctgctggctctggatcgcgccggggcgcaggcggtatgttttgcgccggatcgtccccaactgcatgtaattaatcatttatctggggaagagaccggcgagcagcgtaatgttctggcggagtcggcgcggataaccagaggccatgtgcaaccgctttctgccgcgcgcgccgagctgttggatgcgttgatcgtgccgggcggtttcggcgcagccaagaatctgagcagctttgcggcgcagggcgccgagtgcgaggtggatgaggatttggcaatattgacccgcgaaatgcataaggcacataaaccaattggttttatgtgtattgcgcccgcgctgttgccgaagctgctcgaccagcaggtcaggctgaccattggtaacgatcccgatctcggggaagtgattgataccatgggcggagaaccggtgatttgtccggttgacgatattgtggtcgacggcgaaaacaaagtggtgacgacgccggcgtatatgctggcgcagtcgatcggcgaagcggccagcggaattgataagctggtgtcacgcgtactggatctgaccgaatga

SEQ ID NO: 442354 - DNA, 735 bp, Serratia marcescens
atgagaagaaaggcggcgcgcagatcgctgttatttcttccctggcgctggctgaaacgcggggtactgacgctgctcggcctgtggctggccggcattgtgctgtttgcgttcctgccggtgccgttttccgccgtgatgctggaacggcaggccagcgcctggctgcgcggcgattttggctatgtggcgcactcagactgggtggcgatgagtgagatatcgcccaatatggcgttggcggtgatggccgccgaggatcaaaaattcccgcagcactgggggtttgacgtcgccgccattgagaaggcgctggaccataacgagcggcgtccggcgcgcatccgcggcgcatcgaccctgtcgcagcagacggcgaaaaatctgttcctgtgggacgggcgcagctggctgcgcaaagggctggaagccgggctgaccggcggcattgagctggtgtggagcaaacgacgcattctgacggtgtacctcaacattgtagagttgggcgacggcgtgtttggcgttgaagaggcgtcacagcgctatttcaataagccggcccggcgtctcagcgcgtccgaagcggcgttgctggcggcggtattgccgaacccgcaccgtttcaaggccgatgcgccgtcggcgtacgtgatacagcgtcagcagtggattttgcgccagatgcgacagctgggcggcgagagcttcctgcgggccaataagctggattaa

SEQ ID NO: 442355 - DNA, 576 bp, Serratia marcescens
atgaagcttcatactgtttacgccgtgctgctaggcgctctgatgctgcaaggctgcgtgccggcagtggtggtcggcagcgcggcggtggcgactaaaaccgcgaccgatccgcgcactatcggcacacaggttgacgacggcacgctggaagcgcgggtcgaaaacgcaatgagtaaagaccagcaactgaagaaagacgcccgcgtggtggctaccgcctatcagggcaaagtgctgctgaccggccaggcgccaaattctgacctgtccgcccgcgccaaacagatcgccatgggcgtggaaggcgccaccgaggtgtataacgaaatccgtcagggcacgccggtcagcctgagcaccgcctcagcggatacctggatcaccacgaaggttcgctcgcagatcctgaccagcgacacggtgaaatcctctaacgtgaaagtgaccaccgagaacggcgaagtgttcctgctcggcctggtgaccgaacaggaagggcaatcggcggcgcagatcgccagccaggtgagcggcgtcaaacacgtcaccaccgcctttacctatgtgaagtaa

SEQ ID NO: 442356 - DNA, 393 bp, Serratia marcescens
ttggctgcaatatcgtcagggtcagatcgttccggcctcctgagccaacgcaccaagggggcgggctatgaagtacaggcccgccgctacctggaacgcgccgggctcaccttcgtcgccgccaacgtggcggtgcgcggcggcgagctcgatctgattatgcgcgacggccagacctgggtgttcgtggaggtccgctaccggcgcaacgccgcctttggcgatgccgccgccagcgtcacctatcgcaaacaacagcgcctgctgcgcgccgccgccgtctggctggcggggcgaggcgccagtttcgacacatcgccttgccgttttgacgttttggccttcaccggcagccagttagaatggatacccaatgccttcaatgcggattaa

SEQ ID NO: 442357 - DNA, 2052 bp, Serratia marcescens
atgctttcctcaaaattcgttcgtaccaaagcagggcgttttatgcctgttatcgtggccaccctgctgcttgcaggctgcccaggccaggctccgcagactccgcccgccaatattcaggacgaggcgagcgccagctccgattactatctgcagcaaatgcagcagagcagcgatgataacaaggctgactggcaattacttgctattcgcgcattgttgcgcgaagggaagctgccgcaggctaaccaacagctgagcgcgctgccgcagaacctgagcggcgaacggcagacggagcgccagttgctgaacgccgagctgcaaatcgcgggcaaaaacctcagcgccgcacgcaacacgctgaacggcatcgacaacaacacgctgtcgccgaaccagcgcgtacgcttctatcaggcgcagatcgccgccaaccagggcaaggcctcactgccgctgatccgcgcctatatcgcgcaggagccgctgctgaacgacaaggcgcaccaggataacctggaccagacctggaagactctgctgggcctgacgccgcaggatatgaacagcctggtgatcaacgccgacgaaaacgtgctgcagggctggctggatttgctgcgcgtctatcaggagaaccgtcaggatccggagatgctgaaagccggcatcaaggactggcagaaccgctatccgcaaaacccggccgccaagtcgctgccgacccaactgaaccaggcgctgaaccttacccaggcgtccacctccaacatcgccctgctgttgccgatgaacggccaggcgaaggtatttgccgacgccatccagcaaggctttgaagcggcgaagaacggcaccgccggcgccccggctccagcgcagccacagccgcaagcgcagccggccggcggcagcgcagagcagccggtaacggcgcctgacgcgcagtccggcgatcttaacgccaacggcgcggtgagcacctccgcgccggcggaagaagccgccgccgccgcgccaatcagcgccgcgcagccaagcgccccggccgcaacgccggcgccggcacagccgcagatgagcaacgcgcagattaaagtgtatgacacctccagccagccgctgtccgccctgctgacgcaggcgcagcaggacggcgcgaccctggtggtcggcccgctgctgaagaacaacgtcgatcagttggccagcaccagcacttcgctgaacgtactggcgctcaaccagccggaaacgccgcaggacagcccgaacgtctgctacttcgccctgtcgccggaagatgaggcgcgcgacgccgcccgccatatctggacgcagcagaagcgtcagccgctgctattggttccgcacggttcgttcggcagccgcgtcgccaaagcctttgccgaagagtggcagaaacagggcggcggcaccgtgctgcagcagaacatcggctccgtgaatgaactgcgtcagtcggtgcgctccggcatccgcctgtccggcaccccggtggccgccagcgctccggcgcagcggtcggtcaccgttgccggcctgaccatcccggcgccgccgagcgatatcccggccgccaccggcggccgagtcgacgcggtttatatcgtcgccaaccgctcgcagctgacgctgatcaagccaatgatcgatatgaatatcagcggtcgcggcaaaccgacgctgtacgccagctcacgcagctatcaggccggttccggcccggacttccgtctggaaatggaaggcctgcagttcagcgatatcccgatgctggccggcgccaacccgcagctgatgcgacaggccgccgccaagttccgcaacgactactccctgatgcgtctgtacgccatgggcgtggacgcctggcaactggcgaaccacttctccgaaatgcgtcagctgccggggttccagctgtccggtgccaccggcgcgctgaccgcatcgtctaactgcgtgatcaacaggaagctgccttggctgcaatatcgtcagggtcagatcgttccggcctcctga

SEQ ID NO: 442358 - DNA, 681 bp, Serratia marcescens
atgatcccgtttctgaacgtcttcttttacgatatctacccctacctgtgcggtacggtctttttgctcggcagctggctgcgttacgactacgggcaatacacctggcgcgccggctccagccagatgctggacaaacgcggtatgcgtctggcctccaatctgtttcatatcggcattctggggatttttttcggccacctgttcggcatgctgacgccgcactggatgtacgcctggttcctgccgatcgccgtcaaacagcagctggcgatggtgctgggcggcgtgtgtggcgtattgacgctggtcggcggcatgatgctgctggtgcgccggctgtttaatccgcgcatccgcgccacctccagcaccgccgatattctgatcctcagcattctgctgattcagtgcctgctgggattgtccaccattcccttctccgcccagcatatggacggcagcgagatgctgaagctggtgggctgggcgcaggcggtggtcaccttccagggcggcgcctcggcgcatctggacggcgtcgcgccgatcttccgcatccatctggtgctcggcatgaccatctttctgctgtttccgttcacccgtctggtgcacgtctggagtgcgccggtggagtacttcacccgccgctatcaggtggtgcgctcgcgccgctag

SEQ ID NO: 442359 - DNA, 696 bp, Serratia marcescens
atgcaaatcctgaaagtcattggcctgctgatcgactacccggacgacgatctgtgggcctgcgccgacgaggtgctgccgctggtcgagcaacaggcgcccgaactgctgccgtttacccgcacgctgtttagcgccccgctgctggaccggcaggcggaatggtgcgagattttcgaccgcgggcgcgccacctcgctgctgctgtttgagcacgtgcacgccgagtcccgcgaccgcggccaggcgatggtggaactgatggggcagtatcagcagcagggtctgcagctggcctgccgggaactgccggactatctgccgctctacctggaatacctcagcattctgccccccgcgcaggcgcgggaagggttgcagaacatagcgccgattctggcgctgctcggcgcccggctgaagcagcgcggcgcggcgtggcagccgctgtttgacgcgctgctgaccctggccgacagcccgctgcgcagcgataacgccagccgacaggcggcagcggaaacgcgcgacgacacgccgcaggcgatggacgccgtgtgggaggaagaacaggtgaaatttatcgacgacaacagcgccgcctgcgacagttcgccgcagcagagttaccagcggcgctttagccaggacgtcgcgccgcagtatgtcgacgtcggttcaggaggcccgaaatga

SEQ ID NO: 442360 - DNA, 1545 bp, Serratia marcescens
atgaaaatacgttcgcaagtgggcatggtgctcaacctcgataaatgcatcggctgccatacctgttcggtcacctgtaaaaacgtctggaccgggcgcgaagggatggagtacgcgtggttcaacaacgtggagaccaagccgggcatcggctacccgaaaaactgggaggatcaggacacctggcaaggcggctggatccgcaagatcaacggcaaactggagccgcgcctcggcagccgcgtcggcgtgctgtccaagatcttcgccaaccctaacctgcccggcatcgacgactattacgaacctttcacctacgactatcaacatctgcacagcgcgccggaaagcaaacatcagcccaccgcccggccacgttccctgatcagcggccagcgcatggacaaaatcgagtggggccccaactgggaggagctgctcggcggcgagtttgagaaacgcgcccgcgataaaaactttgaagcaatgcagaaggagatgtacggcgagtttgaaaacaccttcatgatgtacctgccgcgcctgtgcgagcactgcctcaaccccagctgcgtcgccacctgcccgagcggcgcgatctacaagcgggaagaggacggtatcgtcctgatcgaccaggataagtgccgcggctggcggctgtgcatcagcggctgcccgtacaagaaaatctactttaactggaaaagcggcaaatcggagaagtgcatcttctgctatccgcgcattgagtccggccagccgaccgtctgttcggaaacctgcgtcggccgcattcgctatctgggcgtgctgctgtatgacgcggaccgtattgaggaggccgccagcaccgaacatgaaaccgatctgtatgaacgccagtgcgaagtgttcctcgatccgcacgatccgacagtgatcgaagaggcgctgaaacaggggatcccgcaaaacgtcatcgaggcggcgcaaaagtcgccggtgtacaaaatggcgatggactggaaactggcgctgccgctgcacccggaataccgcacgctgccgatggtgtggtacgtgccgccgctgtcgccgattcagtcggtggccgacgccggcgcgctgccgcacaacggcaatattttgccggcggtggaaagcctgcgcatcccggtacagtatctggccaacctgctcagcgccggcgataccggcccggtgctgcgtgcgctgaagcgcatgatggcgatgcgccactacaaacgctcgcaaaccgtggaaggcgtgacggacacccgcgcgctggaagaggtcggcctcagcgtcgaacaggtggaggagatgtaccgctatctggcgatcgccaactatgaggatcgctttgtgatccccaccagccaccgggaaatggccgaagacgccttcccggaacgcaacggctgcggctttaccttcggcgacggctgccacggctccgacaccaagttcaacctgttcaacagcagccgcattgacgccatcaacatcaccgaagtgcaggacaaggcggagggcaagtga

SEQ ID NO: 442361 - DNA, 3741 bp, Serratia marcescens
atgagtaagctactcgatcgctttcgctactttaagcaaaaaggcgacacgtttgcggacggccacggccaggtgatggacagcaaccgcgactgggaagacagttaccggcagcgctggcaattcgataaaatcgtccgctctacccacggggtcaactgcaccggctcctgcagctggaagatctatgtcaaaaacggcctggttacctgggaaacccagcagaccgactacccgcgcacccgccccgatatgcccaaccacgaaccacgcggctgcccgcgcggcgccagttactcctggtatctctacagcgctaaccgcctgaagtatccgctggtgcgcaagcgcctgattgaactgtggcgtgaagccctgcagcagcacggcgatccggtcgccgcctgggacgccatccagagcgatccgcaaaaaaccgccggctacaagcaggtacgcggccacggcggttttgtgcgttccaactggcgcgagctgaatcagctgattgccgcggccaacgtctggaccatcaaacactacggcccggatcgcgtggccggcttctcgccgatcccggcgatgtcgatggtctcctacgccgccggcacccgctatctgtcgctgatcggcggcacctgcctgagtttttacgactggtactgcgacctgccgccggcctcgccgatgacctggggcgaacagaccgacgtgccggaatccgccgactggtacaattccagctacctgatcgcctggggctcgaacgtaccgcagacccgcacgccggacgcgcacttctttaccgaagtgcgttacaaaggcgccaaaaccattgccatcacgcccgactactccgaggtggcgaagctgtgcgaccagtggctgtcgcccaagcagggcaccgacagcgcgctcgccatggcgatgggacacgtgattttaaaagccttccacctggataaccccagcgactatttcctcaactactgccggcgctacaccgatatgccgatgctggtgatactggaagcgcgcgaagacggcagctacgtgccgggccgcatgctgcgcgccgccgatctggtcggcaacctgggggaaagcaacaacccggaatggaaaacggtggcgttcagccagacgggcgaaccggtggcgcccaatggttccatcggtttccgctggggcgaaaaaggcaaatggaacctggaaccgctggcggccggcgcggaaacggagctgcggctttccctgctgggcgagcacgatgaggtggccggcgtcgccttcccttacttcggcggcaatgagaacccgcactttcgcagcgtgccgcagacgccggtgctggtgcatcaactgccggtcaaacgcctgacgctggccgacggcggcgaagcgcgggtcgcctgcgtgtacgatctgctgctggccaactacggcctggaccgcggactggacgacccccactgcgcgcaggatttttcagagatcaaagcctataccccggcctgggccgagcagatcaccggcgtgccgcaacagcatattgagcgtatcgcccgggagttcgccgataacgcgcataaaacccacggccgctcgatgattattctcggcgccggggtcaatcactggtaccacatggacatgaactaccgcggcatgatcaatatgctggtgttctgcggctgtgtgggacaaagcggcggcggctgggcgcactatgtcggccaggagaagctgcggccgcagaccggctggctgccgctggcgttcgcgctggactggaaccgcccgccgcggcagatgaacagcacttccttcttctacaaccacgccagccagtggcgctacgaaaaactcaccgcccaggagctgctctccccgctggccgatgccggccgcttcagcggccacctgattgactttaacgtgcgcgccgagcgcatgggctggctgccctcctccccgcagctcaacctgaacccgctgcgcatcagggcgcaggccgacgccgcaggcatttccccgatcgattacaccgtgcaggcgctgaaaaccggcgatatccgtttcgcctgtgaacaaccggacagcggcggcaatcacccgcgcaacctgtttgtctggcgctccaacctgctgggctcctccggcaagggccatgaatatatgctgaagtacctgctcggcaccgacagcggcattcagggcgaggcgctgggtgaaacggacgaggtgaagccggaagaggtcgagtggcagcaggcggccattgaaggcaagctggatctgctggtcaccctcgatttccgtatgtccagcacctgtctgttctccgatattgtgctgccgaccgccacctggtatgaaaaggacgatatgaatacctcggatatgcatccgtttattcacccgctgtccgccgcggtcgaccccgcctgggaatcaaaaagcgactgggaaatttataagggcatcgccaaggcgttttccgagacctgcgtcggtcacctgggacaggaaaccgatgtggtgctgcagccgctgcagcacgactcgccggcggagctggcgcagccgttcgacatccaggactggcgccaccatgagtgcgatttgatccccggcaaaaccgcgccgaatatcgtagcggtagaacgcgactaccccgccacctatgagcgctttacctccctcggcccgctgatggataagctgggcaacggtggcaagggcatcagttgggaaacgcagaacgaggtggcgttcctcggtaagctcaattacaccaaaactaccgggccggccaaggggcgaccgctgatcgacagcgcgctcgacgcctcagaggtgatcctgacgctggcgccggaaaccaacggccaggtggcggtgaaagcctggcaggcgctcggcgagtttaccggccgcgaccacacccacctggcgcgcaataaggaagaggagaagatccgctttcgcgatattcaggcgcagccgcgcaaaatcatctccagcccgacctggtcagggctggagagcgaacacgtttcgtataacgccggctataccaacgtccatgagctgatcccgtggcgcacgctgtccggccgccagcagctgtatcaggatcatccgtggatgcgcgccttcggcgaaagcctggtggcctaccgtccgccgatcgatacccggagcgtcagcaaaatgcgcgccgtgccgcccaacggcttcccggaaaaagcgctgaacttcctgacgccgcaccagaaatggggcatccactccacctacagtgaaaacctgctgatgctgacgctgtcgcgcggcgggccgatcgtctggctgagcgaagccgacgcccgcgagctgggcatagaggataacgactggatcgaggccttcaacgccaacggcgcgctgaccgcccgcgcggtggtcagccagcgcgtgccgcccggcatgaccatgatgtaccacgcccaggagcgcatcatgaatatccccggctccgaggtaaccggcatgcgcggcggcatccacaactccgtcacccgcgtctgccccaaacccacccatatgatcggcggctacgcccagttggcctacggctttaactactacggcaccgtcggctcgaaccgcgacgaattcatcatgatccgcaagatgaaaaacgttaactggctggatgatgaaggtcacgatcaggtacaggagccgaaaaaatga

SEQ ID NO: 442362 - DNA, 1389 bp, Serratia marcescens
atgtcgcaacaaactgagaaagataatccctatcttttgcgtgactggcggccggagaacgaggccttctggaacaataaaggtaaaggcatcgcgcgtcgtaatctggtgatttccgttttttgtctgctgctggcgttctgcgtctggatgctgttcagcgccgtggccgttaacctcaacaaggtggggtttcacttcaccaccgaccagctgtttttactgaccgcactgccctcgctctccggcgctctgctgcgcgtgccctactcgtttatggtgccgatgttcggcggccgccactggacggtgatcagcaccgtgattttggtgatcccctgcgtggcgctcggcatcgccattcagcaccctgccacgccttactgggtgtttatcgttatcgccctgctgtgtggctttgccggcgccaactttgcctccagcatgggcaatatcagctttttcttcccgaaggcccggcagggcagcgcgctggggattaacggcggcctcggcaatctgggcgtcagcgtgatgcagatgatcgcgccgctggtgatcctgctgccgctgtttaccttgctcggcgtaccgggcgtcgctcaggaagacggcgccacgctgtggctggccaacgccgcctggatctgggtgccgctgctgctggtggccactctggccgcctgggtcggcatgaacgatatcgccagctcgaaagcttcgatcgccgaacagctgccggtgctaaagcgcctgcacctatggctgttagggctgctgtatctggccaccttcggttcgtttatcggtttttccgccggcttcgccatgctggcccagacgcagtttcccgaggtagatattctgcagctggcgtttttcggcccgtttatcggcgcgctggcgcgttcgatgggcggcgtgatctccgacaagctgggcggcgtgcgcgtcaccctgatcaacttcgtgtttatggcgctgtttaccgccctgctgttcctgaccctgcccggcagcggctccggcagtttcctggcgttctatctggtgtttatggggctgtttctcaccgccgggctgggcagcggttccaccttccagatgatcgccgtgatcttccgccgcatcaccatcgacagggtgaaggcgcgcggcggcagcgatgaacaggcgcagcacgaagcggtgaccgataccgccgccgcgctgggctttatctccgccatcggcgccgtcggcggcttctttattcccaaagccttcggcacctcactggcgatgaccggctcgccggtcggcgcgatgaaggtctttctcgtgttttacgtcgtttgcgtgctggtgacctggttggtttacggtcgccgcgcgcctgccaagaaataa

SEQ ID NO: 442363 - DNA, 570 bp, Serratia marcescens
atgaaccggccggccgggcgtccggcgcgcggcaacggagtgattttgcctggtgcaattctctctgcagcgttggagatgctagatacactagggccagaagcctttacgatgcgcgctttggcgacgagattacgcatcaatccgatgacgatctactactattttggcgatcgggacggcttgatcgccgctatggcagagagggtatatcaagaggttaccgccccgccagatgacgatcccctcacccgactggcggggttgttgcaggcttaccacagccaggtattgcagcaccccggactaacgctgctgattttcagccggcccaaggtattccccaaacaggccagacggatcaccactgacattacacaactgctgcaccgaagcgggttgtcgtcagcaggtgtccggcgatgggtcggtatacttgtcgatttcacccatggtgccgcgctggcaatggcgacagaggaacagccggctattgaacgcaacactgctgctaaaaactacgctgaagcgctggctgaattgttgaatgctctaaaaaagcgccaataa

SEQ ID NO: 442364 - DNA, 537 bp, Serratia marcescens
atgatctccggacacgttttcatcgctgcaagtcttgacggttttattgcccgtaccgatggcgatataggatggttgctcgaacgcgatgatcctcaagaggatcatggttatgatgattttattgaaaatattgacgtcatactgatgggacgcgctacctatgagaccgtacaacatgtccgcccatggccatacacccgcccggtactcatcctctccagcacgttggacgaacagcacattcctgctgaactaacagggaaaattcgcttttccgacagctcgcccacacaggcgatgacgatgctggcagccgaaggacatcggcgggtatatgtcgatggtggtcgcattatccagtcatttttgcaggctggcctgattgccgatctggtgatcacccatattccattgctgctagggcaagggcgtgctctgttcggttcccttcccaccgatattccattggttcatgagcacacccgtaccttcgcttccgggctggttcagtcacgctatcgagtcgtctcatga

SEQ ID NO: 442365 - DNA, 468 bp, Serratia marcescens
atggaaacccgctccccgctgccgccctttatgccggacagcgcccggcaaaaagtccgtctggccgaagacgcctggaacagtcgcgatccacaacgtgtagcgcaggtctacgcgccggacacccggtggcgcaaccgcgccgagttcgttaacggacgtgatgaagtggtgcagtttttacagcgcaagtggcagaaggagctggattaccgcctgatcaaagagttatgggcgtttgacgcacacagaatcgcggtgcgcttcgcctatgagtggcatgacgattccggtaattggtaccgcagctacggcaacgagaactgggaatttaatgcgcaggggctaatgaccacccgcttcgcctgtatcaacgactgtccgattgccgaggccgaacgccgtttccactggccgctgggcagacgcccggacgatcatccgggactgagcgactgtggtttctga

SEQ ID NO: 442366 - DNA, 564 bp, Serratia marcescens
atgaccacagccgattcacgcagcgcgcgcgagcgcattattgataccgcccaccgtctgttttaccaagatggcatccgtgccaccggtatcgaccgtattatcaaacaggcgggggtgaccaaggtgaccttttatcgccactttcccgccaaaaacgatctgattctggcgtttttacgctatcggcatgaacgctggatcgcctggttccgcgagacgctggcgcgggagatggccaacggcggcacgctgccgcaggcgttgcccgccacgctggcacagtggttcgccacggcggattttcgcggctgcgcgtttatcaatacggcagtggaaatggccgacagtctgccggaaacgctggtgcaggcgcgtgagcacaagcaggatatgatgcgggagatcgccgctttcctgccggatgaccggcaaggggcgcgcgaggcgcataagctggcgttattggtcgacggggcgatcgtgatggcgcagcgtggggaaaagggggctgaggtgctttcgttactgcgcgaatgcgtggcggacagcctgaaacgctag

SEQ ID NO: 442367 - DNA, 702 bp, Serratia marcescens
atgatcacatgcagaacagcagaacaatgcgggcaagctgactttggttggctgcaggctcgctacaccttttctttcggacactacttcgatcccaaactgatgggctacgcctcgctgcgggtgctgaaccaggaagtgctggcgccgggcgctgctctgcagccgcgcgcctaccccaatgtcgacatcatcaacctgatcctgcagggggaagcagagtaccgtgataacgacggcaacagcgtccgcgccgccgccggcgaagccctgctgctggcggcgcataatggcgtcagctacggcgagcaaaacctcagtgccgacacgccgctgacgcgtatgcagctgtggctggacgcctgcccggaacgcgccaacgagcgtattcagcgcctggcgctgcaaccgcagtcccaccagttgctggcctcgccggacggcgcacagggcagtctgcatttacgccagcaggtgtggattcaccacctggatttagcgcccggggaagcactgacgttgccgctgcacggcccgcgggcctatctgcaatcgatccacggcgcctgttccgcccacggcgagcaccatgcgccgcagcacctgacctgcggcgacggcgctttcgtgcataacgaaactctgcttacgctgcgggctgaaacgccgctgcgcgcgttgctgatcgatctcccggagtaa

SEQ ID NO: 442368 - DNA, 285 bp, Serratia marcescens
atgagccgccgccgggcgctggccgtcagaaaacagcagttgattagccggatcgagcagcagcgcgccgacctgggcgacaataaagcacagtggctggacaaaaccgaacacattgaccgcggttatcaagccctgttcggcatgcgcaagtacctgctgctcggctccggcgtggtcgccctgtacggcatgcgccaccccagcaagctgattcgctggtcgcgccgggccttcagcgcctggggcaccgtgcgcctgctgcgcaaaaccctctcccgctaa

SEQ ID NO: 442369 - DNA, 402 bp, Serratia marcescens
atgaacgagcacgagcaatcccgtgcgcagggccccgccaaaggggtcctggacatcggccagcgtattatcaccatcctggtcggcatggtggaatcacggcttaagctggcggtcgttgaactggaagaggaaaaagccaacctgattcagctgatgctgctggtcggcattactctgctgtttaccgctttcggcctgatgagcctgctgatcctgctgttttgggcgatcgacccggcctaccgcgtgatggcgctgggcactacgaccggcgtgctgctgtttctggccgtggtgggcgtgatctggacgctggtgaaagtgaaacgcaccacgctgctggccgaaacgcgcaaacagctggagctggaccgcgccgcgctggaggggaaaaaatga

SEQ ID NO: 442370 - DNA, 372 bp, Serratia marcescens
atgaagttacgctataccgcccctttggccctctttttatccaccttcgcctctttttcgatagcggccgagggcggctgtgccgccaaagagcaggaaattcagcagcagattgattacgccacccagcacggcaacagccaacgcgtcgccgggctgaaaacggcgctgggtgaagtgcaggcccattgcaccgatgcgggtctgcaggccgagcggcagaaaaaaattgaagagaaacagcataaagtgtcggaacgccgccaggagctgaaagaagcccagcaaaccggcaaactggataaaatcaccaaaaagcagcagaagctggcggaagccgaagccgaattgaaacaggcacaggcggaatag

SEQ ID NO: 442371 - DNA, 378 bp, Serratia marcescens
gtgaccacgccgcgctcccgctggcagtatgcactgattatcgcgctggccctgctggcgctttcggtgttttttctgcccgccatggtgcgcactgaaaccgaactgcgcatccgctcgacccaacaaggcctgtcgctgccggacggtttctacgtttaccaacgtctggatgcgcgcggcatccgtattaaaagcattacgccggaaggagatggcctggtcatccgcctggactccccccagcaacagttactggcgcgggaaacgctgcaggccattctgcctcccggctataccatcgcgctgagcgagctccccgcccccagccactggatacgtaagctggtcagcagcacgccgcaagatctgggatag

SEQ ID NO: 442372 - DNA, 444 bp, Serratia marcescens
atgcgctggttgtttgccatgctgattgctcttttgtgctggaccggcgcggtctccggccaccagctctataccatgcaaccggcatcttctgcgctgcaaaacgcccagccgaacgacgcgacagctgcccagaacgactatctgcaggcgctacgcccgccggccgacctgcgcagcaaaacgccggggaaaaaatggccgctgctgctgtcgcgcaatcctccctgccatagcgccccgctctctgccgtttcccccatccccgcctatgctttaacagaggcgcggcgagagagccgctatccgcgccaggcggcgccggcgtccaaccgtcttgaccaggttaactggatgctccgcacatcccaccagcaaagccgggtcggcggctggaaagcgagcaacatgctgtaccgaggtacgctgacttaccattcatga

SEQ ID NO: 442373 - DNA, 1413 bp, Serratia marcescens
atggccacgtttttaggcgaagattttttactggatacggaatttgcccggcgtttgtaccatgaatatgcggcgcagcagccgatttttgactatcactgccatctgccgccggagcagatcgccgagaactatcgcttcaagaatctgtatgacatctggttgaaaggcgatcactacaaatggcgtgccatgcgcaccaacggcgtggcggaacgcctgtgcaccggtgatgccggtgaccgggaaaaattcgacgcctgggcggcaaccgtgccgcacaccatcggcaacccgctctaccactggacgcatctggaactgcgccggccgttcggtattaccgacaccttgctgtcgccggcgacggcggataccgtctggcaacgtaccaatgagctgctgacgcaagatacgttcagcgcgcgcgggatcatgcagcagatgaacgtgaagatggtcggcaccaccgacgatccgattgacgatctgcgccaccaccgcgcgattgcgcaggatgccggttttaacatcaaggtgctgccgagctggcgaccggacaaggcgttcaatattgatgcgccgaccttcaccgactatctgcagcggctgacggccgcgtccgatgtggcgatccgccgctttgatgacctgcgccaagcgctgagcaaacggctggaccactttgctgagcacggctgcaaggtggcggaccatgcgctggacgtggtggtgtacgccgatgccgacgaggcggcgctggatgcgatcctgaaacggcgccttgacggcgcgctgccggacgacacgcagagcgcgcagttcaaaaccgccgtgctggtgttcctggcggcagaatatcagcgccgcggctgggtgcagcagtatcacatcggcgcgctgcgcaataacaacagcctgatgtttgagcgtatcggcccggatatcggctttgattcgatcaacgaccggccgctggcgcagccgctgtcgcgcttgctggacgcccaggcgcggcagggcgggctgccgaaaaccattctgtactgcctcaacccgcgcgataacgaagtgatcggcaccatggtgggcaacttccagggcgaaggaacgccgggcaagatgcagtttggctccggctggtggtttaacgatcaaaaagacggtatgcaacggcaaatgacccagctggcgcagcttggtctgctgagccgctttgtcggcatgctgaccgacagccgcagcttcctgtcttatacccgtcatgaatatttccggcgcattctgtgccagatgatcggacgctgggttgaagacggcgaagcgccagcggacctggcgctgctgggggagatggtgaaaaacatcagcttcgacaacgccaaaaactatttcgccattgaactggcctag

SEQ ID NO: 442374 - DNA, 1494 bp, Serratia marcescens
atgcagagctttattaagattcatgcgcaggacaacgtggcggtcgccctgcgggatttggccgccggtgaaaccctgcagctggatgatgcgctacgcctgacgctgccgcagccggtggcgcgcgggcataaattcgcgctgacgccgatcgctgccggcgggacgatcgttaaatacggtctgccgatcggccatggggtaacggcgattgcgccgggggagcacatccacgcgcagaacgccaagaccaacctgagcgatctggacgactaccagtaccagccggatttcccggtggtgccgccgcaggcggcggatcgcgaggtgcagatctatcgccgcgccaatggcgaggtcggcatccgcaatgaactgtggatcattccgaccgtcggctgcgtaaacggcattgcccggcagatccagcggcgtttcctgcaggaaaccgccgatgcccagggtattgacggcgtgcatttgttcagccatccgttcggctgctcccagttggggcaggatcatgaaaatacccgcaccatgctgcaaaacatggtgcgccatccgaacgccggcgcggtgctggtgattggtctgggctgtgaaaacaatcaggtcgatgcgtttcgcgacacgctgggcgccgtagacgacgcgcgcgtacgtttcatggtgtgccagcagcaggacgatgaagtggaggccggcctggcgcagctgcacgcgctgtaccagacaatgcgtgacgaccgccgccaaccgggccggctcagtgaactgaagttcggcctggaatgcggagggtctgacgggctgtccggcattaccgccaacccgctgctggggcgcttttcggactatgtgatcgccaacggcggcaccagcgtgctgaccgaagtgccggagatgttcggcgccgagcgtattctgatgagccgctgccgcgacaggcagactttcgacaagaccgtcgccatggtcaacgacttcaaaaaatactttattgcccaccagcagccgatttatgaaaatccgtcgccgggcaacaaggccggcggtatcaccacgctggaggagaaatcgctgggctgcacccagaaagcggggcagagccaggtggtggacgtgctgaaatatggcgagcgtctgcgtcagccggggctgaacctgctgagtgcgccgggcaatgatgcggtggcgaccagcgcgctggccggcgccggctgccatatggtgttgttcagcaccggacgcggcacgccgtacggcggctttgtaccgacggtgaagctggcgaccaacagcgaactggcggcgaaaaaacctcactggattgattttgacgccgggcggctgattcacggcatggcgatggagcagctgctgacgcagtttatcgatgaaattgtcgccatcgccaacggtaaggcggcgaaaaacgagctgaacgatttccgcgagctggcgatctttaagagcggcgtcacattgtaa

SEQ ID NO: 442375 - DNA, 576 bp, Serratia marcescens
atgacgttttattggtttgctcaggcggttggcgtgctggcctttctggtcggcattaccagctttttcaaccgtgacgatcgtcgtttcaaattgcagctctccggctacagcctgactatcggcattcatttcttcctgatgggcgccaacgccgccggcagcagcgcattactcagcgcctgccgcaacctggtgtccatgcgcacccgcagcctgtgggtgatgtggctctttctcagcctgacgttggtgatgggcctgtcgcgctaccagcattgggtcgagctgttgccgattttcggcacctcgatcagcacctgggcgctgttccgcacccgcggccttaccacccgctgcgtgatgtggtgctctaccgcctgctgggtgacgcataatatctggctggggtcgatcggcggctcgttgattgagggcagctttctgctgatgaacggctttaatattctgcgtttccgccgcctgcagcggcgcggtatcgatccgtttgcggcagaaaagcaggccgaaaaaaaggcgtccgaaggacgcctgatgtcagaaccgcgcgcttag

SEQ ID NO: 442376 - DNA, 732 bp, Serratia marcescens
atgaagccgctgttactgatgcaaaccggcgatgcgcctgaggccatccgccagacgcacagcaatttcgaacagatgtttatgcaacaaggcggcatggccgccgaacgcgtgcaggtcgtccacctgcccgccggagaacaaccggcggcgccggcggactattgcggcgtggtgatcaccggctcaccggcgatggtgaccgaacggctgccgtggagcgaacaggcggccgaatggctgcgtcaggcgatggcgctccgcctgccgatcttcggcgcgtgctacggccatcagttgctggcccatgcgctcggcggcgaggtgggctatcacccgcaggggatggaagtcggtacgctggagattgaactgctgccggccggcgcgagcgaccgccggctgatgatgctgccgccgcgtttcaaagccaacctgatccattcacaaagcgtgctgacgccgccgccgggcgccgacgtgctggcacgctcggcgcaggatgactaccagatcctgcgctatggtgataatgcgctgaccacccagttccacccggaattcgacgcggcgaccatgcgcagctatctgcactggctggccgaattaaacccggagcagcaggcggaataccagcaaaaacaacggcaggtggacgatacgccgttcagcaggctgctgctgcaggggtttgtcgtcagcctcggcgcgcagcaggcattggccggatga

SEQ ID NO: 442377 - DNA, 987 bp, Serratia marcescens
atgattcgttttgccgtcgtcggcaccaactggatcagcgaacgctttgtcgatgccgcccatcaaagcggaaaaatgcggttgaacgccgtctattcccgccgtctggagcaggccagaagcttcggcgccccctatcaggtcgagcatctgtttgacgatctgacggcgctggcgcagtccgatgtgattgacgccgtgtatatcgccagcccgaactcgctgcactgccagcaagcattgctgtttatgcgccatcacaaacatgtgatctgcgaaaaaccgctggcgtccaatctgcaggaagtggaattgctgctggcctgtgcgcgcgagcagcaggtggtgctgttcgaagccttcaagagcgcccatctgcccaactttatcaccctgcgacaaacgctgcctaaagtgggcaaactgcgcaaagcgttcttcaactactgccagtattcatcccgctatccacgctatctggcgggagaaaacccgaataccttcaacccgcagttctccaacggttcgatcatggacatcggttattactgtctggcgagcgcggtggccctgttcggcgcgccgcaatcgctgatcgccagcgccaccctgctggacaccggcgtggatgcccacggcaccgtctgcctcaattacggcgattttgacgtgacgatcggccactccaaagtcagcgactcggcgctcgccagcgaaattcagggtgaggacggcgcgctgctgatcgacaagatttccgagtgtcagggggtgacgctgctgccacgcggcggcagccgtcaggatctgagccaaccgcagcacggcaatagcatgcagtatgaggccgaggtgtttgccgatctggtgacgcgtcatcaggttgaacatgccggcctggaaaactcgcgtatcgtcgccgccctgttaagtgaaatccgccggcaaaccggcgtcgtcttcccggcagatggagaaggacaatga

SEQ ID NO: 442378 - DNA, 513 bp, Serratia marcescens
atgtccgaactgacttatctgcaaggctaccccgcccatctgcagacgcaggtacaacagctgatccagcaacagcgcctgggtgaggtgctgctgcagcgctacccgcaggtgcacagctgcaccaccgataaggcgctgtaccagttcaccaccgagatcaaaaatcaatatctgcgcaacgcccagccgatcagcaaggtagcgtatgacggcaaaattcacgtgatgaaacacgctctgggtctgcataccgccatttcgcgcgtacagggcggtaagctgaaggccaaggcggaaatccgcgtagcgacggtgttcaagaccgcaccggaagccttcctgcgcatgatcgtcgtgcatgagctggcgcacctgaaagagaaagaccacaacaaggcgttttatcagctgtgctgccatatggaacccgactatcaccagttggagtttgacacccgcctgtatctcacccatctggcgctgttcggcgggctgtacgccgaccgctga

SEQ ID NO: 442379 - DNA, 1140 bp, Serratia marcescens
atgagccaactcgatctgggaacacagcaacttgagctggagcgttatccccaacaagaaggcgccgcgccgctgcaggcgtgggaagcggcggatgaatatctgctgcaacaggtggaaaatcaggatgttgccggacgcccggtgctgattttcaacgacagcttcggcacgctgacctgtgcgctgcacgcgctgcggccgtacagcatcagcgattcctacatgagccagctggcgacgcgccacaatctggcgctcaacgggctggatgcgcagcaggtgacgctgctcggcagcctggacgcgctgcctgaagcgccggcgctggtgctgattaagatcccgaaggcgctggcgctgctggaacagcagctgcgtgcgctgcgcaaagtggtcggcccggataccgtgattatcggcggcgccaaggcgcgcgatattcatacctcgacgctgcagctgtttgagcgggtgctggggccgacccgcaccagcctggcgtggaaaaaggcgcgtctgatttacggccaggtggcagacatcacgccgccggcggcggcggaaaccaccgactggcagctggacggcagcgatatgctgatccataaccatgccaacgtgttctcccgcagcggcctggatatcggcgcacgtctgttcctggaaaacctgccgagcgatttggatggcgagattatcgacctgggctgcggcaacggcgtaatcggcctgacggcgctggtgcagaacccgcaggcgcaggtgacctttgtcgatgaatcctatatggcggtggcgtcgagcgaactgaacgtgcgccataacctgccgcaggacatggagcgctgtcgttttgtggtcaacaatgcgctggccggaatggacggcggcagcgcgcaggcggtgctgtgtaacccgccgttccaccagcagcatgcgattaccgaccagaccgcctggcagatgttccttgacgccaagcgctgtctgaaagtaggcggagagctgctgatcgtcggcaaccgtcatctggattattaccagaagctgaagcgtctgttcggcaactgcgttaccgtggcgtccaaccagaagttcctggtgctgaaatcggtgaaaaccggcgcacggcgctaa

SEQ ID NO: 442380 - DNA, 2022 bp, Serratia marcescens
atgaacctatacccacacctgctggcgccgctggatcttggcttcaccaccctgaagaaccgggtgctgatgggctcgatgcataccggtctggaagagatgcccgacgggccgcacagaatggcggcgttttatgccgaacgcgcggcggccggcgtcgcgctgatcgttaccggcggcatcgcgcccaatgaccagggcgtggtgtaccgcggcggctcaacgctgagccagccgcagcaggtggcgcatcaccgccccatcaccgaggcggtgcatcaggccggcggcaaaatagccctgcagatcctgcacgccgggcgttacagctatcagccgcagccggttgcgccttccgcgctgcaggcgccgattaacccgttcgcgccgagcgccctcacggcgcaggagatcgaacagaccatcgccgactttgcccgctgcgccgttctggcgcaacaggccggctatgacggcgtggaagtgatgggatccgaaggctatctgatcaaccaatttctggtcgcgcgcaccaatcagcgtgacgatcaatggggcggcagcttcgccaaccgcatgcgcttcgccgtggagatcgtgcgtgccgtacgccaggcggtcgggcgcgaattcattctgatctaccgtctgtcgatgctcgatctggtggaggacggctccgactggcaggagatcgaacagctggcgcaggcgatcgaacaggccggcgcaacgatcatcaacaccgggatcggctggcatgaggcgcggatcccgaccatcgccaccatggtgccgcgcgccggtttcagctgggtgacgcgtaaattaatgggcaaggtcggtattccgctgatcaccaccaaccgcattaacgatccggcggtggcagagcaggtgctggcggacggctgcgccgatatggtgtcgatggcgcggccgttcctggccgacgccgagttcgtccgcaaggccgccgaaggacgcgccgacgagatcaacacctgtatcggctgtaatcaggcctgcctcgatcagatcttcgaaggcaagctggcctcctgcctggtcaacccgcgcgcctgccgggagagcgaaatgccgctgacgacgacggcgcatcccaaacgtctggcggtggtcggcgccggtccggccggtctggcgttcgccgtcaccgccgccagccgcggccatcaggtgacgctgtttgacgccgcgccggtcatcggcggccagttcaacatcgccaaacagatccccggcaaagaggagtttcatgaaaccctgcgctattttcagcgccagctggcgctgcacgaggtcacgctgcggctcgggcagcaggttgaggcgcaggatttgcgtgagtttgacgaagtgatcctggcctgcggcatcgtgccgcgcacgccggcgatccccggcatcgataatgccaaagtgctgagctatctggacgtcctgcgcgacaaaaaacccgtcggccagcgggtggcgatcatcggcgccggcggcatcggtttcgacaccgccgagtacctgagccagcacggcgaatccagcagcctgcatccgcaggcgtttactcatgaatggggcatcgatacgcagctgcgccagcgcggcggcctgtcgccggacggcgccgacgtcccccgctccccgcgccagattttcctgctgcagcgtaaaaccagcaaagtgggcgaagggctgggtaaaaccaccggctggatccaccgcgccagcctgagcatgcgcggggtgaaaatgctcaatggcgtgcagtatcagaggattgacgacgaggggttgcatatcatgcgcgaggagcaggccagctgcctgccggtggataccatcgtgatttgcgccggccaggaaccgcggcgcgaactgcagcagccgctgctggcgatggggaaaagcgtccatctgattggcggcgcggacgtggccgctgaactggacgcgcgccgggccattgaacagggcacccggctggcgatggcgctgtaa

SEQ ID NO: 442381 - DNA, 1476 bp, Serratia marcescens
ttgcgctcgatcagcggtgacctgttgctgcaacgtctcggcgaacagcccgatgataagctgcacaaacgcctgtataacgctatccgaaccagtatcctggacggcagtctgccgccttccagccgactgccggcatcgcgcgacctggcgcaggaacttagcctctcacgtaacaccgttttaaccgtttacgaacaactcctcgcagaaggatatgtgctttcccgtcagggaagtggaacattcgtcgcagaaacggtgccggacagctgtttatccgctgccagcacgccgatcggcagtgacggcgaacagcgcccggtcgaactgtcgcagcgtggcaacgcgctgctacagcacgccagcgccagccccaaacagtggggcgcatttatccccggcgtgccggacgtcaacgctttcccgcatcagctgttcagcaagattcaggcgcgcatcagccgccgtcccgcgccgcagcggctgacctacagtaatcagggcggcagcccggagctgcagcaggcgctggtggattacctgcgcgtcgcccgctcggtgcgctgctcgccggaacaaattctgatcaccgaaggcattcaccaggcgatcgatctggtcacccgcatgctgtgcaacccgggcgatgaggtgtggattgaggagccgggctactggggcatccgcaatatcctgcgcatgaacagcctggatatccggccgctgccggtggatgaagccggcatggtgccgccggagcaggtcagcggcgcaccgcggctgatgttcgtcacgccgtcgcatcagtatccgctgggatcggtgctgagtctggcgcgtcgccagcgtctgctggcgctggcgcgtcacaccggcggctggatcgtcgaggatgactatgacagcgagttccgcttctccggccagccgatccccgcgctgcaggggctggaggccgatgcgccggtgatctatatcggcaccttcagcaaaacgctgtatccggcgctgcggctgggttatgtggtgctgccgaaaccgctgacggcagcgctgaaaaccgcgcacgccgagctgtaccgcggcggccatctgctgatccaggccgcactggcgcagtttattcaggagggccactacaccgcgcacattcgccgtatgcgcctgctgtacgccagacggcgcgcctttctcaccgcgctgatcgaacagcacctgggcaaacaggcgctgagcgaattcaataacaacgccggcctgcatctgattctcaacctgccggatagcgctgacgacgtggcgatcgccgccgccgccgccgcccgcggcgtgctggtacgcccgctgtcgcgctattacatgctgccgagccgccgtcgcggcctgctgatgggctttgcctgcgtgccggaagaacagatggccgccgcgtttgagctgctgctggcgtgcattctagagagcccgcactag

SEQ ID NO: 442382 - DNA, 1455 bp, Serratia marcescens
atgaaactgaataatcccgagctgctgcgtagccagtgcctgatcgacggcgagtggtgcgcggcgcagagcggcaagcgtgaagcggtgatcaacccggcgaccggcgaggagctggcgtcgatcccgctgatcggcagcgcagagaccgagcgggcgattgacgccgcccagcgcgcccagcagagctggaagcagcagaccgccaaacagcgtgcggcgctgatgctggcctgggcggagaaaattatggcggcgcaggaagatctggcgcagctgatgaccgccgagcagggtaaatcgctggcggaagcgcgcggcgaagtggcctatgcggcatcgtttatcacctggttcgccgaagaggccaagcgggtagacggcgcggtattgcaggcgccgcaggcgacccagcggctggtggtgatcaagcagccgatcggcgtgtgcgcggccattaccccgtggaatttcccggcggcaatgattacccgtaaggcggcgccggcgctggcggccggctgcagcatgatcgtcaaaccggcggagcaaacgccgctgaccgcgctggcgctgggcaaactggcgcaggatgccggcattccggcaggcgtgctgcagatcgtcaccggcgaggcggcgcaggtcggcaaggtgttgtgcgacagtccggtagtgcgcaagctgagcttcaccggttcgaccgaagtggggcggattctgatggcgcagtgcgcgccgacgattaaaaagctgtcgctggagctgggcggcaacgcgccggtgatcgtatttgacgatgccgatctggatgcggcagtggccggcatcatggcctccaaattccgcaacagcggccagacctgcgtctgtgccaaccgcatctacgtgcaggccggtatttacgatcgcctggcggaaaaactggtgacggcggtcgaagggctgcaggtgggcgacggcgcggcggaaggcaccacgcagggaccgctgatcgataaggcggcggtggaaaaagtgcagagccatatcgacgatgcgctgatcaagggggcgcaaatcgccaccggcggccagccgcatgcgctgggccgcacctacttccagccgacggtggtgaccggcgtcacgcagcagatgcgttttgccaccgaggaaaccttcggcccggtggcgccgctgttccgctttaaggatgaggaggaggcggtcgcgatggccaacgataccgaattcggtctggcggcctatgtctttacccagaacgccgcgcgtcagtggcgggtgccggaagcgctggaatacggcatggtcggcatcaacaccggcctgatctccaacgaagtggcgccgttcggcggtgtgaaacagtctgggctcggacgcgaaggatcgcgctatgggattgaggaatatctggagctgaaatacctgtgtatcgacgtgaacgcttaa

SEQ ID NO: 442383 - DNA, 633 bp, Serratia marcescens
atgagccaatccaacgccgtactgtataccgacgccaactttttcagcccttacgccatgtcggtatttatcgcgctgcgtgagaaaaatattcccttctccgtcaagccgatcgatctggcccggggcgagcatcagcatgccgactatgccgatatttcacctatccaaaggataccggcgctgacgcataacggctttaccctgtgcgaatcatcggccattgatgaatatctggaagaattattcccgcagccgccgctgtatccggccgacgtcaggctgcgcgctcaggcgcgcgaagttcaggcctggctgcgcagcgatctggcgccgctgcgtgcagaacggccgaccgaagtagtttttaacggtgaaaaacggccggcactgtcggctgacggacaggccgcggcggaaaaactgatcgccgtcgccggcggtttgctggcgcacgggcaggaaaatctgtttggcgattggtgcattgccgacagcgatctggcgttgatgctgaaccgcctcgccatgcagggcgatccgctgccggaaacgctgcaacgctatgcccagcggcagtggctgcgcccgtcgctgcaggcctggctggcgctgtctgcaaacaaatcataa

SEQ ID NO: 442384 - DNA, 2220 bp, Serratia marcescens
atgttggatcgaattcgcgcacacacgcctcttggccccaatgagctgatgttctggtcgctgcagggcagcgaacagctcagccggccttatgttttccaggttgatctactgagccagaacttccatatcgaccggcgctcgctgcttggacagaccgtcacgctggaaatccccacgcaaaatatgctgacgccccgctatctgaacggcaaggtaacggcggcggcggtgcgcagcgaggaaatcaacgacacgcgctatgcggtgtatcaactgaagctggagccggatatctggccgatgctgcgcgatcgaaatttccgtattttccagcagcagacggtgccggacatcgtcaaaaccctgctggcggaacagaacgtcgtctgtgaggatcaactgaccggcagctatcgtcagtgggaatactgcgtgcagtatcaggagagcagctacaactttatcagccggctgatggagctggagggcatctactacttctggcgtcatgagatgggcaaacagacgctggtgctgatggatgcgccccagcagcataagccgtttgaaggctacgaaagtattccctaccacgttacgccttccggcggcagcacccgcgaagagggcgtcagccgctgggcggtcaacgatgtcgtcacgccggggatttacagcattgacgactacgacttccgcaagccgaacgcctggctgtttcaggcgcggcagaaccccgcttcgccgcagccggggcagattgacgtctatgactggccggggcggtttgtcgatcatcagcacggcgagttttacgcgcgcgttcgccaggaggcctggcaggcggagcaccagaaaatcagtggcacggcgacggcattgggcattgcgcccggacacacctttaccctgcacaatgcgccttacgccggtgacaacggccagtatctggtgacacaggctgaatatcacctgcgtgagaaccgttatgccagcggcggagagagcagcgagcaccgtatcgacttcaacgtaatgccggcggatgtgcctttccggccggaacagctggccgagtggccgaagacctgcgggccgcagaccgccaaggtggtggggccgaaaggggagtcgatctggactgataaatatggccgcatcaaagtgaaattccactgggatcggctggcggcgggcgacgacaccagttcctgctgggtgcgcgtgtccagcgcctgggccgggcaaggcttcggcggcgtgcagatcccgcgggttaacgacgaggtggtgatcgacttcatcaacggcgatcccgatcggccgatcgtcatcggccgcgtgtataacgaagccagcatgccgccgtgggcgctgccggccgccgctacccagatgggctttatgagccgctccaaagatggcacgccggacaacgccaacgcactgcgttttgaagacaaggccggttcggaacaggtgtggatccaggccgaacgcaatatggataccaacgttaaaaacgatgaaagccactccatcggcagcaaccgtaccaaaaccgtcggcgccgatgaaaccagccatatcaagcaaaaccgcaccaaaaatgttgacggtaatgagacggtcgccatcggccagaaccgcaccaaaaccatcagcggtaatgagaccaccaccgtgaagcagaaccgcactgaaacggtggagggcagcgaaaccctgacggtgcagcagagccgtaatgagaccatcaccggcgatcactcggccacggtgaaaagcaaccatacctcgacggtggacggcaaccaggtgatgacggtcaatcaggatcgcacccgcaccgtaaacggcaatgagaaggtcagcgtggtgaagaaccgcaacgtggatgtgcagggccaccagacgctggggattaccggtaaccgtacggcctcgatcagcggtaatgagaacaagactatcaccaagatgcaggatgtcagtatcggcgagggccgcaagatcgtgatcgccggcggtgatacgcgttataccgacggtgcggtaagcgacagcgcgtcgcaaagtttcaatatcagcgtgggtgactctgccggcatctcgatttcgcccggcaacattgagattgtcgccggcggcgccagcatcaccatcaacgggagcggtgttatggtcaacggcaccaaaatagaactcaatgcctga

SEQ ID NO: 442385 - DNA, 1581 bp, Serratia marcescens
atgatgcagagtcacgcaagaaaccccaccgagcaactgatggcccagttggaagtgcagtggctggaggccagtgaggatccggccgcgcggctatttatctggcgggtcaaggccaatgccgaaagtattgtgcatgcatttatcgcgctgcagcagccgccgccgagcgactacagcgcgccggatctgtttatcggctttatggcgccgttcgacaccggttacggctacagccgggcgctagcggatgagctgatagagcgttacgaggccagcgaagacgcgcagggctgggagtttgagtcccgtttgccgtgctttagcgccgcgcagtggcaaaccctgctcggcgattttgccggccatcatcgcgaacagttgcgctatgtggtggcggtgatgacgccggagcatatcagcgatgagacggcgctgcagcgctggctgcagcaaaacgttgagcgcattggcaccggcgtgcgcgtgatgttgatcgatacgctggagcagccgacctggcaggcgctgcagcaggcatttccccagcgtgtgcggctgataacgccggatatcgacggtatggcgctgatgcagcaaaccgccagccaactcagcgatcgtgatggcgaccgcctgcgctgccgtcagttgatgaccgatgcggtattgctgcttgagcacggcacggcgcagcaggttgaggcgcgtgccggcatggcgctggcgattgcgcgtaaaaaaggctggctggagcagcaggtggtgatgcacaacatcgtcggcggcggctgggtaaagggcaatgccgccgctaaagcggtggaggcgtaccgtcaggcgcagcaggtggcgcagggcatcggcgatccgccgctgcgcgccacgctgcagatgcagagcgccttcggcgaaggcggcgcctggttcagcgccggcgaatatcagaaggcggccggcgcttatcggctggccgcagggctggcgcaaatggcgggcaaccgcatgttggctatcgaaggaatgcggatggcggggcgctgcctggtgctgggcggcgaggagagccaggcgatggcggactatgcgcaggcgatccacgccgcgcggccgctgtccgccgaggagcgtgcgcaaaccactttgccgctggcgctacaggatttactgcatattcaggatgataaaagtgctaaggcgctggagcactgtgcagaagagtatcagcagcgcaagcagcagctgattttacgcgcggaaggcgaggtggcgcagcagggggcgacgccacagtcggtgctgctggcggaaagtcgcctgcaacaggcgctggagcagagtttccagcaggcgcgcaatcagcgtgagctgctgatccttgaaagctaccccggttttcgtcaggcgatcgccatcggtcgccagtatctgcatccgcactggaacggcctgccggagatcgcccatccgtttgatgcgccgaccggcgaatggtcacaaatgccgcaaagcatggcgctgccgtcggaagatgccgccggtgagtttactcagcaacacgaaagcaaggacaaagcatga

SEQ ID NO: 442386 - DNA, 126 bp, Serratia marcescens
atgaggaaggtggtgattattgtggcgatcacgctgttggtgatcggatttatcagcctgtcgaacagtgagctggccagcgaggcgcgcaatttcctgcgtgccttgctgcgggcgctgttctaa

SEQ ID NO: 442387 - DNA, 4149 bp, Serratia marcescens
atgcattccagttcacactttgacccccagctggggatcgatatccatacctatccgttcgggccgctgccgacgccgcatatcggcctggtgttcgacgtctttgactatattccgattatcggcaccacggtgaacgtcaacggcatcaagcgcgccagcgccggtaccggcggcatggcggtgcatatcccgatcggcggcccgtggctgccgccgctgcgcgtaccgggcggcccgcagttgaatgacgacgagttgtttatgggcagccgcacggtgcgggtggacggcgagcctttcgcacggatgaccatgccggtgctgagctgcaacatgctcggtatgatgccaccgttccgtccgaagcgcgccgccgagcccaaaccgctgtcgctgacgatgccgctgaccctcaacctggcgatccccagccgggtgacagtcggcgggccgtctaccatcaacgtgacggcaatgctgatgcgcgccggcctgttcggtctcggcaaagggctgaaaaaactcaaaaaaagcgccggttacggcaagtttatgaagaagtttcaggcgctgcgccagaagctgtttaaaaacatggaccccggctttctcaagtgcaaggtgctgcgggccgagccggtggatatccgcgacggtagcgtggcgttggagcatcaggacttcctgctgccggggcggatgccgctctcctgggtgcgcagctattcgtcggcggatatcgatgaggccggttattgcggctacggctgggcgacgccggcggatatcagcctgacgcgcgatgccgacgggctgatgctgctgatccgaccggcgggcatgaccgcctttggtgacctgccgacgttaccggggcgcgagcacgcggcggtgggcctgccggatggcgggcggctgtggtggcagcaggaggaacggcagcgacgctggatctacgaagacaacgacggcgtgcagcatcattttgacgacgacgacggtgacgcgatgccgctggcggcgctgggcgaccgcaacggcaaccgctggcagtttgtgcgccggcaggggcagctgactcggctggcggagtacgccggcgcggcgacgaccgggcgcgaggtgcatgtcaccgtcgagcgcgggcgcatcatcgccatgcgcctgtatgaggcggccaacgacgcctactcgccgctgacccgctatgagtatgatggcgaggggcagttggcggcgcagattgatgcgctgggggcggcgcggcgtttcggctatcagcgcctgcacatgacgcagcaccaggaccgcaacggccagcgtttctattatgactacgatgccgactggcgggtggtgcacgcctggggcgacggcgggctgtatgattatcgctttgtctatcacgatgtgctcaatgaagtcgcggtcaccgactcgctcggccatacctcgtatatccgcttcgacagcggcgggttaccgattagcgagatcgacccgctgggcggtaacacggtgtttacctatgacgatctgggccggccgctgagcgtgacgcaggcggacgggcgacgctatcagtgggagtacgacccgcaggggcagatggcggcggagatcgggccggacggcagccggttgagcctggagtataacgcgctggcgcagccggagacgctggtcgacgagaacggcgcgcagtggcagatgacgtacgatgcgcggggcaacctgctgtcgcagagcgatccgaccggtgtgacccggcgttatcgctatgatgctacggggcagccggaggaatatctgggggccgacggcgaacggcagacgctggagtatgatcgctacggcttcccgcagcgggtgacgagtaatcagagcgggacgttgcagctgcgctttgacgtgcgcggcaacctgcggctgaaaaccgatgcgctggggcagcagacccgctatgagtatgatgcgaaggatcggctgacggcgcagctgtccgcatcgggcacacaggtggcgatcgactacgatcgcgaagatcagccggtatgctaccgggatgaggcgggtcgtgagacgcggctgcgctataacggcaccggaatggtgacggagtgtcagacggcggacggcgagcgggtggcgtaccagtatgataccgaggatcagctgacggcggtggtgaacccgctggggcaggcgtggcagctgcagcgtgacgcactggggcgggtgacggaggagcgtgactactgggggcaggcgaccggctaccagtgggatgcgggcggcagcctgctgcagcgcactgatgcgctgggtggcacgctgacgtacgcctacgaccgggcgggacggctgcaggaaaaacgcagcggcgacacgctgctgacgcgctaccgctatgcggcggacgggcagctgacgcagtgcgagaaccgctggcggcagctggcatggcgctacgacgcggcgggccggctgctggcggagtcgcaggacggctttacgctgcggcaccactacaatgacgccgggcagcgtattctgcgtgagagcgacggcggacaccgggtggcgttcagctggagcacgacggggcagctggcggcgatagggctgaatgacgatgtgccggtggcgctgggctatgacgcggcgggtcggctgtgccgggagcagctcggtgaagggctggtgcgcgagctgacgtatgacggcgaggggcatctgaccgcccaacgcacgctgcaggatgaactgccgctgttctcgaccggctatcgttacgacctgcagggcaacatgacgtcgcgggaggacagtggctggggcgtagaccgctaccagtatgacgcggtgggacggctgctggcgcacgtcgacccggcggagcgggtgcggcggtttatgcatgacgcggcgggcaaccggctggcgctgacggtgcgggcggtgaacgagacggcggaagggtggttccgcgagggctggcacaatgatacgcgctacgtgtttgaccgtgcgggcaacctgcggcagcggcgctatactgacggcagccggcaggattttgtctgggatgagagcctgcaactggtggcggtgcatcagggcgagtcggtcacgcactatgcctacgacgggctgggtcggcggattggcaaacagacggcgacggagagccgctggttctactggcagggcgatgcactgctggcagaggtggcggagccgggcggcgaaccgctgcatccattggcgctgtacgacgtggccggccggctgcagcgagagaagcggcaggcggcgctctttaacaatctgcgggaatacgtttactaccccggcagcttccggccgttcgcgctgctgacgcagcaggacggggtacgcagcagttaccactaccactgcgatccgaacggcgcgccggtgcggctgaccgacgtacagggcgagctggtgtggtcggaacaatgcggggtttggggtgagccgggggtggtgcatgcagaccgggtggccaacccgttgcgcttccaggggcagtactttgatgcggaaacggggctgcactataaccgttaccgctactacgatccgcagaccgggagctatatcagtcaggatccgatagggctggtgggggggatgaacccgtatgggtatgtgcataatcctaacagctttatagatccgctggggctggctggatgtagcgcgggaaaagtaactggcgatattaaaactctgagggaaaaaatccgtttagctagaaatggtgatgtttccgctcaagcagaaatagcttacgccaagtacatgagaagcaaaggcaatcatgttcattttaacaccccgcctaatcgttcagtatcaatggctgactttactattaatggagtgcaagttgatactaaacttcttagtggtataggtggtaatgcagctaaaaacgtaacaaaaggtgtaaaacaggttggtgataatggaattgttcaagtcattagaagttcagactcgaaaaacacattaggtcaatttgaagagttcttcggtggatttaagcctaataatccttcagtgacggttgatgtaatagaccaatctgtattggcaccattctggaaattttag

SEQ ID NO: 442388 - DNA, 609 bp, Serratia marcescens
atggtccatcgtatttactgtctgctgaagctgaattttcgtcgcaaaggcaagcagcgtctgccggtacgtaatccatcaccgctcgctacgcctgaagcgttgaaccagagctggtctgttgacttcacgcatgacgccctgagctgcggtcgtcgttttcgcacgttcaatgtcgtcgatgactttaatcgagaggcactgacgattgaaatagacctgaacctacccgcccagcgagtggttcgtgttctcgacaggatagcggcaaaccgtggctatccgataatgcttcgcatggataatggcccggaatttatttctctgacactggctgaatgggcagaaaagcatgcagtaaagctggaatttatcaagccagggaaaccaacacagaatgcttttattgaaagttttaaccgaacatatcgtacagaagtactcgatttttatctgttccgaacactgaatgaagtgcgtgagctcacggagaaatggttgtcagaatataactgtgaacgcccgcatgaatcgctgaataatatgacaccggaggagtatcgccaacagcattaccaggccgagatctcaaaaagtgcatggaactaa

SEQ ID NO: 442389 - DNA, 267 bp, Serratia marcescens
atgcgtaaagcccgttttactgagcatcagatcatcgccgtgattaagtccgttgaagccggacgaactgttaaggatgtttgccgcgaggcaggtatctctgaagcgacttactacaattggaagtctaaatacggtggcatggaagcttctgatattaaaaaaataaaagatcttgaggacgagaaccgacgtctcaagcagatgtttgccgacatcagccttgagaaccgggcattgaaagacgttatcgaaaaaaagctttga

SEQ ID NO: 442390 - DNA, 495 bp, Serratia marcescens
atggaacttctggcgccccatctgcgggtggtgttttgtggcatcaatcccggcctttcttccgcccaccgcggctatccgtttgccaatgccagcaaccgtttctggaaggtgattcatctggcggggtttaccgcccgccagctggcgccggaggagtggcagcagctgcaggaatacggctgcggcattacggcgctggttgcgcgtccgacggtggcggccagcgagttggcgcgtgaggaactgcgccatggcggtgaggcgttaagcgataaaattctgcgctgtcagccgcgcgcactggcgattctcggcaaacaggcgttcagcgatgccttcggcatccgcaaggtgagctgggggcgacaggcgctgatgattggcgataccgaggtgtgggtgctgcctaatcccagcgggcttaaccgtgcgacgctggagtcgctgacggacagctatcgtcagctggcgtcggcgttggaaaacagataa

SEQ ID NO: 442391 - DNA, 360 bp, Serratia marcescens
atggatatcgtatttattgaggaacttaccgtaatcgccaccattggcgtttatgattgggaacaaacgattcgccagaagctggtgttcgatatcgaaatgggctgggataaccgcaaggccgccgccagtgatgacgtcaacgactgcctgagctatgccgatatcagcgaagcggtgatccaacacgttgaatccgggcgttttgcgctggtggaacgcgtggcagaggaaatatccgaaatattactccagcgctttaaatccccatgggtccgtattaaggtcagcaagccgggcgcggtggcgcaggccagccgggttggcgttgtgattgaacgaggccagcgcccggcgtga

SEQ ID NO: 442392 - DNA, 1233 bp, Serratia marcescens
gtgaaaatttacctggttggcggcgcggtgcgcgacagcctactggaactgccggtggtcgaccgcgactgggtggtggtcggcgcaacgccggaacagttgctggcgcagggctaccagcaggtcggtaaagattttccggtctttctcaacccgcaaacccatgaggaatatgcgctggcgcgcaccgagcgtaaatccggccatggctataccggctttatctgccatgccgcccccgatgtgacgctggaagaggatctgctgcgccgcgatctgaccattaacgccattgcacaaaccaccgacggcgaactggtcgatccttaccacggcgttgacgatctgaaggcccgcgtgctgcgccacgtttcggcggcatttggcgaagatccgctgcgcgtcttgcgcgtcgcgcgttttgccgcccgctttgcccatctcggcttcaccattgcgccggaaaccgccgcgctgatgcgccagatggccgacagcggcgagctggcgtcactgaccgccgagcgcgtctggaaagagacggagaaagcgttacaaagccgcagcccgcaggtctatttccaggtgctgcgcgactgccatgcgctgggcgtgctgtttccggaaatcgacgcgctgttcggcgtccccgcgccggagaagtggcacccggaaatcgacaccggcatccatacgctgatgacgctggcgctcgccgcacgactcagcccggagattgacgtgcgctttgccgcgctgtgtcacgatctcggcaaggggctgacgcccaaagaatactggccgcaccatcacggccacggcccggccggcgtgcgtctggtcgaggccatgtgtcagcgcttgagagtgccgaacccgctgcgcgatctggccaaattggtggccgaatatcacgatctcatccatacggtaaataagctgcgaccggaaacgctgctcaagctgtttgacgccatcgacgtctggcgtaaaccgcagcggctggagcaaatcattctgaccagcgaggccgatgcgcgcggccgcaccggttttgaggagcaaccgtacccgcagggtgactacctgcgggaagcctatcgggttgccaacgacgtatcggtcaaagaagtggtggccagcggcctgcagggcccggcgattcgcgaggaagtgcagcgccgccgccggcaggcgctggcaacctggaaagcggcgcagccccagccgtaa

SEQ ID NO: 442393 - DNA, 630 bp, Serratia marcescens
atgaaaaaaatgcagacattacgcctaattttcctcgccctgctgagtctcagcatcacttggggcgcacatgccgaagataaacgctatatctccgatgaactgaacacctacgtacacagcggcccgggcaaccaataccgcattgtcggcacgctgaataccggcgatgaagtcacgctgctcagcgtgaatgacagcaccaaatacgggcaaatccgtgatgccaagggccgtaccgtatggatcccgcttaaccagctcagtaatacgccgagcctgcgcacccgcgtgccggaactggagcagcaggtgcagaccctaacggacaagctgaccaatattgataatagctggaaccagcgcacggcagacatgcagcagaaagttgccgccagcgacagcatcatcagcggtctgcaggaagagaatcaggcgctgaaaaatcagctgcaggtggcccagaagaaggtgaacgcggtaaatctgcagcttgacgacaagcagcgcaccattattctgcaatggtttatgtacggcggcggcgtagccggcatcggcctgctgctcggcctgctgttgccacatctgctgccacggcgtaaaaataacaatcgctggatgaactaa

SEQ ID NO: 442394 - DNA, 1308 bp, Serratia marcescens
atgaccgttgaaattgaactgaaatttattgccacgccgcaggcggttgccgcgctgcccgcgcagatggcggcctggccgcatcaacacagcgcgccgcagcggttaaccaatatttactttgaaaccgccgataatttcctgcgtcgccacgatatggggctgcgcattcgcggctttgacgaccggtatgaaatgacgctgaaaaccgcaggttcggtggtcggcggtctgcaccagcgcccggagtacaacgtcgccatcgctacgccggagttggcattgtcacagctgccggcggatatttggccgcagggctgcgacgtcgaggcgctgcagcagcagctgcaaccgctgttccgcactgattttgtccgtgaaaagtgggtggttacttacaaccaaagccagattgaggtagggctggatcagggtgaagtgcgggcgggggagctgactgaagccatttgcgaaatcgagctggagctgcaacagggcaatacgcaggacgttttgctgctggcggccgagctggcgcaacagggcgggctgcgtcagggcagcctgagcaaggcggcgcgcggctattacctggcgcagggcgcagcggcgcgtgaggttcgtcctttgccggtattgcacgcgccggccaaggccagcgttgagcagggcatgatcgccggttttgaactggcgctcgaccattggcaatatcacgaagagctgtggctgcgcggtgacgcagcggcgcggcaggcgattgtggatgcgctggtgctgatacgccagacgctggtggtgttcggcggtttggtgccgcgcaaggccagcgccgggttgcgcagccgcctgtccgagctggagccgctgctggaggcgccggaggccgaggcgcagacgctgtgctacagcccggtttacctacagtgtaagttggcgctcacatcgtggctggtcaacggcgcgtggcgcgcatttattgatgccaaggcgcaggcaaagctggatggttcatttaaacgcttttgcgacattatgctggggcgcagcgccgccgatctgaaagagggctttaaccgtcctctgagcgacgatgagtatcaggagcagctgccgcgcctgaaacggcagctggcggccttgacgctgctgtccggcgcctatgccgatgaggtgtccgaaccttatctgaacggctggcgagagctgctggcggcgctgtccgcgcgccgtcagggctggtacgaaagcggccgcaaacaggctttatctcatgcgccattttggctaaacggcgcggttcgttaa

SEQ ID NO: 442395 - DNA, 2844 bp, Serratia marcescens
atgtcgccactttcagtcacattacaggcgcaggcacagcaggctgtgcagcgttttcaggaagttaacggtagcgaatgggtgtttgacgagcgggagcaacaggctctggcgtcgagcgatttcatcagcgatacgctgttgaatcatccggagtggctgacgacgctgcgtcagcagccgccggcggcggatgaatgccagcattatgcggcctggctgcaggacgtgctggacgaggtgagcgatgaagcggcgctgatgcgcgagctgcgtctgttccggcgggaaacgctggtgcgtattgcctgggcgcaggcgctgaatctttgcagcaccgaacagaccctgcagcagctgagcgcgctggcggaaacgctgatcgtcagcgcgcgcgactggctgtaccaaacctgctgtcgtgaatggggcacgccgtgcaatgccgacggcgttccgcagccgctgctggtgctgggcatgggcaagctgggcggcggcgagctgaatttctcctctgatatcgacctgattttcgcctatccggaaaacggccagaccgtgggcggtcgccgccagctggataatgcccagttttttacccgccttgggcagcggctgatcaaggcgctggatcagcacaccatcgacggttttgtctatcgggtggatatgcgcctacgccctttcggcgacagcggcccgctggtaatgagctttgccgcgctggaggattactatcaggaacaggggcgcgactgggaacgctacgcgatggtcaaggcgcggctgatgggcggtttcgacgatccttacagcgcggagctgcgcggtatgctgcggccgtttgtattccgccgctatatcgatttcagcgtgattcagtcactgcgcaatatgaaaagcatgattgcccgtgaggtgcggcggcgcgggttaaaagacaacatcaaactgggtgccggcggcattcgcgaaatcgagtttatcacccaggttttccagctgatccgcggcggacgcgagccatcgctgcagggacgcgcgctgctgccgacgctgcaggcgataggggaactggggctgctgccggaagcgcaggtcgcggagcttggcgccggctatctgttcttacgccggctggaaaatctgctgcaggccatcgccgaccagcaaacccagacgctgccgcaggatgcgctcgatcagacgcggctggcctggggcatggggctggccgactggccggcgctgttgacccgactggacgcgcatatgcgggcggtaagggcggtgtttgacgacctgattggcgatgacggcccggatgcggaggacgatccgcagtgccaacacttcgccggcctgtggctggatgcgctggatgaacaggagatcgcgccgctgacgccgcaccttggcgaagaagagcgccgcatgatgctgcgcaccctcgccgatttccgtcaggacgtcgataaacgcaccatcggcccgcgcggccgcgaggtgctggatcaactgatgccgcgcctgttggcggaagtgtgcccgcgcagcgatgcgccgaccgcgctggcgcggctgacccagttgctgctgagcatcgtgacccgcaccacctacctcgaactgctggtggagtatcaggcggccctgagccatctgattcgcctgtgcgccgcctcgccgatggtggccagccagctggcgcgttatccgctgctgctggacgagctgctcgataccaatacgctgtatcagccggtggcgccggacgcctaccgcagcgagctgcggcagtatctgctgcgggtgccggaagaggatgaagagcagcggctggaagcgctgcgccagtttaaacaggcgcagcagttgcgtatcgccgccggcgatattgccggtgcgctgccggtaatgaaagtgagcgatcacttaacttacctggcggaggcgattatcgacgcggtggtgcagcaggcgtggaacgatatgctggcgcgctatggccagccgacgcatttgcatgagcgcgaagggcgcggctttgccgtgatcggctatggcaaactgggcggctgggagctgggctacagttccgatctcgatctggtgttcctgctggactgcccgccggaggtgatgaccgacggcgcgcgcagcatcgacggccgccagttttatctgcggctggcgcagcgggtaatgcatctgttcagcacccgcacctcgtccggcattctgtatgaggtggatgcgcgtctgcgcccttccggcgcggccggcatgctggtcagcaccatcgacgccttcgccgagtaccagcagcatgaagcatggacctgggagcatcaggcgttggtgcgggcgcgcatcgtgtacggcgatacggcgctgcagcagcgttttgacgccattcgccgcgatattctctgtcagccgcgtgatgctgacaccctgcgtcaggaagtgcgggaaatgcgcgagaagatgcgtagccacctcgccaacaagcggcgcgaactgtttgatatcaaaaccgatgaaggtggcatcaccgatatcgaatttatcgcgcaatatctggtcttacgctatgccgcgaatgaagcgcgcctgatccgttggtcagacaacgtgcggattttcgagctgatggcgaattacgacatcatggccgaagacgaggccgccgcgctgacgcaggcctatgtcgcgatgcgcgatgagatccaccatctggcgctgcaggaacactccggcaaagtcagcagtgagcagttcaccgctgagcgagagcaggtgcgtgccagttggcaccgctggctgggccagcggtaa

SEQ ID NO: 442396 - DNA, 1221 bp, Serratia marcescens
gtgcagggcgttgggctgctgtccacctcgttattgggtaccggcgtgtttgcggtgccggcgctggcggcgcagctggcgcagggcgacagcctgtgggcctggccgctgctgatcgcgctggtgtttcccattgccatcacctttgcggcattagggcgacactttcccagcgccggcggcgcggctcactttgtcggcatggcgttcggcccccgtatgggcaaggttaccgcctggctgtttttgtcggtgatcccggtcggcctgccggccgctttacagattgccgccggcttctggcagtcgacgctgggttggagcgccggtggcctgctgctggtcgagatcgccaccctgctgcttatctggctgctcggcacgcgcagcgccggttccagcgccaatattcagacgctgatcgccgtgctggtggtggcgctggtggccgctatctggtggaaaggcgacattgaaccggctgagatcccgtggccggtgcttgaggacgttgcgccgggcaatatgttccgtgcgctggcggtgatgttctggtgttttgtcgggctggaggcctttgcccatctggcgaccgagttccgtaactcggcgcgcgatttcccgcgcgcgctgctgcttggcatgctgctggccggtctggtgtattggggcggcaccgtggcggtgctgcatttccatgcctatggtgaacatcaggcggctgcggcttcgctgccgggcattgtggtacagctgttcgggcagcatgcgctgtgggtcgcctgcattatcggctatctggcctgtttcgccagcgtgaatatttacacccagagttttgccaggatggtgtggtcgcaggcgcagagcaaaccgcacagcgcattggccaggttgtcgtccgcacagacgccgctaaacgccctcacgctggtggtgggcagctgtctgttattcaccttgctgatttatatgctgggcctgccgctggatacgctgctggtgtacgccaacggtatttttgtgctgatctatctgttgtgcatgctggcagggtgccggctgttgtcgggccgttcgcggctgatggcgctggtggggacgctgctgtgcgtgctgctgttggtgattattggttggaaaagcgtctatgcgctggcgatgtttgcgctgatctggctgctgctgccgcgacgggccagagtaagcgcgaaacaataa

SEQ ID NO: 442397 - DNA, 270 bp, Serratia marcescens
atgattgacccgaaaaaaattgaacagatcgcacgtcaggtgcatgaatccatgccaaaaggcgtacgcgaattcggggaagacgtagagaaaaaagtgcgtcaggttctgcaggcgcaactgggtcgtctggacctggtgaaccgtgaagagttcgacgtgcagacccaggtgctgctgcgcacccgcgaaaagctggcgctgctggaacagcgcatcgccgatctggaaggcaagcaggccggcgcgccgaaacaggaagaagaataa

SEQ ID NO: 442398 - DNA, 768 bp, Serratia marcescens
atgtcggtaccgctgattctgactctgctggccggtggcgccacctttgtgggcgcgctgttcggcattatcggccagaagccctccaaccggctgctggcctttgccctcggcttcgccgccggcattatgctgctgatttcactgatggaaatgctgcccgccgcgctgcatacggcgggtatgtcgccgatgctcggctacggcatgtttatgctgggcctgctgggctactttgccctcgatcgcatgctgccgcatcagcatccgcaggatctgatgcagcaccccatcaaaccgcacaatctgcagcgcaccgccattttgctgacgctgggcatcagcctgcataacttcccggaaggcatcgccacctttgttaccgccagcgccgatctggagctgggaatgggcatcgccctagcggtcgccattcacaatattcccgaagggctggcggtcgccgggccggtttatgccgccaccggttcaaaaaccaaggcgctgctgtggtccgggatttccggcctggcggagatcctcggcgggctgctggcctttgtgctgctggggccgctgatttcgccggtaatgatggccgcgattatggcggcggtggccggcattatggtagcgctgtcggtggacgaactgatgccgctggcgaaaaagatcgacccccacaacaaccccagctatggcgtgctgtgcggcatggcggtaatgggctttagcctgacgctgctgcaaagcggcggactgggttaa

SEQ ID NO: 442399 - DNA, 813 bp, Serratia marcescens
atgttgatgactccggaaaagggggaaatgatgacgatttctcgtatgccggcgctgtttctcggccatggcagcccgatgaacgtgctggaagaaaaccgctataccgaaacctggcgccggctgggggaaagcctgcctcggccgcaggcgattgtggccgtctccgcccactggtatacccgtggcaccgcagtgacagcgatggaacagccgaaaaccattcatgattttggcggcttcccgcaggcgctgtttgatacgcagtatccggcacccggttcaccggaattggcggctcgtctgcagcagctgttggcgccgacgccggtactggcggatcgtgagacgtggggattggatcacggcagttggggcgtgttgatcaaaatgtatccgcaggcggatattccggtggtgcaattgagcatcgacggcacccagccggcgcagtaccactatgcgctggggcgcaagctggcagcgctgcgggagcagggggtgatgatcgtcgccagcggcaacgtggtgcataacctgcgtatggcgcgctggcagggggacggcagcccgtatccgtgggccgagtcgtttaaccagtatgtgcgcgacaacctgcgctatcagggtgaggatcacccgctggtgaattttatgcagcatgagggcgccgcgttgtcgaacccgacgccggagcactacctgccgttgctgtatgtactgggcgcctgggacggcgaagagccgataagcataccggtcgacggcatcgagatgggctcgctcagtatgctgtcggtacaggtcggataa

SEQ ID NO: 442400 - DNA, 1071 bp, Serratia marcescens
gtgaaaaaacttatcaatcaggttgaatcggtgctggaggagcagttgctcgggctgggcgaggcgcatccggagctgttggtgcatcgcgatccgctgtttgtctgtcgctcggccggtccggcggcgggcaaagtggcgctgttatccggcggaggcagcggccatgagccgatgcactgcggctttgtcggcgcagggatgctggacggcgcctgtccgggggaaatttttacctcgccgacgccggataaaatgttcgcctgcgggctggcgatcgacagcggcgccggcgtgctgctgctggtcaagaactacaccggcgacgtgctgaactttgagaccgccgccgaactgttgcacgacagcggcgtggcggtggcgacggtgctggtggatgacgatgtggcggtaaaagacagcctgttcaccgccggacgccgcggcgtcgccaataccgtgctgttggaaaaattgctcggcgcggcggcggcgcgcggcgattcgctggatgatctggtgacgctgggccaccgtctgaacaaccaggggcactccatcggtatcgcgctcggtgcctgcaccgtgccggctgccggcaaaccgtcgtttacgctggcggataacgagatggagttcggcgtcggcattcacggcgagccgggcattgcgcggcggctcttcagcggcctcaatcaggcggtggatgcgatgtttcatactttgctggagcacggccactaccagcgaacgatccgcgtctgggatcgggtgcagggcgagtggcgggaagagctgcagaccaagcgaccgctggcgcgcggcgaccgggtgattgcgctggtgaataacctgggagcgacgccgctgtcggagctgtacggcgtctaccatcgtctggccgagcgctgtgcggaaaccgggctgattgtggagcggagtctggtcggcgcctactgtacctcgctggatatgcagggcgtctccatcaccctgctgaaggtggatgacgaggcgctgtcactgtgggatgcgccggtcaatacgccggcgctgcgttggggttgctaa

SEQ ID NO: 442401 - DNA, 630 bp, Serratia marcescens
atggcgttgacgaaacaacagttggtcgactggctgatgcgctgcggcgaggtatttcgtcgcgagcgtgattttttgaccgagttggatacggcgatcggcgatgccgatcacggcctgaacatgaaccgcggtttcgaccaggtggcggccaagctgccgtcggtggcggagcaggacatcggcgcgatattgaaaagcagcggcatgacgctgctgtccagcgtcggcggcgccagcggcccgctgttcggcaccttctttatccgcgcggcgcaggtgacggccggtaaacagagtctggatctggctgaactgcagcagatggtgcaggccggtgcggagggcgtggcggcacgcggcaaggcgcagccgggagataaaaccatgtgcgacgtctggcagccggtggcggacagcctgagccagtcgctggcacaggcgccggatatcagggcggcgctgcggcaggccgccgaacgggcgcagcaggcggcggaaagcaccatcgccatgcaggcgcgcaagggacgggccagctatctgggtgagcgcagtattggccatcaggatcccggtgcgacttcggtgatgctgatgatccaggcgctgtctgcggcggcgggctaa

SEQ ID NO: 442402 - DNA, 1431 bp, Serratia marcescens
atgatcaatatcgtagtggtttcgcacagcgcactgctggcgcagggcgttgaggcgctggcgcgtcagatgatgcgcagcgacggttgtcggctggtgctggcggcgggcgttgatgatgagcagaacccgatcggcaccgatgcgatgaaggtgatggcggcgattgaatcggtggccgacggtgacggcatcgtggtgctgatggatctgggcagcgcgttgctgagcgctgaaaccgcgctggagttgctggaacctgcactggcggccaaagtgacgctctgcgccgcgccgctggtggaaggtacgctggcggcggtggtggctgccaattccggcgctgcactggaacaggtgctggccgaggcgcggggggcgctgcaggccaagcgggcgcagttgggggaggcgacggcggcgctgaaaacggtcgatttgccgctggagcagggcaaaagcgccagctggcgggtgcagaatgtccatggactgcatgcgcgtccggcggcgcgcctggcggaaacgctgtcgcattttgatgccgagctggtgctggagaagagcggtcagtgtatcaacccgcgcagtctgaatcagctggcgctgctgcaggtggggcatggcgacaccatccggctgatcgccagcggcaggcaggccgacgaggcgctggcggcgtttaatgcgttggcgcagcagcacttcggggaagcggtttctggtgaacagccgctgtcgttgcacggggtgccggtggcggagagcgtcagcagcgggccgattctgcaatggcgtagcgtctggccgacgctgccggcgcggcataccggcgtcgatgatattttgcatgagcagcagcggctgcgtcaggcgctgcagcagacgctcggcgatcttaaccggctggcggagcgcaccgcgacgctgatcggcaaaccccaggcgggaatcttcggcgcgcatagcatgttgctggacgatccggacttacagcagtcggcgtatacgcgcatcgcccagcagtgttgcagcgccgagcaggcgtggcggcaggagatggaggccgttgcggccgattatcgcgcgctggatgacgactacctgcgggcgcgcgagctggacgtgcgcgacattctgcggcgcaccctcagttatctgcaacagcagccggtcccgccgattaccctgtcggagccggtgattttagtgatggatgagctgatgccgtcggaggtggtgatgctggaccggcgcatggtgctgggcatctgtctgagcggcggcaatgcgctgtcgcacagcgctattctggccaaggcgatgggcataccaatggtggtcggcatgagcgattgtctggaaaagacccgcagcggccagacggcgatgctggatgcggcgcgcggcgtattgcagctgagccattag

SEQ ID NO: 442403 - DNA, 1500 bp, Serratia marcescens
atgaagaaactgctcccccttcttatcggactgagcctgggcggcttcagtgcaatgagccaggcagagaacctgctgcaggtttataaacaggcgagggaaagtaacccggatctgcgcaaatccgccgctgaccgcgatgccgcattcgaaaaaatcaacgagtcgcgcagcccgttgctgccgcaattggggctgaccgctggttacacctacggcagcggctaccgcgattccaaaaacatggataccgacaccaccagcggctcgctggcgctgacccagactatttttgacatgtcaaaatggcgcgcgctgacgctgcaggaaaagaccgccggcatctccgatgtgactttccagaccgcagagcagaagctgatcctcgacaccgccaccgcctacttcaacgtgctgaaggcgatcgatacgctgtcctacacccaggcgcagaaagacgcggtgtaccgcacgctggatcagaccacccagcgctttaacgtcggcctggtggcgatcaccgacgtgcagaacgcccgttccaactacgacaccgtgctggcgagcgaagtcaacgctcgcaatgagctggacaacgcgctggaaacgctgcgtcaggtgaccggcgccttctacccggaactggcctcgctgaataccaaccgtttcgccaccacgcgtccggaagcggtcaacaacctgctgaaagaggcggaagcgcgcaacctgagcctgctctcggcacgcctgagccaggatctggcgcgtgagcagatcaaatatgcacaaaccggctatatgccgaccatcgatatgagtgcctccaccggcgtcaccaataacaaatatcacggcagtggctactcaggtaagggtaatgattacgatggccagaacaaggtcggcatcagcctgaacctgccgatctacagcggcggttccaccaattcgcaggtgaagcaggcgcagtacagcttcgtcggcgccagcgaacagctggaaagctcgcaccgcaccgtggtgcagaccgtgcgctcctcgtacaacaacgtcaacgcctcaatcagcagcatcaacgcctacaaacaggcggtgatctcggcgcagagttcactggacgcgatggaagccggctaccaggtgggcacccgcaccatcgtcgacgtgctggacgccaccactcagctgtatgacgccaaacgtcagctgtccgacgcgcgctacacctacctgatcaaccagctgaatattaaatcggcgctcggcaccctgaaccagaatgacctgctgacgctgaacggcgcgctgggccaaccggtttctaccgcgccggacgcggtcgcgccgcagaaccgcggccaggatgcctatgccgacggttatcaggataacgcaccgatgcagcaggtcgccgcaccggctccggccaaccgcgtcaacagcgcgacgccgcagccggcggcaaccggcagccagccgcgcaacccgttccgtaactga

SEQ ID NO: 442404 - DNA, 636 bp, Serratia marcescens
atgagcaacttacggcctacgcccgttactttcgacaaaaatgatgtagaaattattgcacgggacacgctgtaccgtggttttttttcactcaatttataccgttttcgtcataaattgttcaacggcggcgtgagcgaagagattacgcgcgagattttcgaacgcggccatgcggcggtgctgctgccttacgatccgttgcgcgacgaagtggtgctgattgaacaactgcgtatcgccgcggtcgatacctcagactccccctggttactggaaatggtggcgggtatgatcgaggacggcgaaagtgtggaagacgtgtgccgccgcgaggccgaagaagaggccggtgtggcggtcgggcgctgcaaaccgatgctgagctatctggccagcccgggcggcaccagcgagcggctgtcgattatggtcggcgaagtggacgccgcgaccgccgaaggcattcatggattgagtgaagaaaatgaagatattcgagtccatgtggtgagccgcgaacaggcttaccgctgggtggaagacggtacgattgataatgcggcgtcggtgattgccctgcagtggctggcgttgcaccatgaatcgctcagaaaagagtgggtcaacccatga

SEQ ID NO: 442405 - DNA, 294 bp, Serratia marcescens
atgaaagattacccattgctagacaaccttatggggggatactttaatcaagatgccgatctgattacgggttcaacagaactagagggaatgattgattattacttacaaggggcatctgcgaatctgttgcgaaatttaatcaatgaaatggatgattttcaaacggcgcatccagacgatctggacaaagcgttttgcgagcgataccccggagatctggacatgtcacccgtaggtgaattttttgatattttccggaagcgaatccaagaagcgttagggcaacattaa

SEQ ID NO: 442406 - DNA, 309 bp, Serratia marcescens
atgatcaccgtaatcgcagaaatcaaagttaaaccgggccaccgtgagacggtactaaaagccattgagaaactgatcccgtcagtgctggcggaggacggctgcggcgcctaccagccgctggtcgatatcaaggctcaggtgccatggaaacagtcgctgccggattcggtgttcatgctggaaaaatgggaaagcgtggcgcatctggaaaaacaccttgagatggagcatatgcatcagcatcgcgccaccatcaaggacagcgtgctggatgtgaatatccaggtgctggaagaagcgctgtaa

SEQ ID NO: 442407 - DNA, 582 bp, Serratia marcescens
atgagtaatatccttctaatcaacgccggtaaaaaatttggtcactccaacggtgagctgaacgacaccctgaccgatgtcgccgcttcttttctgcgcgacgccggccatgaagtccagctgaccgtggtcgatcaaggttacgatatcgacgccgaagtgcaaaaatatctgtgggccgacgcggtgatctatcagatgcccggctggtggatgggtgagccctggatcctgaaaaaatacatcgacgaagtatttaccgtcggccacggctcgctgtacgccagcgacggccgcacccgctcagacgccagcaagaaatacggctccggcggcctgctgcagggcaaaaaacatatgctgagcctgacctggaacgcgccgctggaagcctttaccgatcccgatcagttcttccacggcatcggcgtggacggcgtttatctgcatttccataaggccaacgaattcctgggaatggaagcgctgccgacctttatctgcaacgacgtgattaaacagccggatattcaaaatgatatcgcacgatatcgcgagcatctggcaaaaacttttgcttaa

SEQ ID NO: 442408 - DNA, 2274 bp, Serratia marcescens
atgagtgatctgactcatgacggtgtagagcgtttaccgctgcacacattcactgaaaacgcctatctgaactactccatgtacgtcatcatggatcgggcgctaccgtatattggcgacggcctgaagccggttcagcgccgcatcatctacgcgatgtctgaactgggcctgaacaacagcgcaaaattcaagaaatccgcgcgtaccgtcggcgatgtgctgggtaaataccacccgcacggcgacagcgcctgctatgaggcgatggtactgatggcgcagcctttctcctaccgttatccgctggtggacggccaggggaactggggggcgccggacgatccgaaatcctttgcggcgatgcgttataccgaatcccgcctgtcgaagtacgccgaagtgctgctgtccgaactgggacaggggacggtggactggatccctaactttgacggtacgctgcaggagccgaagatgctgcctgcgcgtctgccgaacatcctgctgaacggcaccaccggcatcgcggtcggcatggcgaccgatatcccgccgcacaacgtgcgcgaagtggccgccgccgccgtggcgctgctggaaaaaccgggcgcctcgctggatgacctgctggagtttgtgcaggggccggacttcccgaccgaagcggaaatcatcaccccgcgcgacgaaattcgcaaaatctaccagaacggccgcggttcggtgcggatgcgtgcggtgtggaaaaaagaagacggcagcgcggtgatcactgcgctgccgcatcaggtctccggcgccaaggtgctggagcagatcgccagccagatgcgcgccaaaaagctgccgatggtggaagacctgcgcgatgagtcggaccatgagaacccgacgcgtctggtggttgtgccgcgctctaatcgggtggatctggagcaggtgatgaatcacctgtttgccaccaccgacctggaacgcagctaccgcgtcaatatgaatatgattggcctggataaccgcccggcggtgaaagggctggtggaaatcgtcacggaatggctggcctaccgccgtgatacggtgcgccgccgtctgaatcaccgtctggaaaaagtgctcaagcgtctgcacattctggaaggtttactggtcgcgttcctcaacatcgatgaagtgatccacattatccgcagcgaagatgagccgaagccggtgctgatgcagcgtttcggcatcagcgagacgcaggcggaagcgatccttgaactgaagctgcgccatttggcgaagctggaagagatgaagatccgcggcgagcaggacgatctggcgaacgagcgcgatcggctgcaggcgctgctggcgtcagagcgcaagctgaatacgctgatcaaaaaagagattcaggcggatgcgcagacttacggcgacgatcgtcgttcgccgctggccgagcgcggcgaagccaaggcgatgagcgagcacgactttgtgccgtccgagccggtgaccatcgtgctgtcggagatgggctgggtgcgcagcgccaagggccatgacatcgaccccgccggcatgaactataaggccggcgacagcttccgcgccgccgcccgcggcaaaaccaaccagccggtggtgtttatcgactccaccgggcgcagctatgcggttgacccgctgacgctgccgtcggcgcgcgggcagggcgagccgctgaccggtaaactgacgccgccgccgggcgcaaccatcgaacaggtgctgatggccgccgacgaccagaaattgctgatggcctccgatgccggttacggcttcgtgtgcaccttcaacgatctggtggcgcgcaaccgcgccggcaaggcgatgattaccttgccggagaacgccaaggcgttaccgccgctggaaattcacggcgacgacgatatgctgctgtcgattacccaggcgggccgcatgttgatgttcccggtggccgatctgccgcagctgtcgaaaggcaagggcaacaagatcgtctctattccggcggcgcaggcggccgcaggggatgacaagctgacctggctgtttgtgctgccgccgcaaacgtcgctgacgttgtacgtcggcaagcgcaagctgacgctgcgcccggaagatttgcagaaattccgggccgagcgcggccggaaaggcacgctgctgccgcgtggcctgcagcgtatcgatcgcgtcgaggtggatatgccgccgcgcgcgtcggtcggggatagcgaagaataa

SEQ ID NO: 442409 - DNA, 735 bp, Serratia marcescens
atgttattaattttgcgtgccgttttcgtcactctgttctgtattctggtgtgcattttcggttccatctactgtttgttcagcccgcgcaatccccgtcacgtggcgacgtttggccatctgttcggccgcctgtcgacggtattcggcttaaaggtagaaattcgtaagccggccgacgcggcgcagtacggcaagtgcatctatatcgccaaccaccagaacaactacgatatggtgacggcgtccaatatcgtgcagccgcgcaccgtgacggtggggaaaaaaagtctggtgtggatcccgtttttcggccagctgtattggctgaccggcaatctgctgatagatcgggataaccgggccaaagcgcacggcaccatcgctcaggtggtggagcagattaagaaaaaagatatttccatctggatgttcccggaaggaacccgcagccgcggtcgcggcctgatgccgttcaagaccggcgcgtttcatgcggcgattgccgccggcgtgccggttgtgccgatctgcgtgtcgaacaccagcaataaaatcaacctgaaccgcctgaataacggcgaagtgattgtagagatgctggagccgatcgataccacgaagtttggtaaagaccaggtgcgtgagctggcaacccactgccgcgagctgatggcggcgaaaattgcccagctggacgaagaggtggcgcagcgcgaggccgccggaaaataa

SEQ ID NO: 442410 - DNA, 1416 bp, Serratia marcescens
atgtcactcagtcgacgtcagttcattcaggcatcgggtctggcgctgtgcgcgggagccgtgccgctgagggctgaagcgagcggagcgcaaatcccgttaccggttcccccactgctggagtctcgtcgcggtcagccgctgtttttaaccctgcagcgcacacactggccgtttgttgccaaccgtaaggccaacgcatggggcattaacggcatgtacctcgggccaacggtacgggtacacagcggtgacgacgtcaaattgatttacagcaaccgcctggcggagccggtatccatgaccgtcagcggtctgcaggtgccgggcactctgacgggcggcgcggcgcggctgatgtcgccgggcgtggactggtcgccggtgctgccgattcgtcaggcagcagcgacctgctggtatcatgccaacacgccggagcgcatggcgccgcaggtatataacggcctggccggcatgtggctggtagaagatgaaatcagcaagtcgctgccgctgcctaaccactacggcgtggatgatttcccgctgatcgtacaggacaagcggctggataacttcggcgcgccggaatacagcccgccgtcgcagggcggtttcgtcggcgacacgctgctggtgaatggcgtgcagaacccgtaccttgaggtttctcgtggttgggtgcgcctgcgtttgctgaacgcctccaactcgcgccgctatatgctgcagctgagcgacggccgtccgctgacggtgatcgccagcgatcagggctttttacctgctccggtctcggtgcagcagcttcctctggcgcccggtgaacggcgcgaagtgctgatcgatatgtcgaagggcgaagaagtgacgctgaacgccggggaggccgcaggcattatggaccgcctgcgcgggctgtttgaaccttccagcctgctggtgtccacccaggtgctgacgctgaagccgaccggcctgttgccgttggtgacggacaacctgccgatgcgtctgctttcggatcagctgctggacggcagcgtcagccgtacgcgggagttccggctgggtgatgacgtggcgggcattaacggcgcggtgcgggatgtgaaccgcatcgatctgcagaccatgcaggacagctgggagcgttgggtgatccgcgccgatacgccgcagtctttccatatcgagggcgtacagttcctggtgaagagcgtgaacggcgctcagccgatggccgaggatcgcggctggaaggacaccgtctgggtcgacggcgaagtggagctggtggtgcactttacccagccttcctacgatcacttcccgttcctgtattacagccagacgctggagatggccgaccgcggcagcgccgggcagtttgtggcgcaaccgacgcagtaa

SEQ ID NO: 442411 - DNA, 1518 bp, Serratia marcescens
atgagtgataataaatatgatttgagtattcctgatggcgctgcatttattacgcctgaaatgtttggagctgaagtaggtaaagattctagtgtggcaattaatgctgcgatagattacgccaggaataataaaatacctagagtatatggtatgaatatgtatacgctggatgcacctgttcatgttgacaatatgtctttagggttcgagctaaatttagcaggtatagttattggtagtgggttcccgagcttcaccgattggaaacaatcccagggagcagttgttgtcggtgagttttctggagggagtcaggctgggatacgcattattacagggttcttcgatggaggtgaaaaagccacgcttttccaattaaaaggttgtgggagcggttcgagttactatgaagtaggtcgagcaaaatcatttgtggggatttttgaaaacactaagtcaaataaggccaatgcaccggataatactattaggatattgtatgccggtaatggcggttattttggtgtaagaattaaaagaattaataatttgtatattgctgaagggcataaactgtatggcgggtttatacagcaatgtcgctatggggctattcagttgtataatggtgcgcaatactttaatgctcagggtattggcgtagatttcaatggtaggtatttatcagagttgacggtagatgccccattcacaagcgatttagtgagagaggagattatcactaatggtagtaagtcttgcgaagtgttggacttttatcagaagcctaaaggtgtttataaaattttggtcatagaacctgtaaatgtcagcggcggtgcaaatccaacaacgttttctgttggtgatgagctatcaatgtcaggctactcttgtaaggtaaaagatatccgggtggctcagaatgagaatcagtattttgatgtcatccatggttttgaggggactccgtttggtcagtgtgacatgcaattttcttatggtggtggtgtagtaggcggtctgtttaatacatcatctttaaagtggaggaattctaacaatagttacagcaattattttaatggactgatggttcgacatacaggtaactctatggtcatttctgatgcctatttgagcagccctatattaactaacgagacggataaaacaacgctgcataaaaacatttcaatttcatctaatagaattaaaggttatgaggatttgatagcctttaaacagggtgagaagaaaaaaatcagaacatttgactatatttctgatgaacttatgcccgatacgaaaaatgtgtatcggtgtacggttaaaggtcagtctggaatcaatggtgttggtggtgagtttttattatatgttggccgttctggaatagagattaggaataatacggttgattatcctacgctatccgttaacgacctcgctctcgaggggttgcagggggcaatggcagtgatgaacctggtgtttagttttaatcgagtttaa

SEQ ID NO: 442412 - DNA, 933 bp, Serratia marcescens
atgagtgagttttctgcagtaacgccggtattagtattaggcggcgccgtcggcgatctggtcatgacgctgccgcgcctgcccgtcagcggcgaagatattgaagcccggccgcaggggcggcagattggcggctgcgcctttaacgtcgcccgcgtgctgtgccgactggacgtgccggtggtcaacggcatgccggtcggcaacggcgagtggggcgtcgccgtggaagcggcgatgcaggaactggggctgccggttctgctgcggcacggacagatggataacggctggtgcctggcgctggccgagccgaacggcgaaagaacctttatcaccgtcagcggctgtgaagcgcagtggaacaaggcgcagctggcaaccctgccgctgacgccggagacgctggtctacgccaacggctatgagttggtgggcgaaccgggcgccgcgctgcgcgaatggctgacccgtctgccgttcgaccaataccggctgatcgatcccggcccgcgcgtcggcctgctcggcgaggaatttttcgccatgctgagcgacagccataccctgctgacgcttaaccgcgacgaagtggcgatcctgtgcggcgacggcgaccccgtcgacgcggcgcagcgctacgccgccgcccgcaatttcaccctgatttgccgccttgacagcgacggtgcctggatctgcgacggcaaacatccgccgcagcatatcgccgcctatccggttgaggtggtggacaccatcggcgccggcgacgcccactgcgccggcctgctcgccgccctttccgccggctggccgctgccgcaggccgtcgatcttgccaaccgcgtcgccgcctgcgtggtagccagccgcggcgccgacgccgcgccggactgggcgcagctgcgccagcgcttcccggacgaataa

SEQ ID NO: 442413 - DNA, 1398 bp, Serratia marcescens
atgagtgaaataaaccgcagtgaaacatggaaagttgaaagcaccggcatcgatctggtgcccgaggcggagcaaaccggtaaacccatcgagctgttctgggtatggtcagcggccaatatcggcatcctcggcgtggtttacggggcgctgatcgtcggcttcggcctgtcattcctgcagtctgttctcgccgcgctggtcggcgtcgccagctttgcgctggtcggctataccagcttcgccggcaaacgcggccgcacctcgacgctgaccctgtcgcgggtcatcttcggtgtaaaaggcaatatcgcccccaccgccttcagttggatcaatctgatgggttgggaggcggtgaacgtcatcaccggcacgctgacgctggcggcgctgttccaggcaatggggctggcggaaagtccgctgctgaccggcgtcagcctgttgctgttcggcggcctgaccatcgtcgtcagcctgctcgggcaaaataccgtagtctggctgcagacctggttcagccgcatcttcggcagcatgacgctggtcgtggtgctgtatatcgcctttaccaccgaatggcagcgcgtgctggcgctgcccgccggcaactggctgaccggcttcctgccggcggtatcgattatcgccgccggcaccggcatcggctgggcgattgccggcgcggactatagccgctatcaaagcccgaaaagttccaataaaagcatcttcgccgcggtgatgggcggcgcctgtctgccgctgatgctgctgatgtttaccggtattctgctgtcggtgcagttgcccgatctggcctctgcggccaacccgatcgccctgattggctcggtgctgccgagctggatggctatcccttatctgctgaccgccaccgccggcatcgtcaccattgcggtgctgagcctctactccgctagccttaacctgctgaccatcggcgttaaggttaagcaatcgctggcggtatcgttcgatgcgctgctggtgctggcgatcgccctctatgtgctgttcgtgtccggcgattttatggggccgtttatcgccttcctggtgttctgcggcgtcttccttgccgcctgggaagcgatattcatcctcgactatctgcgcctgcgtcgtcatcatggttacgacggcaatgcgctgtacggcctgaacggccaaaatcgcggcgtgcgtatggtaccgctgtgctgctggttcctcggcgccctcagcgggctgatggtcaccaaaagcggctttatcgacgggccgctggccaaaggcctgttcgcggattccagcctcgggctgtttgtttccttcctggttagccttatcgcctacggcctgtttttggccgcgggcggagaacgtaagtaa

SEQ ID NO: 442414 - DNA, 1017 bp, Serratia marcescens
atgacaataagaaaaaatccccacctcgccatccttggcgcactgtatggtcaagccgctggcgatgcgatggggatgccgtcggagctgtggccgctacggcaggtacgcgattattttggttggatcgatcgcttcttgcctggcccggacgagaatattgccgcgacaggttttatcgccggcgaatataccgacgacacgcagcaggcagtagcgctgatggaggcgctactcgccgctcacggtaaggtcgaacccgaacgcatcgcccaccacatcatgctgtgggcagaacgggtcgacgccttcaataaaaacattcttggccccacttccaaagccgcacttaacgccatccgcgccggccagcccatctcggaaatcaacgccaacggcgtaaccaacggtgccgccatgcgcgtcgcgccgctgggatgtctgttatctaccaatgatttaggctactttatggatgccgtgcgcctggcctgtagcccgacgcataaatctgatatcgccgttgccggcgccttcgctattgcctggtcagtcagccgtgcgatcgacggcgacgactggagcgcgattaaacaggcgctgccgtcattggtggaacagatgcagcaacagcagatcaccaccttcagcccgtcgctgagccgccgcattctgtgggcgctggacgtggccgaacgcgtacggccgctgacggacagcgaggcgctggccgagatctaccacaccgtcggcgccggcatggatactattgagtccattcccgccgcgctggcgctggtcgaattagcggacggcgatccgattcgttgcgcgctgctggccgccaaccttggcggcgacaccgacaccatcggcgcgatggcgacggcagtttgcggcgcgctgcgcggcattgaggcatttccggcgcaatggattgaaacactgaaccaggcgaatcagattgattttcaaccatatgcagcggctctgggggcgctgcgcaaccaagggtaa

SEQ ID NO: 442415 - DNA, 738 bp, Serratia marcescens
atgaatgactttagcgcgtggctgcgccagcagttggttcaggccgttgcggcaccacgttatatacagttggctacagcgctggaggcggcgattaaacagcgccggctggccgccggtgattttctgccgcctgagcgcgtgctggccgaacggttggcggtgtcgcgggtcaccgtcagcaaggccctgaagctgctggaagagaaggcgctgatttcacgccaacagggcgtgggcacccgggtagcggtgtatatggattattcgctgtcgcaggagcaggggggatttaccgcccagataacgcgcagcggcagcgccgccagtaaccagtggctactgcgcacgcgcgtgacgccgccgccggagatcgcgcaggcgttaaatctgtccgagcatgagccggtggtgaagctgcgtcgcctgcgtctggcggacggcaatccgatttcgttggaaaccacctatattccgctacgctttctgcccgatcccgagcggctggagcattcgctctacgcgctgtggcaggagcgcggcatcgtgccggagggcaagcactttctgttgaaggcgatcgcctgcagcgatgaagttgccggcttgctgaatgtgtcctgcggcgcgccgctgttgctcgtcacgcagaccagccgcaatgcgcagggcgaagtgctggagatcagtgaagttcagtgccgcagcgacgtgtatgagtttgaagtcagcagctag

SEQ ID NO: 442416 - DNA, 2184 bp, Serratia marcescens
atgagcaccaccagcctgatccaaccggatcgtgaactgttttcttataagcgttactgggccgaatgttacggcaccgcgccgtttttaccgatgtcgcgtgaagagatggaccaattgggctgggacagctgcgacgtgattattatcagcggtgatgcttacgtcgaccaccccagcttcggcatggcgattatcggccgtatgctggaagcgcaggggtttcgcgtcgggattatcgcccagccggactggagcaataaagaggactttatgcgcctcggcaggccgaacctgtttttcggcatcaccgccggcaatatggattcaatgatcaaccgctataccgccgatcgtaaactgcgccacgacgatgcctacacgccgggcaatgtcggcggtaagcgtcccgaccgcgccacgctggtatatacccagcgttgtaaagaggcctataaggacgtgccgatcgtacttggcggcattgaggccagcctgcgccgcatcgcccattatgattactggtcggataccgtacgccgctcggtgctggtggactccaaggccgatatgctgatctacggcaacggtgaacgtccgctggtggaggtggcgcaccgcctggccgccggcgagaagatcgccgatattcacgatattcgcaacaccgcggtgatgcgcaaggcgccgctgccgggctggagcggggtggattccacccgtctggataagccggggcgcattgaaccgattcccaacccttacggtgaggatctgccctgtgccgacggcgctcagccggagccggagccggaagccaagccggtcaccgtgcgcgccgctaagccgaagccgtgggaaaaaacctatgtgctgctgccgtcctttgaaaaggtgaaggcggataaagttctgtacgcccatgcttcgcgcattttgcaccatgaaaccaacccgggctgcgcccgcgctctgatgcagaagcacggcgaccgctacgtgtggatcaacccgccggcgattccgctgaaaaccgacgagatggacagcgtgttcgcgctgccgtaccagcgggtgccgcacccatcctacggcgaggcgcgcatcgcggcgtacgacatgattcgcttctcggtgaatatcatgcgcggctgctacggcggctgttcgttctgctcgatcaccgagcacgaagggcggattatccagagccgctccgaagattcgatcatccgtgaaattgaggaaatccgtgacaaggtgcccggctttaccggcgtgatttccgatctgggcggcccgaccgccaatatgtatatgctgcgctgcaccaacccgcgcgccgaacagacctgccgccgcgcctcctgcgtgtatccggaaatctgcacctatatggataccaaccatgagccgaccatcaagctgtaccgccgcgcgcgcgagctggaaggggtaaagaagatcctgattgcctccggggtgcgttacgatctggcggtggaagacccgcgctacatcaaagagctggcgagccatcacgtgggcggctatctgaagattgcgccggaacataccgaaaccggcccgctgtcgaaaatgatgaagccgggcatgggcagctacgaccgcttcaagcagctgttcgatcattactccaagcaggccggcaaagagcagtacctgatcccgtattttatctcctcacatccgggcacgcgggatgaggacatggtcaatctggcgctgtggctgaagaaaaaccgcttccgtctcgaccaggtacagaacttctatccgtcgccgatggcgaactccaccaccatgtattacagcggcaagaatccgctgggcaaagtgggctataaatcggaagaggtctttatcccgcgcggcgatcgtcagcgccgtttgcacaaggcgctgctgcgctaccacgatccggccaactggccgctgatccgcagcgcgctggaagagatggggctgaagcacctgatcggcagccgccgcgactgcctggtgcccgcgccgagcattgacgaacagcgcgagggcaagcgtctgcagcgccgagcgcgtccggcgctgaccaggcacagcgatattcagcgccagcgctcaccgtccaacaggccgccgcgcaaggcgatccgtaacggcggcgccaaaggcaaggcgtaa

SEQ ID NO: 442417 - DNA, 603 bp, Serratia marcescens
atgaaattttcgatcgccgcctgtacgcgtctggccatcccgctggcgctactgatcctcgccggctgttccagcaagcacaaatccgtcagctacgaccgccacagttttgatagcgccatcgccgacgccgccgacgagtacgacgtcgacgccaaactgatcgccgcgatgatccaggtggagtccggctttaacccggaagcggtcagccgctccaatgccgtcggcctgatgcagctgaaagcctccaccgccggctgcgacgcctatcagtttaaagggaaaagcggctgcccggacgatgacgacctgctcgacccggagaccaatatcgatctgggcgccgcctacctggcttcgctgcagcggcagctgcgggggattgataacccggtgacgctgcgctacgccaccgaagtggcctacgtcaacggcgccggcgcgctgctgcgcaccttttccagcaaccgccgtcaggcggtcagcatgattaacagcctgtctcccgaggcgttctggtggcacgtgcgccagcatcatccgtcggcgcaggcgccgcgctatctggcgaaggtggaagcggcctacgcccggctgtaa

SEQ ID NO: 442418 - DNA, 822 bp, Serratia marcescens
atgacaacgcaacccatcatcaaactccacgatggtaatctgatgccgcagttgggtctcggcgtttggcaggcgagcattgaagagacagccaacgccgtgacgaaagcgctggaggttggttatcgctccattgataccgctgccatttacaaaaacgaggaaggcgtcggcagtgcgctgcagtcagcctcgttgccgcgcagtgaactgtttatcaccaccaaactgtggaacgacgatcagggcgatccgcaggccgcgctggaaaccagcctgaagaagctggggctggactatgtcgacctgtacctgatccactggccgcggccgtcgcaggatcagtatgtcgacgcctggcgcagcctcatcaaactgcgcgagcagggcctgacgaaaagtatcggcgtctgtaacttcaatgtgccgcacctgcagcgcctgcaggatgaaaccggcgtcacgccggtgatcaaccagatcgaactgcatccgctgctgcaacagcgccagctgcacgcctggaacgccatgcacaacatcgccaccgaatcctggagcccgctggcgcaaggcggcgaaggcgtgttcgatcagacggtgatcaaacatctggcggagaagtatgaaaaaaccccggcgcagatcgtggtgcgctggcacctggacaacggtctgatcgtcattccgaaatcggtcacgccgtcgcgcatccgcgaaaactttgcggtgttcgactttaagctggataaggacgagctgggccagattgccaaactggatatcagcaaacgcctggggccggatcccgccactctgtaa

SEQ ID NO: 442419 - DNA, 1164 bp, Serratia marcescens
atgcaaaactttattctccacaccccaaccaaaattctgttcggtaaagatcaaattgccgagctgggccagcaaatcccggccgacgcccgtattctgattacctacggcggcggcagcgtgaagaaaaacggcgtcctggatcaggtgcacgccgcgctgcaggggcgcagcgtcaccgagttcggcggtattgagccgaacccgacctttgaaacgctgatgaaagcggtcgaggtcgtgcgtgccgagaagattgattatctgctggcggtcggcggcggttccgtagtggacggcaccaaatttatcgccgctgcggcggactacagcgcctcgtctgacgcctggcacatcatgcagaccgtcggcagcgaaattacccgcgcggtgccgatgggctgcgtgctgaccctgccggccaccggctcggaatccaacagcggcgcggtgattacccgtaaaagcagcggcgacaaacagcacttcttctcgccgctggtacagccgcagtttgccgttctggacccgcaggtcacctactcgctgccgccgcggcagatcgccaacggcgtggttgacgcctttgtccacacgctggagcagtatctgacctacccggttgacggcaaagtgcaggaccgcttcgccgaaggcctgctgctgacgctgctggaagacggcccgcgcgcgctggcggaaccggaaaactatgcggtgcgcgccaacgtgatgtggagcgccaccatggcgctgaacggcctgatcggcgccggcgtgccgcaggactgggcgacccacatgctcggccacgagctgacggcgatgcacggcctggatcacgcacagacgctggcgatcgtcctgccgtcgctgctgcgggagaaaaaggcgcaaaaacgcgacaaactgctgcagtacgccgagcgcgtctggggtctgcgcgacggcgatgacgaccagcgcatcgaagccgccattgccgccaccgccgagttcttcgaaaaaatgggcgtgccgacccgcatggccgactaccagctcgacggcagcagcattcccgcgctgttggaaaagctgcgcgaacacggcatgaccgcgctgggcgagcatcaggacatcacgcttgacgtcagcgaacgcatctatcaggcggcgcgttaa

SEQ ID NO: 442420 - DNA, 747 bp, Serratia marcescens
atgaccatgaaccagaccattgacctgctgacgtcgcatcgcagcgagcgcagctatctcgatcagccgatcgccgatgaggtgctcgacagcattatcgccgccgcccatctggcgccgacgtcggtcaactcccagcaggtttcgctggttgtcacccgcgaccctgcccagcgtgcgcgcatcgccgagattgccggcgggcaggcgtggatcgccaaagcgccggtgtttatcaccgtggtgctggatatgcacaaaacccggctgggcatcgccatgggcggccagcagcaaaccgcgcaccaaagtattgagagcctgatctccggctgcaccgacgtcggcatcgcgctgggcgcgctgatgaccgccgcccgctcgcacgggctgggcatcgtgccgatcggcggcatccgccgcgaccctcaggcgctgattgaactgctgcagctgccggagctgaccttcccggtcgccgggctggtgatcggccatgtcgatcagggcgcacagcagaaaccgcgcctgccgatcgacagtttccgccatgaagaacgctatcagcgcgaaaatctgccggacgccatcaaggcctataaccagacgctgagcgactactggcagcagaccggtcgcgcggacggcgacgactggagccgcaacaccgccagctattaccagcatatctatttcccgaatgtgcttcccgccattcagcaacaaggctttaaactggacaaataa

SEQ ID NO: 442421 - DNA, 906 bp, Serratia marcescens
atgagcgacattgacgagcttcggtaccggatggcgcagcaggcggcgcgctttgccgtgggtaacggctatacgccgtcgccggtgccgcaggtaaacattctgtacgctgaccggcattatccgcgccagccggtgatgtatgaccccagtattgtcatcatttttcaggggcacaaggtcggcttctgcggcagcaaggtgttccgttacgatccgcgcaactatctgctgatgacgctgccgctgccgtttgagtgcgaaaccttcgccaaccctgagcagcccctggtggggatctcggtgcgcattgatacccagatgctgcaggatctgctgatcgatatcggcgatgatgactatctgacggcgccgcacggcgagagcagcggcatcaactgcgcatcgttgcatgacgagatgctgtgcgccaccgagcggctgctggacgtgatgagcaagccgctggatgcgcgggtgctggggccgcagatcgtgcgtgaaattctctattacgtgctgtgcggccacagcggtgcctcgctgcaggagctggtcagccggcatacgcacttcagccagatcgccaaggcgctgcggcgtattgaaaagcagtatgcggagagcctgagcgtcgaggcgctggccagcgaggtgaatatgagcgtgtcggcgttccaccataactttaaggcggtgaccaacacctcgccgctgcagtacgtgaaatcctaccgtctgcataaggcgcggctgctgatgctgcacgacggtctgaaggccagtacggcggcgatgcgggtgggctatgagagcgcctcgcagttcagccgtgagtttaagcgtttcttcggcgtgacgccgagcgatgaagtggcgcgggtgcgggataactacgccgcctga

SEQ ID NO: 442422 - DNA, 660 bp, Serratia marcescens
atggatgtattgaaagagattgttcacgcgctttggcaacaggattttacggctctggccgatcccagcgtgatttgggtggtttatgcggtgctttttatcaccctgtttttggaaaacggactgctgccggcgtcttttctacccggcgacagcctgctgctgctggcgggcgccttaatcgccaaaggcgtgatgtccttcgtaccgaccctgattattctgacgctggccgccagcctcggctgctggctcagctatctgcaggggcgctggctggggcataccaatctggtcaagggatggctgctgcaactgcccgcgcagtaccaccagcgcgcacacgtgctgtttcaccgtcacggtctgacggcgctgctggtcgggcgatttctggcgtttgtccgcacgctgctgcccaccatggcgggcatctccggcctgagcaatatgcgctttcagtttttcaactggctgagcgccctgctgtgggtggtgtcggtggtcggcctgggttacgccttcagccaaatccccctcgtcaaacgctatgaagaccaggtgatggccggcctgatgatcctaccgctggcgctgctggtgttcgggctgctcggcgccatgctggtgatttggcgtaaaaaacgtcaggcctcctga

SEQ ID NO: 442423 - DNA, 1194 bp, Serratia marcescens
atgacgtccaaaaatctcgataccgcgctgatcggcgccggccgcagcaaacgctacacccacggcgcggtcaacccggtgacgcaacgtgcctcctcgctggtgttcgacaccgtggccgataaaaaacacgcgacggcacagcgcgcccacggcgaactgttttacggccgccgcggcaccctgacccattttgccttccaggaggcgatgaccgagctggagggcggcgccggctgcgttctttacccctgcggcgccgccgcggtctccaacgccatcctgtcgttcgtcagcgccggcgaccacgtgctgatgaccggttccgtgtatgagccgacgcaggatttctgcacgcatattctgggccggatgaatatcgccaccacctattttgacccgctgattggcgaggccatcgccgagctgatccagccgaacacccgcgtggtgtttctggagtcgcctggctcaatcacgctggaagtgcaggatattccggccatcgtgcgcgccgtgcgtgcggtaaacccggagattgtcattatgatcgacaatacctgggccgccggcgtactgttcaaggcgctggagttcgacattgatatttccattcaggccggcaccaaatacattatcggccactccgattacatgctcggcaccgcggttgccaacgcccgttgctgggaccagctgcgtgagtactcctacctgatgggccagatggtggatgccgataccgcctatatggcaggccgcggcctgcgcacgctgaacgtacggcttaaacagcatgaacagagcagcatcgccgttgcccgctggctggccgagcggccggaagtcgcccgcgtcaaccatccggcgttgcctgaatgtaaagggcatgaattctatcagcgcgatttcagcggctgtaacgggctgttctcctttatcctgaaacagcgcctgagcgaggcgcaactggccgactatctcgaccacttcagccatttcaccatggcctactcctggggcggctatgaatccctgatcctggcgaatcagccggaggaactggaggcgatccgtccggccggcggcgtcgacttttccggcacgctggtgcggctgcatatcggtctggagaacgtacaggacctgatcgacgatctggcggcgggttttgcgcgcctgcaggccggctga

SEQ ID NO: 442424 - DNA, 1293 bp, Serratia marcescens
atggacgcatttatcctgcttgcttctctcgccctgctgctggccatcggcgtgccggtggcctacgccgtggggctgagcgccatcgccggcgcgctgtggatcgacctgccgctggaagcgctgatgatccagatgaccagcggcgtcaacaagttctccctgctggcgatcccgttctttatcctggccggcgccattatggcggaaggcggcatcgcccgccggctggtcagtttcgcctatatcttcgtcggttttgtacgcggcggcctgtcgctggtcaatatcgtcgcctccaccttcttcggcgcgatctccggctcttcggtggcggataccgcgtcgataggctcggtgatggtgccggaaatggagaaaaagggttacccgcgcgactacgccgcctcggtcaccgccagcggttcggtgcaggcgattctgatcccgccaagccataacgcggtgatctattcgctggccgccggcggtacggtgtcgatcgcctcactgttcgttgccggcatcctgccggggctgctgctgtgcgtctcgctgatggtgatgtgcgtcgctttcgcccacaagcgcggctacccgaaaggggaagtcataccgctgcgtcaggcgctgaaaatctgcctcgacacgctgtggggtctgatgaccgtggtgatcatcatgggcggcatcatgtccggcatttttaccgccaccgagtccgcggcggtggcctgcctgtgggcgttcttcgtcaccatgtttatttaccgcgactatcgctggtccgaactgcccaacctgatgtaccgcaccatcaagaccgtcaccatcgtgatgatcctgatcggcttcgccgcctgcttcggcgcggtgatgacctatatgcagctgccgctgcgcatcaccgagttcttcaccgccatttcgcagaacaaatacgtcattctgatctgcatcaacatcatgctgctggcgctcggcacgctgatggatatggcgccgctgattctgatcctcacgccggtactgctgccggtgaccaacgcgctgggcatcgatccggtgcatttcggcatgatcatgatggtgaacctgggtatcggcctgatcactccgccggtcggctcggtgctgttcgtcgccagcgcggtcagcaagcagaaaattgaggcggtggtcaaaaccatgctgccgttttactgcgtgctgtttatggtgctgctgctgattacctatatccccgctatttcgctgtggttgccgcatctgtttggcgtaatgggcggctga

SEQ ID NO: 442425 - DNA, 507 bp, Serratia marcescens
atggcacatgcttatcatcaggcaatggatctgctgtaccgtatcgccatgtggctggccggcgcggcgctgctggtgatggtcgccgtcataccggtcggcatcttcagccgctacgtgctcaatgagggcgccgcctggccggagccgatcgccatcttgtgcatggtgacctttacctttatcggcgccgccgtcagctaccgcgccggcgcgcatatcgccgtcaatatgctgaccgaccgtctgccgccggtctggcagcgtctgtgtggccggctggcggacctgctgatgacggtgattagcctgtttattctttattacggctacggcctgtgcagccagctgtggcagcagccgatggcggaattcccgctgctgagcgccggccaggcctacctgccgctgccgctgggctcggccgtcaccctgctgttcgtgattgagcggctactcttcggcccgcagcaccaccgcccggtggtgatgctcggcaatacctga

SEQ ID NO: 442426 - DNA, 978 bp, Serratia marcescens
atgaaactgccccacgccctatcaggtttgtgcctctccctctgcacattgctgtgcagccaggccgcactggcgcaacaaatcaaagccgccgacgtccacccggaaggttaccccaatgtcgtggcggtgcagcatatgggagacaagctgaaaaccgccacgcagggccgcctggagctgaaaaccttccccggcggcatgctcggcgacgaaaagcagatgatcgagcaggcgcagatcggcgccattgacgttatccgcgtatccatggcgccggtggcggcgattttaccggagatcgatgtgttcaccctgccgtacatcttccgcgacgaggcgcatctgcataaggttctggacggtgaaatcggcaaggagatcggcgacaaaatcaccaacgacccggcctcacggctggtgtttctcggctggatggattccggcacccgcaatctgatcaccaaaaaaccggtggtgaagccgcaggatctgcaggggatgaaaatccgcgttcagggcagcccaatcgcgctggcaacgctgaaagccatgggcgccaacgccgtcagtatgggcgtcagcgaagtgttcagcggcctgcagaccggcgttatcgacggcgcggaaaacaacccgccgacctttatcgcccacaactatctgccggtaaccaaaaactacaccctgagccgccactttattattcctgagctgtttctctattccaaagtcaaatgggacaagctgaccccggaagaccagcagctaatcctcaaactggcgaaagaggcgcaggccgagcagcgcaccctgtgggccgcctataaccagcaggcgctggaaaaaatgaaggccggcggcgtgcagttccatgagatcgatcgtgaagcgttctataagatgacccagccggtgcgcgaccagtacggcaaggcgcatcaggcgctgatcgaccgcatcaacgcggtgcagtaa

SEQ ID NO: 442427 - DNA, 978 bp, Serratia marcescens
gtgaaaacggctggcaagactatgaatcaaagagcccgcggcgctggccggggacagtggggcgccgtattcgggcgcggtttgatcgcgtccatggtgctggtggccgggctggccggcagcgcgcaggccgcgccggaaactcagccggccgctaccgagagcgcctctgcgccggcaacgccggctccggcgagcgccgcgccgcagtcagtgacgccggtcaacccggcgccgaccgtccagccgccggaaacgcgcggcatggacttgtccgtctggggcatgtatcagcacgccgatgcggtggtgaaaaccgtaatgatcggcctggtgctggcatcgatcatcacctggaccattctgtttgccaaaggcagcgaactgacgcgcgccaagcgtcgcctgcgccgtgagcatcagcagctggccgaggcccgctcgctggatgaagccagccagatggcgcaaggcttccagccggagagcatcagcgccgtactgctgaatgacgcgcagaacgaactggagctgtcggcggaatccaacgacaacaacggcattaaagagcgcgccggcttccgctttgaacgccgggtggcggcctacgggcgtcagctgggcaaaggtaacggcttcctggccaccatcggtgcaatctcgccgtttgtcggcctgttcggcaccgtttggggcattatgaacagctttatcggcatcgcgcactcgcagaccaccaacctggcggtggtcgcaccgggcatcgcagaagcgctgctggctaccgcgctgggcctggttgccgccatcccggcggtggtgatttacaacatcttcgcccgcgtgatcggcggccaccgtgcgcaggttggcgacgtggcggcgcaggtgctgctgctgctgagccgtgacctggatctggcggcgacggcggaagccaaacgcgcacagcacgcacaccagctgcgggcggggtga

SEQ ID NO: 442428 - DNA, 819 bp, Serratia marcescens
atgccgcaacagattaataaagacacccagctgtgcatgtcgctggccggccgtcccggcaacttcggcacccgcttccacaattacctgtatcaggcgctggggctgaacttcatctacaaggcgttcaccaccaacgatattcaggcggcggtcggcggcgtacgcgcgctgggcatccgcggctgcgcggtatccatgccgttcaaagagagctgcatcccgttcctggatgagctggatccgtccgccacggccatcgattcggtcaacaccatcgtcaacgacggcggctttctgcgtgcctataacaccgactacattgccgtcgccaaactgctggcgcagcaccaggtgtcgccggacacctcgttcgccctgcgcggcagcggcggcatggccaaagcggtgaccgccgcgctgcgcgacgccggcctgcgtaacggacatattatcgcgcgtaatgagaccgccggccgggcgctggcgcagcaatacggttatgagtggcaagcagagatgggtagtctgcagccgcagatgctgattaacgtcacgccgatcggcatggcgggcggcgccgaagcgcagcagctggcttttgagccggattgtatcaccgccgccgagcgggtatttgacgtggtggcgctaccggcggaaacaccgctgattcgccacgcccgccagcagggtaaagcggtgattaccggcgcggaagtgattgcgctgcaggcgctggagcagtttgttctgtacaccggcgtgcggccgagcgatgaacaggtcgcccgcgcggcggcgcatgcgcgcggctga

SEQ ID NO: 442429 - DNA, 1410 bp, Serratia marcescens
atggacgcgttaagcctgatgaaacacaccgcactggcgctgatgcagggccagacgcgcgccgccgcggatccccaccgcccgcggtggcacctggcgcccagcgtcgggctgctcaacgaccccaacggctttatccagcacaacggcgtgtaccatctgttctatcagtggaacccgctggcctgcgaccacagccgcaaatgctggggccactggcagtcccgcgatctgctgcactggcagcaccagccggtggcgctgctgcccgacgcctgttacgacagccacggctgctactccggctcggcggtggcgacggacgacaagatcatgttggtctataccggcaatgtgaaattccccgacggttcgcgcaccgcctatcagtgcctggcgcaggaagatgagcgcggtgaataccgcaagctcggcccggtgctgccgctgcccgacggttacagcggccacgtgcgcgacccgaaggtctggcgccatgggcagcactggtacatggtgctgggcgcgcgcgatctgcaggatcgcggcaaggtgctgctgctgcgtgccgatgatttacgtcagtggacgctgctgggggagatcgccggctcccaactgaacggcctgggcgacttcggctatatgtgggagtgtccggatctgttccctcttgcccagcgcgacgtgctgatctgctgcccgcaggggctggcggcgcagcaggagcgctatctgaacgtctatcaggccggctacttcgtcggcgagctggattactcgacggcgcgcttcagccacggcgagtttcacgaactggacgccggcttcgagttttatgcgccgcaaaccacgctggcggcagacggccgccggctgctggtgggctggatgggcgtgccggatcaggacgaacaacaacagccgacgacgcgctacggctggctgcacaccatgacctgcctgcgcgagcttacgctgcgtgacggcaaactgtatcagcagccggtcgccgaactgcagcagctgcgcggggaactcagccgctggcagggtgcggctgacgatgcgccgccgctggcgattgacagcgccgaactgcggctaacgccgcacggcccgttccgcgccggcttcggcgacgccatgcagctgacgtgggacggcgagcgtttgacgctgacgcgcaataacctgcgcagcggcgcgccggaacaccgctactggcgcggcggactcagggaactgcaattgctgttcgaccgctccagcgtggagatttttatcaaccagggcgaagcggtgatgagctcgcgctacttccccggcgagcagccgatcctgcaactgcacggcgactcgccgctggcgctgcaatactggccgctgcggccatgcatgttagaataa

SEQ ID NO: 442430 - DNA, 1491 bp, Serratia marcescens
atgaaaaacctacgctatctggctgtaacgacaggattattcatcgccggcccggcgctggccgccaacgacagtattgaggcccgcctcaacgcactggagcagcgcctgcaacaggcggaactgcgggctacgcaggccgaaaaacgcgccgccgccgccgagcggcaagcccagcgcctggagcagcgcaccgaacatgccgagcggcaggcccggagcctggagcagcgcaccgaacacgccgagcggcaggcccggagcctggagcagcgcaccgcgcacgtcgagcagcaaagcacacagctggcgaagcgcagctccgcagtgcaggaggacgctacgccgccggccgccggcctccagctcacccatttcagcgatctgaaactgtacggcgatgtggagttcaatctcgacggcgccagccgcagcggccagctcacctcgctgaaaacccgcgacaacaaaaactggaagcccggcgatcacgaacgctgggatattaacggccgcattctggtcgggctggacggctaccgccgcaacccggacggccgcttctccggcttccgcgtccagccgctggcggatatgagcggcaaaatgaatctggacgacgccgcgttcttcttcggtaaagaacaggactggcaggccaaggtcggccgttttgaagcctacgatatgttcccgctcaaccaggacacctttatcgagtattccggcaacaccgccaacgatctgtacgccgacggcttcggctatatctacatgatgaaagaggggcgcggccgcagcagcagcggcggcaacctgatgctgagcaaatacgccggcgactggtatttcgagctcaacaccctggtggaagacggcacctcgctgttccaggaaaacagctatcacggcaacacgctggaaaacaaaaagaacgtcgcctatctgcgcccggtcatcgcctggaaaaaagatcgcttcagcgccgcgctggcgatggaaagtaacgtggtcaacaacgcctacggctaccagaacgcccgcggtcagtgggtcgaccagtccaagcgtaacggctacggcatgacgctcagctggaacagtctggcggacgacgccgaaaacggcatcgtcgccaacctcagcaccgcctatctggatgcggccggcgagcaggacttctccgccggcgccaacgtgctgtggcgccgcttcgagctgggctatatctacgcccataacaatatcaaagagttttccaccgacggcatgacggcgcagatcgacaacccgctcagcgaaccgggacgctatgacattcacaccattcatgcgtcgtaccaaatccccaacgtcatgaacatgccgaactttaatctgtatctcggcgcctatgcctccatgctggaggccgacgccgacaacaagatcgccaacggcgataacgacaaacgctacggcctgcgcgccagattcaaatactttttctga

SEQ ID NO: 442431 - DNA, 549 bp, Serratia marcescens
atgaaaaaatcagcattgcttggcgttatcgttgtcgctttatctacgtttatgccggcgcaggcagaacgtcacaccgtgatttttgattatgcgcgcgctcagcttgataatttcagcgacctagacggcattaatattaaatatcgttacgagtgggggtccgccctgagcctgatgaactctttcaccgcgctgggcggcgataaccacagcgtgaacggcggtaaaaccgagctgaattattatgcctacagcgtagggccggcctactacctaaaccgttatatagtgatgtacgggctggtggggctaagccacagcaatgtgaaaaactccgccgcctgggtggtggagcagagtaacggcggccggcgcggcagccgcggtgccagctccggctcggcctttgcttacggcgccggcctgctgtttacccccagagaaaatatcgtgctggacgtgggttatgaaggctcacagattgatatcggcggcctgaaccgtgacgtcaatctgtttaccgtcggcgttggctaccgtttctga

SEQ ID NO: 442432 - DNA, 2154 bp, Serratia marcescens
atgcccaccctttcgcgcagaaaactgttacaggcggcagccgttggctcggcattttcgctgctgccggcctcgattcgcaaagcgctggcgatccccgccaataaccgcaccggcagcattcaggatgtggagcacgtggtgattctgatgcaggaaaaccgcgccttcgaccactattttggtacgctgcccggcgtccgcggctttagcgaccgctttaccattccgctgccggacggccgcagcgtgtggcagcagcaagggacggagcggctggtgttgccttatcatctcgatgcacaacgcggcaacgcccagcgcgtcagcgggactccgcacacctggcctgacgcgcacgccgcctgggacagcggccggatgcgcacctggcccagccacaaaacgccaacgtcaatgggctattaccgcgagccggaactgccgtttcagttcgcgctggccaacgcctttacgctgtgcgatgcctatcactgctcaatgcacgccggcaccaaccctaaccggcttttcctgtggaccggcagcaacggccccggcccggataacagcgccgtcgtggtaaacgagtgggatcatcccggcagcgcagacaaaggctaccgctggaaaacctacccggaacgtctggaagaaagcggcgtcagttggaaggtctatcaatacctgccggataacttcggcgataacccgctggccggttttcgccagtaccgtgctgccagcatcaaggcaggcaatccggccaacccgccgaaagaattcacggattttgcgccgtacagtgaacaactcaatgctgtcgcaccgctgtataaaggcaatggcaacaccctgccggccggcggcagcggcgatctggaggcgatgctggccgggttccgcaacgacgtacagcaggacaaactgccgcaggtaagctggctgatcgcgccggcggcctactctgaacatcccgacccttccagcccggtacagggcggatggtttactcaggaagtgcttaatgcgttaaccgaacggccggaggtgtggagcaaaaccgtgctgttcgtcacctacgatgaaaacgacggctttttcgatcatatgccttccccgtcagcgccgtcgctgcgcagcgacggcagctttgccggcaaatccaccgtgccttttgaaacggaaatcttccagcacccggcgccgccgggcagcacggatcagccaccgccggatgccggcatttacggccccggcccgcgggtgccgatgctggtgctttcgccgtggagccgcggcggctgggtgaactctcaggccttcgaccacacctccgtgctgcaatttctggaaaaacgcttccaggtgcatgaacccaatatcagcgactggcgacgggcggtctgcggcgacctgacctcagcctttaactttatcgatcccaacaatgaaaaactgccggcgctgcacaccaccacccgccatgctgccgacgcgctgcgtctgcgacaagagaaactgccccaggtgccgctgcccgccgccgagcagcagcagcagccacaacaaaaacgccaggcccgcccgtcacgcgcgctgccctatcagctacaggtggaggcaagcggctatccccgccagcagttgctgacgctgaatatgatcaataacggcagtcagggggcggtgctccacgtttacgaccgacaacgtctggatgaaataccgcgccgctttaccatcgaggcgggcaaagcgctgagcgacgactggcacgctgcggaggattacgatctgtggttgctggggccgaatgggtttcaccgtgcgctgcgcggcaacctgcagcgttcacaggcggaggtgcgtctagaggcagtaccggagacagtgagcgtccgcctggtcttactcaaccccggaacacagccgcagaacgtgacgctggcgcgctgcccctatacccaccgggaagcgcagcatatctcgctgccggccggcgcaacgcgctcgctgtcgcttgacctcagccgcagcggcggttggtatgatattagcgtaacggatgaacaaggctggctacgccggctggccgggcggcttgagaatggccgacatagcatcagcgatccgctgatgggccagccctga

SEQ ID NO: 442433 - DNA, 2136 bp, Serratia marcescens
atggaatttttaaagaaccttcacttcggcttcggccgacggctgccggtgatccagcagtcgcaggcggccgaatgcggcctggcctgcgtcgcgatggtggtgaattactataaatacaacatcgacatgatcagcctgcgccgtcgcttctctacttcaatgaaaggcgccacgctggccgacgtgatgcgcgttgccggcagcctgggcatggccggccgcgcactgcgtctggagatcgaagagctggataagctgcgccgcccctgcattctgcactggaacctgaaccactttgtggtgctgaaaaaggtgaagaaaaacgccatcatcattcacgaccccgccagcggggtgcgcgtggtgtcaatgaaggaggtgtccaactgcttcaccggcgtggcgctggaactgttgccgtccgcatcgttcaagccggcggtggagaaacagtcgctgtcgatgttccgcctgatcggcagcgtcaccggcatcggcgccgcgttaacccagatattactgctgtccgtggcgctggaggtgttcggcgtgattacgccgttctatatgcagtgggtgatggatcaggtgctggtctccgacgaccgcgatctgctgacgctgctgagcgtcggctttattttcgtcttcctgttccaaaacctgatcaccgccctgcgctcctgggtgatgacctggttctccagcctgctgaacgtacagtggaccaccaacgtttgctcgcatctgctggggctgccgctgtcgtttttcgaatcgcgccacgtgggcgatatcatctcccgcttcggctcggtcagcaccattcaagagacgctgacgacgcgctttatcagctcggtgctggacggcatcatggcgatcgtcacgctcggcgtgttgttcacctataacagaatgctcaccgcggtggtggtgctgcagttcctgctgtatgccgccatccgctggattgcctatcgcccgtttcgcaacgccaacgaagaccacatcatcaccgccgccaaggcgcagtcgatcctgctggaatcggtgcgcggtgccaaaaccctgaagctgaataaccggcaggatatccgcgtcagcagctacgccaatgcgctggtagaaaccaccaacaagaatatcgtcgtgcagcgtctgagcatcggcttcagcaccatccacggcattatcgccagcatcggccgtatcgcgctggtctggctggccgcgctgcaggtgctggacggcaacttctccgccggtatgctgataggctttatgtcattcgccgaccagttcatctcacgcggctctggcctggtggacgcctggatcgattttcgcatgctgcggctgcacggcgaacgtctggcggatatcgtgctgaccgaacaggaaaaagatggccgtcacgaggcggaaggtcctggcaacgtctccccccagccaccgacgatcacgctggataacgtgtcgttccgctatgccgagaccgaaccgatgattctggatagctgctcgttcgaaatcggatcgggggaatcggtcgcgctgatcgggccgtccggccagggtaaaaccacgctggccaagctgctgctggggctgctccagccggtctccggccgtattctgatcgatggcgtcgatattcaggacgtcgggctgtaccaataccgcgaacgcatcggctgcgtgatgcaggatgacattctgtttgccggttcgatcgccgataatatctgtttcttcagtcaggaagccgatcaggaacgcatcgaacaggcggctaaaattgcgcaaatccatgatgatattatgaaaatgccgatgacctatcaaagtctggtcggcgacatgggttcatcgctgtccggcgggcaaaaccagcgcgtactgctggcgcgagcgctgtaccgtaatccgtcgatactggtgctggatgaggcctccagccacctggatgtagaaagggaaatgcgcatcaacgacgccatccgcaatatggcgatcacccgcatcatcatcgcccaccgtccggaaaccatccgcagcgccgggcgcatcgtgatgctgtctgacggtaaggcgcagccggtcaacccggaaacgctggcgccgttttaa

SEQ ID NO: 442434 - DNA, 1254 bp, Serratia marcescens
atgacacagtcactttttcgccaggaagcgctggatgccaataacaacaaggtcatggggaccgtttctctctattcaccgccataccgctggctggttatctccctggcgagctgcctggttaccctgatcgtcctgtttatcgtgttcggcagttacaccaagaaagagaccgcgataggcagcctgctgcccagcaaaggcatttacaacattaccgcgccggttgccggtaccatcaccgacatgcaggtggaaaaaggcagcgaggtcatccaacacagcgtattgatgaccatttcctcggagctgtccaccgccatggggcagacccgcctgttcgttcacgaccagctgacgctgcaaaatgaacggctgcagtctgaacgggagagcgaataccgcatgcatgccgaaaccatgggcggcctgaaaaaacagctgggctcgctggagtcgcaggtcgagctgttgcaaaagcagcaggccaagcgcaggcagcagttgaacctggccagcagccagatgcataagctgcagcagatgcgcaatcagggctttgcctctaaccagcaggtggatgaacagcagaacaccgtgctggaagtcggtgcccggctgcaggacgccgaccggctggtgatggatctggaacagaagattatcgccctgcgccagcagctgcgggagctgccgctcgccctctccaaacggcaaaatgaaatcgaccgcagtcaggcggaggtggatcgcgccctggcggagaacgagtcgcatcgcgccgtctatatcaaggcgacggaaaccggcaccatcggcgccacgctggtcaaacaggggcaggtggtcgccagcggccagccgctgctctacatcctgccgcaaggcagccggctgcaggccagaatcatggtcagtagccgcgccatcggctttatcaatccggggcaacaggtgatgttgcgctatgaagcctacccctatcaaaaattcggcgtccagcgcgggcgggtgctcgaagtgtcgaccgctgcgctctctccgcaggaagtgatggccatcaccggcgactcaaacgtgcacgagcggctgtatcaggtggtggtcgaactcgacaaacaatccatcaacctgtacggcaaggacgttgcgctgcgctcgggcatcaagctggaggcagattttttgattgagaagcgacggatcatcgagtgggtatttgagcctctctacgctttgggccaccgcttgtaa

SEQ ID NO: 442435 - DNA, 1398 bp, Serratia marcescens
atgaatatcttcggtgattacttaaatctatgcacggactgcacgattaacatggactacgatatgcatttaatcaaaggattgttccgccttaaaccgctgttattggcttccgctttattacccttcggcgtgagcgccaccaccctgctggaggccatccgcaacgccggcgccgtcaacccggaactgcaggcggcaatgtatcgccagctggcgggtaatgaaaaaagcagccagggcctggccggcctgctgccgactatccaactggacggcggctacaaccagcaggaccagcctaaagcaacctacgccgccaaagtctcgcgccataattacgccatctcgctcaatcagccgctgttcgacctgtccaaatatgccgactacctacgcggcaaggcaatagccgacagcgccgatattgagctgctgcgtgcgcaggaaacgctggcctatgacgtagcggacgcatatgccgccgtgctgtatcagaacgaggtttatcaggccgcgcgggcggccacgcaggtgtatgaaaacgagctgcagcagaccacgctggcggtatcgctgggcaacgccacccgcgtcgacgccgatgaagcgcaggctaaccgcgatctgttccgcgccaaggaaattgaggcgcacaataatctgagcgccgctgccaccaagtaccgacgactgaccggcctggagcacgacgccatcgccccgattagcgccgcctgcctgctgcagggcgcgcagacggggaaagagccggatctctaccagcacgcgctggcccgcaacagccagatccgcagcgcgcgcgcccagtgggaaatcgccaaaaccggcgtctatcaggcgcacagcgcccatatgccgacggtcaatttccaggcttcttacggcaccaactggagccgggccgaagacagcaacctgctcgacgagatgttcggcagtacctcaaaaaccaccaataccaacctcggtatctccgtctccgtgccgattttcagcggcggccggcagatgtcgcaatcacgagaggcggtctatacccgcgagcaggcgcgctacagcctgatcgatgcccagcagaaagtgaaggaagagctgcacaacgccctgttgaacgtgaccaacagccgctcgctggtgacctctacccagcggatgatccagtcggaacagagcaaaatccgctctaccgccaccggaaaaaaactgggactgcgcaccaaaatggatgaactgaacgcttaccaaagttactacgaagcggtaaaaaacaacgccgaggcgcgttacaaactgctgatggccaaggttgctcaggccagggcaaccggcgaactcggccataacgccatcgcgcagattagctgctcgcaataa

SEQ ID NO: 442436 - DNA, 570 bp, Serratia marcescens
atgttgaatataggaaataatcatttatccgcgctcgatccgctgttggtgaaaaaacagcgccggctgctgctggcgctctcgctgctgttgctggtggcggggctgttctgtttgttcagtcctttcgcgtctggtgcggcgctcagcgtggtgatgggggtcttcttgctgctgagcgggatcggcatgatcgtcggcatgattgttaaccgagcgcaaaatacctggccgatgatcggcggtattctattgggtattgcctatctgatcattggctacgtgtttatcaccagccctgccgtcggcatctttaccatggcggtttatctggcggcgctgtttgcattggggggcgtattccgcctgctggccggttatcagctgcgtgcgcttccgggcaacgggatccagtacgcgatcggcgtgttggatctggcgatcgcctggatgttgctgagcgccgatgcggccacctcggtggtgctggtgaccaccattgtcgggattgaaatgctgttcagcgcctttggcctgtttatggtcacccgccgtttcagcgccaggtga

SEQ ID NO: 442437 - DNA, 924 bp, Serratia marcescens
atggaattcaaggattattatgccattttgggcgttaagcctgaagacgatctcaaggcgataaaaacggcctatcgccgcctggcgcgcaaataccatcctgacgtcagcaaagagccggacgccgaggcaaagtttaagcaagttgccgaagcctatgaggtgctgaaggacgaagaaagccgcgcggaatacgatcgactgcgccagcaccgtaacgatccgcatttcggccggcaggcgcagcacaacgacaattacaacgcagaagacttctccgacatcttctcctcaatgttcggcgaacgtgcgcgcgcgcgtcagcagcgccagcaccatgccatgcgcggccagaatctggagattgaagtggcggtattcctggaggatatctttgccgaacagacacggactatcagctatcacgtgccggtatataacgtgtttggtctggtcgagcaggagatcccgaaaacgctcaacgtgaaaataccggccggggtcagggaaggggagcgcattcgcctgaaggggcagggatcgccggggatcgatggcggtgcgagcggcgatctctatctgatcgtacgtatcgcgccgcatccgcgctttgatatcgtcggcgacaatttggaaatcgtcttgccgctgtcgccgtgggaagccgcgttgggggccaaagtttccgtgccgaccgtccagcagcagattctgctgactattcccgccggcacgcagagcgggcagcgtctgcgcattaaaggcaaaggcctgccgggcaaaggacagacggcgagcggcgacctgtacgcggtggtgaaagtggtaatgccgccgaagccggacgcgcagagcgcagcgctgtggcagcagttggcggaagcgcagtcagatttcgatccgcgtaaagagtggggtaagtaa

SEQ ID NO: 442438 - DNA, 306 bp, Serratia marcescens
atgaccaaagtaaatatcacgtttacgctgacggagttttgtctgcacgccggcgtatcgcaggatgaactggtcgaaatcgtcgggctgggggtgatcgaaccttgtcagccggccgacgacgagtggctgtttgacgatggcgcgctggcggaatttcatcgcgcgcagcggctgcatcacgaactggcgctggactggccggggattgcggtggcgctgacgttgctggatgaagtcgaacagctgcgcagggagaatctgcagctgcggcagcggctggcgcgttttacggaaaatgtttga

SEQ ID NO: 442439 - DNA, 588 bp, Serratia marcescens
atgcatgcactgatcgtcgtttctcaccctttgcagcactccctgacgcacggcagcgccgccgccattgcccagggcatcaccgcggccgatccggcgcacaccgttgacatcgccgacctgacgcaggaaggcttcaacccgacgttttccgccgcggatatggcggcgtttcagcaaaccggcgccgtcccgcccgacgtgctcgccgaacaggcgcgtatcgaccgcgccgatgcgctggtactggtgttccccgtttactggtggtcgatgccgggcctgctgaaaggctggatcgatcgcgtatttaccaacggctgggcctatgacgacacctccggcgacaccgtggtgaagaaactgacgcacctgccggtgcatctggtggcgttgggggcggttaaccggcagacctttgtcaaacgcggctacgccgacgctttcaacacccagataggccacggtattttcgattattgcggcgcgccgctgctgacccgcgaagtactgctgatgccggaaatgggcagcccggaagcctgcctggaaagggcgcaggctatcggccgcgccattttccgctaa

SEQ ID NO: 442440 - DNA, 621 bp, Serratia marcescens
atggccacagagcctgcacgccggcgtctatcgcgggaagagcgtcacgcccagctgatagacgtggcatggcggattattcgtgaagaagggacggcagcgctgaccctcggtcatctggcgcaacaggccggcgtcaccaagccggtggtctacgaccattttaccaaccgttccggtttgttcgccatgttgtacaaagagttcgatcgccgtcagacggcgctgatggatgataatatctgccgggcggcaccgacgctggaaccgcgggcggcggtggtcgccgcgtcctatatcgagtgcgtcctgcagcaggggcgtgagatgcccagcgtgatggcggcgctgaccggcacgccggagctggcgcagatccggcaggaatacgccgccggctttacggaaaaatgccgtgcactgtttgccccattctgtgacggtcagccgctgcgcgacgcggcgctgcgggggatgctcggcgctgcggaagggttgtccgatgccgtggtgaacggcgtggtgagcgagcagcaggccaaagatgagctgtttcaggtgattatcgctatggtgcagcgttgctgcactctggctgagggaggtgagcgggatgaataa

SEQ ID NO: 442441 - DNA, 447 bp, Serratia marcescens
atgaataagtcgacaaaagctgcactggtgtggggaggtctgtgcgccatcctgctctatcgcaccttgccggcgggtgtgatgatgtcgtggcaggttttccggcagtatgacattccggtgatgcaactggtcgtcagtgtgctgatgccgctgctgcccgcgctggcgccgctgggctgctttctcgcattacgcacgacggcggcggagcgctggctggcggtggttatcctgccgatggtcgcctggctggccagccatgtgatactgattgtactgttctattttatcgccgtgaaaagcggcaacgtaccgccgtattccgaggggctgtcggccatgatgctgcgtatgctgaatatcggctggctgagcagcatgctggtcgtcgcgttgacgattgcagcctgcggctacgcgttctggcgtgaaagccggcgctaa

SEQ ID NO: 442442 - DNA, 780 bp, Serratia marcescens
atgtcgctactgcaaagctacgaagagttcgatcctgacaccaacaccagccaggcggtggcgctccacatctccgccacggaaacgcgtcgggctatgccgtttcatcatcaccgcaagggccagttgatcctgccgctgcgcggcggcctggtgtgcgaggtcgccaaagcctactggatggtgccgaccggccacgccgtctggatccctggcgggatggagcacagcaaccgggcaatgggcgatgtagatatttatctgctgttcgtcgagccaaactatcccggcatgccggacgagtgctgtacgctgcaaatcagcccgatgctgcgtgaaatcatcaaacacttcgccacactaccggcggactacgtcaccgacagccccaccggccgtctggcggcggtgatgatgcacgaactggcgcaaatgccggtcgggcatctgcatgtgccaatcagcggcaatgccaagatcaaacagctggcggatgaaatcatgctggcgcccggcagccgcagtacgctgcacgagtgggcgcagaagatggcgatgagcgaccgcagctttgagcggtttattcggcgggaaacgggcatgacgttcggcaagtggcgccatcagctgcagctgatggtcgccgtacggatgctggtactgggagaatcggtacagaacgtcgcttatgaactcggttacgactcccccaccgcctttatcaccatgtttaaaaaagcgttaggtaaaacgccggggcgttacctggtgcaggattag

SEQ ID NO: 442443 - DNA, 1278 bp, Serratia marcescens
atgctggaaatcaactcagcgaataacattatgaaattattatcctttcgtgtgaaaaagtcccatcttctgctagtgggcatactgctggtggccgccaacctgcgggcgcctttcaccagcctggcgccgttgctggacgccatccgcctcgatttttccctgagtgcggtacaggcgggcttgatacaaaccctgccgctgctggcattcgcgctgttttcgccgctggccggcagcattgccgttaagtatggcattgaacgggtgatttttgcggcgctgctgctgattgccgccggtatcggctaccgttcttacggcggtctgtttggcgtgtatggcggcacggtgctgatcggtctgggtatcgccatgggcaacgtattgctgcccagcctgttaaaacgcgactttccccagcgggtggcgagcatgaccgggctgtacgccctgattatgggggttggcgccgcgctgggttcggcggccgtggtgccgctgtcgcaggtaccggcgctgggctggaacggcgcattgttcgccatgctgctgttcccgctgttggcggtggtggtctggtttactcagctttcccacggcgcagcgcggctggcgcagagctgtggggagccgcagcagcggtccggcggggtatggcgtgccgcgctggcctggcaggtgacgctgttcctggggcttaactcgctgatttattatgtggtggtcgcctggctgccgtcgattttacgttatcagggcttcagcgctgaacaggcgggatcgctgcacggcgtcctgcagttggcgaccgccgtcccggggctgtttaccggtcatttgctggcgcggatgaaggaccagcgggcgattgccgtcacggtatcgctgctggccgctgccggtctgttggggctgctggcgctgcctgctttcgcaacgctgtgggtggtgttattcggtatcggtgccggcagcaccattattctggggctggcgtttatcggcctgcgttccggcacgccggcacaggccgcggcgctctccggtatggcgcagtgtgtcggttacctgctggccgtcggcgggccgcccggcgtcgggctgctgtatgacgccacccacagctggcatggcccgctgttgatctgcgcggcgctggcgctggtgatggcgctggtgggctacctggccgggcgcgatcgctgtttggcgcaggcagataccacggcaacggcgtcgttgaacgaaggctgtttatccgaagaggaaagataa

SEQ ID NO: 442444 - DNA, 387 bp, Serratia marcescens
atgaggaaatatgttttattgacgtgtgcactgttattaccgttttcttctctggcaatgtcttcggcttcttcattgcaaaaaaacaaggatgcggcggcggcttattgcgatgcgcaatttaccgtggtgaagagtgcctggtcggagaccaatgacgatgaaaatattgcacgctctatcgcccaactggaacagaaaggttatcagttagcggattttggtattgataaggaaacgtatacgcgtgacttgaaaacggccattgccggcgtacgtgataataagtccgcttatcataatcaacaggacgagtttaatcgtgcaatggtttctcagattgacgcctgtaaagtacaagcagaacatcgtttgaacagtaaataa

SEQ ID NO: 442445 - DNA, 633 bp, Serratia marcescens
atgaagaagatcttaatctttgatgagaacagttacttccggcaggccgtcagggaattattattagccaagggaaccatgccgcaatctattctggaagccggtaataaaaaagaactggaacatattctggcgacggccagcgtcgatacactgctgctctcaccagccagtagccaagcggatattcaggacagtttcatcctgatcagagagtgcctgaagcattgccgcaggctgagcatcgacctttggctgatggttgatcaagccactgatttctatcatcaattatgttgcagccacccgcactataaaggggttatcagcaaacggcagccgctggaacagctgagctactatattttcaatacgctgaaagaggaactgagctggaaatcaccacccagaggcacgctgtcttatcgcgaaagccaaatattactggatgtgctgtgtggtgattccagcaacaggctgacaacacgctacggcattcaatcaaaaaccatcagcgcgcataaacttaatgcgttagcaaaactggggctgaagaatatcagtgacattttcaaaagaatgaaaggcgttcaggaattgccggtaaaaggtgagctaatcggcgtatattaa

SEQ ID NO: 442446 - DNA, 954 bp, Serratia marcescens
atgccactgtttaatcttcgcgccgccgttgcgcacgccctgctgcttggcgccagctttactgccgccgctgccggttatgatgtgacctccctgaacgcaggatcttatgtgacgataaatacgacaggcagcgttaactctggccacatcgccaccttcaccatcgacaaatctaccgtaaccggtgatgtgtactgcggtgagcgcaatttgcccccttccctcgtcaaacaacggctgtttttcaatctgccgcaagacccggctaccgggcgttttaaaattaacagaaacctttccattgccgtaaaatctacggtaccgaccgacaaatggttaacaggcggcttagcaacaaactgtggtgaagatacatcaacggatgttctgcctgcagaatatctgaataacgccttccctatacagctggagttttatctggataaagcaaccattgacggtgtgataactattccatcaatggatttaggcggatactctcgtcggttcgacaccgtcgatccgggaaattacaagccggcaaaatattccattccaattcgccttcttggcgggaatattaccgtcccttcgcgttgcaatgcctatccaaacgcgatagaattagatcacgggatgttatcttcggatatcaccaccgacatagcatttaccgatcttacctatacctgttcaaccccggttaatacaacaataaccatcaaccaccaagaaaatgccaccggggatttaaatctcacacatactgatggcagcattggcgccgtcagtaaattgaccattagcgataccagcagcggattgcaggggaaagaaatctccacaaatatcgataccagtaaaacattccgtatcaccagtgaactgagcaacctcagcggtgaaggaacgataaaaggtactgcctggattatcgcctatctggattaa

SEQ ID NO: 442447 - DNA, 567 bp, Serratia marcescens
atgtcaggaaaggacaattctcgtatcaggcatccgctcgggtggtacggcatcgggctgcttttctggtgcgccggctgcctggcagacgtaccgatcacggtcaaagcgacactcgtcaaaccggcatgttacatcatggcaggcacaggggaatggacagacgggctgcatgacgacctgttagccgtcgatttcggtgaggtccccatcgccgatctgggcaccgccaatgcggcaaaaaacgtaaatttgtggtttggatgcgtcaaagacaacccgagcaaaacactaaatatttatgttaaaccaaccagttatggcgtactgccggcgctgggtggtcatgtactggcaacctcgaaggaaaatttgggcattgccatccttgtcgacagcagccccgtcacgctgaaccaatgggtgccggtttctttcctgccgggcgatggtattgcggacggcaaagtcattttgacggcgcagttggtcgctcagggcgataaaaatgaactggaaggtgggtattttcaggcctcggccaacgtcatcttgcactatttgtaa

SEQ ID NO: 442448 - DNA, 537 bp, Serratia marcescens
atgaaccggtatctgggaatatgtatcgcgctgttatctgctatcggttctatgggggacgcaatggcgaaaaacccaatcgatctgacattcagcggcacgctgctggagaaacagtgtatccacgactcggcggaggacgcgcatctcgtcgagctgccgctgctgtcggtcaaatatttccagcactacggccgcggcccggccacccgcttcgccctgcgcttcaaagattgcagcgccgcgacgctgaataagcaggtgcagatggtgtttcacagcccgcagaccgtgaatatcgacggcctgaccatgctcgccaccgacggcggcaccggtctggtgctggggctgaataatgccgatggccagccgatcgtgccggaagtgccgttcaaggcgggcgttattacccagacgggcatcggcagcaccaacgagctgttgtttgatgtctacccgcaggccgtcgatcgcaacgccgtcaaccccggggactacagcgccacggtgacgtttgaaatgagctatctgtga

SEQ ID NO: 442449 - DNA, 732 bp, Serratia marcescens
atgcaaacactgaacaaacaggttgccggcatcaccctgattctcggccttttatttaccacggctaacgcacaggccgccgtcgctctggacagaacccgggcggtgtttaacggcgatcaaaaggccatcagcctgaacatcagcaatgaaaacaaaaatctgccttacctggctcaggcctggctggaagatgagcagcagaaaaagatgaccaccggcgcgctggtgatgacgccgccggtacaaaggctggagccgggcgccaaaagtatgctgcgcatctccgccacgccattggcacagcaactgccgcaggaccgggagtcgctgttctatgtgaacctgcgtgaagtgccgccgcgcagcgataagcccaacgtgttgcagatcgcgctgcagtcgaagatcaaactgttctaccgcccgaaggggatcatcaccgcgccgaacgcggtctggcaggaaaaactggtgctgcacgccgaaagcggcggctaccgggttgaaaacccgacgccgtactacatcacggttatcggcctgggcagctctaaagaacagtccgtcaagggcgaattcaaatcggtgatgatcgcgccgaaaagcagcatcaaggtcgccggccagcactacgccacgccttatctgacctatatcaacgattacggcggccgccctacgctggcgttcagctgcagcgccgcgcagtgcacggtgaaaaacagttaa

SEQ ID NO: 442450 - DNA, 2517 bp, Serratia marcescens
atgtctcagcaacgttttatcatcagtcgcatagcatccgccatcattgccgttttggtaagttgggaagctaacgctgttgagtttaatacggacgtattagatctggaagatagagcgaatattgatttctcccgcttttcgcaggccggctatattatgcccggcgtttatcatatgacgctgcgaattaacggtgagagcgtcggttatgagggggatattccgttttatccacgcgattacgcaccatcagacggcaacgcctcccccgcacagcctgaagcctgtctgccgcaggaggttgtcgaccgcctgggattaacggacaaagcagcccaacagctggcccgctggcataacggccagtgcgtggatttcagcccgctgcccggagtggcgttaacgccaaacctcggcagcgcggcgctgaatatcaacgtccctcaggcgctgctggagtataccgacgcgtcctggctgccgccttcccgctgggatcacggcctgcccggttttctgctggattacaacatcaccggcacctttaccagcaaccgtcactcggggcgtcggcagaccctcagcgccaacggcacgctcggcatgaacctgggcgcctggcgcctgcgcggggattatcagggccgtttcagccgtagcagctcgcagcaaaaaagtcgtcataccctcgattttagccgcgtctatctgtatcggccgattcccagcctgagttcaacgctgaccatcggtgaaaactacgtcaactcgccgatgttcgattcctggcgctatgcgggcatcgccatggccagcgacgaacgtatgctgccgccacgactgcgtggctacgcgccggagatcattggcatcgccaaaaccaacgccaaagtgaccgttacgcagcaggatcgcgttatctatgaaaccaccgtcgcagccgggccgttccgcattcagaacctggacagcgctatccgcggcacgatggacgttaaagtcaccgagcaggacggcgaagagcacaccttcagcctctccaccgcggcggtgccttatctgacgcgtccgggccagctgcgctaccaggcgatcgtcggccgccccaccacctgggaacacgatctggaagggcagatgtttgcctcgggcgaagcctcctgggggctgtccaatatctggacgctgtacggcggctcaacgctctccgccgattatcaggcgctggcgctgggcagcgggcgcgatctgttcgggctcggcaccgtggccgtcgacgtcacccagtccgttgccaaggtgcgcgataacagtaagaaacaggggaagtcctggcgtctgagctactccaaattcttcgacgagatgaaagccgacgtcaccttcgccggctaccgcttctcggaaaagaactatatgagcatgcagcagtttctcgaccagcgccgtctcgattacgaccctaaccaccaaaaagagcgctaccagatcaacgtcaacaagagctttgacaacgtctctctggggctgaactacgagcatcagacctactgggatcgcggcagcaccaaacagtatggcgccaatatcggcaccacgtttgatctgccggcgctgaaaatgcgcagcgcttcgctgaccgccacggccatgcgcagtcaataccgcgggcaagatgagaacaggttcagcctgatgctgtcgctgccgatgggcaccggcaccgtcagctacaacagcagctataaccgggggcaatacgggcaccggatcggctattacgaccggctggggctggacagctacaacatcaacgccggcgtcgatcacggcggtaaccaggaatcacgcgcccaggtcagcggtatgtatacccataacggcgcgcgcagcaagctgagcgtcaacggtgcgatcgacggcgcgcagtaccgttcgctggggctcagcgccacgggcggcatcaccgccacgccgcgcggcgtagcgatgcacgccggcggcaacaacggcagcacccggctgatggtggataccgacggcatcggcggcgtaccggtcaacggcggccgcgtggtcagcaactcctgggggatcggcgtggtgaccgacgtcaacagttactaccgcaccaccacccgcatcgatgtcagcacgcttgctgacgatgtcgaagcgaagaaaagcgtggtggaaaccgcgctgaccgacggcgccatcggctaccagcgctttggcctgctgcaaggcagcaaggcgttcgccaccttccggctggcagacggcggttcgccgccatttggcgccgtggtgcgcaatagcaaaaaccaggaagtcggcattgtcggtgacgcgggcatcgcctggctgagcggcattacgccgaaagagacgctgagcctggtctggaacgacagcgtccagtgtctggcggttctgccgtctgccattaacgaacaaaacctgttgctgccctgtcggcggactgccgccgctggcgctgtaaccaaataa

SEQ ID NO: 442451 - DNA, 519 bp, Serratia marcescens
atgcaacgctggctgggaagttttgtactgttgctcgccgcatccaacggttatgccgatgtgttggcgctaagccggcaggatgacggttacctcctgccgctgcgcgggcgggcaacgctcagcggtaccgtattggctgcaggatgcaccattgcattggataccccatcccaatcgctggatttagacccgcgcccattagacaaccgccaacgatcgttaatttatcatttatctattcgtttcgatcattgtgcgctcccgggacaaaacagtgggtacggtgaagataaagcaatcaaaatcaacttcaaaaacaaatcagcatcagggaatatttttattattaaagatgcggacaataaaacgctaaaaagcggggaagatcacccgatcaattatcgcaaagcggagcaaaacagtgcccatccggcaaccgcagattaccgcgtagaactgacgccgaaagcgccaccctattacgccatattggggctgaacatgcgctacgaataa

SEQ ID NO: 442452 - DNA, 534 bp, Serratia marcescens
atgaaattatcacacgtctctctggctgctctgatggctgcagcaaccctgtctttcggcgcaaacgctgcttcttacgaaggtaactccggtaaagttacgttccacggccaggtcgttgatgccccatgtaacctggcaccaggccaggacggtatggacgttaaggttgatttcggccagctgtctcagtctcagctgaacaaaaacgtaactaccgctcagacttttgaactcaaactgcagaactgcggcctggcgaacgatgacggttccaagaaaaccgctgaaattaccttcaacagtgccgaccagatcgccggtaaaaacctgctgaaaaccaacggtctggctaccggtctggccatcggtatcaacaacattaccctcggcaccccagcggctatcgccggcctggttgacggcgacaacaccctggtttacaccgcggttgctcagaaagctgacatcgccactgacgttaccccgggtgacttcagcgcatcaaccaacttcctgattagctacaaataa

SEQ ID NO: 442453 - DNA, 1029 bp, Serratia marcescens
gtgaacactatgcgacgttgggaaatgaacggcttcgggcgccagtcactgacgctgcagacggcggcagtgccccgccctgcagacgacgaggtgctggtgcaggtgatgtcggtcgccctgaatcaccgcgataattgggtgatcgacagcggacgcggcttaccactgcgctttccgtttactcccggctccgacctttcggggtgcgtggtggcggccggcagccaggtcagccgcttcgcgccgggggatgaggtcatctcagtctttgccccggagtggctcgacggcgctcgccccggcaacgcgcgcgagctggcttaccgcactctgggcggcttttaccccggcgtactggcggaatatgtggcgatgaaagcagactggctggtggctaaacccgcctcgctcagccacgctgccgccagcacgctgccctgcgcggcgctgaccgcctggtttgccctggtggagcgcggcaacctgcagccgggagacagcgtgctgattgaaggcagcggcggcgtagcgctgtttggtctgcaaatcgccaacatgctgggcgccaaaacccttgtcgccaccagcgccggcaaaatggcggcggtaaaacagctgggagccgatgcggttatcgatcgtaacgcgcagggcatggtcgacgccgtcctgcaactgaccgccgatcggggagtcgatcacattcttgagctggcgggcggcgcgcacctgggacaggcggcggcgatgtgcgccatcggcggaaaaatccatctgatcggcgcgctggaaggctttaccgtgtcgtcgccgctggagccgattctgtttaaggatctggcgatttacggcatcggcaccggccatcgccgggcgttgagcgaaatgtgcgccgccttcgacgccaacggcctcacgccggttatcgacagcgtgtacccgctggaagcattgcctctggcgctggcgcgtgtggaaagcggcgccttcggtaaagtagtgataaacattggtgaggtggcgtag

SEQ ID NO: 442454 - DNA, 915 bp, Serratia marcescens
atgaaaggggccgattacgctgaactggccgtctttatggcggtggctaaagagaggagtttccgtcgggcggcacagcggctggggctgtcgccgtcggcggcgagccatgcgatccgcgcgttggaacagcggctgcacgtcaggctgtttaaccgcaccacgcgcagcgtcgcgctgacggaggccggttcacggctgatggcgcagctggagccggcgatggcggcgctggagagtgcggtgcagggggcgggagagacgcagctgacgccgcgcggtacgctgcgcatcagtatgccgcgtctggccgggcatctggcgatcgtgccggcgattgaacgctttatggcgcgctatccggatatccggctggagatgctgttggatgacaacctgcaggatattgtcgctgcggggttcgatgccggcatccgtgcgggcgaccgggtgccgagggatatgatcgcggtcaggctgacggcggatctgcagatggtggtggtggccgcgccgggctgttttcagacccagccgccgccggcgacgccggaggagattgcccgccaccgctgcatcaactaccgctggagcggcaacggcgctcagtatcgctggcgtctcagccgcgccggcgagcacgtcgaggtggacattgaccccgccctgacggccaacgatatcgatctgctgctggctgccgccgagcagggcgcggggctggcgttattggaggcgcagtgcgtggcgccggcgctgcaccggggcacgctggtgcgggtactgccgcagtggtgtaaaccggtcgcggggtttcacctgtactacccgcgtaatgggtttatgacgccgcagatgcgggcgtttgttgattttatgcggctggatacggccgcagaaacgcggcaagagtaa

SEQ ID NO: 442455 - DNA, 204 bp, Serratia marcescens
atgagaacgataatcagcgtagcgctcgcaatgggtttacgcggcggttcactgccggtctgtgccgcgcagacgctggagcagcaacggcagctgaaaattatcagctataacgcctactgggggatgaagtccgacacctcgaaggggaaacagaagtttgccgaatgggccaggcagcaggatgccgatattatcgcctga

SEQ ID NO: 442456 - DNA, 312 bp, Serratia marcescens
atgaaccactttacccgcgagacgctggaagccttcgcccagagctacgggcaccgctatgcggtgctgctgaaagagccgaaggtggcgggcgacgataaatttttcccgacggcgatcaccgccaaatacccgatcgtcaacgtacgcaaggtggtggataacctctggcacggcgcgctgtttgctgatgtgggtcactatcacttagtggtcacccatatgaacccgttccgcacctcacagcggattgatgagatgaacctgattctggataccatcaaatacggtgcggacccgaacggaaagtag

SEQ ID NO: 442457 - DNA, 1002 bp, Serratia marcescens
atgatatatctgtcatttactatttggtatgtgaatgaaaatcattgttttgatatggattttatattattcgtcagcggcaatatgcttgctgtctcagggtttgtcgttaaatttattaagggcaaggtaatgaaaatgaacgatcttacattaagtgatttagaagataagatccttggcgttattcatcgtgaagttaatcactatacgccgaaaataccggcattttatctcgaaggcggccattacgatccccgctaccctgttaatgagttcgcaaaaaaatcattgcatcatgctttagatatcgccagtaatgcgatcgtcaatcataaaaagaatttgaagatctctcttggtattttaatcgacgaccttgggctgcaatgcggcgccgagtcatgtgaaatactcccgacgcagttaaataatacggatgatgcggaggaaagcggggagttacccaaggaattggacgctattttggcgcagtctaaaatcgtcaagcgggaacggatgatgatacagggtgaaagaacctgtaaaaaccgcggcatacagacgctaaggcgtattctcgatcttcatcgaaccacgccgttgcctgaactggagatagaagaggcggaatcgctgacgaaaatcttttttgttaatcaggaagggcagcgcgtactgcttgccgagtcgaaatcaaaagacgtatggacggcaaagtgcccggtgatcatggcccagcactacagcgacgtttatgaccgcgtggcaaaactgcatccgcaggcccacgcgctgcatattatcgatttttcggaaaccgatgactacaacaaagtgatcaacggcgcagacgtggcgatgaagctgtttctgcgtaatgagcgcatcggcgacagagcggtgaaaattaccaacatcttcctttcatcgtttgatgacgacgattacatcatccactcgacgtctcactgcgccgaacggctggcggcagaagcgtga

SEQ ID NO: 442458 - DNA, 1191 bp, Serratia marcescens
atgtctgtaaacaaaccacacccacagaatatgccgctgtatctcgattacaacgcgaccacgccctgcgatgagttagtcctggctgaaatgctgccgtttttttgtcatcactttggcaacgccgccagtatttccagccagcaggggtttaaagcgcacttggcggtcgagcgcagccgtgagcagattgcgaaattgcttcatgcgcgggcgaacgagattatttttacctccggcgccaccgaaagtaataatctggggctgcgcggcgcgtatgcggcctgcaaatcccgtggcaatcatattatttcctcctcgatagaacatcctgcaacgctggcaaccctgaaggatctggagcgtgaaggtgcccgggtgtctttaatcaagcctttgcaggatggccgtttcgacctcgctgcgctcgaggcattgattacgccggaaaccatcctgatcggcgtgatgtacgccaataatgagctgggggtaattaacccgatagcagacattgccaccatcgccgaacggcacaacattctctttatgtcagatgcgacgcaggccgcgggcaaaatcccgatcgatgtgcagcagtgcccgatcgatattcttacctgttccgcgcacaagatatacgggccgaaagggatcggcgcgttatatctgcggcggaaaaatggcaaaaaaattgtcgaccttcatccgcagattaccggcggcaatagcgagcagggtattcggggcggcacgctgaatgtgccgggcatcgtcgggtttggcaaggcggcggaactggcggccgagcgtctgccgcaggcgatggcaaaggcgcagtcccagcgtgaccggctggaaagggcgctggcgcagtgggagaacgtccagataaacgggggaagctctccccgtctgccccacgtctcgaatatctctttcaaacaggtggacggtgccaggctgcttaatcttctgaaaaagagcgtttcggtcagtaccggatcggcctgttcatccagcagcctgtcacccagccatgtgctgaccgcgctggggctgtcagaagagctggctcaggctaccctgcgcttcagtctgggctggccgaccagggacgaagatatcgacgtcgctctggcggcggttaatcaggcgctgcgcatgctgtcgtcagcctatgccgattaa

SEQ ID NO: 442459 - DNA, 1344 bp, Serratia marcescens
atgaatgagatattaagccaacccgcgaatattgacgatgtcgccggcgggcaggggctgtgcgaagcgtccgccgggcgcctgtcgcgtctggcgctggagctggactattccggcattatcaagctggcgtcctatgtgcagcggcagattgacgacggccggccgatctgcgacctgattatcggcgattttgaccccgcgcgcttcccgctgcccggcgtcttgcgtcaggccatttatcaggcctacgcggataatcagcatgattacccgccgttagaaggcgtactgccgctgcgtgaggcgatcgccggcctgaccaaacgctgtttccaggtcgattatgatcccgacagtgaaattattatttccggcggcgcgcgtcctttactgtatctggcgctgttggcggtggccgatcccggcgacacggtgatttatcccgcgccctcctggaacaatatgtactatgcgaccctgtgcggcgctcggggcgtggcggtggaaaccacggcggaaaatcagttcctgccgacggcgcaggattttgcgccccatatacaggatgcgcgggcgatcgccctgtgttcgccgcaaaacccggtggggacgatgttctcccggcaggtgctggaggagatttgcgatctggtggtggcggaaaaccgacggcgccgcggccggcagaagccgctgtacatggtgtttgaccaggtctactggatgctgacctatcaggcgttgccgcattatcagccggcgcagctcaggcccgagttaaaagagtatacgatcgtggtcgacggcggttccaaggccttcgccgcgacggggctgcgcgtggggtggggaatggggccggcggacgtcattgataaaatgaaattaatgattgagcatatcggcgctattgcaccaaaggcggaacaattggccatggcggcattgttgcataatcacgcgctgttgcaggatcacctggcaacgtttaaaccccggatatttaactctctgcagttactgcatggcggcatgcaacggatgaaagaggaagggctgccggtagacgctatggcgccgatggggggcatttatctgtcgatgcagtttaatctggcgggccgggttacgcctgcaggtcaggtactgcgcacgcccgaggatgtgagccggtatcttatcgaccatgcgggcctggcggttgtgccttttagctattttggcatgacgcgcgccgaatggtggttcagggctgcagtatgcgccgtgctgccggaacagatagaaaacgctttgcccagagtcagagatgctattattgccttgagaaacgcgcagtag

SEQ ID NO: 442460 - DNA, 240 bp, Serratia marcescens
atggagatcaacttacgcaaggagccatttatgaatcatctacagctgcatattccgacgatgaagtgcggcggctgcgccgcctcgatcgccaaaaccgtcaaagcgcgggatccgcaggcgcaggtcgatgccgatccggcgacgaagcgggtgatcattgcaagccgcgttgacgacgccgaactgatggccgagctggccgcggccggtttccacgccagcgtcgagtctgactga

SEQ ID NO: 442461 - DNA, 2487 bp, Serratia marcescens
atgaacacgcattcgacggcatcccagtctaaagcgtcaacggcaatcaatttccccgtcgtaggcatgacctgcgcctcgtgcgtggggcgcgtggaacgcgcgctcaaagcggtgcccggcgttgccgatgccagcgtcaatctggccaccgaacgcgcattcgtcacctttaacggcgcgcccgatgtggcggcggcggtcaaggcggttaatgacgcgggctacacggtggagctggaaaccatcaacctgtcggtgaccggcatgacctgcgcatcgtgtgtaggcagggttgaacgcgcgctggctgcggtagacggcgtggagcaggccacggtcaatctggcgaccgaacgggcgcaggtgcaggtggccgccggggtgaatcccgacgacctgatcgccgccgtcgcgcaggcgggttacgaggcgcagacgatcgccgccgataagagcgataccgccgatcaggcggtgcgtcaggcggcagaactgcgctcgctgaaaaaggcgttgctggtggccgtctgtttcgcgctgccggttttcatcctggagatgggttcgcatctggtgccgggcatgcatgccctgatcgaccgcaccatcggcacgcagaacagttggtacctgcagtttgtgctgaccacgatcgtgctgttcggccccggcttacgtttcttccagaagggtattccggccctgctgcgcggtgcgcccgacatgaactcgctggtggcgaccggggtcagcgccgcttacggttattcgctggtggctacctttgcgccgcagtggctgccggccggcacggtcaacgtctactacgaagctgcggcggtgatcgtcgcgctgattttactcgggcgctactttgaagcccgcgccaagggcaatacctcggaggcgattaaacggctgatcggcctgcaggccaaaaccgcccgcgtgctgcgtgacggtaaggcggcggaggtggatatcgctgaggtcaaacgtgaggacattattgaagtccgtcccggcgagcgcatcccggtggatggcgaagtgctggagggcgaaagctttgtcgacgagtcgatgatcagcggcgaaccggtgccggtagagaaaaaaagcggcgccgaagtggtcggcggcaccgtcaaccagaatggctcgctgacgtttaaggcgaccaaagtcggcagcgacaccatgctggcgcagattatccgcatggtagagcaggcgcagggcgccaagctgccgatccaggcgctggtggatcgcatcaccatgtggtttgtgccggcggtgatgaccgtggcgctgctgacgtttctggtctggctgttcttcgggccgtcgccggcgctgtcgtttgcgctggtgaatgcggtggtggtgctgattattgcctgtccgtgcgccatggggctggcgacgccgacctccattatggtgggcaccgggcgtgccgcacagctgggcgtgctgttccgcaaaggggaagcgctgcagtcgctgcgggatgcggccgtggtggcggtagataaaaccggcaccctcaccaaagggcgcccggagctgaccgatctggtgctggcgaacggctttgagcgcgcacaggtgctggggctggtggcgaccgtggaaaacaaatcggaacaccctatcgcccgcgccattgtcgatgccgcacagcaggaaaatgtgccgctgtcgaccattacgcgctttgagtcggtcaccggttttggcgtgaacgccgatatcgagggaatgaccgtcgcggtgggcgcggatcgctatatgcagcagctggggctggacgtggcgcagatggcggaagaggccgcgcggctgggcgatgagggcaaaacgccgctgtatgtcgccatcgatggccggctggcggcgatgatcgcggtggctgacccgatcaaagacaccaccctgccggcgattaaggcgctgcacgagctggggctgaaggtggcaatgatcaccggcgacaaccgccgcaccgcgcaggcgattgcgcgtcagctggggattgatgaagtggtggccgaggtgctgccggacggcaaagtcgcggccattgagcgccttgccgccgagtatgggccggtggcctacgtcggcgacggcatcaacgatgcgccggcgctggccgccgcgcacgtgggcatcgccatcggcaccgggacggatatcgccatcgaggctgccgacgtggtgctgatgtccggcgatttgggcggcgtctccagcgcgattgcactgtcgaaagccacgctggtgaatatcaaacagaacctgttctgggcctttgcctataacgtggcgttgattccggtggcggcgggcatactgtatccgctgaacggcaccctgctgtcgccggtatttgccgccagcgccatggcgttatccagcgtgttcgtggtgagcaacgcgctgcggctgcgccgctttacgccgccgctcaggtag

SEQ ID NO: 442462 - DNA, 1461 bp, Serratia marcescens
ttgcagcgttttttccactggctcgatccctcgctgacggcaacggagtctttatcatccatcgcgcttaatcgcattcacgatgcgatttacctgctcgatcaggatttaaccgtaaaatacgtcaatgaacgtgcctgcaatctgatgggatatagcaaaaaggcgctgctcagcagcaactttgccgccatcgcccccgaactggcggataaagacgtcgccgcgctgtggtggaaactgacgatgcgcccggagggcatcacctttacctcccagcaccggcatcgcaacggcgaaatcatcgccgtccaggtcagttccagccgctatcagcacggcggccgcccgcatgcgctgtgcatcgtcagcgatgtccgcgaactgaagaagaaggaggcgatacagcacctgcgggagaagcagttccgcgcgctggtcgagaactcgccggatatggtggcgcgcttcgatctctccttccgctgtatttacgtcaatccgcgcgtgctgacgtggtttaaccgcacggagagccagatttccggctggcagctgaccgaaagcgtgccgcaccacaacgccggcatggagctgctgcgcctgatcgcccacaccatgagcagctccaccccgaccgacggggaaatcgcgttagagcatcagaatcagcaacgcgtgctgcacgtgcgcagcgtgccggagtttaatctggagggcgaactggagagcgtgctggccatcggccgcgatatcaccggcatccggctggcggagaaagagctgcgcgacgcacaccagcagctgcgcctgctggcgcgcaatcaggaggcgcggcgcgaggcggaacgcaaatatctggccagcgaaatccatgacgaactgggccagcacctgacctcgctgcgggtcgggctgtcgctgatccgcatgcagtcgccggaaaataacgccgccgtgcatctgcaggtggaaaatctgatgcgtctggtggacagcaccattcaggtggtgcgcgacgtctccacccgcctgcggccgaatatgctcaatatgggcctgctgccggcgctggagtggctgcgcgatgagtttaaccgccagcagaagtgccgctgcattctgatcgccaccacggagaaaaaactgcagctggatgaccccagcaccaccgccgccttccgcgtggtgcaggagtcgctgaccaacgtcacccgccacgccagggccagcagcgtctatatctttgtgcgccagcgcggcgaaaagctggagatcgaagtggtggacaacggccgcggcttcgatcaacagcgcgtgcgctccaacgcctgggggctgccgggcatgaaagagcgtgcggaaatgctgcagggctggctgaccatcgacagcaaaccgggcgaaggcacccgcgtacggctcaacttcccgctcaaccgacaaaattttaatgaataa

SEQ ID NO: 442463 - DNA, 573 bp, Serratia marcescens
atgatgaattcattcactgcaaacgcaataccaaccagcgccatggatataccggtggactgggaaggtattttcaaacaatcgaacaaaaagctgattaatttcattcgaaggagagtcgccagcacggaggatgtggaagacatcgcgcaaatgacctgcctggaggtgttgcgtaaccggcataaatttaccggcgcctcgctgcccgaaacctggatgttcggcatcgccattaatctgatccgtaaccactacaagcgtcagcaaaaccgttatctgtttgatacgctgaacgacgaggtgctggaaaacctgctgcacgacgacgatccgagcgaactgaccgaacaacagcggctgctcaacctgaccctgacgtcaattgacaggctgccggaggagattaaacgcatgctgacgattttgatcggcgacgacggcagctatcaggatatcgccatgcagatgaacatcccgatcggcaccgtgcgttcgcgcctgtcgcgcgccagagaaacgctgaaaacccaggtattccaccgatcgccgccgatacgtcagggaaaatag

SEQ ID NO: 442464 - DNA, 1131 bp, Serratia marcescens
atgttgaaatcctccagcctggcctttacgccgaacccgctgcgcgccctgctgaagcagggagaggtcggacagaataaaaacagcggcagggccgccggtcatgtcgctgcgggcgcggccagcgccgacgatatcaaagaagaagccgggctgatgtttggcgaaaaggcggaaagtaaaaagaaggcggaccagcgccggcagaaccagcatcacgtgcgtcaccgccatctgctgaacaaggtcgagctgcataaaatgtacgcgatgctcgatgcgcgcgatgcgggacgccagcaggcgtcgctgcagcggctgcgcgacgccttaaagcgcaaggcggaaaccgacgatctgcttgccatgctggacgacgatccggcgcgctgtgacctgctgctgcgggtgatggagcgcgaggcgcgcagcgacggcgatgaggagctgcgacagacggtggagcagcatctggaggcgctggaacaacaccacggcgaacggctgcgggccgggctgaataccgcctggtcgatcgccgaactgaccgataatccgcagcataaacagagcctgcgcaatatttactatgacagcatcgtgcatcagcagtcggcgatggcgatggtggatctgctgctgagccatttcgaaccgcaggatttcagcatcgggctgcgcacgctgcagcgcgcgctggccgacgatatcgccgcgctggcctcgtcaatcggcgccggggcgctgcgccacattcagaccgggctgttcgaggccggacaggtcaatcacaccctggaagagagccggacgctgctggatcggatggcgggcaaaatggcgctgggcgatatggaccatgtggaactggcgcggcgtctgctgcatatctgccacaacggcgcttttcagcaggacttcagccagctcggacacgaggtggtgaccgatgcgctgccgcgcaacctctccattttctttaacggcgtgctgccgctggtgcgcgatctgccgataggactgtggaagatcaaggacggtcggcagacggcgctgacgctgctggcgaatcacaacacggaactgctgaagaatgagcgccggcaggccaggcgcgaagcgaagccgtaa

SEQ ID NO: 442465 - DNA, 852 bp, Serratia marcescens
atgtttgagctgcgcgtactgtccggctaccactgtggcgccgccttgcctctcagcggcgcgtcgtggcgcatcggcggcgatccgcaggccgatctgcgcctcgacggcgtggatctggccggcctgagttacctcctgagccgtgatgatgagcagtggcggctggctgcggagccggcgtcgcaggagagccggacgctggaggcggatacgccgttccaactggccgatgtctggctgtgcgtggcccgcgccgaaacgccgtggcatgaggcggcggcgctgcccgccccgccggaggaaaactccgcgccaccgccggtggctcgtcgccgcctgtccggcgcgatgcgcgggctggtgctggggctgttcctgctgctgagcatcacggtcgccagctggatcctgcagccgacgatggcgcagacctccgccggcgaggggcgcaccgccagttggaacagcgtggaggaactgcgcgcgccgctgcagcaacagctgcgcgaacgcgaactgctcaaacaagtccgcatcagcaagcagggcgacggtctgctgctgagcggcgaattaagcaagccgcagatggcggtgttcgaacgcatgatggcgcgcttttatgcgcactacggcgcggcggcgccggtgaaaaccgcggtgcggccgcaggagaaaaaactgccgttccgcatcgtgcagatcaccaccggccagcgggccaatatcgtcaccgaagacggccagcgggtgtttatcggcgatgaggtcgccggcctgcggctggcggcgatcaccgacgatcggatcgaattcagcggccgcgatccgctgacggtgaaatggtga

SEQ ID NO: 442466 - DNA, 462 bp, Serratia marcescens
atgcgccagaacaggaacagtgatcactcgccgccgccggacgacggcgatcgggagcttggccaggcgctggaactgatgctgccgatccgccgccagcgtttgcagcgcagcgagcgccggcagcgtcgggaagagcagcagctcagcgcctgccggcggcagctgcagcagacgcagcaccaactggaagccacgcggcaggattatcagcagcggcgggcgcagttcgaccagcgttatttaggcaggcagccgctggagcgtctgcagcacggccttgaggacgaacgcagcgcggcggcgtcggtggacgccggccggcagcagctgctggcagaccagcggcgcagtgacgagcagcagcagaaattgcaggcggcgcaggccgagacgcgccgtcgccagcgcgagctggagaaactggagtgtctgctgcgggaagaggggggcgcgccatga

SEQ ID NO: 442467 - DNA, 687 bp, Serratia marcescens
atgatttccccgacgcagcatgaacaccgtgcttcagcccgcgtacgcgaaaaagagcgggagcgcgaaccgcagcggccggcggcgcagcggcggcaggatgcggcggcacgccagccgcacgagcacgggccggcccatgatgtgcatcatccgctgcgcaaggcgcgtccgggggcgaagaacgtggccgagcgcggccgcgccacggcggaacggccggtgagcggcgggctgccggcggccaggcgcgatgaagagaattccgcgccgacgccggacggcaacctgttcagcatgctgatggaacacgatacgccggcatttcccggcgcgctgcacgttgcgccgcacgccgccgccaccccgcatgctgcggcgacgccggaaagcgctgcctctggcgcgccgatggcgctgtggcagccgctggagaatgaactggaccgggcgttggtcaatccgccggccggcccggtctccgtcacgctgctcttgccgcgcttgggggatgtggacgcccgtttgcaggcgctgccggcgggcggctgggacatcgcgctgcgctttgcgccggcggcgctggaggcgctggcggcccatgaggagcgctgccgccactcgctgcgccgccgtctggcgtgccgggtgcgcctgcgctttgagcagcgggggtatcagccatga

SEQ ID NO: 442468 - DNA, 1053 bp, Serratia marcescens
atgagcacgccgctgaagctgcggcggcagagcgccgccgaggctcggctacgcggccttctcggccacgggctgcgcctggcttttcagttgggcgagagcgtcggcgaactgcgtattgagccggccgccggcgagcggcaggcggcggaaacggcgctgcgctgtatggccggcccgctgtggctgagcgacgctgaaggcgtctgcgcgctgctgtccgactgcccggcactaccaaccgccagcgacgaggacgacctctggtactggccgctgttcaatcacgcgctgagcgcgcaaatccgtgcgctgttcggtgaactgaacgccgccgacggcgcaccgcccgccggtgcgtttggcgtacggctgacggtgacgctgggcgacctgcgggcgcagagcgcgctgacggcggcgcccgaggtgttgtgcgccctgctggcggcgccgggctggcagggcatcgtcaacgacgccctgacggcgctgccgctgaccttaccgttttgcgtcggtgcgctgacgctttccctcgcggaactgacgcgcctgcagccggacgatgtgctgctgccgcgcgaggacacattcaccccgcacggtgcggggacgctgcgctttgcgcacttccgggcccagggcgaactggttggcgcggaagggcgaagcactggtttttatcttaccgatctggagacaacatccgtgacatttccctacaacgacaacgagacagaaagcgacgtacaggacgagagcggcatggaacggcgtattgatgcggagccggccggcgtgacgctcgaccccctgccgctggcgctgaccgtgcgctgtgggcatctgcatctgaccgtgggcgatctgcagcgtctggcgcccggcgccaccattatggtggatcacgtccagcccggcgaagcgctgctgtgtcacggcgactacccgctggcgaaaggcgaactggtggatgtggaggggcggctggggctgcagattacccatatgctgccgggcagcgtcaatccgctggggcaggggcactaa

SEQ ID NO: 442469 - DNA, 423 bp, Serratia marcescens
gtggaaacgcactacatacaaaaactgctggcccgctacggcgcgagcctgcacaccgaactgcacatggaaaacggcgtctgcgccctgcaggatgagcgcggccgggagctggcggtattggaactgccgccgccgggcgagatgctgatgctgcactgcctgattctgcccgccgatccggcctggcaaacgccggccatgctgcagacgctgctgacgatgaactttgagatcggcgcgatggacggctgctggctggcgctggatcaagagcgtaacctgcgcctgtgcggccgcagcgcgctgagccagctggatcacgccggttttgccctgctgctcaacggttttatcgaacgcggccaccaggtgcgcgactttataccggatctgctggaacgcctgcgccccgtcgcctga

SEQ ID NO: 442470 - DNA, 4980 bp, Serratia marcescens
atgacgacgtcaatcagcagcagcatcggcgctttattcaatcgggtgcggcggacgggcgacgagaacgccgcccgcagcggcggcaacaccgtccgcggcagcaccgcgccgtcaacgcagcgcgcgcccctgtcttcaccatcccgccctccggccggcctgcgccagcgccagaacgccgcgccgcagctccctcaactctcccgtgagtccggcaactgggcggtgcagctcaacggtcggctcggcggcatcgacggcgccagtgaagaaccgccggccgtcacgccggaggagcagacgacgctggcgcaaaagcaggcgcagcgccggcgtctggagcgcagcactcagcaccagtggcagtctcaggcgcccaccgcccagctgacggggttaagccgccgggataacggcacgctggatatcaacgccggcgaagcattaggcccgctgctggaaaacaccctcaacgccaataaccagcgctaccgctggcatggcaacggtaatgagcacggccatacgctgctcgaccggcaaaaccggctgattcatctgcacgaagatccgctggcgtttaccgccttcacccaccggctatcggtaccgccgcagcagacgcccgtcgccggcaataacggcagcgtcagctggggcggcgacgagccgaagacggtcgccaagccggcgcaggcgctgcgggaaaaactcaccggtatctaccacaccggccaggacgagcaagcgttgcgcctgtacggcgatcgtctataccaatacacatcggaactccccgccgaatggcagccgatgcatggtatcgacgccaaacctttcagccagctcagccgccagggcaacggccagctgtttgcgctgcaggacgataaacaactgctgaacctcagcaccggccgcaccgaacatacattcagtcagaaagtttccgcctatgcgctcaaccgccacggtgcgctgctggcgctgacggcggacaaagccgccggcaaacaacagctgctgtttcgcccggcgggcgcggacggcgcgccgcagccgctgcagttgcagctggctcgcgaaggcagcggcgaaccgcagccgttttatcctgccgccatagccctgcgcggcaatgaactgctggcgttcgacgacggcggtcgcctgcaccgcgccgcgctgccggacggtgaaataccgccgactctggagctggaacaagacggccgcgatacccaaattcgccatctgttctccgaccccgacacacagctgaccgcgctgctgaacgacggcgacgatcgcatccacgccgtggtgaagaaccatcacaatctcgaattcagctgccagctggacgacaccggcgtcacccccggctggaacctgagcgacagcatggtgatggattatcagaaagggctgcgcctcagcacaccgctgccgcacaacgtcgtcgatctgggccggctcggcaagctggcactgattgaaggcaaggtgcactttcgcgatgaagttaccggccactgggaggccagcggcgaaaaggccgagcgtctgatccgcggccacgacggccaggcgtataaagtggaggacggcgaagtcaaaccgctgaagatcaatcaggccggcaacaaggcttccctccagaacaacctgtttcaccttacgcgggtacgtaacagcgtggaggccgatctcgccctgaccgggctggacaaaaacagcaagacccaaaccgtcacgtcgctgggcaacggacgtctggcctcgctgaacgaagacggccgggtgcagctgcaccaaatcatccccggtctgcgccgcgagcgcatgccgccgcggccgattggcagcgagggactgcccgacgcccggacgccggacaacaggctgaaagatctggccggcaatgccagccatcagctgttcggcctgaccggcggcggacagctgttcagtctggcgccgggcggctggctgccgccggcgctgcgtccgggaggcggccaacagaatgagggcgctaccgcctggcagccggtgacgccaccgccggatctcggccggctcaccagtctgcacaacgatgcacagggccggctggtggcggcggatgacagcggccactccgccacctggcacaacggcagctggcaggccaccgacgatacggcgccggcctcctaccaaaacgacgcctcgcagcagaccttcgaccggctggacgccagcggcaaaagcggccgcatccccaaaaccggcattacctataagcgagaatatgaggtgttcggcgccagcggcaacaatacgcgccaggtgaacaatccgtttaaaaagcgcatgcaggccttcttgttcaagccgcaaggcaaaatgccgcgaccgctgaaaaacctcggcaatgaaattatccaccgcgccagcggccgtgacgggctgagaccctgctaccaggcccagcagcagctctccgtcgagatcgccggcaaaccggcgccgtccgcaggcagcaccaccgaactcaacagcctgccaacgttggagacgcgcctcgacgcgctggggctgggacagagcgccgatgcacaacaccagcagttgcacaaagagatcgccggcttcggcgagatgctcgggcgcagtctgaacctgcacagcgccgcggtgggcaaacattacggcgtagtggatgaacacaaccgggtgatcgacaacccgcaaaaactgcagcacacccgcagcggccagttcaaccgccacagccagcgcgatccgcagttggccggcaccctgcggcatctgctgggcaaccacggttcgcaatcggcgcaggacgcgctgcaaaccctgagcgccatggagaataaccgcgtggtgatcaaccacctgaaggacgaacgcgactaccacgacgatatcggcctgctgaaatcacgcctgtttctcgatctgctgacgcaggaaaagctgtaccaggcgctgagcgactgtcagtccgccccggcgtccgacccgcagcgcctgaacaccctgcgcgacaccgtgcgtaacctccgcgacgaacagtgggatcagcacccggtgaagaaactgtccgatcagggcttccagaatacccgccagcttgaggcctattacgacggcatgaaaagaacggtcaaggccttctctaagcagcaccacggcacctacgtcaccgccagcacgctgttccagaccggcaaccgcgaggagctgacgcagcggctcggcaaggagctgctggcgctgaaaaacggcgaagcgctgaccttcggcaacggccacagcggctttgtctccagcgtcacccttcccggcgaccagatcatcggctcggtcggcgcgcgggtgaatcttgaccgcgactacagcctggcttttacccgtgaagaaacgggactgacggtgaccgtcgcccgcaacggcggcggcagcctgaacgtgttcggcgccgccggggtcaacgtgctgaccggccacctgaatgaagacagcctgaatttcggcccggacggcaaccacaaactgtcgccggtggtgcgcttcggcgcatcgctgccgctgaacctgcagcgccagtcgcaaaacagcatgaccttcagcctgagcgataacgagctgccgcagtttctggagcagctgaccaccaaccagctcaggccgatggatatgctggacaaggccatcgatcacaaggtgaaaaacggcaacgtctggaacctgagtctggatatcaacgcctcggcgcaggccagtctcggcctgccgatgaccaacaaaaacgagaccgccaacgtcgccagcgcgcgcctcggcggcggtctggcggcgggcgccaatctgctgcacggccagcgcgaacgcagcgatgcgcacaatgcggagggcagcaaagtcagccacagcgacaaccgggtacgctatctgaatcagggcaatctggacgcccgcattatggtgcccgtcggcgtcagcagcaaaaccgaacatgcgcgcgagccgattatggcaaccagtgcgctggcggcgcgctacacctttgacggccgcaccaaaaagaaaatcaatatggagctggcggaaccgcatacgctggatcacacccatatcgacaagattgcggaaaccctcggtaaggccttcaccggcccggccgacgcccgggtgctggccacggtgcaggacagcgccggtgacacctcgccaaaggccaagctggcgacgttgaacgaccacttcctccaacatttgcttggcgccaaaacgctgaacaacagccagcatgcggcgatccgcgatctgcagaaactgatccaccagcgcgaagccatggataacaaggtgcctctgcccggcgcgctggagtatcaatccacctacaacaacctggccaagctggacagcaacagcctgccgcactggatccatgatgctttccgctttgagatgcaggacgacaaccacgcccacagtaacgccaaccgcatcggcgccatgatggcgcaggatccgcgcctcgccggcttgatcggccagatgcagctcagcaccgacaccaaggcggaggtgacgctggaactgaaagatgaagaccgcagagagctggtggaaagctggctgcacggcaatatccagcgccaggatctcgaacggcagctgcaggatcgcagcaagatgcgcatcaaatccatcgcttttgtcgaaagtaaatccaagggcgacggcatcatgtccccacgctttctgatcggcggcggcagcaatgtcagcatcgagaaagagcgcaagctgggcaagatcagcttcagctacggcgtcgatcaaagtgcgccgctgagctacagccttgaaggcgaactcgccgaccgtcagaacgctgcgttaagcgaaccgctcaaccgggcgtgggcgcaggggcgactgttgaaagatgcataa

SEQ ID NO: 442471 - DNA, 189 bp, Serratia marcescens
atggttatccgatttatcgccgtcctgctggcggccatgctgctcgccgcctgcgccccgaaagcgccgccaggctgcgccagcgtcgactgccggccgcagtccggcgacaacagtctgaccatctggtggcagccggacctgcgcaacggtccgacggattacacccgggtacaggttaacccctga

SEQ ID NO: 442472 - DNA, 615 bp, Serratia marcescens
atgtggcaacttagaaaaatctctctgcgccagccgcctgagccgcaggccgccctgctcagccgcgacgcgctggccattaaccatcaggccgaaacgctgatcgccgacgccgaacgccaggcgcaggccctgctagacgcggcgcagacgcaggccgaagcgctgcagcaacaggcagcggcagagcgcgacgcattactggcgggcgcacaggagaccttctggcagcaggcccggacgctgttcgccgactggcagcagcagcgccgcgccgagcagcagcagttgctcgacgccgccgacgcgctgctggcgcaggcgctcggccgcctgctggagcaggtgccgccggccgggcagctggacattctgctggagcagctgcgcgccaaacagccgcccgccgtcgccgccacgctgtacagccatggcgaacgacacgcggcggtggcgcactggctgacgcagcggccggaactgcgctggcagccggcgatcgacgactcgctgccgccggacaccctgctgctgaccaccgaacagggcgagctgcatatcagctggcaggcgctgcgtcaggcgctgggtgcggcggagagcgtggccggctga

SEQ ID NO: 442473 - DNA, 582 bp, Serratia marcescens
atgagcgacatcgatgccacgctgcgctggctcgactggtggcacagcggcttctggcgcgacgcacaccccagctggcgtcaggcgctgccgttccccgcaccggccgccgctctggcgcgggtgcgcggcgcggcgctgcgtcggcggctcggggtggcggacgcggcgctgccccggccgcagccgcagttgctgacgctgctcgcccttgacgacgacgcccgctcgctgctgctggcgctggtcgccgaaatctgcaccggcgggacggcgctgcccggcgaactgaaaatctggtgtcgccggctggccaaagggctgcggccggaaagctggctgccgacgccgtccgtcggccagacgccggcggtcaccagcctgacgctgctgcaggcgcgctaccccgactgctggccgcgcctgcgcatggcgtttgaccatcacgacgtctgccgctgcccgccgtcatcgccggcgctggaaccccggcggctgcagccgctgtgggaggcggcgctgtggcagtgtcagcgcacgctgacggaagacggcgaggagcatccgcatgtggcaacttag

SEQ ID NO: 442474 - DNA, 354 bp, Serratia marcescens
atgaaaatatcccataacggcccgtcactgaccggcgccccgctcacctctccggccgccgacaccgccgacgccaatcaggacgatatccacgccttcagcgccgcgcttaacgcgccggccggcgacggccaggagagcctgctgagcggcctcggcggcgccatcagcgataaccagcgcgcgcagcagcaggcgttccgcaacctggaagtcgcttcccgctccagcaacccgacggacttcagccaggcgaacgccgcgctgtccgattactacattcagagcctgatgaacgccaagatcatcgccaagggcacgcaaaccctggataaactcactaacctacagtaa

SEQ ID NO: 442475 - DNA, 258 bp, Serratia marcescens
atgaaattgatgtcattaccatcgctcggcaccactctggccaacggcattaccggcggcgccggcttcgccaccaaactcgccggcgccagcagcggcagcagctttatgagccagatgcagggcgtgcaggcggaaatgcagcaaaaccaggtcgacaaggccaaactggatgcggaaaaccagcgcatcaacggcatcgccgacagcgcggcccaggctggctccgccgccgcgcaggtcaaaattcagtactga

SEQ ID NO: 442476 - DNA, 984 bp, Serratia marcescens
atggttaagcctgttgattccagaatgcccgctcgggcaccggccgattgcgccagggaaaatcacgcctcacacgcgtccgcctccggcgcgacgccgcacgcggccgacgatattcacagttacctgcataagttaaccaaaatcgtcgccccgctgcacgtggatatcctgctcgaaggggaaaccggcaccggcaaagacacgctggcccggcgtatttatgaactctcaggctgcaacggaccgctggttcccgtcaactgcggcgccattccggaaaatctcgccgaaagcgagctgttcggcgtcgaacccggcgcctacaccggcgccagtcacgcccgcgccggctatatcgaaacggcgaacaacggcattttattcctcgatgaaatcgacagcatgccgccgacggtacaggccaaactgctgcgcgtgctggaaacccgcaccattacgcgcctcggcagcaccaaacaaatcagcctcaatctgcgcgtgatcgccgcctcgcagacgccgctggagcagttggtggagagcggccgtttccgccgcgatctctgcttccgcctgaacaccatcaagctggaaacgcccacgctgcgctcgcgtcccgaactgattattccgctgttccgccgcttcgctctcgagtcggcgctgcggctcggcatgccgcacccgccgcgcagcaccgcgctggacgaagcgctgctgctgcactgctggcccggcaacctgcgcgagctgaaggcggcggccgaacgctttatcctcggcctgccgccgctcaatcaggcgctgccgcaggagagcggcacggtcttgctgaaagagcgcctcaagcgcatcgaacgcagcctgatccacgactgtctgaaccgccacgaccaccgcatcgacgacgtggtgcacgagctgggcatcccgcgccgcacgctctatcaccgcctgaaacagctcaatattcacgcctga

SEQ ID NO: 442477 - DNA, 783 bp, Serratia marcescens
atgacactcaatatatccggttcaggcgttggcatgccgctggtggggaatctgatcgaacgtgccaacgaaaacgtagaaaaaattgaacaggccatctcgctgccgcagcaaaacagtgcggtgaaattcagcaatgccaacaatgcggcgtttatgcagcagatgccggcgcacggggaagaggcgcagcccgcgcagcagggcgggctgatgcagaaactgctgatgctgatcgggctgcagcagctgttgggcggcaatgggacgcagccggccgagcagtcgccgcgccagtcggaaaacagcgcgcctgccgggcagtcgtcagcgtcaggcggcgtgggcggggtgatccagcaggtgatgcaaatgatgcagcagctgatgcagatgatccagcaactgacgggcggcaaaggcgcgcagagcgctgacggcgtgcagaacggtcagaacggtggacaaacgcagccggcccgcagtcagccggagacgccggcctccggcgggcagtctcagggcggcgtgagcggcctggttcagcagctgatgcagatgatgcagcaactgatgcagattatgcagcagctggcgggcggcgggcagaaggccgcgccgtcaggtgagaacggcaacgcagagtctggcggatccgctcagccggcacagcagcagggcgacggcaatatgctgagcaaactgctgggttcggtgctgcagatggtcgggctggacgcgctgatgtcgaaactgggcggcacgcagaacaacggaggctaa

SEQ ID NO: 442478 - DNA, 984 bp, Serratia marcescens
atggtgagcaatatctccggccagggggtgtttccccgtcaggccggccaatcgctggagaacccggcagagggcctgagtgaaacgctgcagacgccgcagctgcgcatcgggacggtgaatttcggcaatgcgccggcgcagcaggcggagcagccggaagcgatgccgcagagcggcgggctgttccagcagttgctgatgctgatcggtctgcagtcgctgctgcagggcccgcaggcggatatgtcggcgatgtttggcggccaggaaggcgtcagcgagacggaaaaggacaccagcgtgccgccgaccgatgacaacctgcagggacggccggataacgatacccgcagcgcgcaggagattatcgatgccaacccggtgctgaagaacctcggtgaccagaaggatatcaagcgcgatgagctgaagcagcgttttggcgactggaccgaggataacccggatcccgccagccgcgccgacgccgcttacaatatggcgcgggtgctgaacagcatcaaagggctgaataaccgcgagggcggctcccgcggcgacttggcggacaacggcaagattgacggtatcaccaaggacggcgacgcccgccacggcaccgaagccggcgtgttgaaagatatcgccgaacaggggctgaaggctttgccgagcaacggcaacctgccgcagaccaatgacagtcacgtgcggctggacggcaccaacaaggataacttccagtgggcgatgggcgagatcggcaaggcgctgtccaatattccgatcctgaagtccgtgctggcgccgatgttcaacaatatgggcgaggcccgtggcctgggtgatgtgtttaccggtgcgctgaaggggattggcgagggggcgatgagcgccgctcgtggcccggtcggctgggcgatgacggcggcgacggacaccgcgcagattgtgatagataacgtgaaaaataagaaatag

SEQ ID NO: 442479 - DNA, 912 bp, Serratia marcescens
atgctctctgtatcatccaaccccgtcccgcagcccttcgggcagagcggagacttcagcaacctgagcgataatctgtcgcagaaacccgtgcttaacgcctcagacagcggcgcgccattgccgatcagctacggcggcgcccaaggcaccaacatggacagcctgctcggcggcggcgatatccaacagcagctgcaaagcgccatttccggcaccctgatgcaaatgctgttcagtcagctcatgccgcagtttatgcagctggcgcagcaactgctgtccaacggccagaacggcgggtcgcagacgccgcagcagcagggcagcgcgtcaacgccgggcgttaccccgcaaagcacgccggagacagccagcggccagccgacaaccggcgcaacggagaacagcacgccggctgccggcagcggcagtctgcacctgcccgacgcgctgaagccgtatgaagcggatatccagaacgccgccgataagaccggcgtgccggcggaagtgttagcggcgcaaatctggcaggagtcgcgcggcaacctgggcgccagcacggtgaacggcggcaacggcctgcaggacagcgggctgatgcaggtcaacagcaatacctttgccgatctgcaaagcaaaaaccccgggctgctggggccggacgccaacccgaacagtacccgggacaacattatggccggcgcgctgtatatgaaagagcagttgaacgcctttgacggcaacatgggtgcggcgctgcgcgcctacaattccggcccgaacaacgtcaacctcaacgatctgagcgatatctccaaaaccggcaccggcgacgccacctacgtcgataaggtgctgaacttcgccaatatcatcaaaaccggccagggcgaactgccggcctga

SEQ ID NO: 442480 - DNA, 969 bp, Serratia marcescens
atgtctgtcgatatctcttccttctaccgcccggcagccggatggcagagcggcccggcaatggacgatgcctggacatccgccgagcttccccggcagtccgccggcggcggcgcggtgcagttcgccacgccgggcgccgggagcagcgtcaatttcggtgcgccgctgactgatgccctgccgacgtcaacggacgggcagcccaaccccggcgacccgctcagccagttgatcggcgcgctgctcagtcaggtgatggcggagctggcgcggaggatgcagggccagaacggcagcgggcaggaaacagcgcagcagaataccgatactgccgccccgtccggcggcgcgatgccgctgaatgaaaccaacgccgccaaaccgacggcccatgctgcaagcgccgccgacggtccgtcggccggcagcgggccgcgcaccttcaatatcaccaatacgcaggatcacgacatcaatatcggccagtttgatcagcacaatcagttggtcggcgagatcaccctgaagcccggggaaagcggccagatgcgttatcagaatgactttaccggcctgctgaagcaggccgacgccgacggcaactatcgggacgacgccagccgcctggagttctataacggcttcgtcaataccagcgatatcgatggccgcaacgccgccattcacgccaccgatcatcagggatttgaaatcggcgatcggcagagcattgccgaccgcgcgccggcagatattgtcagcaccgattctgccgggaataaaaccattgccggctactacgacggctccagcgagaccatgcgcaagggcggccagtttatgaccgacatgctcggcaccggcatgacctatatgcacccggacgacgaccggctgccggagggccagaacccgatgcgccataccgacgccatgacgctggacgtcaccttcggcaaggcctga

SEQ ID NO: 442481 - DNA, 387 bp, Serratia marcescens
atgtatgtaaaacactacgaagttgacgcagcacacatcgattttcagggcgtggttgacggtctttactaccccttctatatggagtggacccgccacgcctttatgaaagaggcgctgggcatcgatatcgaagaggagtttaagcagggacggctgtatatggtgctggagtacaacctgcgctttcgcaaaagcctcaccaagggcgacaagatggaagtcacctgtgagctggcgaaaaacgacaagcgcaaccgggtgaatttcgtgcagcaaatccgcgttgacggccaggtctacgccgacgccaccttcgtcgccacctgcctggagaacggccgccccagcgtacctgcggtcatcgccgagtttatcaacgcctga

SEQ ID NO: 442482 - DNA, 789 bp, Serratia marcescens
atgtccagaaacaccgccgtcaaagattttcttgttaaacaccgcgccaaactgaatccgagcgattacggcttcagtccgcttaaccggcgcgtcagcggattgcgccgggaagaagtggcgcagctggcggcggtcagcgtcagttggtacacctggctggagcagggtcgggagatcagcatctcgccggcggcgcttcagcgtatcggcagagtgctgaaactgtcgccggtagagcagcagtacctgaataccatggtatttggcaacgatgccccccatcaggcgccgatgcagctccccgccgaggtgatggcgatggtcgatgcgctcaatccccatccggcctttgtccgccgcgataatatggacattctgtactggaatcaggccgcgcaaacgcagatttttgactggtccgccattgccgaggcggatcgcaactcgttgaagctgatgttcgtctgcccggagtacaaacaaaagatttatcaatgggagcaggccgccagacatacgatcgctgcgttccgcgcctatcaggccgccggcaataaccgtgatgatttcagcgcggtgatcgacgatctgacggcgagaagcagcgaatttcgcaccatgtgggattatcatgacgtccggaaaatcggcaccggcaacaaagccattatcaatgacgatggccgcatcagccattacacctacacctccctggagatcgaacactcgccggggctctacctgattttctatctggcagccggccccaccgctgatgcaggttaa

SEQ ID NO: 442483 - DNA, 618 bp, Serratia marcescens
atgaaatctatctttatatacggtattaccggcgatatcggccagcgtacggcacgcctgctcaatgaggccggccaccgcgtatcgggcgtggccagaagcgaggataaggcccggccgttaatcgatcaaggcattaacgtggtgctgggcgacgtggcgtccgccagcgcacagacgcatcaggcgtggcttgagggggtggatgtggtgctgttcaccgccggggcgaagtcggacgatgaggcgaaaatccgcgccgtcgactatcaggcggtgattcattccgcgcaggcggccatgcatgccggcgtcggcgcctatgtgctggtttccgctttccccgaagcggggcgccgccgggaaaccaccccgggatttgagtgctatatgcactataaaaaactggccgacgcctggctggtcaacagcacgctggcgtggaccattctccgcccgggcagactgacggaagccgagccgaccggacgcgtacaggctgcgccggcgctgccgtacggcgagattccgcgcgcggatttcgccgcgtttgtggcggatgcgatccgccgcggcgcctacccacaggcgattgtcgaagtgaccggtgcggtgtaa

SEQ ID NO: 442484 - DNA, 1158 bp, Serratia marcescens
atgagcagcagacaacataatattaaaatcatgctcaccggcctgctgacgttggtcaccgtaatgggcatcgggcgcttttcgctgacgccgcagatcccggtgatgattggggacggctacctgacgctttcaagcgccgggattctggcggcgatgaactatatcggctatctggccggggcgctgcacgtcagccgtatgaagagcgggcatgcgggctatctgaaggccggcatctgcgccaccgtgctggtgaccttactgtccggcgcgacctcgtcgttcgtcctgcagtgtctgttccgtctggtcgccggcatcggcggcgcctgggcgctgatcatcgtcacctcctggacgcagctgacgctggcgggcaaccgtgctccgcgcctgtccgccgcagtatttaccggcccgggcgttggcattacgctcagcgggatattggcatgggccatggggttgctgcatctggattctgccagcgcatggtatgtctacggcgcggtggccctgcttatcagcctgatgacgtttcgctatctgccggcgacattcggcccggctcagggagcgggcgaaagcgagaagccggttggcagcgagctgaaaaaactggtggctatctatacgctggccgggttcggctacatattaccggcgacgtttctggcgcagatggcacacagcgcctttccgggcggcgatttggcggcgtttttctggccgctgttcggcctgtcggcggtggccggcgtggtgatggtgatcctgtttgcggcgcgcttcaatacgcaaatcagcctggcggcgatgatggtgctgcaggggcttggcgtggctgcggcggtggtattaccgggggccgtgggattgctgtgttcgacggtgctgaccggcctgggctttttgtcgattatgcagctgaccatgaggtttgcgcgtgaaatctcctccggttcgctggcaaaaaatgtggggcttctgacctccggctatgcgaccggtcagctggttggcccgctggtgtcatccgccagcgtggcgctgttcggctcgctgcatgaggcgattcttctggcggcggcagggctggttctcggtgggatcggcgtggtgaccctgatacgacgcccggctgagcagaactga

SEQ ID NO: 442485 - DNA, 336 bp, Serratia marcescens
atgcaacttccagcctgcccgcaatgccagtctgaatatacctacgtcgataacggcctgtatgtctgccctgagtgtgcacacgaatggaacgacgacgagcctgcggccgataacgatgcgctggtggtgaaagacgccaatggcaacctgctggccgacggcgatgcggtgacggtgattaaagacctgaaggtgaaaggcagctcatccacgctgaaaatcggcacccgtgtgaaaagcatccgcctggtcgaaggcgaccacaatatcgactgcaaaattgacgggttcggccagatgaaactgaagtccgagtttgtgaagaaaagctga

SEQ ID NO: 442486 - DNA, 786 bp, Serratia marcescens
gtgactcgcattgtcgacgatattttacaaacgctgctggacagggatccgccagggcaggaaatccaccgcgaagcggatgagtacggcgatattatcgttgccgaacacaaacagtatcgcatcctgcgttttgacgatctgtacgagcagagcaaggtgaacatgcgttctcctgaggtgccgatacatcactatattcaagcgatgttgatggcgattagctggcaggaagagggcgacgtgctgttgctggggctgggcggcggcagcctgctgcgggcgctgcatgcctacaaccccgccaggcggcttgatgtggtggagctgcgtccgcgcgtgctggcggttgcccgtagttatttcacgctgcctgatacaagctgtgtgaactaccatattgacgatgccgagcgctatttgcagcaggcgcagggccgccgctacggggtcattttctccgatctttattcggcattcagcatgtcgccgctgcagggcaccgaagcgtttctcgaacgctgccgggacgcgctgtgcgacggcggctggctggtgctcaactacctggaaatgccgcacggccagacgctgctgtaccatgccctgtaccgggtgtttaccgacgtctttttctgcgaaaccggcagcggcaacgtggtgatttacgccacctgcgccaccaatgcttaccggcttaaagcgctgcggacgcaggcggcgcgtttgggatgcgacggcgtggcggaggtgggccatctggcgcgttatctgacgcggctgtag

SEQ ID NO: 442487 - DNA, 195 bp, Serratia marcescens
atggaaaagaagaccgcgcgtttaaccgttttgatcgatccggagaagaagaaagctctggagacgctttgccaacagcaagatgttaccccctcgcaggtggtccggcaattgatccgggattacctgcacaagcatcacgttgactacccttcccagacttctcaggccaaccccaaggtcgagacgcgctga

SEQ ID NO: 442488 - DNA, 1689 bp, Serratia marcescens
atgaatacacacaagatcaaccgcgtacgccccttcagcgcccttattgccgcctgctggcaggaaccctactcacgccagcgtctgctaaaagacgtcattgccggcgttaccgtcggcattatcgccatcccgctggccatggcgctggcgatcgccagcggcgtaccgccgcagtacggtctgtacacctcagcggttgccggcatcgtgatcgccgtcaccggcgggtcgcgctacagcgtctcggggccgacggccgcctttgtggtgatcctgtatccggttgcccaacagttcggcctggccggcctgctgctggctactctgctctccggcatgtttttagtggtgatggggctgacccgcgtcggccggctgattgaatatattccgctgccggtcacgcttggttttacctcggggatcgccatcaccatcgccacgctgcaggtgaaagattttttcggcttgccgctcgcggcgctgccggccggctatgtggataaactggccgccttgctgcaggcgctgcccgccgcggatattggcgatacgctgattggcggcgtgacgctgctggtgttggttgtctggccacggctggggctgcgcgtgcccggccatctgccggcgttagcggccggcgcggcggtcatggggttgcttaatctggccggtcatcaggtcgccaccatcggctccagcttcagctatcagctggccgatggcagccagggcgccggcatccccgccattttgcctcagctgcagctgccctggacactgccggcggcggacggtcagccgatgacgctaagctggcagacgctgtccgcactgctccccgccgccttctccatggcaatgctgggcgccattgaatccttactgtgcgccgtggtgctggacggcatgaccggcaaaaaacacagcgccaacggcgagcttctgggacaggggatcggcaatattattgcgccgttctttggcggtattaccgccaccgccgccatcgcccgctcggcggccaacgtgcgcgccggggccacctcgccgctggccgccgtgattcacgcgctgctggtgctgctggccctgctgctgctggcgccctggctctccttcctgccgctggccgccatggccgccttattactgctcgtcgcctggaatatgagcgaggtgcataaggtgttcgatctgctgcgccgggcgcccaaggatgacattatcgtcatgctgctgtgcatggcgctgacggtgctgttcgatatggtgatcgccattaccgtcggcatcgtactggcgtcgttgctgtttatgcgccgcattgcacgcatgacccggctgagcacgctcagcgatgacgcggatgtattggtgctgcgcgtgaacggcccgctgttttttgccgccgccgagcgcgtgttcgatgaggtgctggcacgcagtaccgcgtatcagacggtgattctgcagtgggatgcggtgccggtgctggacgccggcggactcagcgccctgcagcgctttattgatgcgttgccgcagggtaagcagctgatcgtcaccgacattcccttccagccgctaaaaacgctggcgcgggcacgcatacggccgattgacggccggctcgccttctattcaacgctgccggaggcgctggccgacgggcagaaataa

SEQ ID NO: 442489 - DNA, 267 bp, Serratia marcescens
atggattttttgcatgcgcagttacacctgaaaacgggcgacgtggtggaagtgcactgcgaccggccgtgcatcatcctgctgatggatgatgcggagtttgcgcgctatacccacgggcagccggggcgtcatcatggcggccattttgatgaactgccggcgcgcttcaccgcgcctgacgacggcgtatggcacatcgcaattgatgccggccagtttaactccgcacttacccacagcattaatatttatccggttaattag

SEQ ID NO: 442490 - DNA, 948 bp, Serratia marcescens
atggtaaacagcgcgctgtggtaccgggagtttggcgtaccggaagaggtgctccggctggaacacgcgccgccggccgcgctgacggcgggaagcgtgcgggtagaaatgcggcttgcgccggtgaacgcctctgatttgattccgctcaccggcgcttaccgccaccgggttacgccgcccgccgtcgcgggctatgagggcgtcggcgtggtgacggaggcgacgccgggggcggagcatctgctgggcaaacgggtattgccgctgcggggtgagggaacctggcagcgctatgtcagttgcccggcggcgctggcggtgccggtaccggaggctattgcggacccgctggcgtcccgcgcctatatcaatccgctggccgcgctgttgatgttggatctgtataacccggcggggcgccgcgtgctgctgaccgccgccggttccgactgcgccaggctgctcggccagtgggcgctgcagcgtggcgcgacggcggtggcgggcatctgccgttccccggtgcatgccgacagcctggcggcatgcggcattacccccgtggcgcagagcgagcgggcgcgcatcgaccaactggccgctacggcggatatcgtgtttgacgccaccggcggcgtgctggcacagcagttgctggaagcgatgcggccggacgggctgtttgtctgttacgggctgctctccgggcagacattcgcgctgaaacgccactatccgccggtgcgctggtttcatatccgcaactatctggccgacatcgctgcggcgcagtggcacgcgatgttccggcggatatggccgctgctggcggaaagccgctgcggcgaggcgcgcatttttccgcaggccgactggcgggaggcgctggcgctgtaccgccagccgggccgacagattaagcccgtgatgagtctgcagccttga

SEQ ID NO: 442491 - DNA, 627 bp, Serratia marcescens
atgaatatactgcacattgactgcagcccgcggcacgattcgcacagccgccggctttccgccgccctgctcgcgcgcctgcgggccgccactcctgacgccggcgtgacgcgccgcgacttgggccgcgagccgatagcgcatgccgacgccgactacgccagcgttttatcctcacccggcgcgctggcggccggcgcggcggaaagcgcgctgcggctgtcggaaaccttgattcaggaagtcgagcaggccgacgcgctggtgctgggcacgccgatgaacaatttcaccgtgccttcggtgctgaaggcgtggctcgatcagattctgcgtatgggacgcactatcaccacaacccccgacggcgagaaactcggcctgctgcaggacaagccggtttatatcgccatcgccgccggcggcgtgttcagcggcgaacgtgccagacagccggactttctcaccccttacctcaccgccgcctttggctgcatcggcctgcattccctgcaattttttcccctgcaggcaacggcgtttctcgaccatgagcaattggcggccgcgcaggaggcgctgctcgccaccctgacgctcaaggctgcagactcatcacgggcttaa

SEQ ID NO: 442492 - DNA, 435 bp, Serratia marcescens
atgagcacaccaaaacgtctgccgtaccacaccctttctcccgacgcctatcagggcctgatcgccaccaagaacgcgctggaaaacagcccgctgggcaaaacgctgatcgagctggtctggctgcgcatgtcgcagatcaacggctgcgctttttgcctggagatgcacgccaaagcgctgcgcgccggcggcatggcggagaccaaactggacggggtggcaggctggcgcgtcagcgaacgcttcagcgcccgcgaacgcgccgcgctggcctggacggaatcgctgacgcacgtagataccacccacgcctccgacgacgacttcgaaccgctccgtgcccacttcagcgaagtggaaatctccgacctgaccttcgccatcgccctgatgagcgcctttaaccgtctggcgatcggtatgcgccagtaa

SEQ ID NO: 442493 - DNA, 1413 bp, Serratia marcescens
atggatatacagcagttgcggcctgaccagcagcatgatgcaccgctctacctgcagctgtaccggcgctaccgcgaggcgattgccgccggcaagctgcgcccgggggaccgcgtgccgtcggtgcgcagcctcgccagcgaactgaatctggcgcgcggcacggtggaaaccgcctaccagatgttggcgaacgagggctatttcgtcgcacgcggcgcggccggcaccgtagtgtcgccggggctggggacgctggccgaaccgctggcggtcactgcaccgccggttgtcgcttcgcctcatccgcatgccgtcaccggcgattcgctgtcgttccagatggggctgccggcgttggacgcgtttccgcgcaaagtctgggcccgtctggcggggcgcagcctgcgttcgcgagagatgcaggcgatgtattaccccgatccggcgggctatgcgccgctgcggcaggctattgccgcctatctgggcatctcgcgcggcattgcctgcacgcatgaacaggtgtttgttaccgcaggctatcacggggcgctggagctggtgcgccatacattgctgcaggcgggcgacgtcggctggtttgaggaccccggttacctgtttgcccggcagtatctggagcgtgccggcctgcggctggcagcggtgccggtggatgcggaggggctgaacgtggccgccgggcggctgcgctcggatgacgcgcgtttcgcggtggtaacgccgactcaccaaagcccgacgggcgtggcgctgtcgctgccgcggcggttggaattgctggaatgggcgcgccgccgccgggcgtggattattgaagacgactacgacagcgagttccgctaccacggtcggccgctgccggcgttgaaaagcctggatcgcgacgggcgcgtgctttataccggcaccttcagcaaagtgttgttccccggcctgcggctggcgtatctggtggcgcctgccgggttggtcagccgctttcgggacagcgtcaaccatctgcccggccccggctccattctgccgcaggcaatggtggccgactttatggaacaggggcactttggccgccatctgcgcaagatgcgtgcgctgtacgccgcacggcgcggctatctggtggatgccctgcggcagacgctgggcgagcggctgcatatccagccgcaggccggcggtatccacgtgttggcgcatctgccggccggacaggatgataaggcgttggttgccgctgccgagtccgccgggctggggctgcaggcgctgagtgactggcgggccacgccttccgaagcgggcgggttgctgatggggtttgccaattttgccacggcggcagaggcagagacggcggtgcggcgtcttaaggcggtgatggtgtag

SEQ ID NO: 442494 - DNA, 792 bp, Serratia marcescens
atgacactatccctgacagctcccgtgcaacagcagctgaccgccgccgtcgaccttctcacccgccagcttggccgtaacctgatggccgtccacctgtacggctctgccgttgagggcgggctgcggccctacagcgatctcgatctgctggttacggtgcgcgcgccgctggacgacgcgcagcgggcggccctgatgcaggcgctgctgacgctgtctgcgccgcccggcgcatcggataccaagcgggcgctggaggtcaccgtgctggtgtattcacagctggtgccgtggcgctacccgccggtcagagaactgcagttcggcgagtggctgcgcgaggctattggtgcaggaatctatgaaccggcgcagcaggacgcggatattgccattctgctgaccaaagcgcgccacgtcagcgtggcgctggccggcgacgaggcggcacggctgtttcccccaataccgccgcgcgacctgcggcaaacctttcaggatacgctgacgctgtggcagacaaccgcagacctgcagggtgacgagcgtaatattctcctgacgctggcgcgcatctggtacagcgttgtccacggcgatattaccggcaaagaagaggcggcggactggctgttgcctcggttgcccgccgaccatgccgccacgctgcaggcggcacggcaggaatatctggggctggcgacgcaggactgggcagcggtcatgccggcggtagaacgctttgttcactatgcccaagcgcagattggcgcccggctcgacggataa

SEQ ID NO: 442495 - DNA, 435 bp, Serratia marcescens
atgaaaaaactttcttccttgttattagtttgtgttgcgatggttttttcctccaatgcaacggcgggacgtcagggatgtgaaatcaagaaaagtaaaatcaaaacgcagatggaatatgccaaacgctacggcaaccataaccgtctggcggggctggagcgggcgctggcccgggttgaggcggcgtgttctgatggttacagcggcgccagctatcgccttgacggctatagcggggcgagtcatcgtcttgatggctacagcggtgccagtcatcgtctggataaaattcagggtaaggaagataaagtcagacggcgcgaaatcgagcttgatcgggcgattgccagcggcgatatggaaaaggtccgtaacaaggcccataagctgaatgaagccaagcaggaactggcggaagcgcggcgctggtaa

SEQ ID NO: 442496 - DNA, 1167 bp, Serratia marcescens
atgaaaattaattatcccctgctggcgctggcggtgggcgcgttcggcatcggcaccaccgaattctcgccgatggggttgctgccggtgattgccgaaggcgtggacgtctcgattcccaaagcggggatgctgatcagcgcctacgccatcggcgtgatgatcggcgcgccgctgatgaccctgctgctatctcaccgggcgcgcagaaacgcgctgatgttcctgatggcgatttttaccctgggtaacgtgctgtcgagcattgcgccggattacaccacgctgctgctgtcgcgcatcatcaccagcatgaaccacggcgcgttcttcggcctcggctcggtggtcgccgccagcgtggttgccaaagaaaaacgcgccagcgccgtcgccaccatgtttatggggctgaccatcgccaatatcggcggcgtgccggccgccacctggctcggcgccaccatcggctggcgcatgtcgtttcttgccaccgcgggactgggggtgatcgccatgctgggcctgtggttctcattaccgaagggagaagcgggcgaacgccctgacgtgaagcgtgaactgtcggtgctgatgcgcccgcaggtgctgagcgccctgctgaccaccgtgctgggcgccggggcgatgtttaccctctacacctacattgcgccggtgctgcacacgctgaccgccgccacgccgacgttcgtcaccctgatgctgatgctgaccggcgtgggcttctcgatcggcaactacctcggcggcaaattcgccgaccgttcggaaagtaatacgctgacaggttttctgctgctgttgctgaccgtcatgctgctgatgccgctgctggcgcgcagcgagatcggcgcggcgctgggcatggttatctggggcatcgccaccttcggcgtagtgccgccgctgcagatgcgcgtgatgcgtgtcgccagcgaagcgcccggcctctcctcgtcggtcaatatcggcgcatttaacctcggcaacgccctgggcgcggccgccggcggcgccgtcgtctccagcgggctgggctacgcttttgtgccggtgacgggggcaatcattgccgctctggcgctgttcgtggtgctgctgaaccgccggacgcgggacgcggtggcgtattccaacggctaa

SEQ ID NO: 442497 - DNA, 762 bp, Serratia marcescens
atgacggcaacatttcctctgcaaaacaaggtcgcctttattcagggcggttcacgcggcatcggcgccgctatcgcgctgcgtctggcgcgcgacggtgcggcagtagcgctgacctacgtctcctccgccgataaggccaacgccgtggtggaaaccattaccgccgccggcggcaaggcgcaggccatcaaggccgacagcgccgacgccgaggcgctgcgccaggcggtgcagcaggcggtgcagcaggcggtgcagcactttggccggctggatattctggtgaacaacgccggggtgtttgccatgggcggcatcgaagagctgacgctggacgatctggaccgcacgctggcggttaacgtgcgcagcgtcttcatcgccagccaggaagcggcgcgccatatgaacgacggcggccgcattatccatatcggcagcaccaacgccgaacgtatgccgtttggcggcggcgcggcgtatgccatgagtaaatccgcgctggtcggcctgaccaaaggtatggcgcgcgacctcggcccacgcggtattaccgtcaataacgtgcagcccggcccggtggatacggatatgaacccggacgacggcgagttcgccgaacagctgaagcagttgatggccatcaaccgctacggcaaggatgaagagatcgccagctttgtcgcctacctggccggcccggaagccggctatatcaccggcgccagcctgaccattgacggcggcttcgcggcgtaa

SEQ ID NO: 442498 - DNA, 597 bp, Serratia marcescens
atggatatttgtttaacggaagaaacgggcgcaatttatcaggcccctcatgcaacttttcctctccacggtaatgataactattatatttatagccttggcctgttgctggaaggggtactgaaggaagaggccggcgaggcgcgggcgctgcctgatatctgggtgatgaccggatttcaggatgttttatcctatatcaagcggatgaagaaaaatgcagagaatatcgtgattggcgatgagcggcattatcgcctactgtccggtatccccagcattggagaaatggtttttatccatgcctcactgcccgttgaagaaatcaaagagcgcttcaggtttgtcatccgccgcaaggcggacagaaatatgcggtgcgaatatcgccaccatgatacgcaggcattttccgccggggcgagaaagacgattaaactgctgctgaaagggctgccgacatggcgtgtagcgcaggagtgctgtattgagaaccgtgccgtcagcgtgtataaacgcaacgtaatgcgacgtctgaatgtgaataatacccaggaactggtgatcaagtgccggctgatggagttccagtggtag

SEQ ID NO: 442499 - DNA, 639 bp, Serratia marcescens
atgttagagaaacactggtcaaagaccgaacttttacaccagacggtgaccaacccgaatattatcgtcaaaggcagccacagttattacagcgactgctgggacaacggctttgagcgcgatgtggtgcgctatctgcacggcgacgcctacagccagcaatgggaaccgctgggcaagatagaccgcctgctgattggcaactttgtctgtattgccgcagaagcggtgattctgatggggggcaaccacacccaccgcaccgactggctgagcctctacccgtttatggcgagcatccaggcgtcttaccagtccagaggcgatacgcagctcggcgatggctgctggattggcatgcgcgccatgctgatgcccggcgtcaccattggcgaaggggcgatcgtcgccgccggcagcgtggtaaccggcgacgttgcgccttacaccgtggtgggcggcaacccggcccggccgatcaagcggcgtttttctgccgagaccatcgcgcgcctgctggcgctgcgtatttacgatctcccggaagaaaagatcgtcaacatccagccctggctggcgagcgatgatatcgccgcgttagagctggcggtggctaacctcaccgccgccgttgattaa

SEQ ID NO: 442500 - DNA, 1479 bp, Serratia marcescens
atgacctcccgaatatcttcaaccacaccaccgaatgagcacctccctctcaacaataagtcgccggaattgaccgttgacgatattactattgttgatagtgatatgctcaaacgagccgtcggcgcagccgcgctgggcaatgccatggaatggtttgattttggcgtatacagctacctggcgttagtcatcggtaaagtatttttccccaacgccagtacggcggcacagttgatcgcctccttcggcaccttcgccgccgccttcctgatccgcccgatcggcggtattgtgtttggcaggatgggcgaccggattggccggcaaaaagtcctggccatcaccatgatcatgatggccatcggcacctgctgcatcggccttatccccagctacgcctccatcggcattctggcccccgtgctgctgctgttggctcgcctgctgcagggcttctccaccggcggtgaatactccggcgccgccacctttatcgccgaatactcgacggataaacgccgcggctttatgggcagtttcctggagttcggcaccatcggcggctatctgctcggcgccagcctggtgaccatccttacctccacgctctctgaacaggtgatgctggactggggctggcgcataccgttctttatcgccgcgcctatggggttaatcggcttttacttccgtctgaaactggaagagacgccggcctttcagcagcatatggcgcagcaggaggcgctggagcacagcaagccgcgcctcagcctgctgcagatgctgaagaagtaccattcttcgatcctgaagtgcgtggggctggtgctgctgtttaacgtgtccaactatatgctgacctcctatatgccaagctacctcagcggcattctgggactgggacagcttagcagcctgctgctggtgatggtgatcatgttcgtcatgatgccgctgacgctgttctggggttacaccaccgaccgcatcggccgtcgtccggttatcgcgctgggcgccgccgggctgattctgctctctatcccggcctttatgctgctggcttccggcaatctggtggcggtgtttggcggcctggtcatcctgggcgtgctgcactcttgcttcagcggcaccatgccggccacgctgcccgcgctgttcgtcaccgacgtacgctacagcgcgctggccatcggctttaacctgtcggtttcgctgttcggcggcaccacgccgctcatcaccgcctggctggtagataccaccggcaacatcatgatgccggcctactatatgatgggcgccggagttatcggcattatcaccgtgctgacgctgcgcgaaacggccaaaaagccgctgcgcggctccccgccgacggtggccagcagtaaggaagcccataatctggtgaaaaaactgcggctgcggcgcaaggcgcagcgccagtctgaagccagcgcatcctga

SEQ ID NO: 442501 - DNA, 594 bp, Serratia marcescens
atgccgaattcgcatagcccgttaaccgatcctcagtttgttgctgaattacagcagcagatgctgcaatttgcccgactgcagctgaatgattttcatcaggcggaggatgttgtgcaggaagcctttgaaggggccatgaaaaatgcgggttcttttgccggcagggcggcgtggaaaagttgggtgtttgcgattttacgccataaaattgccgatatgctgcgtatgcgttaccgccaggcggaggtgacatccgcggatgaggaagatcagcaaaactttgaggcgctgtttgacgcgcaggggcactggccggctggtgaacggcctcagcgctggcatcagccggacgagtcctgcgaacaggcgcagttttggcaaatctttgagctttgcctgacgcaggtgccggccaagaatgctagggcttttatgatgcgcgaatttatcggcctggagacgcaggagatctgccgcgagatggcgctgtcggtcaccaatcttaacgtcgtgctgtggcgggcgcgtatgcgcctgcgggagtgtttatcacagcgttggtttagccgtgaaggaggcgaacatgcttaa

SEQ ID NO: 442502 - DNA, 195 bp, Serratia marcescens
atgcttaactgccaccgtgcgacccgcctgatgtctcaggctcaggatgcgccgctgccgtttgcgcagcgtgcggcgctgcgcttccatctgctgttttgctccggctgccgtaactttcagacgcagctggtcgatttgcgcagcatcacttcggctttcgcccagggcaaagatcggtcgcctaaacgttag

SEQ ID NO: 442503 - DNA, 492 bp, Serratia marcescens
atggcattactgcaaacgctggcggcgaagggccagaaagttgtccgggaaagcctgctcggcctgctggcgcgcatcgcgctgaccgccacgttctggctgtcggggcagagtaaggttgaagggctgacgatcgatatcctgggcggagagccgctgcggttggggataccgcacctgagcagcggcgcgctggcgctgttcgccaccgaataccaactgccgctgctgccgccggccatagcggcaagcctggccgccgtggcggagcatctctttccgttactgctgctgctcggtctggcgacacgcttttccgcgctggcgctgtgggtgatgacgctggtgatccagatcttcgtctatccggatgcctggccggttcacagcatgtggatgagcgcgcaaatttatctgatgagctacggcggcggcaagctggcgctcgacagcctgctgtgccggcgccgggtaccgcgctctaacgtttag

SEQ ID NO: 442504 - DNA, 744 bp, Serratia marcescens
atgcaacgcgcactgtatcaggcgctgcttgacggcaacgtcgccgtgccccaggggctcaccacctggaacggcagcgatccggcccggcgctttgccgtttaccgcaacaacgtgatggcctcgctgattagcgcgctggcggaaaactgcccggtgctggtacagcaggttggcggcggcttcttccgcgccatggcggccgaatttatccgccggcacccgccgacctcgccggtgctggctgactatggcacggcgttgcccacctggctggccggcttcccgccgctggctgactggccgtggctggcggatctggcacagctcgaactgctgtgtatcgagtctctccacgcggctgatgcgatgccggacaacgccgggcagcccacgctatccgccgacagcgtcctgcgtctgcatccttcgctgcggctgtttggctcgccgtttgccgtgttcagcctgtgggcggcgcaccagcaggatcaggcgccggcggagctggatccctgccgtgccgaacaggttttactgtttcgccatcaggatgacgtgcgtctgatcgcgatcggcgcggcggagctgcgctttctccacgcgctgcggacgcggaaatccctggcgcaggcgctgacggcagcgctcgcggaggacaccgcgtttgccgtccaaccggtcttacaacgcctacaccattacggcctgatcctttgcgtatccggccggcaggagaaataa

SEQ ID NO: 442505 - DNA, 927 bp, Serratia marcescens
atgactacgtcagttcataccccgcctgccgtcacccgtgatgcgcctggctataacatgatgggcggtctcccgccgcgggccggcatcggtctcaagccggagcacttcggccagatcctgcaggagcggcccgacgtcggtttttttgaaattcatgcggaaaattatctggtggccggcggcccttttcatcaggccctgagcgccatccgtcaaagctacccgctgtccattcacggcgtggggatgtctatcggcgcagaagcgccgctcgaccgcagccacctgcaacgcgtcgccgctctggtggaacgctatcagccgcagatgttctccgaacatctggcctggtcgacgcataacggcttttttctcaacgatctgctgccgctgccttataccgaggccacgctgacgcgggtctgcgcgcatatcgatcaggtgcaaaatgcgctgcggcggccgatcttgctggagaacccggccacctatgtcgagttcgtcgactctaccctgagtgaaaccgcctttatcagcgagatggtaaaacgcagcggctgcggcctgctgctggacgtcaacaacctctacgtcagcggcgtcaaccaccaccgcgatccgctgaccatgctgtacgagctgccgctgcaccgggtgggggaaatacacctggcgggccatgcggaaaaccaggacgccgccggcgaccgtttactgattgattcccacgacggccgcgtcgccgcaccggtctggcagctgtatcgtgccgcgctggcggcgaccggcaacgtcgcgacgctgatcgaatgggacagcaacctgccgccgctggcggtgctgctggatgaggcgcgtcaggcggaagcgttgatgacggcggaggtgaaagatgcaacgcgcactgtatcaggcgctgcttga

SEQ ID NO: 442506 - DNA, 294 bp, Serratia marcescens
atgaaaaagccaactacaaccgcactgctggcgctggcgttaggcagcgtgctgaccaccgcaagcaccgcagccatggcggctgaaggaagcaatatggagaaatgctacggcgtatcactgaagggcaaaaatgactgtaaagcgggcgccggcaccacctgcgccggcacggccaaaaccgattaccagggtaacgcctggaagctggtgcccaccggcagctgcgtaaaaatgaaatcgccgacgtcatcgaccggctttggtcaattggacgcgtttaaagagatgtaa

SEQ ID NO: 442507 - DNA, 288 bp, Serratia marcescens
ttgtgggagggctaccgactgctgcaggcgcagcgggacaacggcacgcgccgcacctggagctatgacccggccaacgcctggacgccgctggcggccctcgagcaggcgggcgacggccagcaggcggatatctactggctacacaccgatcttaacagcgcaccgctggaggtgaccgacgccgagggcaacctgcgctggtccggcaactacgacaccttcggcaaactgcaggggcagacggtcgccggcgccgaacggcgtaagggcgcgctcgttgactaa

SEQ ID NO: 442508 - DNA, 279 bp, Serratia marcescens
atgaaaatcagcacgttgctgatgttgttccctctgctgatgccggcatcggtgcttgccggcacggtactctataccgattctcaccatcccccgaccaacatcgatgcgtcggtatccgtgatttatcttgacggcccggaacagctgcagaagcaaatgttcggcgagctgtcgtcaaacccggatgaagccgaggacaggcgtaaggaaggcagtaactctaacgtcagcagcggcagtacgatgtaccggggcgacgcacgcgcaagacggtaa

SEQ ID NO: 442509 - DNA, 396 bp, Serratia marcescens
atgaataactcattgaaatttaatgcctcagtgttggaatgttacgaagaggacgatgtgctcactgttgctctgggcgataatgagcagtcacctgagaattatctaatcattactcggttggatgatgaagataatgactcaattgatgaggggatcggcctgcaaacatcacagtccgcctatgaagcatcggcagcgatcgagaaagtgattttgcattctgaccgtttagatgtagttatcacgcctgattcacatgagcatttcggttgctcgaagctcgaaggtgtgttctctgaaacggtgcgtaatacgcctgaaaaaattgctctgttgcgaaagtatcttgaagcaattttcaacggtagtaagacgacccttgtcttttcatga

SEQ ID NO: 442510 - DNA, 4254 bp, Serratia marcescens
atgagcgaagcggcacgcgtcggcgatgcgattggccactcccatgcactggcggggatgattggcggcacgttggtcggcggtctgattgccgccgccggcgcggtggcggcgggcgcactgtttgtcgccggtctggcggcgtcctgcgtgggcgtcggcgtattactggtgggcgccagcctggcggtgggctatctcaccggggagctggcgaccaaggcgcgagacggcattgcggaggccggcgcagggagcctgacgccggccggcaagatagtgaccggctcaccggacgtgcgcatcaatggcaagccggcggccatcgctaccgtcagtcaggtcgcctgtgaccaggacggccccagcatgcagatggcgcagggctcggacaaggtatctatcaacggccagccggcggcgcgcgtgggggataaaaccaactgcgacgcccaggtgatggaaggctcgcccaacgtgcgcatcggcggcggcaccgtcaccaccttgccgataaaaccggaagtgccggactggttgtataaaatctccgacctgacgctgctgtttgccggtttggtgggcggcgtcggtggtgcggccagcaagctgggtgcactggggaaaatgctgagcaaggcgcccggcatcaataaactggggcggacggcctgccggttcggcacgctaatgaccgccacggccgccgccggcattattgcccggccgatagatatcatcagcggccagaaattcctgtccggcgacgacgagctggactttgtgctgccgtcgcggttgccggttgagtggcagcgctactggcgcagcggcaacccggcacagagcgtgctggggcgcggttggagcctgttctgggaaagcagccttaagcgctaccaggatggtctggtgtggcgtgcgccctccggcgactacgtctccttcccgatggtgcccaaaggtcataaaacctactgcgaagcggaaaagtgctggctgatgcacaacagcgatggcagttggcaggtgttcgacgtcagcgagcaggcctggcactacccggcgttgagtgatgcgccgagccggctgcagatgctgactgacctcaccggcaacacgatttccctgttccacgacgaccacggccgactgaccgaactggtcgacagcgccggtcagcggctggcgtgccgctacctgaccaccgccaacgggctgtcccgcctgagctcggtgctgctgtttaccccggacggcgagctgccgctggtgcactacgggtacgatgacgaggggcagctggttaccgtccgcaaccgcgccggcgaagtcacccggcgctttggctggcaagacggactgatggtcagccatcaggaccagaacggcctgctgaacgagtaccgctggcaggaaattgacggcctgccgcgcgtggcggcctaccacaacagcgccggcgagcagctggcgctctattatgactttgccaacggcacacggtgggcggtgcgcgaggatggcaaacgggcgttgtggcagttggacgatgacgacaacgtggcgcagttcaccgactttgacaaccggcagtcggccttcatctatgtgcggggcgagctgtgcggcgtggtgctgccgggcggtgcgcagcgccagagcgagtgggaccgttacggccgcctgctgagcgagaccgacccgctgggccgcatcaccacttaccagtattcccgcaacagcggccgtctgttctcggtcacctacccggacggcagtcaggcgtttcagcactgggacacccagggacgcccgacacagcagattgatgcgctgggcaatgttacccgttaccactatcccgatgaggaggagagcctgccggcgagcgtcatcgatgcgctgggcggcgaggtgaaactgacctggaacgcacagggattgctgacgcgctataccgactgttccggcagcgtcaccgcctacgcctatgacgcgctggggcaactgacgcaccgtaccgacgcggaaggtcacctgacccgctaccgctgggaccgagccggccggctgcagacgctgctgcatcccgacggcagcgaagaacgtttcgactggagcgcgcagggccagctggcccgacaccaggacccgctcggcagtgagacgcgctggcagtacaacctgctgggacagccggtcagtgtcaccgaccgcatccagcgcacgcgccgttatctctataactgccgcggctggctgatgaggctggaaaatggcaacggtgccgattaccagttcagccacgatgcggttggccggctgatgattgaacggcggccggacagcatcgaccgtttatatcgctatgggcttgacgggcaacttaccgaataccgggaagtcgcgtcgccggacgtggagccacagccgtccccgcggctgcaccaattccgttatgacgacgccggccagcttgtctggcgcgccaacgacagcgccgagtggcattaccactatgatgcggccgggcgcatgagccgcctgacgcgtacgccgaccgctgccggcatcgcactgggtatcgagccggacagcgtgcagctgcgctacgacagggccggcaacctgctgagcgagcagggcgtcaacggcgagctgcagtaccagtgggatgccttgtccaacctgcaggtgctgacgctgccgcagggtgaccaactgcagtggctccattacggctccggccatgccagcgccatcaggttcaaccagcaactggtgagcgagttcagccgcgaccggctgcaccgggaaaccggccgtacccagggcgtactgcatcagcagcgccaatacgatgcgctggggcggcgcagctggcagagcagcgcattcgggcacatcagcaaaccggaagagggcgtgctgtggcgcacgttccgctatacagggcgaggggaactggaaggtgtcagtgacgcgctgcgcggcgatattcactatggctacgacgcggaagggcgtctgctgcagcaccgcgaggcgcagcagggcaagcccggccaccggctgcgctacgacctggcggataacctgattggtgagcagcgtgtcagccgtgacccggacgccgagctgccgccggcgccggtggtcgataaccgtctagaatactggcagcggatgttttaccgctatgacggctggggtaacctgacccgccggcgtaacggggtttaccaacagcattacgtctatgatgcggacaaccggctgataaaggcgcacggccgcggcccgcagggggattttgcggcgcagtatcactatgacgcgctggggcgccgcacgcacaagacggtaacctacaaggggaaagcgccggaaaccacgcgcttcttgtgggaaggataccgactgctgcaggagaaacgggacaacggcacgcgccgcacctggagctatgacccggccaacgcctggacgccgctggcggccctcgagcaggcgggcgacggccagcaggcagatatctactggctgcacaccgacctcaacagcgcaccgctggaggtcacggataacgagggcaacctgcgctggtccggcaactacgacacctttggcaaactgcaggggcagacggtcgccggcgccgaacgacgcaagggcgggctcgttgatcagccgctgcgttatgccggccagtaccaggatgacgaaagcgggctgcattataatctgttccgttactacgagccggaggtggggcgctttaccacgcaggatccgatagggctgcgcggcgggttgaacctgtatcagtatgcgccgaatccgcagggatgggttgatccgttaggtttagcttttggttcaggtaaaggtacacataatgccaaggcaacattatttgatagcaatggcaatgttaaagcgacaggtgtgtggcaaagtgggaacatgactccggatgaggctgctttaggattcccgcagagtacacttgccacgcatacagaagcgaggattactcgtgagttacatccacaggcagctcctggagatcgacttgttattgatggcgaatacccaccttgcaatagttgtaaagggaagatgaatgccttcaaaactgctacaggtgctgaggtagaatataaatggcctgcagatacaggcgatggaaccaagatctggaatgctaagtcgaaaggaaccaggaaaataccaggcgcggattgctaa

SEQ ID NO: 442511 - DNA, 2364 bp, Serratia marcescens
atgaaaatgctaaagaactggagcctcgccggccaatatgacgaccgcatcgaactgctggtggatgatcagcatctgttttgcctctacgtgctggaggaggatctgttccgcgtgttgctgaaacgcaacggcgagctggcgctggaccgcacctggagcattgcgccgcagcaggacgtgccgtgggaagggcgcgaccggctcagcgtggcgggcttcagcctgccgggctaccgcctggagcagcatgacgatcggctggtggtgaccagcgccgcgctgcgggtgacggtgcatcagcccctgtggctggagtgggagtattgcaccgccgacgggcagtggcgtccgctggcggccgaccggccgaccagcgcctatctgctgaacgcgcacggcgacggcgtggcgcactatcagcgccgcttcggcggcgagcactattacgggctgggggaaaaatccggcgatctggagcgcagcggccgccgttttgagatgcgcaacctggacgccatgggctacaacgcggccagcaccgatccgctgtataagcatattccgtttaccatcacccggcgcgaggacgtcagcttcggcctgttttacgataacctgagcagctgctggctggatctgggcaatgagctggacaactaccatccggcctaccgccgctatcaggcggaggcgggggatctggattattacctgttcctcgggccgcaggtgctggacgtgaccaaagcgctgctgcgtctgaccgggaaaacgcacttcggtccgaagtggagcctgggttacagcggctccaccatgcactataccgacgcgccggatgcgcagcagcagctgcagcagtttatcgccctgtgccggcagcatgagattccctgcgattcgttccagctctcctccggctatacctcgattaacgataaacgctacgtgttcaactggaactacgacaaggtgccgcagccgaaggcgctgagcgcggcgttccaccaggccgggctgaagctggcggcgaatatcaaaccctgtctgttgcaggaccacccgcagtacgcagcggtggcggagcaggggctgtttatccgcgactcgcaaagcgacgcgcctgagcgctcgagcttctgggacgacgaagggtcacacctcgacttcaccaacccggcgacggtgcgctggtggcagcagggcgtcacgcagcagctgctggagatgggcatcgattccacctggaacgacaacaacgaatacgaagtgtgggatggcgaagcgcgctgccacggttttggccggccgatcgccatcaagcatatccgcccggtgatgccgttgctgatgatgcgcgcctcgatggaggcccagcagcgctttgcccccggcctgcggccgtacctgatttcccgctccggctgcgccggcatgcagcgctatgtacagacctggagcggcgataaccgcaccagctggcagacgctgcgttacaacatccgcatggggctggggatgagcctgtccgggctgtataacgtcggtcatgacgtcggcggcttctccggtgataagccggacgccgagctgctggtgcgctgggtgcaaaacggcgtgatgcatccgcgttttaccattcactcctggaacgacgacgccacggtgaacgagccatggatgtacccggcagcgacgccgatgatccgtcaggcgatcaacctgcgttatcagctgatgccgtatctgtatacgctgttgtggcaggcctgcgccgaggatgagccgatgctgcggccgacattcctcgatcacgagcaggacagccgcgtctggtgcgaaaacgacgattttatgctggggcgcgatctgctggtggccagcgtggtggagccggagcagcgtgagcgtacggtatatctgccggataaccaggcgggctggtactgcttctacagcggccagtggttcagcggcggacagagcgtgacgctgccggcgccgctggagcgtttgccgctgctggtgcgggccggcgccgccttgccgctttcgcgccgtctggcgcacgttgacgtggcggcggatgaccagcgtgaacttaaactgttcccgctgcagcagggcgagcgctcagggctgctgtttgaagacgacggcgagagcgacgcctggcggcagggcggcgcgctgtggctgcgctggcggatgcagtgcgacgcgcagcgcattacgctgacgtttagccatgacggggatttccgcccggcgtggcggcggctggcggtgacgctgccggcggcggaaacgcgcgagctgtggatcaacggggaacgggcggacggctattcgctgagctaa

SEQ ID NO: 442512 - DNA, 1308 bp, Serratia marcescens
atgagtgttgagataaaccaggaagccgtgcacggcggacggcgtaagttcaaatcgttacgctggtggatgctggcgctgtttctgctgggggtgacggtcaactacattacccgcaactcgctgggcattttggcgccggagctgaaaaccagcctgaatatgaccaccgaacagtattcctgggtcgtcgccgctttccagctggcgtacaccctgttccagccgctgtgcggctggctgattgacgtgatcggcctgaaaatgggcttcctgatttgcgccagcgtctgggcgttggtctgtatgctgcacgccggcgcgggcagctggctgcaactggcgatcctgcgtttctttatgggcgcatcggaagccgccgccacgccggccaacgccaaggcgatttccgactggttcccgaaaaaagagcggccgattgccgccggctgggccggggtgggcttttccgtcggcgcgatgctggcgccgccgattatcgtggttgctcacgtctcctttggctggcagggcgcatttttgttctccggcgcgctggcgatggtttgggtgctgctgtggtggcgcttctatcatgcgccgcagcagcacccgaatctgagccaacaggagctggcgctgatcggtgcggacaatgagccagaactggcgcgtctgccgttttttaaatccctcaaactgctggccaaaaacaaaaaattctacggtatcgccattccggccttcctcgccgaaccggcctgggcggtcttcagcttctgggtgccgctgtacctggccagcgaacgcggtatggacctgaagcagatcgccatgttcgcctggctgccgttcttggcggcggatatcggcagcgtcgccagcggctacctcaccacgctgtaccgtaaatggtttggctgcacgcgcgtgaactcggtggtcgccagctcggtgaccggcgctttcctgatggtgtcgctggcgtttgtggcgatcaccaaagatccctatctggcgatcctgctgatttcgatcggcggtttcggccaccaggtgatctcctgcatgttgagcgcgctggtggtggagtcgttcgataaaaatcaggtggcgacggtcaacggcatgcgcggttccagcgcctggatcgccagcttcctgttcacgctgctgatcggcgcggtgtccgataccgtcggcttcggcccgctgtttgtggcgatgggcttctttgacctgatcggcgcgctgttcctgattgccctgattgccgagcgcggcaagaaaaaaaaccttaacccgtaa

SEQ ID NO: 442513 - DNA, 1083 bp, Serratia marcescens
atgaacggaaagctgaaagtgcaggaaattgcccgccaaaccggcctgtcaatcagtacggtttcccgggttctggcgggcaaggccaacaccagcagcgccgcacggcaaaaggtgctggagtgcgcgcagcgcaacggcattttgcacgccatttccagcgggcgcctgatgctcaacagcgtgatggtgtttgcgccacagcgcgcgtttgacgtgcgcaccgatattttttactaccgggtgattcaggggattatcgccgcgctggcgcagcatgaggtcaggatccgctattgcgcgctggaagaaacgcacagcgacggggcgctgttcctggccaaaatgaatgagccgcaaacccaggcggcgctgattatcggcatcgatgacgagcatatccacgcgctggccgccgatctcaacaaaccctgcgtgctgatcaactgcagcgaccgcagcatgcggctcgacagcatctcccccgaccatcagcgcatcggcgaattttccgccgactatctgctgcagcagggccaccagcgtattctgcacctacagtgcctgcgccgccgcactatggagctgcggctggccggcattcgccaggcgtatatgcagcagcacatgccgtttgatgaaagccggcagctgatcaccacctccggcttcggcagcgcggaggcggaacaggcgctcgcgacctttatcggccagctcggtgaccgcaacgcattgccgacggcggtgctggccggcggcgactatatggcggtcggcgcggttaacgccctgcaacggctcaacttcagcgtacccaacgatatgtcggtgatgagtatggacggtttcaacctggcggaaatccacgacgtaccgctgacctcgctgcacgtgccgcgcgacgaactgggcgcggaagccatccaactgctgcaacggcggatgctgcggccggacgccccggtctgcaacctgctgctgcaggggcggctggcgatccgtgaatcggtcaagcgtctgaacgcgcagcaggcgacgccggcggtgagcacttaccaccacaagctgtatgacgtgtga

SEQ ID NO: 442514 - DNA, 1026 bp, Serratia marcescens
atgtctaacctgcttgctcgttccgttattccgccttatatcctgcgacgaatcgtcgaacacggcagcgtaccgcagcgcgattgcgcccagcataccctgaaccatgtacagagcctgctcggcaatatgccgctgcgcgccgccggcacgcaaaccgccgccgccggcagcgtggagcgcgatatctatgacgcgcaaaacggcacccaactgccgggcaaggcggtgcgcaaagagggacaacccagcaacggtgacgtggcggtggacgaagcttacgactacctcggcgttacctacgacttcttctggcaggcctttaaacgcaactcgctggacaaccaggggctggtgctgaccggcagcgtacattacggccacgaataccagaacgccttctggaatggccagcagatggtgtttggcgacggcgacggcgaaatcttcaaccgctttaccatcgccatcgacgtcgtcggccacgagctggcgcacggcgttaccgaaagcgaagccgggctggtctattttcagcaggccggcgcgctgaatgagtcgctgtccgacgtctttggcgcgatggtcaaacagttccacctgaagcagaccgccgagcaggccgactggctgatcggtgaaggcctgctggccgagggcatcaacggtaaggggctgcgttcgatgtccgcccccggcaccgcctatgacgacccgctgctgggcaaagacccgcagcccgccagcatgcaggattatattgataccaaagaggataacggcggcgtccatctcaattccggcattcctaaccgcgcgttttatctggcggccagcgccctgggcggctatacctgggaacaggccggcgtagtgtggtacgacacgctgtgcgacaaggcgctgccgcaggatgccgacttcgccacctttgctgcgctgaccgttaagcacgccgggcaacgtttcagccaacaggtggcggataaagttcaggcggcctggcggcaagtgggggtggaataa

SEQ ID NO: 442515 - DNA, 342 bp, Serratia marcescens
atgcgtccgctgccatcgttcagccagataacggtgattgaactggcccgggaaggcggcttcgcctttattcccaaactggccggactgcggcgcatcgtcgtcgccgatatttcgccggatgaatgccaacgtctggaacagttgctcaatcagtcactgccctacgcccgcgaggaggggcagcccgactcccccggccgcggcgaccagcgttattttcgcgtacagattgattactacggccaggagggcagcagccaaatcgtgctgctgatcccggaaagcgaagcgccgcaggcgctggtcgatctgtggcagaccggtcaggtggataaatag

SEQ ID NO: 442516 - DNA, 225 bp, Serratia marcescens
atggacgcactgtgtcctgactgcggtcagccgctggcgtgggagaagggtcactttcactgtcagggctgccagcgcgactaccgacagctggccgactgcccggagtgcgggcagccgctgcaggaactgaaggcctgcggcgcggtagattacctgtgccagcacggccacgggttaatcagcaaaaagcgcgtgcgctttcgctatctgccgctgacctga

SEQ ID NO: 442517 - DNA, 957 bp, Serratia marcescens
atgtcctgggaaacctggaattttgcattcagcgttaccgtaccgaatttattgatgatgttgctgggcgtgttcctgcgctatcggcgtctgatggacgatcgctttatcgacggcaccagcaagctggtgttcaacctggcgctgccttgcctgctgtttttcagcattgccaccaaccatccgcatatcctggctaatctgccgctggtgatgtacggcgcgctgggcaccgtcgccacctttctgatgctggagatcgccgcgctgtggctggtgaaagagccgcgcgagcgcggcgtcttcgtgcaggggggctttcgcgccaataccgccatcgtcggcctggcctatgcgatgaccgcctacggcgatgagggcgtggcgctggggtcgttgtatctgacggtcaccgtgattttgttcaacgtgctgtcggtgatcaccctgacgcgcagtctgcagggcgggccggacaagaaaatcagccgcctgtcgctgctgcgcggcatcgtcaccaatccgctgattatcggcctggtgtgcgggctggcgtatgcccagaccgggctgggcattccgcaggtgattgtgcagaccggcagctatatctccggcctgtcgctgccgctggcgctgctgtgcaccggcgccagcctcgacctgcgcgcgatgttccgctcctccaacgtggcggcgctctcctcggcggccaagctgtttgtggtgccggtgctgatgacgatgggcggctggctgtgcggctttgagggcgcggcgctgggcattattttcctgttttccgccacgccgaccgcctccggcagctacgtcatgacgcgggcaatgggcggcaacgcgacgctggcggccaatattatcgccatcaccaccgtcggctctttcttcaccaccgcgctgggaatttatttcttacgttcctggggcgcaatctaa

SEQ ID NO: 442518 - DNA, 1182 bp, Serratia marcescens
atgcaattgcgtaaaacactcttggtcgggctggtttccgccgccctgctgagcggttgttcgctgttcaacagcgaagaagacgtggtcaccatgtctccgctgccaaaagttgaaaatcagtttactccgagcaaaacctggagcacctcggtcggcgacggcatcggcgaatattattcgcacctgcgtccggcctaccaggacggcaccgtgtatgctgccgaccgtcatggcattgtgaaggcgctggacgccgaaagcggtaaagaaaagtggaaggccgatctgtctgagaaaaccggcttcttctcaagtaaccgttcagccctgttatccggcggcgtgacggttgccggctccaatgcctatgtgggcagcgagaaggcggtggtttacgcgctgaacacctctgacggcacgctggcctggcaggccaaggctgccggtgaagtgttgtcccgtccggtggtgagcgacggcatggtgctggtgcataccagcaacggccagctgcaggcgtttaatgaagccgacggcgcggtgaagtggaccgttaacctggatatgccggcgctgtctctgcgcggcgaatccgctccgtccaccgcctacggcgcagcgattgtcggcggtgataacggccgcgttaacgccgtgctgatgcagcagggccaactgatctggcagcagcgcatttcccagccgagcggcgccacggaaatcgaccgtctgaatgacgttgacaccacgccggtgattgttgacggcgtagtctacgcattggggtataatggcaacctggcggcgctggatctgcgatccggccagattatgtggaagcgcgagctgggttccgtgagcgattttatcgttgatgccggccgtatctatatggttgaccaaaacgaccgcgtgattgccctgagcaccgaaggcggcgtgaccgtctggacgcagagcgaactgctgcaccgtaacctgacgccgccggcgatgtataatggttatctggtggttggcgattccgaaggctacctgcactggatcaacaccaccgacggccgtttcgttgctcagcagaaagtggacagctccggcttcctgtctgcgccgatggtggcgggcgagaagctggtggtgcaggccaagggcggcgaggtttacgcatttacccgctga

SEQ ID NO: 442519 - DNA, 621 bp, Serratia marcescens
gtggaagtctataccaccgaaaacgaacaggttgacgctctccgtcgcttctttgccgaaaacggcaaggcgctggcggtcggcgtggtgcttggcattggtgccctggttggctggcgtatctggcagagtcatcaggactccaatatgctggctgcctcccagtcttatcagcagaccagcgaagcgctggctgccggcaaatcgggcgacgtcgccgctgcggagcagttcattcaggcgaatggcaacagctatggcgtgatgacggcgatggagctggcgaagcatttcgttgaacaaaaagattttgcaaaagcggaacagcaactggtgttggcgcaggggaaagcgaaagaagataacctgctgtcaatcgttaacctgcgtttggcgcgcgtccaactgcaggaaaaaaagctggatgaagcactgaaaacgctggatggcgtcaaaggcgaaggctgggcggcgatgcaggcggacatccgcggcgacgtactgctggcgaaaggcgacgccaagggcgcgcgtgaagcctacagcaaaggtcttgaatccaatccttctcaggctcagcaggcgctgctgcgcatgaaattgaataacttgtccagctaa

SEQ ID NO: 442520 - DNA, 981 bp, Serratia marcescens
atgaatactgaagcctcccaagacaaaaccgtatccatgacgacaggcgagcgcctgcgtcaggcccgagagcagctcgggctgagtcagcaggccgttgcggaacgcctgtgcctcaaaatgtctaccgtacgcgacatcgaagcggacaacctgtcggacgatctggcttcgacctttgtgcgcggttatatccgctcttacgccaagctggtgcatgtgccggaggatgaactgctgccggcgatggccaagcagacgccggtgaagatggccaaagtggcgccgatgcaaagcttttcattgggcaaacggcgcaagaagcgcgacggctggctgatgagctttacctggctgatcctgtttgtggtgatcggcctgaccggcgcctggtggtggcaaaatcacaaggcgcagcaggatgagattgccaacatggccaaccagtcatcggcgcagctgtcgcagcagagcgaaggccagtcggtaccgctgacggacaataatgccgatacgcagacgccggcagcggatgccgctccaacgcctgcgccggccgacagtgcgccggcagcgcctgcgccgtccacaccatcggtcgccagcggcagcgacgccgcgcagcagccggcggtggtggcgccaagccaggccagcattcctgatgccgcgcctgccgataacgccgcgtcattgccgaccggtgatgccgccatggccgcgccggcggtcgacccgaatgcgctggtgatggatttttccgccgattgctggttgcaggtcaccgacgccagcggtaaaacgctgttcagcggcatgcagaaaagcggcggtaagctgaacctgaccggctccgcgccttacaagctgaccatcggtgcgccggcggcagtgcagattcaatatcaaggtaaaccggtagatttaagccggtttgttaagtcaaaccgtgttgcccgtctgaccgttgccgcgcagtga

SEQ ID NO: 442521 - DNA, 738 bp, Serratia marcescens
atgaagctgaaatcctggggatggctgttgacggcaggcctgttggccggctgttccggttcggtgccggataacccggcggcggcgcagacgcgtctgcagctgggtttggcgtatctgcagcagggcaacctggaggcggcgcgtaaaaatctggcgaaggcggcggacgccgcgccgcaggattaccgcacccagctggggatggcgctgtatcagcagcgcatcggcgcgtccgatgctgcgcggcagcgttatcagcaggcgctgaaactggtgccgggcaatggtagcgtattgaataattacggtgcgtttctttgcagtttagggcagtatgtagaggcgcaacagcagtttagcgccgcagcgtcagccgccgattacggccagatcgccgacagtctggaaaacgcgggttactgttttttacaggctgatcaatacgatcgggcgcggccgctgctgatgaaggcgttaaagatcgacccggataaaggctcaccgctgttggttgaggctgaaaagcaatttggtgcagggaaacgtgcgcagtcgcagtttctattggatgtttatcagcacgttctgccggccagcgccgacagtttatggttacagattcgtttcgccgcgttagccggccgtcaggatagcgttcagcgctatggaaggcagttagcgcgaagttttccacaatccaaacagtaccagcagttcttagccgatgaatactga

SEQ ID NO: 442522 - DNA, 834 bp, Serratia marcescens
atgagttcccaccaccacgataatgtcgccgctgacgacaatgaactggagcgcctgctgaagctggcggtcagcgaagcggcgcaccggccggcgtttttccgcgagctgctggagtcgaccgtctatatcctaggcgacggcgagcaggtgcagcagcagggcgaaatcgtcctgaatgcggatacgccggtgaacattcagcattgggaaaagcaggacggcagcagcgtcgtgccgttcttttcctccctgcgtctgctgcagcaggcggtagaggacgaacagccgtttatcgccatgccggcgcgggtactgtttgaaattacccagggcgctgaactgttcctgaacccgaaggcggaatacggcaaagagttttatccggaagaagtggcgatgctgctggcgaacggcggggtgagcaagccggttgaacactatatcgataaagaatcgcaaatcctgcttggccagccggaggtgtatccggcggcgatggtggatgcgctgaccacgctgttcagccagcgcaagccggtacgccgggcattcctggccctgatgcatgaccgtgcgctggatgagaaacccaatctgctggtcggcgtggaagtggacggcgatgcggcggagatcgatgcgctgattcaggaagcgggcagcgtcgccagcgaagcgctaccggacgatgagccggtggacttctgcctggtgtcggaaaaagagcgcggcgtcagccactacctgatcgcccatacccagccgttctatcagcgtcgctggggcagctggctgcgcaacatcattccttccacggataccacccaatag

SEQ ID NO: 442523 - DNA, 519 bp, Serratia marcescens
atggattactttactttattcgggctgccagttcgctatcccgtggacggcagcctgcttgcatcccgctttcaggatctgcaacgtcaattccatcccgaccgttttgccagccagccggaacgtgaacgcctgatggcgctgcagcaggcggcgaccattaacgaagcctaccagaccctgaagcacccgttaaaacgcgccgagtatatgctatcgttgcacggttttgatctgggtaatgaacaacataccctgcgcgatacggcgttcctgatggaacagctggagctgcgtgaagagcttgacggcattgaacgcaaagcggatgacgccgcgctggccgcctttggcgaacgcctcgccgccgccgtcagacagcgcagcgcccagatggtgcagcagttggacagcgaacagtggaccgacgccgccgataccgtgcgcaaactgcgctttttggacaaactccagcaacaggttgaacaactcgaagaaaaactgctgggttttgagtga

SEQ ID NO: 442524 - DNA, 1020 bp, Serratia marcescens
atgtcactaaacctcggcagctcgccgcttcgtcgccgtcattgggccgccagcctgtggccattactgttgctgctggcgctggcggccggtgcgcagctggtgtggcactattggccgcaaattatgctgcagagcgtggcgtggcagaaaacgctgaaccagcagctggcggcgctgttgcagcaggtgaaagccgatccgcagcgcgccggaatcacgctgatgctgttcagcctgagctacggtgtattgcacgcgctggggccgggccacggtaaagtggtgatttcgacctatctggcgacgcatccgacgcggctgaaaagcagcctgaaactgacctttgccgcttctttgctgcaggggttggtggcggtggcgttggtggcgctgctgctgggcgtgctgcagctgtcatcgcgtcaactgcaccaaagcagcttctggctggagcagggcagttacctgctggtggtgctgttgggcgcactgctgagctggcgggcgctgcgccgtctggccgccgcgctgaaggcgctgaagccggcaccggcgttgcgtatccagcgtctgcagccgctggctgacgatcacgtgcacagcgcgcattgcggctgcggacaccgtcatttacccagcgacagcgaactgcaggccggcagcgactggcgcacgcgggcggcgattgttctggcgatgggcatccgaccctgttccggcgcgattctggtgctgctgttttccaaggtgctgggcgtgtttgcctggggcgtggcgtcggcgctggcgatggcgctgggcacatcgctgaccatttcgctgctggcgctgtttgtacattacggtcgccggctggcggaacgcatcagcgtgtcgcgcgcgtcggcaaactggcaggcggtggcgtggggatcgctggcattgctgggcgggttgttgttgctgtttgccggggtattgctttacgccagcgcgcagccggagttcagcggcggggtgcggcctttctcgcgttaa

SEQ ID NO: 442525 - DNA, 636 bp, Serratia marcescens
atgatgaagctaagaggtttgctggttggattggcggcgtggtatagcgtggatgcagcggcgcatccgcacagtttcatcgatatgaacaccacctttgtggtgcaggaacagcaactggttggtttgagaatggtgtgggtgatggacgaaatgacgtcggcggacctgttgtacgatgcgcagaatgccaaaagcgactcggaaacctggaaaaaactggcggcgcaggtgatggccaacgtgttggggcagcactactttaccgatatctaccgcgacggcaaaccggtgaaatataccaatttgccgccggaataccggctttcccgtcaggggcacaaggcggtgctggagtttgtcctgccgctggcgcatccgcagccgctggcggggaaaccttttagtatctccacctatgatcccacctactttgtcgatatgagctatcaggcttcatcggcgatccatctgccggccgagatggcgcagcagtgtcgcttcgagctgttcacgcccacaccggacgcctcgctgcaggcgtatgcgctgtcgctggataaaaacgattcgccgggagaggacctgcagcttggccaacaattcgcccaacggattactttacaatgtcactaa

SEQ ID NO: 442526 - DNA, 1266 bp, Serratia marcescens
atgagcctggacacttcccccgtgcctgagctctccagtcaacagcggcgctgccgcctgctgttgctgctgtttactccgccgcctacggtaaaactggagactatcagccacatcaacggcgtcgacctccccaccacccggcaagatatcgccgaggtgagcagtgaaatccggcgattccatcacctggagatcgcgggaacccccgaagagggctaccaactgaccgggagcacgctgaatcaacgcctctgtctgatccattggctacgacgggcgctgcgctgctgcccgcagtttgttgaagacaccttcagcccgcagctgcaccgggcgttgaccctcgacagcgcccaggcggcccgcttgcagcaggcgttggaaaactgtgccgccacgctgaaacagccgcttgaggagcgcatccgcctgttcctgccgccctatctttgctactgcctgtgggaaatccgccaacagcgccacccgtcgttcaccgacgcccagcgcgcctggctgcatcagaagccggagcaacaggccgccgccaggctttatccgctgctgctggcgctgtcccgtcgcccccctcaggccgatgaacaagactttctggtgctgatgttcaccctgttaaaaaaccacagctatgagagcgatcactctgacgaagatttacgcctgatggcggcgatcgaacggatggttgaacatttccagcagctttccggcatgagtttcagcagcagagcggacctgattacccatctgttcgcccatctggcgccggcggtagagcgctgccactttgatatcggtattgataatatgctgctggaagaagtggtacgtaaatacccgcggctgatgcgcaccacgcagcaggcgctggagccgtttgagcaggaatatggtattcgtttttcgcgcgaggaggccggcctggtggcgataagcttcggcgcctggctgatgcagggcaacgccctgcaggaaaaacaggtactgctgctgacgctggataacccacagctggaggaagagctggagtatcagctgcgtgaactgacgctgctgccactcaatatcaaatatcagccgctgcgcgactttctgcgttccggcgcgccgcatgacgtcacgctggtgatcaccccttacgccgcgccgccgcaggcaacgcagccgcctttgatctacaccgaactgccgctggcgcgcgggcaacgcaagaccctgcgcgccctgctggaaactccttaa

SEQ ID NO: 442527 - DNA, 1146 bp, Serratia marcescens
atggttctgcaatcaacacgttggctggcgctcagctatttcacctacttcttttcttacggtatttatctcccgttctggagcgtttggctcaagggcgaagggctggagcctgatgtcatcggtattctactgggcgccggactggtggcgcgctttctcggcagcctgctgattgcccctcgggtgaaagatcccgccaatctggtgacggcgctgcgcattctggcgctgttgacgctggctttcgccgtcggcttctgttttggcaacgcctggggctggctgatgctggtcatcgccggttttaacctgttcttttcaccgctggtgccgctgaccgacgcgctggccggcacctggcaaaagcaaattacgctggactacggccgggtgcggctgtggggatcgctggcgtttgtgattggctccgcgctgaccggccaactggtggcggtctggggacaccacgccgttttatattgtctgcttgccagcctgctggcgatgttgctgggcatgttgctgaagccgacggtgatgccgcagggggaggcgcgcgtgcagaaccagccgcaacgctcgtggcgcgagctgctgacggaagggccggtctggcgttttctgctgtgcgtgacgctgctgcagggcgcgcatgccggttattacagctttgcgtcgatttactggcaggagtccggctactcggccgccactatcggctatttctggtcgttgggcgtggtggccgaggtgatcgttttcgccagcagcagcctcctgttccggcgctggaacgcacgcaatctgctgctgctgtcggcctgctgcggcgtggtgcgttgggggctgatgggggccaccaccgacttgggctggctgctgctggtgcagatactgcactgcggcacctttaccgtctgccacctggcggcgatgcgctttatcagcgcacgcagcgggccggacgttattcgtctgcaggcggtttattccggcctggcgctgggcggcggcatcgcggtgatgacggtgatcgccggcttcctgtttgaacactggcagggcggcgtattctgggtgatggcggcgcttgtgctgccggcgctgtttatccggccgccggcggtcagcgtcgcgcgttaa

SEQ ID NO: 442528 - DNA, 1191 bp, Serratia marcescens
atgctggatcaacaaaccatcgccaccgtccaatcaaccattcctctgctggcggcgaccggccccaaactgactgcccatttctacgaccgcatgtttacccacaatccagagctgaaagatattttcaacatgagcaaccagcgtaacggcgaccagcggcaggcgctgttcgacgccatctgcgcctacgccggtaatctggaaaacctggcggcgctgttgccggcagtggaacgcatcgcgcaaaaacataccagcttcaatatccagccggagcagtatcagatcgtcggcacccacctactggcgacgctggacgaaatgttcagcccgggccaggaagtgctggatgcctggggcaaagcctacggcgtactggccgacgtgtttatccagcgcgaggggcagatttatcaggaaagcgccaccggcgacggcggctggcgcgatcgccgcgcgttccgcattgtgaagaaacagccgcagagcgacattatcagcagctttattctggcgccggtggacggcggtaaggtggttgactttaaaccggggcagtatctggcggtatatatcaaggacgatggcctggaacatcaggaaatccgccaatattccctgaccgccgcccctaacggcgaatactaccgcattgcggtcaaacgcgaggatcgcgggctggtatccaattatctgcatcagaaagcacaggaaggcgatgtcatcgatatcgcgccgccgcacggcgacttcttcctcgacgtggcgccgaccacgccggtggcgctgatctccgccggcgttggtcagacgccgatgctgggcatgctcaatacgctgcacgccaaacggcatcaggccgaggtgcactggctgcacgcggcggaaaacggccaggtgcatgcttttgccgatgaagtggcggctatcgccgcagaaatgccgaacctcagccgtcacgtctggtaccgcgaaccgggcaaggatgatgtggctggacgtgactatcagtcacagggtctgatggatcttggcgcgctgcgcgcgacgctggtgaatccgcagatgcactactacttctgcggcccggtcggctttatgcagtttgtcgccaaacagctgctggagatgggcgtcgacgccgaacgcatgcattacgaatgcttcggcccgcataaggtgctgtaa

SEQ ID NO: 442529 - DNA, 864 bp, Serratia marcescens
atgtacacatggtctaaacgcgctcgtctaccgaagaccgaaccttcaacgcgcgcgcagcaacgtgctttgctcggcaaacgtccgctctctttattggggacgctgttttttgtcccgctgttgctggcaggctgcgccgatcgcgccgtcagcggcggtttgggacagcagccccaagaggctattcctgacgccaaagtggtggattaccacatcgcgccttgcgacaccctgtggcagttggacggtaaagaagcgctggagaattccctgtactggctgcgtgccatggactgtgccgaacgtatcggatccacgcaggcgcgcgcgcaggcgagagcgctgccggccgccagctgggacggcgttttcaagcaaagcattctgctcggcagcgccgagccaacccaggcggagcggcgtcagatgctcgatcggcttaacggctatcgcctggatttccccagctctctgcgtccattgctgcagctgtggcgtcagcagcagcagcagcaggtagcgttggccgaagagcgactgcgttaccagcgtctgcaggaaaacagcgacaaccaggtcgatgctctgcgccaaagtcaggcgcggctgcaaaatcagctgcaggaaacctcgcgtaaactggagaacctgacggacattgagcggcgtctctcctcgcgcaaacagctgcagggcgagctgccggacaataacgcgccgcagggcaaggccggtaacggcgcctcggtgcgcaagacggctgagccggaaagcataccggaaaaaggcaccgccattcccgtcgagcctgaagatacttacgcgccacctgaggccaacaaggagtccgacgcgcaatga

SEQ ID NO: 442530 - DNA, 1464 bp, Serratia marcescens
ttgaaacaccaaaaactaaactacattctcatcggcgttatcaccgtgcttctggctcttgcgctctggccgaacatcccctggcgcagcggtcagggcgggcaactcgaagagatcatatcccggggagagctgcgcatcagtacgctcaactcgccgttaacctatttcactacccccaaaggcccgagcggcctggactatgaattggcgaaacgcttcgccaattatctgggcgtgaaactggtcgttttgccgcatcaaaacatcaacgatctgtttgacgatctggacgataatgatgctgatattctggccgccggcctgatctacaatcaggagcgcctcagccgcgcccgtaccggcccggcctactactccgtctcccagcaactggtgtaccggctgggcaatgcgcggccgaaaacctttgccgacattaaaggcaaactggcggtggcctccggctccgcccacgtcagcacgctgaaacagctgaaacacgataaatatcctgacctgcagtgggagtcatccagcgaccggacatcgcgcgagctgctggagcaggtggccgccggcaaactggactacaccatcggcgattcagtcagcatcgcgctgctgcagcgcatccacccgcagctggccgtcgccttcgacgtcgccgacgaggagccggtcacctggtacctgaaacgcagcggcgatgacagcctgtatgccgccatgctggacttcttcagccaaatggtggaagacggcacgctggcgcggctggaagagaaatatctcggccatgtcggcagcttcgactacgtggataccaaatctttcctgtcggcgatcgattcggtgctgccgacctaccagccgctgttccagaaatatgccacggcgtttgactggcgcctgctggcggcgatcgcctaccaggagtcgcactggaatccgctggcgacctcaccaaccggcgtgcgcggcctgatgatgctgacccgcgctaccgccgacggactcggcgtgaacgaccgcctcgacccggaagagagtattcagggcggcgcactctatctgcagcgcctgatggcaaaaataccggaaacggtgccggaagatgaaaggatctggtttgcgctggcggcctataacatcggctgggggcatatgctcgacgcgcgcaaactgaccaaaatgcaaagcggcaatccggacagctgggtcgatgtgaaacagcgcctgccaatgctcagccaaaagcgctactacccgcagctgacctacggctatgcgcgcggccgggaagcctataactacgtagaaaacatccgccgttatcaggtcagcctggtgggatacctgcaggaaaaagagaaaaaagccgcgcgggaacggcaggagcagaccgccatgatgcagagctatccggcggtgccggccaaactggcgctcaacctcgattaa

SEQ ID NO: 442531 - DNA, 1152 bp, Serratia marcescens
atggctgctgcaacattctatattccttccgttaatatgatcggctccggctgcctggaagaggcggcgaaaaccatgcaagagcaaggcctgcgccatgcgttgatcgtcaccgaccgggtactgaacgacatcggcgtggtcgcccaggtgcaacaactgctcaccgcacaggatatccagagctgcgtgtacgacggcactcaccctaacccaaccaccagcaacgttgaacaggggctggcgctgctgcgcgaacatcagtgcgactgcgtcatctctcttggcggcggctctccgcacgactgcgccaaaggcatcgcgctggtcgccaccaacggcggcgatatcaaggattatgagggcgttgaccgctccgccaaaccgcagctgccgatggtggcgattaacaccaccgccggcaccgcgtcagaaatgacccgtttctgtatcattaccgacgaagtccgccatatcaaaatggctattgtcgataaacacgtcacgccaatcctgtccgttaacgatccgcacctgatggccggcatgccgaaagggctgacggcggccaccgggatggacgcgctgacgcacgccatcgaggcctacgtctccagcgccgccaacccgatcaccgacgcctgtgcactgaaggcggtaaccatgattatggcgtcgctgcgcgatgcggtgaacgacggcaagaacatgcaggcgcgtgaagatatggcttacgcccagttcctggccggcatggcgttcaacaacgcctctctgggctacgtgcatgccatggcccaccagttgggcggcttctataacctgccgcacggcgtctgcaacgcggtgctgctgcctcacgtacaggagttcaacgcctccgtagcggcaggccgcctgaaagacgtcgccgttgcgatgggcctggaagtgagcaacctgaacgacagtcagggcgccgcggcctgtatcgcagccatccgcaagctggcgcaggatgtcggcatcccggccgggctgcgcgatctgcaggtgaaagaagaagacttcgatacgctggcggccaacgcgctgaaagacgcctgcggcttcaccaacccgattcaggccagccacgagcaaattgtcgccatctttaaagcggccatgtaa

SEQ ID NO: 442532 - DNA, 657 bp, Serratia marcescens
ttgagtgaccagtcacgccagaaggccgaagagtcgcgccgcatcgtgttcttcgatctggatggcactttgcatcaggaagatatgtttggcagcttcttgcgctttttattgcggcatcagccgctgaatcttgtgttggtgatccccctgttgccgttggtgggcgcggcgctgctgattgccggacgcgcggcgcgctggccgatgagcctgctgctgtgggcaatcacttttggccattcggaggcgcggttgcgggcgctggaagcgcgctttgtcgcctacttccgcgccaaggtgaccgcatttcctgtggtgcagatgcggttacgccagtatcttgatgcgcatgatgcgcaggtgtggctgattaccggttcaccggaaaggctggtggagcaggtgtatcaggattcgcggtttttaccgcgggtgcgcttgatcggcagcaggatgacgcgccgctatggcggctgggtgctggtgatgcgttgcctgggggaacaaaaagtaacgcagttggagcagcgcatcggcgcgccgttaaaattgtacagcggctacagcgacagcaaacaggacaatccgctgctgttcttctgcgaacaccgctggcgggtaagtaaagaaggcgagctgcagcagttggaataa

SEQ ID NO: 442533 - DNA, 1368 bp, Serratia marcescens
atggataagacggcggcactggcccggcagattttggcgggcgtcggcggcgaggggaacatcctcaagctggaaaactgtatgacgcgggtgcgtgtcgaggtcagcgatgaactacggcttgagctgtccctgttacagcggctggaaggcatcaaggggtacatcaagcagggcgggcagcaccagtttatcgttgggccgggtgcagccgccaaggtggtggatgagatgcgcgccttgctgagtgagcctgctgcctctctcgatgccgatgataacattgctgaaaataaagccgccgccaaagccaaatacgccgcgccgatgagcggggtgctgaaaaaactggctaatatttttattccgttgataccggcgtttatcgcctccggcctgattaccggcatcattaatcttttgaaacggccggatatcgccggcgatatcgccctgagctacccgaatattcttggcctgctggcgatcttcggcagcgcggtgttcgccattatgaatattttggtcggcgttaacgcggcgcgggtgttcggcggttcgcaggcgatgggcggggtaatggccggcattctttccagtccgcagctggcgcaaataaccctgtttggcgaggcgctgcagccggggcgcggcggcgtgatcgctgtgctgctggtggtggcgctgatgtgctggctggaaaagcgcctgcgcaggttgctgccggaatcggtggagctgattttaaatccgctgctgactacgttgattaccgcttcgctggcgattgcgatcctgcagccgttaggcggttatatttccgatgcgattacccacggtgccaacctggcgctggacaagggcgggctactggttggcgcactactgtccggcctgtttctgccgctggtgttgtccgggctgcatcaagggttggtgccgatccacgttgaactggtgcaggcgcatggtgccaatccgctgctgccgattttggcgatggcgggcgtagggcaggttggtgcaactctcgccgtactgttgaaaactcgtaacgcgcggctgaaaaaagtgattaagggcgcgttgccggtcggtattctgggcatcggcgagccgctgatttttggcgtgacgttgccgctgggcaaaccatttattggcgcttgcctcggcggtgcggtcggcggtgcgctgatcagctactggaaggtggcgacggtgattaccttcggcctctccgggctgcctttggcgttgactatcgtctcgggcaaggtgatgttgtatctggccgggatgctgattacgattgtagcagggttcattttcacctgggtcatggggttcaacgatcctgaggagtag

SEQ ID NO: 442534 - DNA, 894 bp, Serratia marcescens
atgaatttaggcgcactcgtatccgaaacccgcaatccagagacgatgacgttggatgaaatgtcgacgctggagatggtgacctgctttaaccgtgaagaccgtaaagtgccgcaggcgattgcggcggtactaccggagatcgctcaggcggtcgatttggcagcggcggcgctgcaggcaggcggccgcctgatttatctgggggcgggcaccagcggtcgccttggcgtgctggacgcgtccgaatgtccgccaaccttcggcgtgccgcacggtgtggtcgtgggtctgatcgccggcggccccggcgcgctgttaaaagcggtagagggcgctgaggatgacgcagcgttgggggagcgtgacctgcaggatctgacgttaacaccgactgacatggtggttgggctggcggcttccggccgtacgccttatgtgatcggcgcattgcgctatgcgcgtcagttaggttgcccgacggcggcgatctcctgtaatcccgactcgccgatcgctgcggaagcactggtggcaatttccccgctggtcggtccggaagcgttgaccggttcgacccgtatgaagtccggcactgcgcaaaaactggtgctgaacatgatctcaaccggcgcgatggtcaaactgggcaaggtgtaccaaaacctgatggtggacgtgaaggcgaccaacgtaaagctggtggatcgtgcctgccgcattgtcgttgaggcgaccggcgccgaacgcagccaggcggaaactgcgctggcgcagactgattttgaggtgaagccggcgattctgatgctgttggccggaatcagcgctgaagaggcgcagcggcgtttactggcgcatcacggctacctgcgtgcggcgttggcggattaa

SEQ ID NO: 442535 - DNA, 1551 bp, Serratia marcescens
atgcacacattaattgctgaaaaaatacgcacgcgtgttagcctcaacgcgatattggtaagttctttatatatcatatcgtccgtcgtgctgacctattctctgggttaccatggggcaaagggcattgatattctgctaatgctattaatattgctcacacttccctccattctgctactgcgttatctgctcgttattccgctatttatcctcagcgccatatacttccctatcggttacatttacggcaaaccctctatttcggtggtttcagccttactgcaaaccaataaactcgaggcccatgagtttttactttcaatgccgacggcatgttatctactgccagttttagttatcgcattattaattgcccttaatcgttattcctggaaaaaatctacatccctaaagaaaaggttgccatgctggttattattaatcctcatcgtcttggtttacggtacaactaacaatctgcataagttaaagcttacggattactttatatcgatattcaccggttaccgggattatcaagagcaaatcgcacagctggatatggcctacgtcggcgcccccggttggcaggtcaccccagcaggcgataaacaggctaattatgtcattatcatcggggagagtatgcgacgggactatatgtcgctttttggctatcccttgccaaccacaccgtttctcgatcaggtaaacggcgacttttacagcaactatatttctaccgcatccaatacctttgagtccctaccgcgtacgctggcgctgagccagggcgaacaggtcgattatgcgaataacatcattaccctggccaaagccgccggtatgaaaacctactggttttccaaccagggtttcgtgggcgattatgatattccggcctcacgaatcgccgcctacagcgatcaccgctatttcctcaaacatggcgactaccaatcacgaaacactgatgattatcaactgctgccgccttttgccgatgcgcttaaagataaccataacgggctgtttgtcttgcatatcatgggatcgcattcggatttctgtgaacgactgaatggcgcgcaaccggcattcagctttaataatcaggatctgtcctgctatctctccacttatcgcaagaccgatgactttatccagcaaacctaccatctactgcagcagacacagcgccctttcaagctgttttatttctccgatcacggcctggccaaacataatatcggcggtaagttctatctgcgccatagcggggagttcaagcagaattacgaagtgccgttggtgatcttgtccgataacgctacgcggcaccgccgggtagatgcaccatacagcgcgttcagttttatccaactcttcgcccgaaaaaccggcatcaccatcactcagccaaatatggccgtctacatgacgcagcaggatcagcgccgcgtttacgtcggacaaaacatggtggactttgatggattagaggaagacaaagttgatctgcctgatgaaaaccaccttcatggctaa

SEQ ID NO: 442536 - DNA, 261 bp, Serratia marcescens
atggctctgctgattaccaaaaaatgcatcaactgcgacatgtgtgaacccgagtgcccgaatcaggctatctcaatgggcgcggacatttaccagattgataccgaacgctgcaccgaatgcgtcggtcattatgatacaccgacctgtcagcaggtatgcccgattgataacaccattgtggtcgacccgcagcatacggaaagccaggaacagctgtgggataaatttgtggtgctgcatcacgccgacaggctgtaa

SEQ ID NO: 442537 - DNA, 852 bp, Serratia marcescens
atgatcgataaagggcagatgctgagccggcacgatttttcaaaggtcaactggggcattctggcagcggcggcgctgctgttaaccatcggcggcgcgctgctaatgctgccgctgatgagcaatatggaagagcgcggcatactgaccttgctgcaaaccggcgcggtaaccatattactggcgtgtatcctgctggcgctgcgtcatgttctgcgcccgacgcagacctatcgcctgtatgaacacggcgtcagagtgttcaatagccataaccaccaggaacgctttatcccgtttgagaagatcgtcgatatttatcgcatccgcagcgtgccgctgctgggcaacctgtgtggcgggctgtgcgaagccatggcgttccgtaccgccgccgatcagccctggtgtacggtattcagcaatgtgtcacacgcctgggcgctgcgtgacaccatcatcaaccagcagatcctgttgcgcggcccggtggccctcaatgcgttatatcagggagaggagctggcctttaactatattgccggcagaacccgctggctaacctggcttcttggcagcagatcacggcacctgccgggccagacgctgcggctgagcgccaaaacgctggttacgccgcagggggatatcgccatcgaacaaatccgctcgctggacagccagccgcagcacggcgttatccatttactggacagccagggtcagacgctggccacgctgcgttactattcactgctgagcgccgatctgtttactgcgttgctggagcatatgattaacaaccgcatccccgcctaccgcaactcggcgatgacgcggccgttcatttag

SEQ ID NO: 442538 - DNA, 477 bp, Serratia marcescens
atgatgaaagagtgggccacggtagtctcgtggcaacagggcgtggcgctattgcgttgcgagcctaaagcgggctgcggcagctgcaaggcccgttcgggctgcggtgcgcgtgcgctgaatgaactggtgccggaaaccgagcatcagctgcaggtgcagattgaacagccgctggagccggggcaacgggttgaggtgggcatcaccgaaggcagcctgctgcgctcggcgatgctggtttatctgacaccgctgctgggtatgatgctcggcggcggcgcgctgcagctgtggctggcgacggacggcgctgcggcactgggcgcgctgtttggcggcgtgggcgcctttttgctggcgcgtaaactggcccaccgtctgggtgaacaggacgcctaccagccggtggtgttgcaaatcggcctgcctcctaccgcgctgcgcctgcagccggaatcccctctgtctgactaa

SEQ ID NO: 442539 - DNA, 957 bp, Serratia marcescens
atgaagcaactttggttctccgtttgtctattgacgggcagcctgctctactcaaatatcgccccggcgcagaccgcgtccggggcgttgttgcaacaaatgagcagcgccagccgttcactcaattacgagcttgcctatatcagcatcaccaagcaggggatagagtcgttgcgctatcgccatgccctggtggagcagcaggcgctcggccagttactgcatatggacggtccgcggcgtgaagtgctgcagcgcggcgacggcatcagctatttcgaaccgggcctggagccgtttaccctgtcgggcgaccatatcgttgatgcgctgccttccattgtgtacgccgactttacccgtctggcgaaatactatgattttatctccgtcggccggacgcgtatttccgatcgtccttgtgaggtgatccgcgtggtggcgcgcgatggttcgcgctacagctatattgtctggatggatgaagagaccaaactgccgctgcgggtggatctgcttgaccgcaacggcgaaacgctggagcaatatcgggtgatctcatttgaggtgggggaagaggtgcaaaacgcgctgagcggattgctgaaagcctcattgccgccgctgatttccctgccggcgatggacaatgttaaactgggttggaacacggcctggttaccggccggggtcagcgaagtggcgcgcaatcgccgcaagttgccgaacgtttccgtgccggttgaaacgcgactgtacagcgacggcctgttcagtttctcggtcaatgtcagcccggcgggcagtggcgttggcacgcagctctatcgccaggggcgacggacgattcagaccgaattacgcaacggcaaagagattaccatcgtcggcgaactgccgccgtcaaccgccaagcgtattgctgacggtatttccttcaggggatcgtcgaaatga

SEQ ID NO: 442540 - DNA, 657 bp, Serratia marcescens
atgcagaaagaaaaactttccgctctgatggatggtgaatcgctcgataacgaactgctgagctctttgtcgcaggatcgggcgcttcaacaaagctggcagagctatcacctgatacgtgacacgcttcggggtgatgtaggacaagtaattcatctcgatatcgccgaacgtgttgccgctgcactggagaaagagcctgctcgtctggttccttcggcggtgcctgaatctcagccgcagccggaaacctggcagaagatgcctttctggcacaaagtgcgcccatgggccagccagctgactcaggtcggggttgccgcctgcgtctctctggcggtgatcgtcggcgtccaacactataatcagcctgatgccacgcagccgggttcttcggaagcgccggtgttcaacacgctgccgattatgggtcagccatcgccggtcagcctgggcgtgccggcagacagtttctcaaccggcagcggtcaacagcagcaggtgcaggaacagcgtaaacgtatcaatgcgatgctgcaggattacgaactgcaacgccgcttgcattcaaaccaattgcaacttgatcaaggcacgccgcagcaggccgccgttcaggttccaggcacccagtctttaggaatgcagcagcagtaa

SEQ ID NO: 442541 - DNA, 747 bp, Serratia marcescens
gtggacagtcagtcaaaagccaatttcaaaccgcgtcgcggcggttttaccttcaaacagttttttgtcgctcacgatcgctgtgccatgaaagtcggcaccgacggcgtgctgctcggcgcttgggcgccggtgacggcggtccgacaggcgctggatatcggctgcggcagcgggctgattgcgctgatgctggcgcagcgtacggcggatgacgtgcagatcgacgcggtagaactggacgccgccgccgccgcgcaggcgcatgacaatgcagaagcgtcgccgtgggcgtcgcgcatccgtatatatgagcaggatattcaacagtttgccgggcagcgggccgccagctacgatctgattgtcagcaacccgccgtattttgcgccggcggtagcctgccgcgatcgggcgcgagatgcggcgcgctataccgaaacgctgactcatgatgtactgctggcctgcgccgaacggctgctacagcccgacggtatgctgtgcgtggtgctgccgtatgacattggtgaggcctttgccgccgatgcgctgcagcgcggctggcatttggcgcagcgggtgaacgtcagcgaccgggcggataccccacggcatcgtatattgctggcgctgacgcgcacggcgcagacgtgtgcgcacagcgatctggccatcaagcaggcggagggtgactacactgcaccgttccgtcgcctgatcaccgatttttatctgttttattga

SEQ ID NO: 442542 - DNA, 750 bp, Serratia marcescens
atgcctgacagattacgctggccaatattgctgatgttattgataccgttagcagtattggcgttgtcgggaaaggccgaggaactgcagatgaatcagcaaacgacgccgtttaacggccagagctgccagccgctggcgctgtcggttgccactggtgatacggcccgtatcgcggcactggcgacgccggaggcgcttggtgagcgcggcgagcagggtataacgctgttgcagtgggcgattttacgccagcagcctggcagcgtacaggcgctgctggatgccggcgccgacgtgacggaaaccggcatggacggcaatagcgcgctgcatatcgcggcgatggtggaggatgccggctatctgacacagctgctggcgcggcagccggtggttgatgtgcgtaacgccgtcagcggcgcgacgccgctggccgctgcggtgctggccggccgtccgacgcaggtgcgccaattgctggatgcggctgccgacagccgcctggccgatcgcgtcggtgatacgccgctgcatattgccgccagaatcaacgcgccgcaggtggcgctgatgctgttgcaaaacggcgcggatgctgcggcggttaaccggcaggggatgacatttcaggcttatttcgcccagacgccgcggcatctgcagaatgaagccatgcgtcaggcgcgtcagcagctggatgattggctgcaggcgcaccggctggcggcgcgttatcgcgtattgtga

SEQ ID NO: 442543 - DNA, 963 bp, Serratia marcescens
atgagcatgtctttaagttttacttcggcggcgttacctgccgtatctttgcctgtggttcccgaacggcgcacggagccgcccattccggcagagcctgtcgctggcgaacggttgcccacggcggcgcatccatcaacgtcgtcacagaaccggcaaacgcagcaactgctgcattcgttggtcaatgatgtcgccgctgtcgcctcgtcggccaaaaccgatctgatgcgcgggcaagtgccgcaacagggggactacaccctggcgctgctggctaaggacgtttacagcctggacggaaagggcgtagaaaatttcagccgcctgagcgatgcggcattgctgagcgccggtattgagcctgcaagcctgcatgatacggcatcgggttttcaggcgggcatttaccatgacgggcagcaatatgtactggcctttgccggcaccaacgactggcgggactggttaagcaatgtgcgtcaggcgacgggatacgatgacgtacagtacaatcaggcagtgtcagtagcgaaaagcgccaaggcggcgtttggcgagcaactggtaattagcgggcactcactggggggcggtctggcggctaccgccgcattggccaccggtacgctggcggtcaccttcaacgctgccggagtgtccgatcacaccctgactcgctttggtatcgatccggccgcagccagacaggatgcggaagccggcggtattcgccgctacagcgagcaatatgacatgctgacgtcgacgcaggagtcgacgtcgctgatcccgaatgccatcggccatcaaatcattttggaaaataatgatacgctaaatggtattgacgactggcggccgagcaagcatctggagcgcagtcttgccgcgcatggtattgataaggtgattagctcaatgatggaacagaaaccgtgggagacaaaggccgatgcctga

SEQ ID NO: 442544 - DNA, 573 bp, Serratia marcescens
atgagtagtaaagaacacaagacgccaaacgagcaagtctcggaagaaatggaacacgctcagcacgaggacgtgcagcaggaagcagcagaaggtgtcgatctgcgtgacgcacgtattgccgagctggaagcccaactggcggacgctcagcagcgcgaacgcgaaagccagctgcgcgccaaggctgaagtcgaaaatattcgtcgtcgtaccgagcaggatattgaaaaggcgcataaattcgccctggagaaattctcttccgatctgctgccggtaatcgacaacctggagcgcgggctggagctggcggaccgtaataatccagagttggcggcgatggtcgaaggtatcgaactgacgctgaaatccttgctggacgtggtgcgtaaatacggtatcgaaattgtcggcgacgtgaatgtgccgttcaatccggatgtgcaccaggcgatgagcctgatggagtctgccgatcatgaaccgaaccaggtgatgatggtgatgcagaaaggctatacgctgaacggtcgtctgttgcgcccggcgatggtggcagtttccaaataa

SEQ ID NO: 442545 - DNA, 1662 bp, Serratia marcescens
atgctgtcgcaattaaccatcagcaattttgctatcgttcgtgagttggagatcgactttcaaccgggtatgacggcgattaccggtgaaaccggcgccggtaagtcgattgcgattgatgccctggggctgtgcctcggcagccgtgccgacggcaacgcggtccggctgggcgcctcccgcgccgacctgtgcgcacgcttttccctggccgacaccccttccgcccgcgagtggctggagcaaaatcatctggacgacggcaacgaatgcctgttgcgtcgggtgattggcgccgacggccgctcacgcggctttatcaacggcacctccgtgcccctgtcgcagctgcgcgaactgggccagcgcctgatccaaattcacggccagcacgcacatcagctgctgctgaaaccggaacaccaaaaatcactgctggacgcctacgccggcgaagcggaactgatgacggagatgcgcctggcctatcagcgctggcaccaaagctgccgtgagctggcgcaccatcagcagcaatccatcgaacgcgaagcgcgtaagcaactgctgcagtaccagttgaaagagctgaacgagttcgcgccgcaaagcggcgagtttgagcagattgatacggaatacaaacgcctggccaacagcggccagttgctgacgctcagccagcaggcgctgcagctgttggccgatagcgacgaacacaacatgctgagccagctgcacagcgtcaaacacctgctgctggagcttatcggcatggatgacaaacttgccggcctgctggatatgctggaagaggcgtcgattcaaatcagcgaggccggcgacgaactgcgccactatgccgaacgcatggatctcgaccccaaccgcctgtatgaactggagcagcgcatttcacgccagatagcgctggcgcgcaaacatcatatcacgccggaagagctgccgaccctgcatcagcagttgctggaagagcaggaactgctggcccagtatgaaagcgaccaccaacagttgaacgaagcggttacccaacaccatcagcaggcgatggcgctggcggaacgcctacaccaacagcgccggcactatgccgccgaactcacccaactgatcaccgacagcatgcatgcgctgtcaatgccgcacggccagttcagcatcgacgtacatttcgaacctgaacatctgggcgctgagggggcaagtcgcgttgagttctgcgtttccaccaaccccggccagccgctgcagccgctggcgaaggtcgcttccggcggcgagctgtcgcgtattgcgctggcgattcaggtgattaccgcgcgtaagatggaaacgccggcgctgattttcgatgaggtagacgtcggcatcagcggcccaaccgccgccatcgtcggtcgcctgctgcgccaactcggcgagtccacccaggtgatgtgcgttacccacctgccgcaggtggctggctgcgggcatcagcacttcttcgtcagcaaacagaccgacggcacagcgacagagacgcagatgtcgccgctgggtaaacgcgcacgcctgcaagaactggcgcgcctgctgggcggcagcgaagtcacgcggaatacgctggctaacgcaaaagagctgctggcggcgtaa

SEQ ID NO: 442546 - DNA, 285 bp, Serratia marcescens
gtgtctgagatacgcgtagaggtggtttatgcgctgccggaacgtcagtatctgcgccaggtcaagctggcggcaggcagtacggtcgaacaggcggttatagcctccggactgctggaactccgtaaggatatcgatttagcgaccaacaaggtcggcatctatagccgtccggccaaaccgggcgatgtgctgaatgatggcgaccgggtggagatttaccggccgctgattgccgacccgaaagaactgcgtcggcaacgcgcggagaaagcaaaaaaataa

SEQ ID NO: 442547 - DNA, 1218 bp, Serratia marcescens
atgagcaaggtaagtacgccggaaatgcgtatcgtctggctggcggcgctaattcaactggtcaatgcgctggactttatgatggtgatgccgctggggccggatctttcgcgagagctggggatttcacccacctatatcggctatctgggcgggggttatacgctggcggcggcactttcctcgctgttatgtgcgaagtttattgaccggttcgatcgtaagtctgtcgcgctggtggcgttattagggctgtcggcagcgacctgggcatgcacgctggcctggaatatggaaagtttgtttatcactcgcctgttggccggagtttgcgccggcccggctacgtcgatagctttggccatcgtagtcgatgcggtgccacaacagcagcgtggccgggcgatggctatcgtgatgggcgctttttcactggcggcaattgccggcgttccgttggggctggaactggcgatgcgctacgggtggagcgcgcctttttatatcgtcagcgctttgggcgtgtgtgtcttggcggcggtgtacgcaaaattgccgacgatgacggcgcatctgcagcagcaacagccgtcgttttcctttgtcaaaatgctgaggcgtccggtggtgttgaacgcctttgcggcgatcgggctggcgattttcagcacgttcctgatcgtgcctaacgtggcgacctatttccaattcaacctgagcgtaccgcgcagcgacatgagctattactacgtgatgggcggtatttttagcctgttggcgatgcagtttggcggtcgcctgattgataagctgggggccatgcgcatgacgctgataatggggctgttgatcctgctggtggtgtgggatggcttcttacatacgccatcgatgccgccgatcgtgattttcacgctgtttatggcggtgaccgcgacgcgcactattgccgtggcggcggtaaacagccaggtgcccgagccttgggaaagagcgggctttatgtccttacaaagcgtttgccagcatatcttcagcggcctggcggcggtcgtatcttcaatgatattaaccaacgtggatgggcggttgggcaatgtcgaccagctggcctggctgacgatggccctgacggtgattcagccgcttttcctgtttatgctgttgaagcgactgcgtgcggcgccggagttggaggaaaagacggctggtgaataa

SEQ ID NO: 442548 - DNA, 591 bp, Serratia marcescens
atggtttggtatgcgcaagaacggttctccgtccgtcttgagtgggggatagaggctgtcgaacaacttggccagacggcagattgcatcatcatcgttgacgtgatgtcattttcaacctgtataagccttgcggtggataaaggcgccagggtttatccctatccctggaaagacgagtcggcaattgcctatggcaatgagaaaggggcaatcgttgcaagtactgagcgccgcctcaaaagcaacggttattccttatccccttgttcgctcaaagacatcgaacaaggcgccaggctcgttctcccctcgcccaatggctcggcaatctcttttcgcgccaaggatagcggtgcagccgtcttcagcggttgcttcagaaacatggcggcaaccgccagagcctgccgccattttaagcgcatcctggtcataccctgcagtgaacggtggccaaatggcacgctgcgccctgcggttgaagatttggtcgccgccggcggcattatttcttatctggcggaaaaaacatggtccccggaagccagggctaccgcgtcagcatatcgtcaaaacagccctgggtga

SEQ ID NO: 442549 - DNA, 2631 bp, Serratia marcescens
atggcttctttatcttcgcaacagaaagttgcgtcgctttactatgcaatcaccagcaataaaccagcaacgaccactgtttttaaccaccacggtaatttactggaaagtggtaaagccacggtggaaagtctggctaccgacttcctgaacactccttatagtcaaaaaatctatgccgggatgagtagcgaacaaatcgtctcccagatttacaccaaggtttacggcactgccccatcctcggcacaggtcacagagttgctgggtaacggcagcactgcagatgccgttctggcattggtcgataacctgctgaactacgatggatttaacagcaccattctggagcagcaagccaactttgaaagcacgctgaataacatcctgtataacgacgcaggtcaactacctgacctggcgcaccaagaacaagccatgtcgatcgggctggcagcattagataacgggttgacctcacgcacgcttgaatcttggagccaggagttagcggcaggtaccagccaaaacgatctgatcgccgcaaaactgtcctcggctgagctgaaaaatgccatcggcaatcttgaaggcagcgatctggtcaaacagctctacaccacggttcacggcaccgccccgaccgcagcacaagtggctgcctacagcgcactgcctaacaaacaaagcatcgttgaatccatcatcaacgatctgcgcgactcaacctctaccaacgcaaccacggttacacagcaacacgcttttgaagcgcgtatcggtgaaaacctgctgtacaaaaccaccgcggccctcagcgtaacggacaatggcggcaatgccaccggcacggtgaatacgcatgcaagccaccagttaagtaatgcggaaaccgccgtgctgcaacacgttcaactgaacgcggacaaagccggcagcgtcaatctgaagtttgcagatagcctgaacgaactgaccatcaacggcaacgcagccgctacggttaatctgtcagacaacggtgccaacagcggcgttaatattggcgtcaacaatggcaatatcaaactgaacgccagctccggcaacgatatcgtcaacgtctcctccagcgccaatatcgctaatggcaccggcacctttaacctgggcaacggcaatgactcgctgctttgggccggcaacgccactaccggcggcaacagcgtatccagccaaatctccgctaacggcggcagcggtacggataccatttccgccaacttcatcaccaaatccgttgccaccaccagtaatatcctggggatccgcagcagcgccatcaccagcaacgccgacaagttcagcaatttcgaaaaaatcgatctggctggctatgtaggcaaatccagcggtactctgaacggccaggcagtaacgaccggctcccacacctttgactttggcctgctgaacggcaccgccacggtagaaggcaccagcggcggcagcgtcacccagggcgcgaaagccaccaacctgggttcgcaagggtttgaactgtccggcaaagcggataacgtgaaagtcatcaacgccgcaggcggtgatgccgccgcgctgaccgtaaccggcaatgccggcgccagcagcaatctggaaatcggcttccgccagaacgccaccaacaagttcgacatcagcttcaacgccaccagcaacaaagatgtcgatgccggctccctgagcctgtcaagcagcagcagcgcgctgggcggcacctcgctgagcaccgttaatatcgcctccggcggtaagggcgacttcagcaacatcctggatctggtgggcaccaactctcaggtacagaccctgaaagtgaccggcgaccataacctggatctgacgctgggcagcggttacagcaacgtacgcaccatcgacgcttccggcaacaccggcggcatcaacctggattccgcccacggcggtaccggcgacggtatcctggtgcaactgctgaatatcctgccgctgagctcggtcaccaccacactgctgacgccgctgctgaacacgctgggcctgaacggctatcagatgaaagtgaccggcaccgacgctgacgactccttcagcctggcggccaacaccaccgtaaccggcggttcaggcagcaatacctatgagctgaaaggcagcaccaccaaagccggtatcaccatcaccgactttaacagtgctaaagacagcatcgttgacaccgcttccggcgttcacctctccggcgctgccggcagctcggtggcggactacggcgtgcgctcttccgatatcatggatggtctgctgggctcgctggttggcggcctgaccaatggcgtggttggcctgctgggcggcattctgggcctgggcaacagcaactcgctgacctccaaagtcggtatcgcctcggtagcgttcgacggcggcaaagatgccagctatgtcatcatcgataacaacgacaacggcacgctcgataattcagacagcgtgatatacctgactaaccagaaccaccaatctctggttaacagcctgcattacaccgatgtcagcgttaacggcgttgccggcaccgcttcggccgacctgggcgtagcctaa

SEQ ID NO: 442550 - DNA, 927 bp, Serratia marcescens
atgccgttgttttaccaccgtttttatagggttttatttgtactgctggtgagcgtgtgcgcaacggcgcccgccagcgcccggccggatttggatcgccggattggcgttacggtggcggagcgcgggacggctgactatgccttcagcgactttcgtctggcctcggcggatggtgaacgccactaccgcattcgcatcgccaagccgaaacaggccgccccggcggcggggtatccggtgatttattttctggatggcaacgccgtgttgatgcagcttaatgccgggctactgcagcgtctggcgcaggcgccgcatccgccgctgttggtgatgctgtcttatgataacgatctgcgtattgatgcagccgggcgcgcctatgattatacgccggcgttgcctgccgggcagcgtggccacccggtgcagatgggccgctggcgcagcggcggtgccgatgcgtttgcgacgctgctagagcagcgcatcaaaccgcaggtggcggcgcgcgtcaccgtggatccgcagcgtcagacgctgtgggggcattcatacggcgcgctgtttgtgctgcatacgctgttccagcgtccgcagttgttccagcactatattgcggtggagccttcgctgtggtggggcaaagggcaaattcttaaggaagcgcaggcgtttgtccgccagtcgccggtattgaacgcccgtctgcagctgtgggtggggcaacaggcccctgaggcgcagccgcatccagaggagcgtacgtcgcagccggccgatgtcgcgcgtcagctgtcgcagcgtctggacacactgccggggttgcgggccagctatcgccaatggccggcattaagccacggggcgatgctggatgccgctattgcgccggcgttggaagggatagcctccgggcagtaa

SEQ ID NO: 442551 - DNA, 735 bp, Serratia marcescens
atgtcacaaaatatctacgacaaccaacgcttctttgacggttacgcgcagctcagccgctcgcaacacggcctggacggtgcaccggagtgggccagcatccgtgaaatactgccggctctacaggggaaaaacgtcatcgatctgggctgcggctacggctggttctgccgctacgcccgtgagcaaggggccgccgaagtgctggggatcgatctgtcgcaaaagatgctcgagaaagcgcaatccatgaccaatgacgccggtatccgctatcagcagcaggatctggaaacggcacagctgccggcggcgtctgccgatctggtttacagctcgctgacgctgcattacatcgttgacctgccagcgctgttcagccgcgtctttcaggcgctgcgccccggcggccggtttattttcaccgcagagcaccccatttacaccgcgccgcagcggcagggctggctgatcgccgaggacggaaaaaaatcatggccggtcaacggctaccagcgtgaaggagagcgtatttccaactggctggcggaaggggtgatcaaacagcatcgcatgctgggcagttacctgaatatgctggtgcagcagggcttcatcatcaattatttgaatgaatgggggccttcagcacagcaaatccgcgacaacccggcgctggatgaagaaaaagagcgtccgatgattttcatcctgtctgcgcagaaggcgcgctaa

SEQ ID NO: 442552 - DNA, 414 bp, Serratia marcescens
atgggtgatagttcaaaagacggcgttattctgctggccagaatattgctgatgatcctgtttatcattttcggctggatgaaactgaccaactttggcgcaaccgtcacctccatggaaggttacggcgccccgatgccctatctggcggcgattatcgccgtggtggtggagtttttgtttggcatcgcgctgattgtcgggatctttacccgccccatcgcgctgcttttcgccctgtacgtgctgggcaccgcctttatcggccatccgttctggcacatgaccggagcggaaatgatgggcaacgagattaacttctttaaaaacgtcagtattatcggcgggttgttgctgctggcggtcaccggcgccgggcgttactcgctggaccataaactgttcgataaataa

SEQ ID NO: 442553 - DNA, 387 bp, Serratia marcescens
atgaaaatagaacggctggaccacctggtgttaacggtggcggacattgaacgcagctgccagttttatcagcaggtgctggggtttgacatcatcacctttcgcggcgaccgcaaggcgctgcgcttcggccagcaaaaaatcaatctgcaccggcaggggcatgagtttgaaccaaaagcgcaccgccccacgcccggctcggccgacctgtgttttatcacctcgaccccgcttgagcaggtgatcgaagaactggacgacctcggcgtcatcattgaggaggggccggtggagcgcaccggcgcgattggtcctctcctctcgctgtatctgcgcgatccggataataacctgctggaaatcgccaatctgctgtccgcctga

SEQ ID NO: 442554 - DNA, 573 bp, Serratia marcescens
atgagcaacgaagataaaggcttttttgagcaggcgatggcggacgtcatcccgttatccgggcagcagcaaacgctgtatctgcaaccgcagtcccaggtcgataagcgcgcccggcgcgacgcgctggcacagtcagaggaaaacccactcagcagcgattttttgacgattattcccggcgatacgccgctcgaatacaaacgggaagggattcagcagggcgtactggataagctgcgcagcggacgctacgccccgcaggccagcctgcacctgctgaggcggccggtggagacctgccggcaggagctgtaccggtttatcacgctggcggaaaaggagaacctgcgctcgctgctgatcgtacatggccgcgggcgtgatgatgaaagccatgccaatattgtgcgcagctatgtcgccaagtggctggcacagctggagcaggtgcaggcattttgccgcgcgctgccgcgtgacggcggcgagggtgcctgctatgtgacgctgcgtaaatctgcggcggccaaagcggataatttcgagcgtcacgccaagcgcagccgttaa

SEQ ID NO: 442555 - DNA, 372 bp, Serratia marcescens
atgactatgcgcgagctggaaatccagtttcaaaatgcaatgaatgagttgcaggccagcttcgaaaagcagcaccgcgaatggcaacaaagctatgacgctctgcaacaacagctggaagaatccaaacagcgtgagatggcgctgctggaggaggccaaacggcgtgaggccgcgctgcatgcgcaaaatgagcaactggcgcgcaaactgagcaccgccacttccgttccgcaacagcatgcgctggtaaaacagataaaaatgctgggtgcgcatctggacgcgctggcaaaagacgccgccacgttcaaccaccatctgcaaaaccagcagcagaccgcagggaacttcagcggcgagcagcactga

SEQ ID NO: 442556 - DNA, 447 bp, Serratia marcescens
atgacgtggattatcatcgctgttctgatcgtcgtatttatcgccggctatcggatcctgacgtccgatacccgcaaggccgttgactcgctggcccagtggctgcgggtcaagcccatgctgattgagtcaatgatgcaggaaatgggtggccgcaacagccaggcgtttattcgcatgctgaataacggctataccgaagagatgcaccgggccgcctacctgctgtttatctatgtcgcctttatcaaggaggcagacgacacccagctcgcccaatggcgcgatatgctgattcgcgccggcctgtcgccggaactgaatgcggaatacaccgaatccgccctgttctactttgccgaattggatctggacgcgtttgaactggcgcagttccgtcgcgcctataatgcgcgttttaatctggatgcggtagccaacggctga

SEQ ID NO: 442557 - DNA, 339 bp, Serratia marcescens
atgtatttacggccggatgaagtggctaaggtattggagagtaccggctttaagtgtgactcgatgaccgaccaggcgtatggttaccgcaagggcgagcactatgtgtacgtgaaccgggaagcccggatgggcagaaccgcgctggtgattcatcctgagttaaaagagcgcagccgctatttcgccacgccggcttcgccgatacgcgtcagcgaacaataccttgaattcccgctggacgtcagcggcgacagtccgggccagcgttacggtattccccacggtttcagctcgcgtgaagcgctgagccgctacctttacagcatgtttctgtaa

SEQ ID NO: 442558 - DNA, 312 bp, Serratia marcescens
atgatgaaaaaattattagctctggccgttgcggcaacgatgggtctgtcttccgtggccttcgcggctgaaactgcggctgcgccggcagctgctgcacctgcggcaaccaccagctcaccggctgccgcggcgacaaaagcgccggcaaaaaccagccataagaaaacgcatcacaaaaaagcccataaaaaagccgcagagcagaaagctcaggccgccaaagcgaaaaaacacgctaaaaaagccccggcgcaaaaagcgcaggcggccaaaaagcatcacaaaaaagcaggcaagaaagccgcttga

SEQ ID NO: 442559 - DNA, 1593 bp, Serratia marcescens
atgcgtagaaaactctcatttcaaatcaaactgtttctgtgtctggtcgcgttctcctgcctgttgctgacgctgatcggcgcctatacctattatcagctggacgcccaactgcaccgcgatttgggcgcgcgggcgcaggtgcaggcccgggaaattgccctgattccctctttggcgcaggcggtgcaacaacaggacgcacatgccattgccgccctgctgaaaaaaatccgcgccagcagcgacgccagttatattgtgatcggcgatcgtcatgctcgccacctttatcattccgaatatcccggccgttacggcacggcgatggtcggcggcgataataaagaggtgctggaaggtaaaagcattatttccattcgaaaaggcggcatcggaatatcgttacgcagtaaagcgccgatcgtcgacgaaaataatcaggtgatcggcattgtgtcggtcggctatcttaaatcgcatatcgataatttaaatgcacgcaccctgacgcagattatcggctcgattattctactgctgatcgcactgtttattttctcctggctgctgtcaaaaaacctcaaacgccagatgttctggctggagccgcaggatatcgccctgctggtgcgtcagcaaaaggcgctgctggaggccatttatgaaggggtgatcgccatcgatccccagcagaagatcatcaccatcaaccacgccgcgcgcgagctgctggatctgcgccagccggccagcagcctgatggggcgcgacatcgccgaagtgatccaggcacagccggactttttcagcccggcgcagctcgcccaggattgtcacgacgaggtctgccgcttcaaccacgtccgggtgatcgccaaccgggtgcgcatcatgcaggaagatcgtctgcagggctgggtgatcagcttccgcgataaaaacgacatcaatacgctgagcagccagctcagccaggtgaaacgctacgccgacagcctgcgcattatgcgccacgaacaactcaactggactgccaccctcgccgggctgctgcatatgcagcgctatgacgaagccatacgctacgtggaggcgcagtcggaaggcgcgcaggagatcctcgactttatttcgcagcgtttcagttcggcggcgctgtgcggcctgctgctgggcaaatatgccagcgcgcgggaaaaaggcgtggaactgcgttttgaccccgcctgtcagctgcgccagataccggccgcgctgaatgaaaccgaactgatgtcgattatcggcaacctgctggataacgcggtggaagcaaccctgcattgcgctgcgccgcacgacgcggtagaactctatattaatgataatggcaatgagttggtgattgaggtcgccgaccacggcggcggcatcgcggcggagatacgcgagacgctgtttgaacagggcgtttccaccaaacggcacggcgatcacggcatcggcctgcacctggtcgccagccatgtcgcccaggcgcacggcagtatagaagtgtcggacaatgagccgcacggcgccattttttccctgtttatccccaagaattga

SEQ ID NO: 442560 - DNA, 270 bp, Serratia marcescens
atgttatcagtacgtcgggcggcggtttacatcaggcgttatcttggctatggtaaaattgccggtgatttaaaattattggcaatgatcgcaaaatattccactgaacaagacggatttattgataaatatccgttgcctgcggctgaaatgtcggttgatatttttcaggataaatcttgcctgctggaggcatattttatcgtcctggatgacggcgcaatgggtaaatttcagcgtggcggaaataataaaaaacccggcggatag

SEQ ID NO: 442561 - DNA, 1203 bp, Serratia marcescens
atgtcaattaaaatagaagttaagaatctatataaaatattcggtgaacatccggatcgcgcatttaagctgatagacaaagggttcagcaaagaccagttgtttgaaaaaaccggactttcacttggcgtgaaaaatgccaatctggccattgaagaaggcgaaatcttcgtcatcatggggctttccggctccgggaagtcaaccctggtacgccttctcaatcgtctgattacccccacccgcggcgaagtacgcatcgacggcgaagatattgcgaaaatatcggaatctgcgctgcgtacggtgcgcagaaataaaatcagcatggtattccagtcatttgcgctgatgccgcacctgaatgtagtaaataatacggcattcggcatggaactggccggcattccgctgcaggaacggcagcaaaaagcgctggaggcgctgcgtcaggtcgggctggaaaattatgcccattcctacccggatgaattatccggcggtatgcgccaacgcgtcggcctggcccgcgccatggcgaataacccggatatattactgatggatgaagccttctcggcgctcgatccgttaatccgcaccgagatgcaggatgagctggtgaaactgcaggccaaacatcagcgcaccatcgtatttatctctcacgatctggatgaagccatgcgcattggcgatcgcatcgccattatgcagggcggtgaagtgattcaggtcggcacgccggatgaaatcctcaacaacccggccaacgactatgtccgcaccttcttccgcggcgtcgatatcagccacgttttcagcgcgaaggatatcgcccagcgccgcccggtcaccctgatccgcaaagcgcccggtttcggcccgcgttcggcgctgcgtctgctgcgtgacgaagaccgcggctatggctatgtgctcgaccgcgggcagaaatttgtcggcgtggtgtcgatcgactcgctggaaaaagcgctggaggccaacctgagccttgatgacgcactgctggaagccccggcgccggttgctgccgatatgccgctcagcgaactgatttcgctggtagcgcaggcgccctgcgccgtaccggttatcgacgacgagcacacctatatcggaatcatctccaaagccatgctgctgcaggctttagataaagagggcccagcgaatgagtga

SEQ ID NO: 442562 - DNA, 1203 bp, Serratia marcescens
atgaaaacaacaacagaacacccgggactcagtccggcgctgaccgcgctgatcgccatggcgaccggcctggccgtcgccagcaactattacgcccagccgctgctggaaaccattgcccagcagtttaacctgtcggttaatcaggccggctttatcgtcaccgccgcccagttgggctatgccgtcggcctgctgtttctggtgccgctcggcgatatgttcgaacggcgcggcctgatcgtgtttatgacactgctggccgccggcggcatgttgatcaccgccacctccagtacgctggcggtgatgatcctcggcaccgcactgaccgggctgttttccgtggtggcgcaaattctggtgccgctggcggcgacgctggcgcatccggaaaaacgcggcaaaaccgtcggcattattatgagcggcctgctgctcggcattctgctggcgcgcaccgtcgccggggcgctggcctccgtcggcggctggcgcaccatttactgggtggccagcgcgctgatgatcgtcatggcgctgatcctgtggcgcgcgctgccgcgctataagcagcacagcgggctgaattacccgcagctgctgaaatcgatcttcgtactgttcggcaccacgccgctgctgcgcacccgcgccctgctcggcgcgctctctttcgccaatttcagcgtgctgtggacctcgatggcgtttctgctggccgccccgccgttcggctattccgaaggagtcataggtctgttcggcctggtcggcgccgccggcgcgctggctgcttcccacgccggccagcagacggataaaggccgggccggattcaccaccagcgccgggctgatcctgctgctgttatcctggatacccatcgctttagctaaacaatcactctgggcactattaatcggcatcatcattctggacctggcggtgcaggcggtacacgtcaccaaccagagcgtgatttaccgcgtgatgcccgacgcgcgcaaccgtctgaccgccggttatatgaccagctactttatcggcggcgcgctgggctcgctgctgtcggcctctgcctaccaacatgcaggctggtacggtgtcgccgccgccggcattacgctgtgcatcatcagcctgttaatctggtggcgcggccagcggcacgacccccagtggcggtcaaaatctgattag

SEQ ID NO: 442563 - DNA, 747 bp, Serratia marcescens
atgcaaagccaagcctctgagaacctgacgccttccgccgcacgctctactttcgtcaatggcattattgacagcctgccaatcgttatcggctacctaccggtggcgttcgcctttggcctcagcgccgtcaagctcggcttctcgccgctggaaagcctgtttttttcctgcatcatctacgctggcgccagccagttcgtcatcactgcgctgctcagcgccgggatgtcgctgtgggtgtccgcgctgacggtgatggcgatggatatccgccatattctctacgggccggcgctgcgccaccgcattagcgcccgcctgtccaaaggtaaaactgctctgtgggcatttggcctgaccgacgaggtcttcgccgccgccagcgccaaactgatccgcgaccggcgcagctggagcgagaactggatgctcggcatcgcgctcagctcatggctcgcctgggtggcgggcacggcgttaggcgctctgtttggcaacggcccgctggagcagttcccggttatcgaggcctcgctctcctttatgctgcccgcgctgtttctcagttttctgctggctgccttcacccgcccgcaaagtctgatcatcgccgcttcactggccggtgcgctgctggggctgctgtgtttctctattccggcggcaatcctgagcggtataggcgcaggctgcctggcggcgctgttacaaccaacggcaacggagaacgtcgatgaacgctga

SEQ ID NO: 442564 - DNA, 342 bp, Serratia marcescens
atgaacgctgatgtactgcttatcggtctggtggtcggctgcgcgaattacctgttccgttacctgcccttgcggtttgccccggcgcgtcaacggccgggtatgccgcgcggtaaaatcgccctgctgctcgacagcatcggcattgcctccatctgcgcgctgctggtggtttccagtaccccggaggtgatgcgcgatcacgccaggctgctaccgacgttaaccggtttcgccgcgttggcgctatgcttttaccgcacgaaaagcattatttacgctacgctgttcggcgcgctggcgttcggcgttactttaaaaattcttattgtttttggttga

SEQ ID NO: 442565 - DNA, 1452 bp, Serratia marcescens
atgcgatccccatttaactggagactcaccccgctgttcgccgttttactgctggccgggtgtgcatctaccgataatatagccccgcagtctaccctgatggatccgcaaaacctgcagctggcgcaaccgaaggtcagttcgctggccatcagcccgcagtggtggcgcgccctcaacgatccgcagctcgatggcctgatgactcaggcgctgcaaaactcgccgtcgctgaagcaggctgccgcacgggtgcgcgaagcacgcagcgtgatgggtgaagccagcgccgccaacggcccgaacctggatctcaacgccggcaccacccgccagcgtaccccgcaaaacgtcaactccggccttggttatcccaacaagccaatttactccagctccaactcgctcggcctgaacctggcctacgaatttgactggtggggcaaataccgcaaccaggtcaacgccgccaaagcacaggttgacgccgcgcgcgccgagcaggaacaggcggcgctgacgctgaccagctccgtagcttcggcctattacctactgcagaactattatgcgcaggaaaaactgctgcagcaggaagtaacgaacaacgaccgcctgacgcagctgcgccagcagcaatatcaggccgggatgaccggcgttgacgtaccgcaacaaaccaaagcacagtccgatgcggccaagcagcagattctgcagctgcagtcgcaaatcgagcagttaaaacaccagctggcagccctaagcggccagggcccgaatgcgatgcagcatttgcgtccggtgaaactgccggccgactcgctgctgtcgccgaaaggcgagctgaccgccgacctgctgggtaaacgcccggacattgcggcccagcgtcagctggtggaatcctataaccagcgcgtcgccgcggcccgtaaagagttctatccgagcctgtcgatttccgccttcgccggtttgaccaccaccaacgtcaacggcaccagcccgaacctgttcgaagccgccagccaggcctggaatatcgccccggcgatttcgctgccgatcttccacgccggcgcgctgcgcagcaagctgggtgaagagtccgccctctacgatcaggcggtagaatcctataaccagactatcctcaatgcgctgcaggaaaccgctgacgccattacggttcagcaaagtaccgcccagcagttgcagcaggcctcctcggcctcgcagtctatgcagcaagtttaccaggtcgccaatgcacgttaccgggcagggattatcgggcgtgacgatctgttatccagtcagacgcagctgatccagcagcaactgacggaattaagcgccagcagcaatatgatgcaggcgaagataggactgatccgcacgctgggcggcggctatcaagccccgtcggccacggacgaaaaagcataa

SEQ ID NO: 442566 - DNA, 1053 bp, Serratia marcescens
atgaacgactcatttagtggcaaaaacggcaaagttaaagtgatgtacgtccgcaatgacgaagacggcggcgacgatcgtaacaacaaacgcccggccggcaaaggccgtccggcggacaagtcgcgctccggtcgcggcgctcaggataataaggcgcgcggcggcgaccgcggcgggcgtcgtccggcacgtacggaaggacgcggcggcaatgattcgccgtggaaaaccgtatcgcgcggcccggatgcggagccggcgttcgaccacggcggcatcagcggcaaaagttttatcgatccggaacagctgcgccgccagcgcgcggaagaaacgcgggtgtatggcgagaatgcctgtcaggcgctgttcgccagccgtcctgacgctatcgtgcgcgcctggttcgtgcagtcggtgacgccgcgtttccgtgaggcgctgcgctggatggcggctaaccgtaaggcttaccacgtggtggatgatgaagagctggcaaaagcgtccggcaccgagcaccacggcggcgtctgcttcctgatcaaaaagcgccagggactggatgcgaccacttacctgaagacggcgccggccagtgactgcgtgctggcgctggaagcggtgggcaacccgcacaacctgggggcgatcatgcgctcctgcgcccacttcggcgtgaacggcgtgctgctgcaggatccggcgctgctggaatccggcgcggcggtacgtaccgcagaaggcggcgcggagcatatcaaggcgatcaatgccgacgacttcctgtcggtgctggatagcttccgccaggcgggctacaccatcgtgaccacctccagccataaaggcgtggcgttggcgcaggccaaactgccggccaaaatggtgctggtgctgggtcaggaacgcgatggcctgagcgacggcgcctggcagcagggggacatgaacgtctccatcggcggcaccggcaaggtggagagtctgaacgtctcggtcgcgaccggcattctgctggcggactggtggcgtcagaatcaggcgtaa

SEQ ID NO: 442567 - DNA, 420 bp, Serratia marcescens
atgaatacagtttgctccgcttgtaacgccaccaaccgcgtcccgcaagaccgtctgactgacggcgccaaatgcggccgctgcggccatgaattattcgatggcgaggtgattaacgccaccgcagagaccctggataaattactgcaggatgacctgccggtagtggttgacttttgggcgccgtggtgcggcccctgcctcaactttgcgccgattttcgaagacgttgccgaagaacgggccggcaaggtgcgcttcgtcaaggtcaacaccgaagctgaacctgaactcagcgcgcgcttccggattcgcagcatcccgaccatcatgctgttccgcgacgggaaaatggtggatatgctcagcggcgcgatgcccaaagcgccgtttgacaactggcttgatgaatcagtgtaa

SEQ ID NO: 442568 - DNA, 2652 bp, Serratia marcescens
atgagtcagcgaggcttggaagcgctattacgtcccaaatctatcgccgtgctgggggcgtcgcaacggccgggacgttcgggccatctgatgatgcacaacctgctcaccggcggtttcaacggcccgattctgccggtcacgccgcgctataaggcggtatgcggcgtgatggcctatgccgacgtcgccagcctgccgatcgcccccgacctggcaatcatctgcactcacgactcacgcaatctgccgctgcttggcgcattgggcgaacgcggctgcaaagccgtgattattctctccgcccagccggagcagttcgccgagctgaaagcctgcgcccagcgttacgccatacgcctgctggggccgaatagtctcggcctgctggcgccgtggcaaggcatcaacgccagtttctcaccggtgccgatactgccgggccggctggcgtttatttcacaatccgccgccgtcgccaataccattctcgactgggcgcagcagcgcgaggtcggcttttcctattttgtcgcattaggcgacagccaggatatcgacgtcgatgatctactggactttctggcgcgcgacgcgaaaaccagcgccatcctgctgtatctggaaaatattcacgatgcgcgccgtttcctgtcagcctcgcgcagcgcctcccgcaataagccgattctggtggtaaaaagcggtcgcagccagcaggcccagcgtctgctgaacggccagcaggggctggacgccgcctatgatgccgccatccagcgcgccggcctgctgcgcgtgcaggatacccacgagctgttctcggcggtggaaaccctcagccatatgcaccctctgcgcggcgagcgtctgatgattatcagcaacggcgccgcgccggcggcgatggcgctcgaccagttgctggcgcgcaacggcaaaccggccatgctgagcgaagagacgcagcagcagctcagcgcggcgctgccgggttttatcccgctgaacaacccgctcgacctgcatgatgacgccacgccggaacgttatctggcagcgctgcaggtgctgctggacagcaacgattacgacgcgctgctgctgattcatgcccccagcgccgccgcgcccggcaccgtaaccgcggagaaactggtcgcggcaattcgccagcacccgcgcggcaagcgcattacgctgctgaccaactggtgcggcgaatactcctcgcaggaagcccgcaggctgttcaccgacgccgggatacccacctaccgcacgccggaaggcgccgtgaccgcctttatgcatatggtggagtaccgccgcaatcagaaacagctgaaggagacgccggccctgccggtcggactgaccgccaataccgccgccgctcatcagctgattcatcaggcgctggccgaaggcgccagtcaactggatacccatgaggtgcagccgatcctgcaggcctacggcctcagcacgctgccgacctggattgctggcgacagcgccgaagcggtgcatatcgccgagcagatcggttatccggtggcgctgaagctgcgctcgccggatattccgcataagtccgaggttcagggggtgatgctctatctgcgcaccgccaccgaggtgcagcgcgccgccgatgcgattctcgatcgcgtcaagcgtacctatccgcaggcgcgcatccacggcctgctggtgcagagcatggcgaaccgcgccggcgcgcaggaactgcggatcgccgttgagcaggatccgatcttcggcccgctgattatgctgggcgaaggcggcgtggagtggcggcaggaacatcaggccgccgtcgccctgccgccgctcaatatggcactggcgcgctatctggtgctgcaggcggtgaaaggcggcaagattcgcggccgcagcgccctgcgcccgctggatattcccggccttagccggctgctggtgcaggtctccaacctgatcctcgactgcccggagatcgcccggctggatattcatccggtgctggcgaccggcagcgaattcacgctgctggacgtatcaatgcagctggcgccgttcagcggcgatccacaggcgcggctggccattcgcccctacccgcaggagctggaagagaccatcacgctgaagaacggtgctcactgtctgttccggccgatcctgccggaagatgagccggcgctgaagcactttatcgaccgcgtgaccaaagaagacctttattaccgatatttcagcgagatcaatgagtttagtcatgatgacttagcgaatatgacgcaaatcgactacgatcgtgaaatggcatttgtcgcggtcgccgaggatcagcagattatcggcgtgacgcgcgcactgtccgacccggacaataccgacgccgaattcgccgtcctggtacgttccgatctgaaaggattaggcctgggtcgtcaactgctggaaaagatgattggctatgcgcgcagccgcggtctgctgcgtttgagcggcatcaccatgccgaataaccgcggtatggtgacattggcagagaaactgggttttatggtggacgtacagctggaagacggtatcgtcaatctgacgctgccgctgaagtccggaaaagcggggtga

SEQ ID NO: 442569 - DNA, 330 bp, Serratia marcescens
atgcgtgtattgcatctctgcctgctgatcccactgttattcaccggcggctgcagccatctggccaacgacagctggaccggtaaagacaaagcccagcattttatcggctctgcggcgctggccgccgccggtagcgcctacggcgaccatcagaattggagcgagcctcacagccgcactttcggcctgatgttcgccatcagcgtcggcgccgccaaagagctgtatgacagccgcgaaggcggcaccggctggagctggaaggattttgcctgggatgttgccggggcggcggcgggctatagcctgtaccacgccacccgctga

SEQ ID NO: 442570 - DNA, 1305 bp, Serratia marcescens
atgactgaaacaacctcaccgctcggggatgccgctacgttagaggcacaagataaaaaaaagcgaatctttgccattgttggcgcttcatcgggcaacctggtggagtggtttgatttctacgtttattccttctgctcgatctattttgccgccgctttttttccggcaggcaacagtaccacccaactgctgcaaactgccggcattttcgccgccggcttctttatgcggccgatcggcggttggctgtttggctatatcgccgataagcatggccgtaaaaactccatgctgatctcggtctgtatgatgtgcgcgggatcgctggtgatcgcctgtctgcccacctacgcgtcgatcggcaactgggcgccagtgctgctgctggttgcgcgcctgttccaggggctgtcggtcggtggtgaatacggcaccagcgcgacctatatgagtgaagtggcggtgaaaggcaagcgcggcttttacgcttctttccagtatgtcacgctgatcggtggccagctgttggcattgctggttctggtggtgctgcagcagatcctgtctcatgctgagttagtggcctggggttggcgcattccgtttgcgttgggggcggtactggcggttgtagcgctctatttgcgccgctcgttgaacgaaacgtctgacgcctcaacccgtaatcatcaggatgccggttcgctgagggggctgtggaaaaaccgcaaagcattcttgatggtgctgggttttactgcggcaggctcgctgacgttttatacctttaccacctatatgcagaaatatctggtcaataccgccggtatggacgccaggctggccagcggcatcatgacggcggcgctgttcgtctttatgctgctgcagccggtagccggagcactgtcggataagatcggccgtcgtaactccatgctgatcttctccacgctggcgacgctgttaacggtgccgattctgtttactctgaaaagcgtctccagtccttatgccgcttttggcttgattgttgtggcgttgattatcatcagtttttatacctcgatcagcggcctgctgaaggcggaaatgtttccgcctgaggtgcgggcgctgggcgtggggctgtcttatgccgttgccaatgcgatgttcggcggctcggcggaatacgtcgccctgtcgctgaagtcattcggcatcgagaatgtcttcttctggtatgtgtccggcatgagcctgctggcgctgctggtttcgctgaagctgcatcgcaaagggaaggagattcagctgtaa

SEQ ID NO: 442571 - DNA, 705 bp, Serratia marcescens
atgcaattaaatgctcaacaacaggccgcacaacgcaatctttcttatttactggcagaaaaactcggccaacagattctggccggcgaatttaaagcgggcagcattctgcccggtgaaatggaactgggagaaacatttggcgtcagccgcaccgccgtacgggaagcggtaaaaatattggcggccaaaggcatgctgctgccgcgaccgcgtatcgggacgcgggtgatgccgcaaaatcattggaacttcctcgaccaggagctgctgacctggtggatgacgcgggaaaacttcgatcaggtcatgcagcacttccttattctgcgtacgtcgctggagccgcaggcctgttcactggccgccatacaggctgacggtgaacaaagagcgcagttgacggcgctgatggcggaaatgcgcgccctgcacgatgattttgaccgcgaacgctggatacaggtggacacgcaataccaccagctgatttacgcttccagcggcaaccctttcctgatctcgttctctaatctgttcagttccgtataccagagctatttcagggcgataaccaataatgaggtgatcaagctgcagcagcaccaggatattgtcgacgccatcctggccaaagacgcccaggccgcctttaaggcatgccagactctgttaggcgaaaaaaatccttcttctattatatag

SEQ ID NO: 442572 - DNA, 927 bp, Serratia marcescens
atggaaacaggaaaactggtggtgctgggcagcatcaatgccgaccatatccttaatattgagcaatttccccgcccgggcgaaacggtgatcgggaaacagtataaggtggcgttcggcggcaaaggggctaaccaggcggtggccgctggccgcagcggcgccgatattgcctttattgcctgcgtgggcgccgacgacgttggcgaacgggttcgccggcaactggcgaccgatcgcgttgatacgcaatccatcgaagccgttgaaaactgcaccaccggcgtggcgcttatcttcgtcaatggcgaaggtgaaaacgtgatcggcattgatgccggagccaatgcggcattgacgccggactatctggcgagctatcagcagcgggtgatcgatgccgatgccgtgctgatgcagcttgaatcaccgctcgatacggtgatcgccgctgcgcgcctggccaaacagcatcagacgcgggtgatcctcaatccggcgccggcgcgtgaactgccggacgagctgctggcgatgctggatatgatcacgcccaatgaaaccgaagccgagcgtctgaccggtattgcggtgggcaatgaacaggatgccgcgcgtgcggcacaggcgctgcatcaaaaaggcattgatacggtgctgattacactcggcagccgcggcgtgtggttgagcgaacgcggtgagggcaaattggtaccggcctttaaggttgaggcggttgacaccatcgccgccggcgatacctttaacggcgcgctgctgacggcgctgctggaaggtaaaacgatgctggaggccgtacgtttcggccatgccgccgcggcgatcgccgtcacgcgtccgggtgcgcagccttccgtgccctggcgtgaagagatagacgcctttttgcaacggcaggagtaa

SEQ ID NO: 442573 - DNA, 969 bp, Serratia marcescens
atgagttctcagactatcgcaaccaagcgctggttcagtaaagaatggctgttggaacagaagtcgctgattgcgctgctggtgctgatcgccgtggtgtcgtccatgagcccgaactttttcacgctcaataacctgtttaacattctgcagcagacctcggtcaacgccatcatggcggtagggatgacgctggtgatcctgacctccggcatcgatctgtcggtgggatcgctgctggcgctaaccggcgcggtggcggcctcgatcgtcggcctggaagtcaacgcgctggtggcggttgctgcggcgctggcgctgggggccgcggtcggcgcctgtaccggcgttatcgtcgccaaaggtaaggtgcaggcgtttatcgccactttggtgatgatgctgctgctgcgcggcgtcaccatggtttacaccaacggcagcccggtgaataccggctttaccgatgtggccgacgcgtttggctggttcggcatcggccgtccgctgggcgtgcctacgccgatctggattatggcgatggtatttattgccgtctggtacatactgcaacatacccgtctgggccgctacatctacgcgctgggaggcaatgaagcggcgacgcgcctgtccggtatcagcgtagatcgggtcaaaatcatcgtgtattcactgtgtggcctgctggcggcgctggccggggtgattgaagttgcacgcctgtcttcggcgcagcctaccgccggcaccggttatgaactggacgccatcgccgccgtagtactgggcggcaccagcctggccggcggcaaggggcgtatcgtcggcaccctgatcggcgcgctgatcctcggcttcctgaataacggactgaatctgctgggtgtttcttcctactaccaaatgatcgtcaaggcggtggtgatactgctggcggtactggtagacaataaaagcaacaagtaa

SEQ ID NO: 442574 - DNA, 420 bp, Serratia marcescens
atgaaaaaaggcgtgctgcttaatgccgacatctccgcggcggtttcccgtctcggccataccgaccagctcaccctgtgtgacgccggtttgccgatcccggccggcgttgagcgtatcgatgtggcgctgatggccggcgtgccgacttttttacagctgtttactgcggtcacgcaggaaatgcaggtggaaagcgccatgttggccgaagagctcgtcacgcaaaacccctcgctccatagcgctctgttggcgcaactgacgcagttggggcagcagcagggaaataccatcagcgtgcgctatatcagccacggcgatttcaaagcgcaaaccgggcacagccgggcggtgattcgcagcggggaatgttcgccctatgcgaacattatcctgtgcgccggcgtaactttctga

SEQ ID NO: 442575 - DNA, 1509 bp, Serratia marcescens
atggcgtcttcatcactactggcagaacgaatttcccggctcagcagcgcgcttgagagcggcctttatgaacgtcaggaagccatccggctctgcctgctggcggcgttaagcggcgaaagcgtatttcttctcgggccgccgggtattgcaaaaagtctgatcgcccgccgcctcaaattcgccttccgccatgcccgctcctttgaatacctgatgacccgcttctccacgccggaggaagtattcggcccgctctccattcaggcgctcaaagacgaagggcgctaccagcgcctgaccgacggctacctgccggaagcggaaatcgtgttcctcgatgaaatctggaaggctggccccgccattctcaataccttgctgaccgcgattaacgaacgccgcttccgcaacggcaacagcgaagagccgataccgctgcgcctgctggtcgccgcctcgaatgaactgccggaggccgacaatagcctggaggcactgtatgaccgcatgctgatccgtctgtggctggacaaggtgcaggataagcagaacttccgctcgctgctgaccaaccggcaaagtgaaaaccaaaacccggtgccggaagcactgagcgtcagcgatgaggagttccggcaatggcaggcgcagatcgataaaattcagctgccggagaactgctttgaactgatattcctgctgcgccagcggctggatgcgcttgaacaggcgccctatgtttccgaccgacgctggaaaaaagcgctgcgcttactgcaggcctgcgccttcttcagcggccgcgaagccattgccccgatcgatctgatgctgctgaaagactgcctgtggcacgatctggcctccatgaagctgatgcagcaacaaattgaccaactgctgagcgagcaggcctatcagcaacagacgttgctgctccagctgcagcagttgcatacccgctggatgcagcaccaacaacagcaaagcgatcgccgggccatcagcctggtgaaaaaaggcggcatgttcagccgtaaaccgcaatacgcgctgggtgaatcactcggcagcggcacgctgacgctattgctgcaaaagccgctgcagctgcatgatattcaggttaaccatttgagtatcgacagcagcacgctagaaagctggctgcaaaaaggcggcgaggtgcgcgccaagctcaacggcattggtttcgcgcagcagattgatttagaggtggatgagcagcagcacctgaccgtgctggacgtcagccgccagccatcgctgctggcgctgccgggcaaacagaccagcgccacgccgccggaactgctggaggaactggatacgctgatgcagcggctggcggaacagcggcggttattcagccagcatcagccctgcctgttcaccccggccgccggcctggccaagatagaagccagcctgctgcaggtagcggagcaaattaaacagcagcaacagcaaatgcagggccagtaa

SEQ ID NO: 442576 - DNA, 1041 bp, Serratia marcescens
gtgttgcttaatcatcagcaacagagacaggatttaagagatacggcaatgaaaaaacagtttatccaaaaacaacaacaaatcagcttcgtaaaatcgttcttctcccgccagctggagcagcggctgggtctgattgaggttcaggcgcctattctcagccgcctgggcgacggtacgcaggataacctgtccggcagcgaaaaagcggtgcaggtcaaggtgaaaaccctgccggacgcgacgtttgaagtggtgcattccctggctaaatggaaacggaaaactctgggcgcccatgatttcagcgccggtgagggcctgtatacccatatgaaggcactgcgcccggatgaagatcgcctgagcgccatccactcggtgtatgtcgaccagtgggactgggagcgggtgatgggggatggcgaacgcaacctggatcacctgaaaagcaccgtacgcagcctctatagcgctatcaaggaaacggaagcggcggtcagtcgcgaatatgggctggcgccgttcctgccggaacagattcacttcgtgcacagcgaagcgttgctgcagcgtttccccgaactggacgctaaagggcgtgagcgggcgattgccaaagagctgggcgcggtattcctgatcggcatcggcggcaagctgtcgcatggccgctctcacgacgtgcgtgcgccggattatgatgactggagcaccaccagctttgaaggactgtccggcctcaacggcgatattctggtgtggaacccggtgctggaagacgcgttcgagctatcttcaatggggatccgcgttgacgccgccgcattgcagcgccagctggccctgacggaagatgaagatcgcctgcagctggagtggcatcagtcgctgctgaaaggtgaaatgccgcagaccatcggcggtggtattggtcagtcgcgcctggtgatgctgctgctgcaactgtcgcatatcggccaggtgcagtgcggcgtatggtcgccggaagtgcgtgaaagcgtggaaggcctgctgtaa

SEQ ID NO: 442577 - DNA, 441 bp, Serratia marcescens
atggcagacattactctgatcagcggcagtacgcttggcagtgctgaatatgtggcggaacatctggccgaaaaactggaagacgccggtttttccaccgagatgctgcacgggcctgaactggatgaactgacgcagtccggacgctggctggtggtcacctccacccacggcgctggcgaactgccggataatctgcaaccgctgtgggatgagatctccgaacgccagcctgatttatccgaggtgcagttcggcgcagtcggtctgggcagttcggaatacgataccttctgcggcgcgatcaaacagatcgacgatctgttacaggctcgcggcgcaaaaaggatcggcgatcgcctggagatcgacgtgacgcagcacgacattccggaagatccggcggaagaatggctgaaaagttgggttaatttactctga

SEQ ID NO: 442578 - DNA, 1845 bp, Serratia marcescens
atgggtatttttaattataaaggcttgagcgatgctgaatcgcaggaattattctccgatgcattagccatgactatgtatagctaccataatctggatgatggcttagcctacggttatcaacattatggttttaacctggggttgccgctcacgctgctcaccgcgctggtcggcaattcccagtcgcagggcattgtgccggggttgccgtggaaccccaattccgaacagcaggcgctggataagatcaatgccgccggctggcaggtgattagcgctgaacagctggggtaccagggtaaaaccgataagctgggcacgtattatggcgaatcctggaagtacaaaacctcccaggcggaagtgctgggtaaatacgacagcgaggggaaattaatcggcctgggcgtcgcgtttcgcggcaccagcggcccgcgtgaaacgctgattaccgacaccattggcgatgcgatccacgatctggttgccggcctggggccggcctcgttctcgaacaatttcgcgttgaacgccttcggtcgtttactggccgacgtggccaagtttgccgcggcaaacggcctgagcggcgaggatgtgacgatcaccggccatagccttggcggtctggcgaccaatagtctggcctttttaagtgaagactattggggcggcttttattcaaactcaaaatatctggcttttgcttcgccgactcagcatgagggcgatggtaaggtgctgaatattggctatgaaaacgacccggtatttcgcgtgctcgacggcacgagttttaattggtcgacgctgggggttcatgataaaccgcatgaatcagcgaccaataatattgttaattttaacgattattacgcgtcgaaattctgggggatgctgccgtcatcaatattaaatctgcccagctggatctcgcatatgccgttcgcctacggtgacggactgtcgcgcatcgttaattctgagttttattcgtttatggatcgggattccacggtggttgtttctacgctgtccgatgtgatgcgcggtaaaacctgggtggaagatctgaatcttgcggcgcaaaaacataccggcacgacctttattatcgggacggataagaacgatatgatcggcggcggcaaggggaatgattacctggaaggtgggggcggcaatgataccttccgcgacggcggcgggtttaactatatctccggtggtgaagggcatgacaccctgattctgcaacaggggatcgccaagacgcaggtggcttatgacggggaaaacctctatctgcgcgacagcaccggcgccattaccatcgccaacagcgtagagacgttgcgcagtcagagcagcggcgtattcggcagcaagaagcatgttgattatctggtaaaagatgacgggctgatggtgggcaatgtccatgttgattacacccggcacggcatcggcagcgaagcggacgatgttctgcaggcggccggcaaccagcgctggctgttcgggcttgacggtgatgacaccctgctgggcagcagcagtggtaacctgacgttcgtcggcggcagaggcaatgatgtgatgcacagcgccggccagaacaataccttcctgtttgaaggcgagtttggtcaggatcaggtgattgattttggtcagagcgacaggctggtgttctttacgccgcaggataagggcggtgatttccgtcagtatgcgacgcagcaaaacgacgatgtggtgtttaacttcggcgataatcaggtcacgctggtgggcgtttctctggattatctcagcaacagccagatcgtgctggtataa

SEQ ID NO: 442579 - DNA, 840 bp, Serratia marcescens
atgaaaccgcgcgttttagcattcactctgctcgccagcctgagcggcctggccgtcgggaccgcccaggcggataagctggatgatattatacaggccggcgtggtgcgcgttgccgtgttcgacagtaacccgccgttcggctatatcgacccgcagagcaaaaaactggtgggctatgacgtggacgttgccgaggctatcggcaaggcgctgggcgtgaaggttgaactgcgcgccaccaacccggctaaccgtattccgctgctggcatcgaaaaaggtggatttgatcgccgctaacttcaccattaccgatgagcgcgcgaaagcggtgaatttcagcgtgccctatttcgccaccgggcagaagtttatcgcccgcaaaggcgtactgaaaacgccggatgacattaaaacgctgcgtatcggcgccgataaaggcacggtgcaggagatcacgctgcgcgagcgctatccgacggcgaaggtgatctcttacgacgatacgccgctggcctttgttgctctgcgcaatggcaatgtacaggcgatcacccaggatgacgccaagctggtggggctgctcggcaacctgacgccggcgcaaaaggccgactttgaaatttcaccgttcagcatcaccaaagagtatcaggggatcggcattcccaaaggggaaacgcgcctgacgacgaccatcaatgacaccttgatcaagctggagcaggacggcgaagcggtgaaaatttataaccgctggttcggcccggacagcaaatcggcccagccgcgcggcgagtttaaaattgcgccgctggatcggcagcctaaagcctga

SEQ ID NO: 442580 - DNA, 726 bp, Serratia marcescens
atgaatttgccacccatcgaggactggctgctggcgccgcagtatttacactggctgtggcagggttttttgctgacgctgtggctgtctgcctgcgccggaacggcggcgacgctgttggggtttgtgctggcggccctgcgcgacagcgggctggcgccgttacgctggttggtcacggggtactgttcactgtttcgtaatacgccgctgctggtgcagctgtttttctggtacttcgccgccgggcagcttctgcccgccaatgccatgcagtggctgaatatgccgcatcagctcggctggctgacgtggccctcttttgaattcctcgccggttttgtcggcctgacgctctattccggtgcgtttattgccgaagagatccgcgccggcattcgcggcgtcgccgcgggacagaagcaggcggccagcgcgctggggttgggccgctggcaggcgatgcgctatgtggtgctgccgcaggcgctgaatatcgcgttgcctcctctgctgggtcagtatatgaatcttatcaagaactcctcgctgacgatggcgattggcgttgccgagctgtcctatacctcacgtcaggtggagaccgaaacgctgcgtaccttccaggcgtttggcgtggcgacgctgctgtatattgccgttattgcgctgctggagggctgggggctgtggcgccagcagcgacggctgcagagggggcattaa

SEQ ID NO: 442581 - DNA, 738 bp, Serratia marcescens
atggattttcgcgttattcacgacaatctgggctacctgttatggggagcctggccggatggcgaactgggcggcgcggccctgacgctggcgctcagcctgatggccggcgtcgcttcggcgttgatcggcatcgttctgggaaccctgctggcgatgtcgcgcggcgtcgccgccggattgctggccgccgtgctggggttcttccgcgcgattccggtgattatgctgatcttctgggcctacttcctgctgcccatggtgtccggcgtcgagatcccggcaatcaccaccgtggtatgcgcgctggcgctgattgcgggcgcctatctggcgcatgcggtaaaagccgggatcctggcaattgcgcccggccagtggcaggcggggctgtcgctgggcctgacgcgctggcaaacgctgcggctgatcgtcctgccgcaggcgctgcgcatgatgacgccgtcgtttatcaaccagtggatcgcgctgattaaagatacctcgctggcttatatcgttggcgtgggcgagctgacgtttctggcaacccaggtgaataatcgcagcatggtttacccgatggagatctttctgtttgtggcgctggtttactttgtgctgtgcctggcgctcgatctgctggccaacgcgctgggtaagcgcttcagcccgcaaagcaaagcgccgcggcgcttctggcattggcggcgtaagccggccgtcgcagccggctag

SEQ ID NO: 442582 - DNA, 666 bp, Serratia marcescens
atgacccagattgactgcatcctatttgactgtgacggtacgctggtggacagcgaagtgctgtgcagcatggcctatgtgcatatgttcgcccagcacggcatcacgctgtccctggaagaggtattcaagaaatacaaaggcatcaagctgtatgagattatcgatcgggtgaacgccgagcatggcgtcacgctggccagggacgtgctggaaccgctgttccgtcaggaagtggcgcggctgttcgacagcgagctgcaggaaattgctggcgcgcgcgaactgctggcgcagatcaccgttccggtctgcaccgtctccaacgggccggtcagcaagatgcagcactcgcttggcctgaccggcatgctaggctattttgatgaccgattgtacagcggctacgatctgcaacgctggaagccggacccggcggtgatctaccacgcggcgcagcagatgaacgtgccgctggaacgctgcatcatggtggatgattccccggcgggtgcgcaggcgggcatcgccgccggcattccggtcttttacttctgcgccgatccgcataatccgccgatcgatcacccgctggtgactacgttcgatgcgctgacgcaactgccggcgctgtggaaacagcgcggctggcagctgacccgctag

SEQ ID NO: 442583 - DNA, 1044 bp, Serratia marcescens
atgtattttttaattttagccttattaacggcttttaacaccagtcctgtcaacgccacagaaatgcattaccctgcgggagaagaaccggttgaactcccgacagacagcccgctgcataacaaactgccccgttcggcacacagtaaagaagatcagaaaacagaggcaatgtcgctctacctgacgctgatgcgtgaagatgaacacagcatctgggcgccttatcagcttgccgtctcttctgccgaaaaagggcaaactgaactggcggaacgctatctgcagctcagcgccaaacgcggcctgtggtattactacaacctgctggaagaggatgcctttaacgccattcagcacggcaaaacctaccagtccatcctggcgcaaaccaaagcccgctatcagcagcgtgcgcagcggcatgaaggcaaagccagctatacgctgccgcagggcgaaccgccggccggcggctggccaacggtggtgttcctgcacgcctacggcaaacaggccaacatcagcgccgaggagaagctgatgttcggcgccatgggagttgcctatatcgagctgaatggcacgcagatgctgtcggaaaacagcttccgctggtcaaactacagcgatgaaagcacccacaatatggtgcagcgcaccctgcacgacttgacgccgcagctcgggctgaaccctcaggcggtttatctttttggccgtggtcagggcgctctgcacgccgccaatctgctggcgaaatatcctcagtgttactcaggcggcctgctggtggcgccggtgggggcgatcaaaccggcaactcagagcctggccggcaataagcgcatcgtcatcgcttactacaaccgacaaaaatttagtacccaagcaatagcattagatttttccgaacttttcggcgcaaaaaatcaggtgcaggtactgcactttgaacagccggaaagcgctaaacagagctggctcgcccgctttgcacaaccgctggagtggatgctcggcaagacgccaagcgctgaatag

SEQ ID NO: 442584 - DNA, 567 bp, Serratia marcescens
atgtcagaccaagcattaaagatcgtgaccctactaggcagcctgcgtaaaggctcttacaacgccatcgtagccaatacgctgcccaaactggcaccgccaggcatggttatcgaagccttaccctccattcgcgatatcccgctttatgacgccgacctgcagcaggaagaaggatttcccgccacggttgaaaccattgccgagaaaattcgccaggccgacggcgtcattatcgttacgccggaatataactactctgtacccggcggcctgaaaaacgccattgactggatttcacgcctgccgaaccagccgctggccggtaaacccttggcgatccaaaccagttccatggggccgatcggcggtgcgcgttgtcagtatcacctgcggcagatcatggtgttcctggatgcgatggtgatgaaccggcccgaatttatgggcggcgtgattcaaaataaagtggatgagcaggcgggagagctgaccgatcaggctacgctggattttctgcgcagccagttagccgcattccgcgattatatcgcccagttgcgataa

SEQ ID NO: 442585 - DNA, 1281 bp, Serratia marcescens
atgttgctttcgcaaaagggatggtcacgcctgttatttgccgttgtgctgggcgcggcctcctgcgccagtcaggcggaatcacactatgtgctggaaaaagtggtggaggtcagccgtcatggcgtcaggccgccgacgcccggcaaccggcaggcgatgcaggacggtaccgatcgcgcctggccgcaatggaccacccgcgacggcgagctcaccggccacggctacgcggccgccgtgctgaaagggcgttacgaggccgaatattatcggcgtcaagggctgcttgagcgcggctgcccggctcccggcgcggtgtacgtctgggccagcccgctgcaacgtacccgcgccaccgctcaggcgctgatggatggggcatttcccggctgcggcgtggcgatccatgcggtcagcgacaagcaggatccgttatttcaggcggataaaatggggctgacgccgctggacgcggaaaaagcccgggcggcgatccagcaggcgatgggcggcagcccggagcaggctcagcagcgcctcagccgtgacattgctcgcctgcaggccgccgtctgccagccgaacaagccctgcccggcctttgagcaaccctggcgcatcgaacgcaaagaggacggccgcttcagcatcaccggccttggcaccctgtctaatatggcggaaagcattcgcctggcatacagcgagaacctgcccgccgcgcaggtggccttcggccacggcggcagcgcgtcggcgattgcgcctctgctacccttgctcaccgcccgctacgattttaccaatgacgtaccctatatcgcccggcgcggcggttcggtattgctgaatcaaataacgcaggctttagcctccgatcgtgcatcggctgatgccccgccgccggcgcgctggctgttgttcgtcgcgcatgacaccaatatcgcctatctgcgcaccctgctgggcttcagctggcagcaggatcggtacccgcgcggaaatattccgccggccggcagtctggtgtttgagcgctggcgcgataaacagagcggtcaacgctttctgcgcacctactttcaggcacagtcgctcgatcaaattcgtcgtctgacgccgctggacgcccggaccccgccgttaaaaaccgacctcagccgccctggctgccggccgtcaccggttggcgtactgtgcccctggtctgcatcgttacaccaactgcgcgcggcaattgacccgacggcattaccggcggtgcattacacgccgtaa

SEQ ID NO: 442586 - DNA, 1365 bp, Serratia marcescens
atgtctggtatcttcgcttattttaaagcggcgccggccacgccttcccatggcccgctgaatgagaaaaaattccgcctcctgcgcggccgcacctttctggcgatgacggcggcttacgtgatgttttacgtttgccggctgtcgttcaccgtggcgaaaagcgccctggtcgacatcggcatcacccccggcgaattgggtatgatcggttccgccctgtttttctgctacgccatcggcaagctggtgaacgggttcctggccgaccatgccaacgtcgtgcgttttatgagcctggggctgctgttgagcgccgggatgaacgttatgatgggcatgaccaccaacgcgctgctgctgacgctgttttggggcatcaacggctgggcgcagtccatgggcgtcggcccgtgcgccgtatcgctggcgcgctggtacggcaataaagagcgcgggaccttctacgccatctggtccacggcgcacaatattggcgaagcggtgacctatatggccatcgccgcggtgatcgccgcctttggctggcattttggctatttcaccacggcgatgctcggcgtcgtgggcgtggtgttaattttactgtttatgtgcgactcgccacaaagcgccggctatccgccgattggcgtgatccgcaacgaaccggaagccctgtcggaagataagggaacggtgctgaaaaaccagctgtggtcgctgcgcaacccggcgctgtggacgctggcgctggcctcggcctttatgtatatcgaccgttacgcggtcaactcctggggcattttctttttacagcaggccaagcactacaccacgctggaagcctccggcattatcggcgtcaacgccattgccggcatcgccggcaccattatcgccggtatcctgtccgatcgtatcttcccgcgtaaccgcagcatcatggcgggggcaatcggcctgttaaataccgccggcttcgccttgatggtgtggtttccgcgtaacgactacaccgacgtgctgtcgatgattatcttcggcgcgacgattggcgctctgacctgttttctcggcggcttaatcgcggtggatatctcttcgaagaaagcggccggcgccgcgctcggcaccatcggtattgccagctatgccggcgccggactgggtgaatgtattaccggcgtgattatcgatcgcacctcggtgattgaagcaggtaaaacgctgtataattttgacaccttatcgctgttttggatcggcgccggtttattttccgcggcgctgacatttattaccgccggcattgttgctcaccgccagacaatacatcggcaaacgcaaatatcccgttcataa

SEQ ID NO: 442587 - DNA, 810 bp, Serratia marcescens
atggcatcaacatctgaacaggatatcgcagcgcgctaccgctttgcctgcgacgttgcgcaacaggccggcaggctggcgtacgatttttaccagcggcgccagcagctggccgttgagcacaaaggcggcgacctgcaggacgtggtcagccaggccgatcgggaagtggaagcgctgacgcgtcgtctgatcgcccagcgctttcctcaggacgactttctcggggaagagagcggcggcggccacggcaccgcgccctacacctgggtggtggatccgatcgacggcaccgcctgttttctcaacggattacatacctggtgcgtctcgatcggcgtgatcttcgacggcgatccggttatcggcgtggtttacgatcccaaccatcaggaaatgttccacgcccggcgcggcggcggcgcctttctcaatcatgcgcccatcaacgtgcatccgggccgctcactgcgcgacggcgtgatgggggtcggcacctcgcaccgcgtgacgccggaagagtttgtgccgtttgtcagccgcctgttgcacgccggcggcatgtttatccgcagcggttccggcgcgctgatgaccgctcaggtcgccgccggccgcttaatcggctattacgagccacatatgaacgcctgggacagcctgcccggcatgctgctggtgcaggaagccggcggcatcaccaatgatttcctggccgatcggggattacagaaaggcaacgtggcgttaatggccaacgcggagatttattcccagctgcgtgaattaattcagcaacaggttaaataa

SEQ ID NO: 442588 - DNA, 993 bp, Serratia marcescens
atgagtgatgcaaaaaacagttgggttaccgccagcgacgttgcgcgcctggcgggcgtttcacgctccgccgtttcacgcaccttcacccccggcgcttccgtctctgaaaaaacgcgccagcgggtagaagcggccgccgccgagctgggttatcaggtcaatatcatcgcccgttcgatgattaccggcagcagtaacttcatcggcctggtcaccgccggctttgacaaccctttccgcagtaaactgctggcgccgctgacgcaccacctgaccttacaggggtttatgccgctgctgatcaatgccgatgaccctcagcagctggagccgcagctgcgcgagctgttaagttatcacgtcgcgggcgtgatcctgacctccggcgccccgccgctgtcgctggcggaagcatacctggcgcgcaaaatcccggtgacgctgatcaaccgccaggcggagctggacggcgccgatcaggtatgcagcgataacagcgacggcgcgcagcaggccgcgcagcgcttgatgcagcatggggtaaaacatccggggtttatcggcgaagacgcctccttcagcagccatcagcggcaacaggcgttcacccgccggctcagcgagcaacagttgacggtcaccagcgcgatctgcccgcaagggggttaccaggccggctgggaggcggcagccacgctgttgacgcaacggccgcagctagacgccctgttttgcgccaccgatatgctggccattggcgccatggattttatacgccgtcatcaccccgcacgcacgctgccgattatcggtttcgacgatatcccacaggcagatttttccgcctatcagctgaccaccctgcgtcaggatacggaaatgctggcgcgtaccgcagtagacctgttggtcagccgcatccgccacttcaatcagtcggcggtgcgcaaaagcgtccccgtcgagcttatcgtgcgaggatcggcataa

SEQ ID NO: 442589 - DNA, 816 bp, Serratia marcescens
atggctattgaactgattgcaattgatatggacggcacgctgctcaatccgcagcaccagattacgccggcggtaaagcaggcgatcgaggccgcgcgccgccagggagtgtacgtggtgctggcgaccgggcggccttacgttggcgtgcaggactatttgcgtcagctggatattcagggagctaacgattactgcattacctataatggtgcgctggtgctgcaggcggtcgacggcgcctgcgtcctgcaggaaacgctgggttttgaggactatctatacttcgaacagctggcgcgcgagctgggcgtccacttccacgcgtttgatttcgacacgttgtacaccccgaataaagacatcggcaaatataccgtgcatgaggcttctctgaccggtatcccgctgaaataccgcagcgtggaagagatggatcgccagatgcgtttcccgaaagtgatgatgatcgatgagccggcgctgctcgacgcggcgattgcgcgcattcccgccgaagcgcaggcgcgctatacgctgctgaaaagctcgccgtactatctggagattctgcataagcaggtggataaaggcgccggggtgaaaatgctggccgaacatctgggcatcgcgcaggcaaacgtgatgacattgggcgatcaggccaacgataccgcgatgatcgagtatgccggcgtcggcgtggcgatgggcaatgcgattgacgaactgaaagcggtggcgcagtttgtcaccagcagcaacgccgaggacggcgtggcgcgggcgatcgagaagtttgtactcaatgcctga

SEQ ID NO: 442590 - DNA, 942 bp, Serratia marcescens
atgcgcatccttgaccggcagcaaatcctggccgctttcgatgccgatgccgtcacggcgctgctgaagcagggctttatcgcctattcgcagcgccgggttcagcaaccgccggtacagcacttcctgtttaaacaggcggccggtgatggctgtatcaaatcggcctggttggagggggatgagttattcgtcgtcaaagtgtccaccggcttctaccgcaacgctgaacgcgggttgcccagcaaccaggggctgatgatggcattttccgccctgaccggtgaaccgcaggcgctgctgctggatgaggggtggctgacggcgttgcgcaccgcgctggccggacgcatcgccgccgaactctgcgcaccgccggatattcaggcgatcggcatcctcggcaccggtttgcaggcaaggctgcagctgcaatatctgaagccggttaccgactgccgcgacctatgggtatggggccggaatcagcaggcgctggaggcttatcgccacgatgccgaagccgagggcttccgggtgcgcactacgcaggatgcggcagagctggcggcacactgccggctgatcgtcaccaccacgccaagccgtgagccaattttgcaggcggcggatatccgccccggcacccatatcaccgcggtcggcgccgacgcggacggcaaacaggagctggcgaccgcgctgacggccaaggcagatattctgttggttgatgcgctggcgcagtgtgcggagtatggcgaaatagcggcggcttaccggcaaaatatgctgacatcgacgccgatcgtcgaatttggcgccgcgttggcgcagggtggaaaagtccgcagcggccgggagcagatcacggtagccgatctcaccgggctggcgattcaggacctgcaaattgcgaaaggggtgttagccgccgtgtaa

SEQ ID NO: 442591 - DNA, 969 bp, Serratia marcescens
atgacagatttattcgccgccattgaggacgcgcaccggcagttgcggccacaggtacgcgtcacgccgctggagcacagcatcctgctttcacagcaattaggctgtgaactgtggctaaagtgcgaccatttgcagcaaaccggctccttcaagtttcgcggcgccagcaacaaactgcgcctgctgagcgacgcccagcgccgcaacggcgtgatcgccgcctccagcggcaaccacggcctggccattgcgcaggcgggtaaactgatgggtatcggcgtgacggtttatgcgccggagaacgccgcctcggtcaaactggacgccatccgcgcgctcggcgccgatgtgacgctggtgcccggcgatgcactgcaggcggaaatcgccggagagcgcgccgccgccgaacagggcaaggtgtatatttccccgtataacgatgaacaggtgatcgccggtcagggcacctgcggcatggagctggtcgaacagcttagcgatctggatgcggtattcgtggcggtcggcggcggcgggtatattgcaggcatcggcagcgtactgcagcatttgtcgccgaaaacccagttgattggctgctggccggagaacgccaccagcatgtacagcgcgctggaggccggccatatccacccggtcgaggagcaggagaccctgtctgacggcaccgccggtggcgtcgaacctgatgctatcaccttcccgctgtgccagcgcctgatcgatcggcgcgtgctggtcagcgaagcggaaatccgccgggcaatgcgcgccctggccgccagcgagcgctggattatcgaaggtgcggccggcgtggcgctggccgccgccataaagctggcaccggaactgcaggggaaaaaggtcgcggtagtgctgtgcggcaaaaatatcgtgctggagaaatacctgaaggccatcgaccatgcgcatccttga

SEQ ID NO: 442592 - DNA, 606 bp, Serratia marcescens
atgttgaaccgctatcacgccatcgccgatgccatcgccctgctgtttaccccctatgccgaagtagcgatccacgatctggccagtcagaagctggtgtatatcgccaataatcgttcgcagcgtgaactgggcgaagattccaacctgaacgacctgcaggacaacctggatctgcaggtgctcggcccctatcagaagcacaactgggacggcggccaaatgcgctctatcagcgcagtgctgcgtgacgacaaccagcgcccgatcggcctgatgtgcatcaatctggatattacggtgctcagcagcgccaaagcggcgctagagactttcctgtccggcagcacgctccagccacagcccgccgtgctgttccaggacgactggcaggaacgcatcaatacctttattcaccagtggctgcagcagcatcagcaaacgctgtcgacgctgggcggccccgccagacgggcgctggtggaagcgctgtatcaccagggcgccttccggggaaaaaatgccgccggctatgtcgcgaaaatcctcggtatcggccgcgccacggtttacaactacctgaaaaatattaaggagtcggtatga

SEQ ID NO: 442593 - DNA, 696 bp, Serratia marcescens
atgaagcagcagatcggtaaaactgaccgcatcattattgagattggccggcagatcgtcggcggtaagtatgttcctggtgcagcgctgccgtcagaagcggagctgtgtgaagagtttgctacttcgcgcaatatcatccgcgaagtgttacgggcgttaatggccaaacggctggtggagatgaagcgataccgcggtgccttcgtcaccctgcgtaatcagtggaactatctggataccgatgtcctgaactgggcgctggagcaggattatgatccgcgcctgattgtggcaatgagcgaggtacgcaacctggtggagccgaccatcgcccgctgggcggcggagcgtgccacgtccagcgagttggcggtgatagaggcggcattgaacgacatgctcgcccatcaccagcagcgcgagttgtttaatgaggcggatattcgctaccacgaagcggtgttggcgtcggtgcataacccggtattgcaacagctcagtgtggcgataagttcactgcagcgcgcagtgtttgagcgtacttatatgccggatgaggacaatatgccgcgcacgctgcgtgagcatcaggatctgtatgatgcgatacgtcatcaggatgcggatgcggcagagcgcgctgcgctgacgatgatcgccagttcgacaaaaaggttaaaggacatgctatga

SEQ ID NO: 442594 - DNA, 894 bp, Serratia marcescens
atgagtgacagctttatcgcgattgactggggttccaccaacttgcgcgcctggcgttatgaacggggcgtatgcgtcgacagcgtgcagtccgaagccggagtcacccgcctcggtgagcgtttgccgcagcaggtatttggcgagctgatggcccgttgggcggagccgctgccggtggtgatggcggggatgattggcagcaatgccggctggattcaggcgccgtatttgtcttgtccgacccgcctgaccggcatcgccgcccagttgaccacgatagagcaagccgcgccgtatcacgcctggattatcccggggatatgcgttgctaacgaagataactgtaatgtgatgcgcggcgaggaaacacagctggtcggcgcctatgccgcgcggccgtcgccgctgtacgtcatgccgggtactcacagcaaatgggtgcggatggacggggatgcgctggtggattttcgcaccgtgatgaccggcgaactgcaccatttactgctggcccattcactggttggcgccggcctgggcgaacagctgagtgatgaacgggcgtttgaacgcgggttggcgatagggctgagcgaacggcatatcgtccgtcggctgtttgaaacccgcgctgcccatttgcttggcaagttggaaaagagcgcggtcagcgactggctgtccggcctgctgatcggcaatgaagtggcgcagatgcagcaggaatttgcgttaccggcgcaggatgcgttaacggtaatcggcaacccaaaactgacggcgcgttatgcccgggcgctgagtatggctggcatggctcacagcgtattggatggcgatgacgtttttcaattaggcatcaggagcatagtcaatgagttggaatactaa

SEQ ID NO: 442595 - DNA, 618 bp, Serratia marcescens
atgagttggaatactaaattgccgttgatcgctattctgcgcggcatcacgcggccggaggcaggtgaacatatagaggcgctgctggcagcgggttttgatgcgatagaaatcccgctgaactcgccggagtgggaggagagcatcggtgatgcggcgcagcgttttggcgatcgcgcgttgattggcgccggcacggtattgcagacgcagcaggtagaacgcctggcgatactgggcagccggctggtggtgacgcccaatacgcaaccggcggttatcagccgtgcggttgcgctgggcatgacggtgtgcgccggctgtgcgacggcgaccgaagcattcaacgcgctggacgccggtgcgcaagcgttgaaaatttttccgtccatgtcgttcggcccgtcttatatcaaagcgctgaaggccgtattgccgccgcaggtgccggtcttcgccgttggcggcatcacgccggaaaacgtgcaccagtatttggccgcaggttgtgttggcgcaggattaggcagcgatttatatcgcgccggtcagccgccggaacgtaccgcgcagcgggctgctgcttttgtccaagcctataaggaagccacatcatga

SEQ ID NO: 442596 - DNA, 1149 bp, Serratia marcescens
atgaaaatcaccaaactgaccacctatcggctgccaccgcgctggatgttcctgaaagtagaaaccgatgaaggcattatcggctggggcgagccggtaattgaaggacgggcgcgcagcgttgaagccgcagtgcatgagctgtccgaatacgtggttgggcaggatccggcacgcatcaatgatatttggcaaacgctgtatcgcgggggtttttatcgcggcgggccggtgctgatgagcgcgatcgccggcatcgaccaggcattgtgggatatcaaaggcaaagcgctgggggtgccggtgtaccagctgttaggggggttggtgcgcgataaaatcaaagcgtatagctgggtcggtggcgatcggccggcagaggtgatcgccggcatagaaaaactgacgcagattggcttcgacactttcaagctgaacggctgcgaagagatgggcatcattgatagctcgcgcaaaatcgatgccgcggtggcggtggtggcgcagattcgcgaagcgtttggcaacaagattgagtttggcctcgattttcacggccgtgtcgctgcgcctatggcgaaggtcttaattaaagagctggagccttaccgtccgctgtttattgaagagccggtattggcggagcaggccgaatattacccgcgtctggcggcgcaaacccatattcctatcgccgcgggggagcgtatgtattcacgctttgattttaaacgcatcctggctgatggcggcctagcgatcgtgcagccggatctttcacatgcgggcggcatcaccgaatgttttaagattgcggcgatggcggaatcttacgacgtatcgttagcgccgcactgtccgctggggccgatcgcgctggcttcttgcctgcacgtagactttgtggcgcgcaacgcggtgttccaggaacagagtatggggattcactataaccagggggcggaactgttggattacgtgcttaacaaggatgatttcgccatggacgacggccatttctatccgccgtgtaaaccagggttaggggttgaggtgaacgaagagctggtggttgaacgcagcaaacaggctgccgactggcgcaatccgatctggcgccatgccgatggtgccgttgctgaatggtaa

SEQ ID NO: 442597 - DNA, 1317 bp, Serratia marcescens
atgaataacgatctgtactcctcaaccatcaataaaatgaatgtcaggatcattccttttattatggttctgtatttaattgcttatatcgatcgatctaatatttcggtggcggcgttacagatgaatgccgatttggccatgacggccgaaatgtacggtattgccgccggtatattttatatttcctatattatatttgaagttccgagcaatgttatcctgacccgtgttggcgcaaaactctggattgcgcggattatggtcacctggggcgttatcgcggccggcatgagcctggtgcaaacaccgatgcagctgtacatcatgcgtttcctgctgggcgtcgccgaagccggctttactcccggcattatttattatctctcctgttggtatccgcgcagcgagcgtgcacgcgctatgtccctgttttatatcggcgcggcgctggcttcggtgatcggtttgcccctttccggctctattctcaatctgcacggttttttcggtattgaaggctggcgttggttattcctgttggaaggcatcccggcgtttatgctggggatcgtggtgtatttctatctggatgatgcgccggaaaaagcgcgttggctaactacggcacagcgtagctggctgagtgagcaactggccagtgaaaatgcgcagacggcgatcggtcatcatcatgactggtgcacagcgttgaaaacccggcgcgtctgggtgctgagcctgttatggctgctgcaggcgttcggcaccattggcatcaccctgtttctcccgctgatcgtgaaaggtgtggcggcgcagcagagcaattttatggtcagtgtgctgtccgccgtcccgtttctgttcgcctgtatttttatgtatgtgaatggccgccattccgatctgaccaaggagcgcgcctggcatctcggtttgccactgatggtcgccggtgcgctgctgttgctggcgatctacagccagaatctgctgctggcgtacgtgttgctggtattgaccgttggccttaactgggccattacgcctattttctgggcggtgactaccgaaaccgtcgtgggtgctgccggcgccgcctctattgcgttgattaatgccgtagcgaatattgccggcctgattttccctccggtaatgggaagaataaaagatgtgaccgatagctataacagtgcgctgattattgtcgctctggcattaattattggtggtgccatcggtttgaaaattggccggaaaaacatgtcatccgttgctaaaaaagaaaccagtatttcctctcgttactag

SEQ ID NO: 442598 - DNA, 1293 bp, Serratia marcescens
atggaaatgacattaaccgcaacaccaaaaaccaagcgtcgctacctgacattattaatgatatttgtcaccgtggtgatttgttatgtcgatcgcgccaatttagcggtggcgtcggcgcatattcagcaggagtttggcatcaacaagacgcagatgggctatatcttttctgcctttgcctggacgtacacgctgtgccaaatccccggcggctggttcctcgatcgcttaggttccaaactgacctactttatcgccattatgggttggtcgattgcgacattgctgcaggggttcgccaacgggttaagcgcgttgatcggcttacgggcggtcaccgggctgtttgaagcgccggcatttccgacgaacaaccgtattgtgaccagctggttcccggaacaggaacgtgcatcggccgtcggtttttatacttccggccagtttgtcggtctggcgtttttaacgccgctgttgatttgggtgcaggagctgctgagctggcactgggtgtttattatcaccggaggcgtcggcatcgtctgggcgctgatttggcacttcgcgtatcagtcgccgcggaaaagcaaaggcgtgaatgaagcggagctggcgtatatccaggccggcggcggcatggtggacggcgatgttcccgatgagaaaaaggcgcgtgtcgccctgacagcggcggactggaagttggtgttccaccgcaagctgttgggggtatacatcggccagtttgccattacctcgaccctgtggtttttcctcacctggttccctaactacctgacgcaagaaaaacacattgctgcgctgaccgccggctttatgaccaccgtaccatttttggcggcatttttcggcgtactactgtcaggatttgtcgccgatcgcttgctgcgtagcgggaaatcgataggttttgcacgtaaaacgccgatcatctgtgggctgctgctctctacctgcatcatgggcgcgaactacaccgacgatccgttctggattatggtgctgatggcgctggcgttctttggtaatggttttgcctcgataacctggtcgctagtgtcatcgttagcgccggtgcgcctgattggcctgaccggcggtttgtttaactttgttggcggattaggcggaattaccgtaccgctggtagtcggctatctggcacaggactacggcttcgccccgtcgctgatttatatttccgccgtggcgctgattggcgcattgtcctatttgttgctggtgggcgatgtgaaacgggtaggttaa

SEQ ID NO: 442599 - DNA, 1281 bp, Serratia marcescens
atgagtcaacgggacacacagcttacgttcgatcaacggggccatcagttaaccaatatcaacgtctggacgccgtgcagccagtggctggcgtatgacgtgcgcccgagcggcgcatcgtttaccgggctgaccatcgagcgggtcaacgtagccagcggcgaagtgcaggtggtgtaccgcgccgagcatggcgcgcacgtcggcgtggtgaccgtcagcccggacgcgccggcgcgctatgcgtttatccacgggccggagcacccggacagccactggcattatgattttcatcaccgtcgcggcgtgatagtcagcgagccggaccgcgaactggcggtgacgctcgacgcgttggatatcaccgccccctacacgccgggcgcgctgcgcggcggcagccatgttcatgtgttcagccccgacggcagccggctcagttttacctataacgatcacgtgatgcatgagcgcgatccggcgctggacctgcgcaacgtcggcgtcgcgctgccgctgcgcggcgttaatccgccgaagcagcatccgcgtgaatatgacggcagccacttctgcgtgctggtcagtcgcaccacgccgcagccgcgtccgggaagcgatgagattaaccgggcgtatgaagaggggtgggtcggtaatcacggctacctgaagccggacggcagccggcagcgctgggcgctggcgtttatcggcgacacgctggcggaaaacggtgaaaaactgccggaagtgtttatcgtcgacctgccggaaaacgacgccgactatgcaaaggccggcgatgagccgctgcagggcagcgaaggtcgcctgccggcgccgccgcgcggcgtgcgacagcggcggctgacctttaccggcgaacggcgcaaccccggcgtggcgacagcgccgcgccactggctgcgcagcgcgccggacggcagtcagatcgcttttttgatgaaagatgataacggcgtggcgcagctgtggacggtttctcccaacggcggggcgccgcggcaggtgacgcagggcaaacatgcggtgcagtcggcgtttagctggcacccgcagggcgggcatgttgcgctggtctgtgataacagcgtgatgttgtgcaatatggcgaccggcgcgctgcgtcgcctgacgccgcgtagcgagcagccgcccagcggcgatgcggtggtgttttctcccgatggcaaacgggtggcgtttatgcgggacgtggcgggctttagccagatatttatcgtcgaggtctag

SEQ ID NO: 442600 - DNA, 339 bp, Serratia marcescens
atgatgatgaaaagattgatggcgaccagttgcctgctgttggcgaccagcggttgctccagcgtaatgagccacagcggccccgatatgggctactatcctggcacgcgcgccagtatgaacatgttgaaagacaatgagaccggctgggcaatgaagccgctggtggcgctggatctgcctttctctgcggtaatggataccgtgttgctgccttacgactacctgcgtgccgacagcgacaaaactgccgactcgccaagagagcgcattctgcgcagcgagcagcagaatctggcctctaccggcaacccgggacaaggccccgtcacacactga

SEQ ID NO: 442601 - DNA, 1254 bp, Serratia marcescens
atgactttttcacttttcggcgacaaatttacccgttactcgggcatcacccgcttaatggacgacctgaaccaaggcctgcgcaccccgggcgccatcatgctcggcggcggtaatccggcgcaaatcccagagatggagcactacttcaaacagctgtgtcaggagatgctcgaccagggcaaactgaccgaagcgctgtgcaactatgacggcccgcaagggaagaatacgctgcttaaagcgctggccaccctgctgagtgaagagctgggctggcagatcgaaccacagaacattgcactgacaaacggcagtcagagcgcgtttttctacttattcaatctgttcgccggccgctgcgccgacggcaaccggcgtcgcgtgctgttcccgctggcgccggagtatatcggctacgccgacgccggcctggacgaagggctgtttgtctccgccaagccgaatatcgagctgctgccggaaggccagttcaagtatcacgtcgatttcgacaacctgactatcggcgacgatatcggcatgatctgcgtgtcgcgccccaccaacccgaccggtaacgtcatcaccgatgacgagctgatccagcttgacgcgctggcacagcagcacgatgttccgctggtgatcgataacgcctacggcgtgccgttcccgggcattatcttcagcgacgccacgccgctgtggaacccgaacatcatcctgtgcatgagcctgtctaaactgggcctgccggggtcgcgctgcggcatcgtgattgccgatgagaaaaccatcaccgcgctgaccaatatgaacggtattatcagcctgtcaccgggcagcatcggcccggcaatcgcggcggaaatgattgaacgcggcgacctgctgcgcctgtcaaacgaagtgattaagccgttctaccagcaacgggtgacgcagaccatcgccaccatccgccgttatctgccggaagagcgctgcctgatccataaaccggaaggcgcgattttcctctggttgtggtttaaagacctgccgatcagcaccgagctgctgtaccagcgcctgaagcagcgcggcgtactgatggtgccggggcactacttcttcccggggctggagcacgagtggccgcatacccatcaatgcatgcgcatgaactacgtgccggagccggataaaatcgaacgcggcatcgccattctggcggaggaagtggagcgggcgcaccgcgaagcgcagtaa

SEQ ID NO: 442602 - DNA, 753 bp, Serratia marcescens
atgaaaagagaagttatcgtggtgaccggcgcttacggcacggataccgttcagcagcggggcggacaggccgccatgctgccgatcattgccgatgccggcgcggacggcgtggaaatccgccgggaactgttcagcccggccgaactggataacctgccgcagctggcgcaggagatcgaacgtcagcagctgttcacggtgtattccgccccggagccgcttttcactcccgatcatcacgttaaccctaaactgcccgcgctgctggcggaggcccaggcgctgaaagcgcgccgtctgaaactctctttgggccattaccagccgggctttgatttcactgaactgaaagtggacctgatgcaacatccggttcagctggtggtggaaaacgaccagaccgccgactgcgggattttgtcgccgatgaacgccttcctgcacgcggcggaagatagccagctgccgatcagcatgaccttcgacatggccaactggctctgggtggggcaagacccccgcgccgcagccgaacgcctggcgcgtcacgtcggttatatccacgtcaaagcggcggtgcaggggccgcgcggctggcgcgccattgcgctggacgatgccggcgacgagtggcgccggcttctggctcaactgccggcggacgtgccgcgcggtatcgaattccccctgcagggcgacgaccttgaggccgttacccgtcactacgtcaacctgttacgcgcggagtaa

SEQ ID NO: 442603 - DNA, 1038 bp, Serratia marcescens
gtgagcagtgtgaaagcttcacgtgcaaccgggcgcgccaccatcagcgacgtggcgaaaatggccaaaaccggcaaaaccagcgtgtcgcgctatctcaacggtgaacagcacctgctttccgccccgctcaaacagcgtatcgaacaggcgattttgcagctcgactatcgccccagccagatggcccgcagcctgaaaggcggacaaacgcgcctgatcggcctgatcatcgccgatatcaccaatccctactccgtcgacgtgatgcgcggcatcgaagccgcctgtcgtcagcacggttttaccctgctggtgtgcaacaccaataacgaagtcaatcaggaacagcactacctgcagctgctcagcagctaccgggtggaaggcattgtggtgaacgccgtcggcatgcgggaggaagccttgtcgcagctgcagcagtcgcagctgccgatggtgctgatcgaccgcaagatccccgactttgcctgcgacgtggtcggcctgaacaaccacgaggccaccgtgatcgccaccgagcacctggtgcagcaggggtttgaggcgattttattcctcagcgagccggtcggcacggtcaatacgcgcctcgaacgtctgcacgccttccgccagattatgacgcagcagcacccagacctgatcgccgagcagacggaaaccccgctgaacgacgccgcgcagctggagcagacgctgcgcgatttccacacccgccgccgcggcatgcgcaaggcggtgttgtcggccaacggcgccctgacgctgcaggtggcgcgcgcgatgcgccggctgggcatccactggggcagcgacatcggcctgctgggctttgacgaactggaatgggccgagctggccggcgtcggcatcaccacgctgaagcagccgacctaccagatcggccatgccgcgttggaacagctggtgcaacgcatcaaaggccgcgacgctccgcctgacgagcgtgtgttctccggtgaactgatcgtacgcggctccaccacccgttaa

SEQ ID NO: 442604 - DNA, 567 bp, Serratia marcescens
atgactgaccaacgctgcggctgggccaccgccgatccgttatatctggcctatcacgatcatgaatggggcgtgccgaccaccgatgcgcgcgaactgtttgaaatgctgtgtctggaggggcagcaggcagggctttcctggatcaccgtgctgaaaaagcgtgaaaactaccgccgcgccttccataacttcgatccggcgcgggtcgccgccatgaccgaacaggacgtggagcggctgctgcaggatgccggcattatccgccaccgtggcaaaatcgaagcgatcatcgccaatgcccgcgcctatctggcaatgcaggccgccggcgaagagttcgtcacctttatctggcgctttgtcgacggccggccgcagcttaatcactggcacaaactggcgcaggtgccggcaaagaccgaagtctccgacgccatgtcgaaagcgctgaaaaaacgcggcttcaaatttatcggttccaccgtctgctacgcctttatgcaggccagcggcctggtgaacgatcatctcaccgattgtctctgttaccccaaaacgccgtaa

SEQ ID NO: 442605 - DNA, 1989 bp, Serratia marcescens
atgcctctaaaaataatgcgcgctcccggcagggcagcgctggcggtagctttagtcctggggctggcggcgtccgcatcggcccatgagcgggtgtatgtgtttggcgacagcctgagcgacagcggcaacaacggacgctacacctacgatggcagccggcatcagctgtacgacgaagcgctggtgcagcgtatcggtgcggcgctgctggcgtccgatctcggcggcgacaactatgcggccggcggtgcggtggcggtgccggcgctcaacccggcggacaatacccaggaacaggtgcagcgctatctggggcagaacaacggccgcgccgacggtaacggcctgtatattcactggatcggcggcaacgatctggcggcggcggcgttaaatccggctacagcgtcgcaggtcagctataacagcgcggcagcggcggcgctgcaggtacgctccctgctggatgccggcgccggtacggtgatcgtgccgacggtgccgaacatcggctttaccccacagttgatggaagcgattgtgcaacaggcgctggcgccggtgcaggccgccgcactgcaggcggcctatgcggcgctgaacgcggtggcgacgccggacgccgcctcgcggcagcaggcgattcaccgggcgctgagcgcggcggcccagcagggcagcagtgatccgcagatgcagcaggcgatcgccgcacagctgatcgccgcctatgacagcctgagcgcgcaggcgagccaactgaccgatttttataaccgcagcgaggaccagttgctggcgcagggcggcggcaatatcgtacgagccgacgtgaaccggctgtttggcgaggtgatcgccaatccgcagcagttcggcttcaccaataccgccggcatggcgtgtccggccggcgtttcttcggcggtatgtcgttccgccgcgcccggttttaacgacggccaggccttcctgtttgccgaccatttccaccccagcccgcaggcgcacctgctgattgccgattatattcaggcggtgctggacggcccggcgcaggcggcggcgctgacgcaggcgacggcggcgatggcgcgcgacagccgcgccaccctcgacagccgtctccagcagctgcgcagcggcggcaacccgcagggggcgctgggggtattcggcggctatgccgggcaacattatgattatgccgccaataacgcggccggcgacggcaacgccaccacccacaatctgacgctgggggtggattaccaactgacggaccgctggctgatcggcgcgctgatcgccggcgccaatgacgatcagcaaccctccagccgctatgactacaaggcgcgcggcgtgctgttctccgcctttacctcgctggatgtgtttgaacacggctgggtgaatgccgatctgcactacgccagactggattacgacgatattcgccgcagcgtgcagcttggcccgctaacgcgcagcgaaaccggttcgacctccggcaaacagtggggtgcacgcgttaccgccggctatgacttcccgctgaccgccagcctgaccaccgggccgatggcgcagtttgcctgggactacagcaacgtttccggctatagcgaagacggtaatgacagcaccgcgatgcgctttaacgatcaaacctaccattcgcagatcggcgcgctgggctggcggctggacagcaatctcggcgtggttaatccgtacgctgaaatcagctatcagcatcagttcggcgacgacgtatatcgcgccggcggcggtctgaagtcgacgcaaacctcgtttactcgtgacgccgccggccaggataaaaactgggtcgatgtgacgctcggcgccaatatgccgctgaccgaccgggtggcggcgttcgccaccgtatcgcaaaccggcggcctgagcagcggcgaacaggtgatgtacaacgtcggcgtcagcgcccgcttttga

SEQ ID NO: 442606 - DNA, 1326 bp, Serratia marcescens
atgcaggcagacagtcgttatcgctaccgcattttcgccatgatgttttttatcgcgctgattaactatgtcgatcgcggcgcgctgtcgttcgccgccaacgacatcgcccgcgagttcggtttcaacaagacgcagctgggggcggtgctgggctacttcggcttcggctatctgttcggctcgctgtgcggcggcatcctcgccgaccgcgtcggcagcaaaaaagtctggctgctggccggcgcgctgtggtcgctgctggagatcgccaccgcctgggcgggcgaattgggcgttgcgctgttcggcggctccgcgctgatgggcttcgccgccctgcgcatcctgttcggctttgccgaaggcccggcctacgcgctgatgaataaaaccatcggccactggtcgccgcgcaaagagcgcggcttcgcgctgggtatcgggctgctgagcacgcagatcggctcgctgctgaccgcgccgctggcggtcggcctgctgctgctgaccgacgactggcgcagtatgtttatgctgctcgggctgttctcgctgctggcgattctgctgttcgccgcctgctttaccgatacgccggcgcagcatccgaaggttaacgccgccgaactggcggcaattggcagcgatcgggaggaaaatgacgagcatcaggcgccgctgccgtggcgggcgttcttcaccaaccgcaccctggtgttcaacgcgctcggctacttttcctttctgtatgtcacctttgtgctggtcacctggggaccgaaatatctgcaggacagcttccattacgacctgcatgcgctgtggtatgtggcgatgatcccgtggagcggcgcctgcttcaccgtgctgctcggcggacgcatcaccgatgcgctgctggcgcgcagcggtaacctgcgtgtggcgcgcaatctgttcgccgccgtcacgctgctgctgaccgccggctgcttcctgctgatcccgtttatgcagtcgcccgccgcgattattgcgctgatgacgctgggcaacgcgctgaacgcgctggtgaataacgtgtattggtcggtggtgctggacgtgacgccgaaagcgtcggtcggggcgtacagcggcattacgctggccatcgccaacctggcgtccatcagcgcgccgatgctcagcggctggctggcgcagcagcacggctacagcgcgatgttcttcgccaccgcgctggtctctttctgcagcatgctgtgcatgacccggctgcagccggaaaagaaaattaccgcccgcgccgccgccgccggcattgcgcgccatcccgcctga

SEQ ID NO: 442607 - DNA, 720 bp, Serratia marcescens
atggcggtagggattcagagcaaaggcgtaatgcgctggttggcgccgattgtggcgttgttggtggtgatgcagctgaccgcctgcggcgataaagagccggagcagcgcaaggcatttatcgactatctgcaaaacaccgtaatgcgcagcggcgtgaaaataccgacgctgagcgaagaccaaaagcagaagtttggcaactatgccggcgattacgcaattttagtcgcattttcacagcagttaaccaaatccgttgacgccagtctgacaccggcgatcgatcaggtgagccagatccgcaccgcgcaggattacatcagcaagcgcgacgggctgcagcagtcgataggcgcgcttaatctgctggggcagcagatacagaccgccaagtcgcaggcggacagcgcccgtacggcgctgaagcagccggacgatctgaaggcggtgtataaccaggcctatgacaaaatcgtcaccgcgccggccaacgcgctgatgccgaccattccggcagcggccggctttattcaggagctggtgcaggtaggggatttcctgcaggcgcagggtaatcaggtcagctttaacaacggcggcgtgcagttccgcaatcagcagcaggtagcgcagtacaacgccatgatgaccaatctggcggcgaagcagcaggacctgcagaacgcacagaaagccatcaatgaggtggtgcgttaa

SEQ ID NO: 442608 - DNA, 2673 bp, Serratia marcescens
atgccacacatcacgacgtcgaatttaaacaagttaattacgcgtgtcagaaaagcccaggcgatattcgccgactattctcaggcgcaggttgacagaatttttcatgccgcggccctggctgcggctgatgcccgcatcccactggcgcagctggcggttgacgagtcaggtatggggatcgttgaagataaagtgatgaagaatcaatttgcttccgagcatgtctatcatgcctacaaggatgaggtgacctgcggtattttggcagaagatgacgccttcggcaccctgaccatcgccgagccgatcggggttatttgcggtatcgtccccgccaccaaccccacgtcgacggtcattttcaaggcgctgatcagcctgaaaacccgtaacggcattattttttcccctcaccccagagccagcaaggccgccaataaggcggcggaagtgatcttgcgcgctgcggtagacgccggcgcgccgcccgatattatcggctggctggacagccccaccgtcgagatggcggatcggttgattcaccatccgcaggtggatttgatcctggcgaccggcggccccggccgcgtaaaagcctcatacagctccggcaaacccgccatcggcgtaggcgccggcaatacgccggtcgtggtcgatgaaacggcggatatcaaacgcatggtcgcctccgtgttgatgtccacaaccttcgataacggcatgatttgcgcctccgaacagtcggtgatcgtcgtcgacgccgtgtatgacgaggttcgtgcacgctttgccgccaacggcggctatctgctgccggaagcgcagcggcaggcggtgcgcgacatcattgtgaaaaatggccgcatcaatgccgacatcgtcggtcaatccgcattgagaatcgccgaaatggcgggtattgaggtgccgcccaacaccaaagtgctgattggcgaggccaccgagataggcgagagcgaaccgttctccggcgagaaactctccccgctgctgggcatgtatcgcgcacagcacttcgatgacgccatcaataaagccgtcgccctggccgcgtttggcggcgccggccacacctcttgtctgtataccgatcaggataatcagaaggcgcgcatcgcctgcttcggcagccggctaaaaacgtcgcgcattctgatcaacacgccggcatcccaaggcggcatcggcgatctgtataactttaagctgcctccgtccatgacgctgggctgcggctcctggggcggtaactccgtttcagaaaatatcggccccaaacacctgctcaaccgtaaaaccgtggccaagcgcgcggaaaacatgctgtggcacaaactgccgcaggccatctacttccgccgcggcgccttatcctctgcactgaaagaggtcgccgtacagggcaaagccagacgcgcgtttatcgtcaccggcccgtatctgttcagccaggggttcgtcaaaccggtgctggccattctgcatgcgcaaggcgtggaaaccgacgtgttctccgaggtgggcgcggagccaaccctgacgatggtcaacgccggcgcccagcgcatgctgcagtttaaaccggacgtgattatcgcgctcggcggcggttcgccgatggatgccgccaaggtaatgtggatgatgtatgaacatcccgacgtcaaattcagcgatctcgccctgcgttttcatgacatccgcaaacgcatttacacttaccccaacacccggataaaagcccggctgatcgccatccccaccacctccggcaccggttcggaggtctcgccgttcgccgtcgtcaccgacgaagccagcggacaaaaatacccgctggccgactatgcgctgacgcccgatatggcgatcgtcgatgccgatctggtaatgaatatgcccaaaacgctgtgcgcctacggcggtatggatgccatcacccatgccgtggaagcctatgtctcggtgcaggccaacgaatatgccgacgggcaggcgctgcaggcgctgaagctgctgaaggagagcctgctgctcagctaccaggccggcgcgcaaaacccacgggcgcgggaacgggtgcacaatgccgccaccatcgccggcatcgccttctccaatgcgtttctcggcatctgccactccttagcgcacaagctgggggcggaatttcccatcgcccacgggctggccaacgccatgctgctgaccaacgtcattcgttacaacgccaatgacggccccgccaagcagacggccttcagccagtacgatcgcccgcaggcccgctgccgctatggcgaaatcgccgatcatctggggctggccgccgccggcgacagcgcagagcaaaaggtcgagaacctgctgacgtggctggagggattaaaggcggagctggcgatcccggcttcgctgcaggaggccggcgtcgatgaaacgcattttctgtcggtgctggataagctggcggttgacgccttcgatgaccagtgcaccggcaccaatccgcgctatccgctgattaaggatcttcggcagctcctgctggactgtttttacggccgctattacagcgatgcgcccgacgtcgagcgccagcgcgcggtgaaagaaaaagaggccgtcaaagtcacggactaa

SEQ ID NO: 442609 - DNA, 1152 bp, Serratia marcescens
atgaaagcattacattttggcgctggtaatatcggccgcggctttattggcaaactgctggccgatgcgcatgccgaactgactttcgccgacgttaaccagacggtgctggacgcgctcaatcaacgccatagctacccggtgcgcgtcgtcggcgagcaggaacgcacggaaacggtgaataacgtcaacgcggtcaacagcggcagcgatgacgccgtggcgctgatcgccgacgccgatatcgtcaccaccgccgtcggcccgcagatcctggccaaaattgccgctacgatcgccaaagggctgagcgaacgccgccgccagggcaatcaacagccgctgaatattatcgcctgcgagaacatggtgcgcggcaccagccagctgaaacagcacgtcttcgccgaactgtcggcggaagagcaggcgtgggcggagcagcatgtcggcttcgtcgattccgctgtggatcgcatcgtgccgccggcggaagcgggcagcgacgatccgctggcggtaacggtggagaccttcagcgaatggatcgtcgaccagacccagttcaagggcgcgccgccggcgattgccggtatggagctgaccgataacctgatggcgtttgtcgaacgtaaactgtttacgctcaataccggccacgcgattaccgcctatctgggccagcaggccgggctgcagaccatccgtgacgcaattctcgacccggcggtgcgcctggtggtgaagggcgcgatggtggagagcggcgcggtgctgatcaagcgctacggctttgagccggcaaaacacgcggcctatatcgagaaaatcctcagccggtttgaaaacccctacctgcacgacgacgtcgagcgcgtgggccgtcagccgctgcgtaaactgagcgccggcgaccgtctgatcaagccgctgctgggcacgctggagtatggcctgccgcatgccaacctgattcggggcgttgccgccgccatgcattaccgcagcgcgcaggatccgcaggcgcaggaactggcgcagttgctgagcgaacgcgggccgaaagccgcgctggcgcaaatttccggtctgccggaagacggcgaggttgtggaacaggccgtagctgtgtataacgccatgcaaaagtag

SEQ ID NO: 442610 - DNA, 672 bp, Serratia marcescens
atgaccaatcccgccgtttatatcggccacattcagacctatccgggcggacgcccgagcgcgattgccaaacggcaggtcgacggcgccctgccgctgaccccgctcggcctggagggcgatcagcaggcggaaaaaagctatcacggcggccccgatcgcgcgctgtgccactacccgcgcgaacattatgaccactggcggcagcagtttccggcgcaggccgaactgttcagcgcgccggcattcggcgaaaacctctcaacccgcgggctgaccgagcacaacgtgtttatcggcgatattttccactggggcgacgcgttgattcaggtgacccagccgcgctcgccgtgcttcaagctcaattatcatttcgacatcgacgatctgtcgctgctgatgcagcaaagcggccgctgcggctggctgtaccgggtgatctctcccgggcaggtcagcggtgaccagccgctgctgctggcgacgcgctgcagcgacgtctcgctggccgaggcgatcggcatcgcctggcacatgccgttcgatgaggagcagtatcgccgcctgttgtcggcggccgggttgtccgccagctggagtaaaaccatgctgttgcgtattacctgcgggaaaatcgaagattttaaccgtcgtttgctggggcgctga

SEQ ID NO: 442611 - DNA, 1929 bp, Serratia marcescens
atggcggtattacaaacattaacaggcaggtatcttcaccttggcgtagggaaaaaactcactctcggcttcgtcctgatgctgctgttggcgatagtcatcgccgctaccggtatccgctacctcacactgatcgaatcccgctctgcacgcatcgatttcagcgaccggctgagtcacgaaatcaatgaggcccgctacaaccgggcactgtatgcgcagagctaccgcgccgcatacctggaagaaaactacaaaaatatcaacgccgcagaaaagcttatcgcccagggacaaagcctggactgggacccgcaaagccgcaaagatttgcaacggctggtgggcatgcttggcaaataccaacagcaacagcagaaattcatcgacgcgatcgccgccaaaaacgccattcgccagagctggaatatgtcggaagtccagcaacagctcgcgcaggccgaacgtcagatcggcagcggcgatctgcagctggcctttattcagcttggcaggcaactgacgcagatccgctataatgcgcgcggcctgctgctgaacctgacccgcgatgctgaagcaccgctgctggccgccattgatgacgcccgccacggcgcgcaaacgctgcaccagcggctgcctgatgcacaaaaatccctgctgcagcccttactcgacacgctggacgattatctcgtccatatcaaagcctatatgcccgcctatgagcatgagcaggcgctgaacgccgagctgggaaaaaacgccggcgacatcggcaagctggtgcgcgcttttctgaaagatgagctgacccagaccaaaaacgacatcgacagtgcgcagtggaagatgggcctgaccacgctgctcgccattatcgccgggctgctggtgtcgtggcggatgacgctgcagatcacccggccgctgagcaacacgctggaaatcgcccagcgcatcgctaccggcgatctgcgccgggtggaggtgcctgaacgccgcgacgaactgggtcaactgctgcaggcgatggcgacgatgaaccagaacctgcgagatatgattgaaaaaattcagcaaggagtcggccaggtctacaccgccgccggtgaaatctccgccggcaataccgacctctcctcacgcaccgaacagcaggcggcagcggtggaagaaaccgccgccagcatggagcagctgaccgccacggtgaagcagaatgcggacaacgctcatcatgccaaccagctggcgtcggacgcctctaaaaccgcccttcagggcggcaagctggtgagcagcgtggtcgccaccatgcgcgatatttccagcagttcgcagcgtattgctgaaattaccaccctgatcaacggcattgccttccagaccaatattttggcgctgaatgccgccgtcgaagcggcgcgcgccggcgagcaggggcgcggtttctcggtggtggccagcgaagtgcgcagcctggcgcagcgctgcgcgcaggcggccaaggagattgagggactgatcggcgaatcggtcgaccgcgtacaaaacggcaccgcactggtggaagacaccggcagcaccatggagcagatcgtactcgccgtcggccacgtgcgcgacatcatggcggagatcgcctccgcctccgatgagcagacgcgcggcatcgaccagataggccaggcgattgccgaaatggatcagaccacgcagcaaaatgccgcgctggtggaacagtccgccgccgccgccgactcgctggaggagcaggcggaaattctgcagcagagcgtggcggtgttccggctggaagatgcgccgtcacgtggcgccgagccgcccgatgcgccgcccgcgcgcgtggtgaaaaccgtcgcgcccgcgccaagcgaacaggataactggaccacgttttaa

SEQ ID NO: 442612 - DNA, 930 bp, Serratia marcescens
atgagtatccgcattgttcctaaagagcagttaggggcacagcgtgaaaagccacacacggcggaagcaattccgccgttacttttcgcgaatctgaaaagcctgtacacccgccgcgctgaacgcctgcgtcagctggcggccgatcacccgctgggggattacctccacttcgccgccgccattgccgaggcgcagcagcacgcgcagcatgaccacccgctgcagctggacctgtccgacgcgctgcgtcagggcaccgaacgcggcaaaccgccgctcgacctcagcgtttatccgcgcagcgcgcactggcgtacgctgctgacggcgctgatcgccgagctgcgcccgcaggcgccgcagcacgtgctggcggtgctggataacctggagaaggcctccgagcaggagctggagcagatggcgaccgccttgctcaaccgcgagttcgcgcaggtgggcagtgaaaacgcgccctttatctgggcggcgctgtcgctgtactgggcgcagatggccagccagatccccggcaaggcgcgtgccgaatacggcgaacaccgccagttctgcccggtgtgcggcagcatcccggtctccagcatggtgcatatcggcaccgtcaacggcctgcgctacctgcactgcaacctgtgcgaaagcgagtggcacgtggtgcgcgtgaagtgcagcaactgcgagcagacgcgcgatctgaactactggtcgctggacagcgaacaggcggcggtgaaggcggaaagctgcggcgactgcggcacctatatgaaaattctctatcaggagaaggattcacaggtggaagcggtggccgacgatctggcgagcctgatcctcgatgccaaaatggaagacgagggatttgctcgcagcagtatcaacccattcctgttcccgggcgagtag

SEQ ID NO: 442613 - DNA, 639 bp, Serratia marcescens
atgatgttcaaaaagatagtgaaattcgccgccgtagcggccctgatcgccggcctgagcgcctgcgatgactcggacaccaaacagccgacggtgccgaagcccgcgccgaaaccgaccgccgcccaacccgcgccgcagccggagaagcctgcgccgctgccggggctgagcgtctcgctgcagcaaggcaagctgacctttgagctgccgtccggctttagcgatcaaacggaaaacagcggcatcattaacgaccatacgtcgaccattcagcgtttcctgaatggcaagtcgcggcagagcgccgtctcctccgaggtgattccgccggcgggaatgaagctgaacggcagcgacaaaatgctcagtgagctgatgcagagcatgcttaccgaactttccggccgctataagcagattgaaaagaccaaagaagagaactttaccgtcggtaagcagaaattccgtcgtctggataccgaacagagcgtcaacgggcaaaaagtggtttccaccattgtcctgacggtgttcaataaacgcgtgattacgctgcagatgctgtcgccggcgaaggagctggaggtgcaccaggcgctggtgcagcgcattgttgatacgctgacggtgaaataa

SEQ ID NO: 442614 - DNA, 606 bp, Serratia marcescens
atgaaactgatcggcagttataccagcccttttgtccgcaagatttccgtgctgctgctggagaaggggctggcgtttgaattcgtcaacgatccgccctatgaggcgcagacgcgggtaggcgagcacaacccgctggccaaggtgccggtgctgatcgatgagcacggcgaggcattttatgactcgcgggtgatcgccgaatatctggacctgctgcctgctgggccgcgcttcctgccggacgaccgcgcgctggcgctgcgggtgcggcgcagcgaagcgctggcggacggcgtgaccgacgcggcgtcgctgctgtatcgcgagagcctgcgcgccgcgggcaaacaggatgaagcgtggatgctgcggcagcgcgacaagctgcaacagggactggacgcgctggaagcgctggcgcaggagaaagcgctgctgaacggcgagcagctgacgctggcggatatcgccgccggctgcgcgctgggttatctcaacttccgccgtatcctgcccaactggtgcgtggggcgtccggcgctggtcaaactggccgagcgtctgttcgcccgcgaaagttttgcccgcacctcgcctccctga

SEQ ID NO: 442615 - DNA, 1392 bp, Serratia marcescens
atgagcactgaagcccattctctttacagtcagctgccggcgattgaccgcctgctgcgcgacccggcgatagaaccgttgttggccagccacggccagacgctgattggcgaactgctgcgccagatgcaggcgcaggcccgcgaggcgattaaacggcagggatgcctgccggagtggtgcggcgactggccgcaggcgctgcaggcgcggctggcgcaacagcagcagccgcgtctgaagacggtgttcaatctcagcggcaccgttttacacaccaacctgggacgcgcccagctggcgcagccggcaatcgcggcgattggccgggtaatgggcgcggcggtgacgttggagtacgatctggacggcgccggccgcggccatcgcgaccgtgcggtggccgatatgctgtgtcagctgaccggcgcggaagacgcctgcatcgttaacaataacgccgcggcggtgctgctgatgctggcggcggtggcgccgggcaaacaggtggtggtgtcgcgcggcgagctggtggagattggcggggcgttccgtatcccggacgtgatgcgccaggcgggctgtcagctggtggaggtgggcactaccaaccgcacccatctgaaagactatcagcaggcgattaccgagcagaccgggctgttgatgaaggtgcacaccagcaactacagcgtgcagggctttaccgcagcggttgatgaggcgcagctggcgcagcttggccggcagcacggcctggtgaccgccaccgatctgggcagcggttcgctgattgatatgacgcagtacggcctgccggcggaaccgatgccgcagcggctgctggccgacggcgtcgatctggtgaccttctccggcgacaagctgctgggcgggccgcaggccgggattatcgtcggcaaaaaagcgctgatcgcgcagctgcagcagcacccgctgaaacgtgcgctgcgcgtcggcaaaatgacgctggcggcgctggaggccacgctgcgcctgtaccaacagccggagctgctggctcagcagctgccgacgctgcgcatgctgacccggccgcagcaggagatgcagaccgccgccgagcgtctgctggcgcagctgtctccgcactatgcaggccgttttgcactgggtgccgaaccctgctggtcgcaaatcggcagcggttcgctgccggtcgatcgcctgccgagctatgcgctgaccttcgcaccgctggacggccgcggcgctaccctggagcgtctggcgcaggcgtggcgcgcgctgccgcagccggtaatcggccgcattaacgacggcaaactgtggctcgacctgcgctgtctgacgcaggaagcggcattggcggaggcgcttttgtcatga

SEQ ID NO: 442616 - DNA, 1842 bp, Serratia marcescens
atgattatcgccaccgccggccatgtcgaccatggcaaaaccacgctgctgcaggggatcagcgggatcaacgccgatcgcctgccggaggagaaacgtcgcggcatgaccatcgatctcggctacgcctactggccgcagccggacgggcgggtgctgggctttatcgacgtaccggggcacgaaaaatttctcgccaatatgctggcgggcatcggcggcatcgatcacgcgctgctggtggtggcctgtgacgacggcgtgatgccgcaaacccgtgagcatctggcgatcctgcgcctgagcggtcgtccggcgctgacggtggcgctgaccaaggccgatcgcgtcgacgccgagaggctggcggaagtcgaagcgcaggtgcaggctgaactggcgcggcagggctggcccgacgcgccgctgtttattaccgctgcggcgcagaatctgggcattgaggcgctgcgtgcgcatctgctggcgcttgagccggcggcgcatgcgctgacgcgccgtttccgtctggcggtcgaccgcgccttcagcgtgaagggcagcgggctggtggtgaccggcaccgcgctgggcggcagcgtcaaggtgggtgacaccctgtggctgagcggccagaacgtgccggtgcgggtgcgcgggctgcatgcgcagaaccagtcggcgcagcaggcgcaggccgggcagcgtatcgcgctgaatatcagcggtgatgtcagtaaaagcgacgtgacgcgcggcgactggctgctggcgcagcggccggcgctgcaggcggaacgcattctggtgactctggagcaggaccagcctctgaagcactggcagccgctgcatattcaccatgcggccagccatatcaccggccgggtgtcgctgctgcaggattcactggcggaactgatcctcgaccggccgctgtggctggcggaagacgatcggctggtgctgcgtgatatcgccgcgcgtgaaacgctgggcgcagcgcgcgtactggcgctgacggcgccgaagcgcggcaaacgccagccggcgtatctgcactggctgacgcagacggcgcaggcgcaggatgatgcgcagcggctgatgctgcagctgcagcaggggccgctggacgtggcggcctttggctgggcgcgccagctgagcgatgagcggctgacgcagctgctggaggagcacgcggtgctggcggccggcggtaaggcgctgtcgctggaaaacgcccgtcaggcggagcagcgattgctgcaggtgctggcagagtatcaccagcagcatggcgatcagctgggcctcgggcgggcgcgcctgcggcgcatggcgctgccgacgctggatgaggcgctggcgtttttacttatcgaacggctgctggcggccggcgcgctgcgcaacagccgcggctggctgcatctgccggaacatggcctggcctttagcgaacaggagcaggcgctgtggcagcgcatcgcgccgctgttcggcgatgcgccatggtgggtgcgcgatctggcggcagagctggcggccgatgaggccgaggtgcgcgccacgctgcgcaaggcggcgcagttgggccatgtgaccgcggtggtggtcgaccgctactatctcagccagcgtgtggcgcagttcgccgcgctgatccgcgagctgcacgacggccagggcggcgccagcgccgctgattttcgcgatcgactgggcgtcgggcgcaagctggcgatccaggtgctggagttctttgaccgcagcgggtttacccgccgtaaaggcaatcagcacctgctgcgcgaccgcgggctgttcgacgcctga

SEQ ID NO: 442617 - DNA, 2316 bp, Serratia marcescens
atgtttgaccgtattactgtgacaacgccggcgggcgccggtgcgctgaagttctggaagctcagcggggtggaagaggtttccagctcgttcgaactgcaggtgatgctgctcagcaccgatgcccgcctggaccgccgggcgatgctgggccagccgatcactttgaccattccgacgcagggcgtactgtccgcaccgcgttatctcaacggccaggtcacctcggtcaacgtgcacagcgccgatattaacggcgcgcgctacgccgtttacaccctgacgatggaatctgacctgtggccgctgaagcgggaccgcaaccagcgtatcttccagaatcagcgcgtgccggatatcgtcagaacggtgctcggcgagtacggcgtacaggtggaggagcagctttccggcagctaccgcagctgggagtactgcgtgcagtatcaggagagcagctacgactttatctcccggctgatggagctggaggggatttacttctttttccgccacgaggcggacaaacacacgctggtgctgcacgatgcgccgcagcagcaccagccgttcagtggttatgaggtgattccctatcacgccacgccgtccggcggcagcaccggcgaacaggggattggccagtgggcgatctccgagcgggtgacgccggggatctacagcatcgacgactatgacttccgcaagcccaacgcctggctgttccaggcgcggcagaaccccagctcgccgcagccggggcagattgactactacgactggccgggacattttgtcgagcacggcgacggtgaattttacgcccgggtgcggcaggaggagtggcaggcggagcaccagcgtattaacgccaccgccaccgcgctgggcatcgtgccgggctgcacctttacgctgctcaacccgccgtttgccagcgacaacggtgagtatctggtgctgagcgcccgctacgatctggaggaaaacagctacgccagcggcggcgacgaagcggtgcaccgcatcgagatgacggtgatccccgccgatacgccgtaccgttcgccgcagcgcacgccgtggccgcgcacccacggcccgcagaccgcgcgggtggtggggccgcagggtgaatcgatctggaccgataagtacggccgggtgaaggtgaaattccattgggaccggcaggccaagggcgacgaaaccagctccggctgggtgcgcgtctccagcgcctgggccggtcagggctttggcggcgtgcagatcccgcgcgtcggcgacgaggtggtgatcgactttatcaacggcgacccggaccggccgatggtcaccggccgggtgtataacgaggccagcatgccgccgtgggcgctgcccgccggcgccaccatgatgggctttatgacccgctctaaagacggccacagcgacaactccagccatctgttctttgaggacaaggccggctcggagatggtgcagctgcacgccgaaaaggatatgaatatctcggtggagaacgataaaacggtggctattgacggtaaccgtaccaccaccattcagaaaaaacagaaagatgaggtgatcggcgacgcgacctttatctaccacggtacgcgcaccaccacggtaaccaagaaagagacgaaaacgtttgaggacggcgaaaaggtcaccatcaccaacggccgcaactcggagatcgccagcggcggcgaaaagctgaaggtgaagggcgatcgggagctgaaaacggacggggaagaaaaacatcacgtcaccggcaagatgaccgaagagtttgataaagggctggaaaccaccatcgccgcggtgggaaaaaaagagaccatcagcggcggcgtgattagcgatatcaaaggtggcgtcgatgagaagataaaagacggcgtgaccaccaatatcaatagcggcaactggacgcagaatgtgaacgatgggacgattaccatctacagcccccagctgatccgtattgccagcggcacgaagatcagccttgaggcgccggagtccgttttcaatcccaagctgcacagtttgaccgtgaccgcctttagcgaaacgctcaccggtaataccgcgacggcgtcaggggtgaccagcgccatgatcggcgtatccaatgccgttacggggctgtctaacgcatttaagctgaaagagttctctaaaaccgtatttcaaacggaatcgaacgatattgtggtgaacctcgaggtgaccaacatcagcaacagaacgctgaatatcaccaataacgcgttgtttgtaataacataa

SEQ ID NO: 442618 - DNA, 390 bp, Serratia marcescens
atgtctctggccgatatgtcgaagtacttcctgtatttggggatcgccatgccgatcgttatgggcattttcttttactgcatttttaagaacaacggcagtaaaaatgccgatattccggcggtgaaaagttatttgaacatggaaaaacagggcggtgagattttttcgtcccagctggtggcctgcagacagaccaacgtcaggtacggcaacgattttttcttcgacgtcgacttctatctccccggcgatagccggctccataccgccaaggcgctggttaaaccgggccagatgcacctgctgagaaaaggcatggatatcaaggtgaaaaaagacgccaacaaccagatggcggtggtggaatttgcctattctgaccactag

SEQ ID NO: 442619 - DNA, 330 bp, Serratia marcescens
atggcgttggccatcgttatttccatcctgcttttcggcggctttttcggctatatcgcccacctgttttaccgcgaccgtaagatagcttcccgaggacgggagctgctggcgcgcgtggaagaggtgcattaccgcagcgccaacgataccggcagcgtcaatatccgctaccggctgtcgtggccggaaggcggcggcaccaaacaggtggagggcagggagaccatcccggccttctattcgtcgaaggtgcaaaaaggcagtgaagtgacgatccgctatctggacgacgaccatatcgcgtttgtgtttgataaagaccgctag

SEQ ID NO: 442620 - DNA, 993 bp, Serratia marcescens
atgagcaataaaattggctggatagataacttacgcgccgtagcgtgcctgatggtggtggtgatccacgccaccaccgcgctgctgaccacgccggagaaactgggcagcctcgcctgggatgcggccaacctgctcaatgccctgtcccgcgcggcggtgccgctgttctttatgatctccggctacctgttcttcggcgagcgcagcgccaaccgcaaacactttgtgcggatcggctgctgtattttgttctacagcgccgtggcgctggcgtatatcgccttcttcaccaagattggcttctggccttcattgcgcacgctgctgcaaaaaccggtgttctatcacctgtggtttttctacgccatcgtggtggtttatctgctgtcgccgctgatcaacgtcaagccggtatccggccgctatctggcggcggcgctgctgattctggcggtgatggccaacccgaataccgataagttcgccatcgacggcgtgcacctgctgccggttaacctgtatatcgccggcgataccttctactacctgctgtatgcgctggccgggcgggcgatcggcatgatggacaccggacgacgcggcgtcagcctgctggcggcgctggcctttgtcggcagcgtggcgctgattatcatcggcacccggcatcagtcgctgattaacggcaattttgccgccacctactacctgtacgccaacccgctggtgtttatcgcggcggtgtcgctgctggtgtggtttaaaaactgcctggcgcagccggtgggctggctggcggtattctcccgccattcgctggcgatctacggcctgcacgccctgattgtcaatctggtgcgccatcagggctgggatctcggcggccatccgctgctggatattttctgggtgttcggcctggcgctgggcctgagcctgctgctgtccgccgggctgcagaaaatcgaccgccgccggctggtgtcctga

SEQ ID NO: 442621 - DNA, 1398 bp, Serratia marcescens
gtggaaaacagccaacaacaaagccgcagaacctttctcagccaaaccggcaagctgaccaccgcctgcgcggtgctcggcctcagcggcggcgtggcgcaggcggccacgcccgccaatagcgccccctgcgccgcgccggcatcgccgatgaccctcagcgaccgccactacctgctgagcgacgtcctgctggaagaaggcttcgaatacgacggcgacacggtgatcggcacccgcaccgcgcgctacacgctggagattaaagacggcaacatcgcggcgctgcacccggccggcgccacgccgcccaccgctctgccgcgctattcggcaggcggccagctgctgctgcccggcacgcgcgatatgcatatccacctggataaaaccttctacggcggcccgtggcaggcgccgcgcccgcgccagggcaaaaccattatggatatgattgcgctggagcagacgctgatccccaaactgctgccgacctcgcagcagcgcgccgaagggttgatcgccctgctgcagtccaaaggcagtacggtggcgcgcagccactgcaatatcgacccggtcagcgggctgaaaagtcttgaacacctgcagcgtgcgctggaaaatcagcgcgccggcttcagctgcgagatcgtcgccttcccgcagcacggcctgctgcattcaaaggtggatgcgctgatgcgcgaagcgatgcagatgggagtgcagtacgtcggcggtctcgacccgaccaacgtcgacggcgcgatggagaaatcgctcgacgccatgttccagatcgcactcgacagcggcaagggtgtcgatattcacctgcatgaaaccagcccggcgggcgtcgcggccatcgactatatgatcgccaccgtcgagaaaaacccggcgctgcgcggcaaggtcaccatcagccacgccttcgcgctcagcacgctggatgaaggacgcgtggcggagaccgccgaacggctggcggcgcagcagataaccatcgcctcgacggtgccgatcggcagcctgatgatgccgctgccgcagctgagtgaaaaaggggtatttgtgatgaccggcaccgacagcgtgatcgaccactggtcgccgttcggcagcggcgatatgctggaaaaagccaacctctatgcccagctgtaccggggttcggacgagttccacctgtcgcgttccctggccattgccaccggcaacgtgctgccgctgaacgataaaggccagcgcgtgtggccgcaggccggcgacgacgccggctttatgctggtcgacgccagctgttcggccgaagcggtggcgcgcatgtcgccgcgccgcgccactttccatcaggggcgtctggtgtacggcagcgtcaccagagcctga

SEQ ID NO: 442622 - DNA, 1452 bp, Serratia marcescens
atgtatatcggcatcgatcttggcacctccggcgtgaaggccattctgctggatgaacacgggcagttgctggccagccacactgaagcgctgaccatctcccgcccgcagccgctgtggtccgaacaagatccgcaggactggtggcaggcgaccgatcgcgccatgctgtcgctcggccggcaacatggcctgcggcaggtgcaggccatcggtctgaccggccagatgcacggcgccgtgctgctggatcaccggcagcaggtgctgcgccccgccatgttatggaacgacggccgcagctttgagcagtgccgccagctggagcaggcagtgccgcgctcgcgcgccattaccggcaacctgatgatgcccggctttaccgcgccgaaagtgcagtgggtgcggcagcatgagccgcacatcttcagtcagatagacaaggtgctgctgccgaaagattacctgcgctggcggctgtgcggcgtattcgccagcgatatgtcggacgccgccggcacgctgtggctggacgtcgcccgtcgcgactggagcgacgagatgctgaccgcctgcggcctgacgcgcagccagatgccgacgctgtttgaaggcagccagctcaccggccggctgaatgccgagctggcgcagcgctgggacatgccgcaggcgccggtggcggcgggcggcggcgacaatgcggccggcgcgatcggcgtcgggctgtatcagcccggccaggcgatgctgtcgctcggtacctccggggtctatttcgccgtcagcgacggtttcctcagcaacccggccagcgccgtccacagtttttgccatgcgctgcccgatacctggcatctgatgtcggtgatgctcagcgccgcttcctgcctgaactgggtatgccggctgaccaacgttgccgacgtcgctaccctgctgcacaacgtcgagcaggccagtccggcggacgcgccgctgtggttcctgccctacctgtccggcgaacgtacgccgcacaataatccgaacgccaaaggcgtattctgggggctgacccatcagcacgggccggacgatctggcgcgtgcagtgctggaaggcgtaggtttcgcgctcgccgacggcatggatgcgctgcacgccagcggcctgcatcctgacagcatcacgctgatcggcggcggcgcacgcagcccgttctggcggcagatgctggcggatatcagcggccagccgctggaataccgcaccggcggcgacgtcggaccggcgctgggggcggcgcggctggcgcagatcgcgctcaaccctcagcgcccgctggccgaactgctgcccgccttgccgctggagcagatgcacacgccggatgccgggcgtcatcaggagtacgcggagcgccgcgccaccttccgcgaactgtatcgctgtctgctgccgttgatgtga

SEQ ID NO: 442623 - DNA, 999 bp, Serratia marcescens
atgaaatttaagcacttattcctctccgcctgcgccatgctggcgctggtcagccagccggggttcagtaaagacgtcaagataggtatggcgattgacgatttgcgcctggagcgctggcagaaagaccgcgatatttttgtcaaaaaagccgaatcgcagggagcgaaagtgtttgtgcagtccgccaacggcaatgaagaaacccagatggcgcagattgaaaacatgatcaaccgcggcgtcgatgtgctggtgatcattccttataacgggcaggtgctgagcaacgttatcggcgaggcgaagcgtgaagggatcaaagtcctggcctacgaccgcatgattaataatgcggacatcgatttttatatctcgtttgataatgagaaagtgggcgagctgcaggcgcagagcctggtgcagcgcgtgccgcagggcaattacttcctgatgggcggctcgccggtggacaataacgccaaactgttccgtcaggggcagatgaacgtgctgaaaccgttgattgacggcggcaaaatcaacgtggtcggcgatcagtgggtggacgcctggctgccggaaaacgccttgaaaatcatggagaacgccctgacggccaataacaaccatatcgatgcggtggtggcgtccaatgatgcgaccgccggcggcgcgatccaggcgctggctgcgcaggggctggcgggtaaggtggcgatctccgggcaggatgccgacctggcggcggtaaaacgtattctcgccggcagccagaccatgacggtgtacaaacctatcagtaaattggccgatgaggccgccaatattgcggtgcaaatgggccggggcgaacagccgaaatccaacgccaaattaaataacggtactaaagacgtaccggcctggttattgacgcctatttccgtcgataaatcgaatatcgacagcacgatagtcgctgatggtttccataaaaaatccgatctgggtaaataa

SEQ ID NO: 442624 - DNA, 1542 bp, Serratia marcescens
atgtcctgtttattgcaaatgaaggaaatcacgaaacaatttggcgcggtaaaagcggtggataatatcagtctgcaacttgaagccggccaggttttatcattgtgcggtgaaaatggttcgggaaagtccacgttaatgaaggtgctgtgcgggatatatccgcacggcagctatcagggcgatatttatttttccggtcagttaataacggcgaaaaccattcgcgataccgagaaaaagggtatcgccatcattcatcaggagctggcgctggtcaaacagatgacggtgctggagaacatgtttctcggcagcgagtgggggcgctatggcctgatggactatgacgccatgtatcagcgctgccagcgcctgctggcacaggtcaagctggcggtggacccggatacccgcatcggcgatctggggctgggccagcagcagctggtggagattgccaaggcgctgaacaaacaggtgcgcctgctggtgctggatgagccgaccgcctcgctgaccgaaagcgaaaccgccacgctgctgacgatcgtgcgcgatctgcgcgatcgcggcatcgcctgtatttatatttcccataaattgaacgaggtgaaggcgatctcggatctgatctgcgtgatccgcgacggcaggcacatcggcacccgcccggcagccgacatgagcgaggaggagattatcgccatgatggtcggccgcgaactgaccgagctgtatccgcaggcgccgcacacgatcggcgaggtggtgctgcaggttgataatctgaccgcctggcacccggttaaccggcatatccgccgggttgacgacgtgtcgtttacgctgcggcgcggggaaattctcggcgtcgccgggctggtcggctccgggcgtaccgaaaccatgcagtgcctgttcggcgcctatcccgggcgctggcaggggaacattacgatcgaggggcaggcggcgacgattggcaactgccgtcaggcgatgcgctacggtatcgccatggtgccggaagaccgcaaacgcgacggcatcgtgccggtgatgggggtcggcgcgaatatgacgctggcggcgctgggtgacttcagcggcccgctgtcggcgctggacgaggcgcgggaacaggtgaccattgagcagtcgctggcgcggctgaaggtgaaaaccgcatcggcggagctggccatcggccgcctgagcggcggcaaccagcaaaaagcgatcctcgccaaatgcctgttgctgaacccgaaaatcctgattctggatgaaccgacgcgcggtatcgatatcggcgcaaaatacgaaatctacaaattaatcaatcagctggtgcagcagggcattgcggtgatcgtcgtgtcatccgaattgccggaagtgctgggcctgagcgatcgcgtgctggtgatgcaccaggggaaaatcaaggcctcgctggaaaaccgcaatctgacccaggaacaggtgatggaagccgcgttgaggagtgaaaaacatgtcgaaaaacacgctgtctga

SEQ ID NO: 442625 - DNA, 1185 bp, Serratia marcescens
atgtcgaaaaacacgctgtctgaggcaagcctgccgtctgcgcccgccaaaaaggcgctgctgccgctgagatcgctgaacctgcaggtgctggtgatgctggcggcgatcgccgtcattctgctgttctttacttttaccaccgaaggggcgtatctcagcgcgcgcaatatttccaacctgctgcgccagacggcgattaccggcattctggcggtcggcatggtgtttgtgattatctcggcggagatcgatctgtcggtcggttcgatgatggggctgctgggcggcgcggcggcgatttttgacgtctggctcggctggccgctgccgctgaccgtcgcggtgacgctgctggccggcttgctgctcggcgcgtggaacggctggtgggtggcctatcgcaaagtgccttcctttatcgtcacactggccggcatgctggcgttccgcggcattttggtcggcatcaccaacggcaccaccgttgcgccgaccagcggcgcgatgtcgcagattggtcagagctatctgcccggcggcctggggttcggcatcggtgtgctggggctggggctattcgtcatctggcagtggcggcgacgcagcagacgcgcgcagctcgggctgccgttgccggcggccggcggcgccgtcgcccggcagagcattatggcggtggtggtgctcggggctatctacctgctgaacgattatcgcggggtgccgacgccggtgctgatcctgacggcgctgatgctggcggggatatttatggctacccgcaccgcgtttggccggcgtatctacgccatcggcggcaatatcgacgcggcgcggctgtcgggggtgaatgtggagcgcaccaagctggcggtgttcgccattaacggcctgatggtggcgatcgccgggctgatcctcagctcccggctgggagccggctcgccttcggcgggcaatattgccgagctggacgccatcgccgcctgcgtgattggcggcaccagcctggcgggcggcgtcggcagcgttgccggcgcggtgctgggggcatttatcatggcgtcgctggataacggcatgagcatgctggacgtgcccaccttctggcagtacatcgtcaaaggcgcgatcctgctgctggcggtgtggatggattccgccaccaagcggcgcgcataa

SEQ ID NO: 442626 - DNA, 1179 bp, Serratia marcescens
atgttcgaaaaacgttaccgtattacattgttatttaacgcgaataaggtgtatgaccgccaggtggtggaaggggtgggggaatatttacaggcgtcgcagtgcgactgggatatttttattgaagaggacttccgctgccgcatcgataacattaaagagtggctgggcgacggggtgatcgccgattttgacgaccgcgagattgaacggctgctggataacgttcaggtgccgattgtcggcgtcggcggctcctaccaccgtgacgacgactacccgccggtgcactacatcgctaccgacaatcatgcgctggtggaagcggcgtttatgcacctgaaagaaaaagggctgaaccgctttgcgttttacggcctgccgcctgagggcggtaaacgctgggcgcaggagcgcgagaatgcattccgccggctggtggcgcaggaacagtatcagggagtggtgtatcaggggatgtcgaccgcgccggaaaactggcagtacgcgcagaaccggctggcggactgggtgcagaccctgccgcagcagaccggtattattgccgtgaccgatgcgcgcgcccgccatctgctgcaggtgtgcgaacacctggcgattccggtgccggagaaattgagcgtgatcggcattgataacgaagaactgacgcgttatctgtcgcgcgtggcgctctcttcggtggcgcaggggtcgcggcagatgggctaccacgccgccaagttgctgcaccgcctgctacaacagcgtgagctgcccctgcagcgtattctggtgccgccgctgaaagtgatcgaacggcgctcgacggattaccgttcgctgcgcgatccggcggtgattcaggcgatgcactatatccgccatcatgcctgccgcggcatcaaggtggaacaggtgctggatgcggtggggctgtcgcgctccaatctggagaagcgctttaaagaggaaaccggccagacgattcaccatgcgatccacgccgagaaactggagcgggcgcgtaacctgctggcgacgaccgcgttatcgatcaatgagatttcgcagatgtgcggctacccgtcgctgcaatatttttactcggtgttccgcaagggcgacgccatgacgccgaaagagtaccgggaaaaatacgccgaaacggcctactga

SEQ ID NO: 442627 - DNA, 1209 bp, Serratia marcescens
atggtggaaaatcactctcaaccggcgggtcaggcgtcagtcgcgcgccgctggtttcatcctttgttatgggcgctggtgctgatcggcctcaatatgcgcccgctgttaacctccgttggcccgctgctgcccacgctgcgccaggccaccggcctgagctttggcggcgcggcgctgctgaccgcgctgccggtgctgatgatgggcctgatggcgctggccggcggatggatcaaccgcctgctgagcgaacgcgccagcgtattgctgagcctgctggcgattgcgctgggggcactgtggcgcgaactggcgccggacagcgtgcagctgctgctcagcgcggtgctgggcgggctgggcatcggcgtgatacaggcggtgatgccgggcattatcaaacaccattttctcaagcggatggcgctggtggccggcttatggtcggcggcattaatgggcggcggcgggctgggggcggcggtgacgccgtggctgaaccgcggccacgactggcacagcgcgctggcctggtgggcgctgccggcgttggtggcactggcggtctggctgtgggcgagccgcggactggggcggctgacgtcgccggcgggcgggcaggcgggcagcctgttccgcagcccgcgcgcctggctgctggggatttacttcggcctgattaacggcggctacgccagcctgatcgcctggctgccgccgtactatatgcagcttggctggcagccgcaggccagcggcgtattgctggcgctgatgacgctgggacaggtggcgggcgcgctggcgctgccggcgctggcgcgtggtcacgatcgtcgtccgctgctgtgggcggcgctgatcatgcagctggtcgggtttatcggcctgatcggctggccgctgcagacgccgtggctgtgggcgctgctggccggcgtcggcctcggcggggcgtttccgctgtgtctggtgctggcgctggatcacctgccgcagccggcggcggccgggcggctggtggcctttatgcagggcatcggctttttgctggcgggcgttgcgccgtatatttccggcctgctgcgtgactacagcggcggtttcctgctcgactggcagctgcatacgctgttggtgctgctgctgatggcgctgacggcgcgcttccatccgcgcagctaccggcagagtggcggcgggtaa

SEQ ID NO: 442628 - DNA, 1356 bp, Serratia marcescens
atgacaatgaaaacaatgatgaaaaccacgcctctggcatgcctgttcgccagtatgttgtgcagcacgacgctgtgggcgcagcaggaagtcgatgcgcagctggccggccatgcgctgctgccggtcagcagcacggtgacgccgccggacgacgcgccggcagatctgcgccagagcggcaaatacaccagcggccagcgggtcagcgtgccgggcagcgttgccggcctgtcggccgatcgtcctaccggcatcggcctgccgatcgacggccagccgcgccaggggcactccggcattaaacatatgccggacggcagttactgggtgctgaccgataacggcttcggcagcaaggccaactcgccggacgcgatgctgtatctcagccactaccgcatcgattttaaaaccggcgcggttgagccgttaaacacggtatttctgcacgatccggacaagaaagtgccgtttcatatcgttaacgaaagcaccgacacgcgctatctgaccggcggcgatttcgatccggaaagcttccagttcgccgataatgcgctgtggatcggcgacgaattcggcccctatctgatcaaggccacgctggacggtaagattctggcggtgttcgacacccaggtgaacggcaaggtggtgaaatcgccggacaacccgaccctgacgctgccgggcgcgccggacggcaaacagaacttccaggtggcgcgctccaaggggtttgaaggtatggcgctgtctaaagatggcagcaagctgtacccgctgctggaaggggcgctgtgggacggtgaagatttcgagcaggtcggcggcaaacgctatctgcgggtgctggagtttgacgttaagcaacagcagtggagcgggcgcagctggcagtacgtgctggaggataacgctcatgcgatcggcgattttaatatgatcgacgccacgcacgggctggtgatcgagcgcgataacggcgaaggcacggcggaccaggcctgcgccgccggcgcgctgacggagaactgcttcagccaggtggcgaagttcaaacgggtgtaccgcatcgcgttttccgacgccaacgtcggtaaaccggtggagaagcaggcctatatcgacctgctgaagatccaggacccgaacaagctggcgcgcaagccgctgaataatggcgtgctgaccttcccgttctttactattgaaaacgtcgatgtggtggacgagcgccatatcatcgtcggcaacgataacaacttcccgttctcctccagccgccagccgaataaggcggacgacaatgagtttatcctgctggatgtgccgcagctgttaaaaccttaa

SEQ ID NO: 442629 - DNA, 495 bp, Serratia marcescens
atgacatgcattggaagaacattggccgccggcctgctggccgcgctatccggctacggcgcttacgccgccgatcaggggacgcgggtcagcatcaccgccacggtggtggcgccgccgccctgtgagattaacgacggacgcaccatcgacgtggacttcggcaaggtcggcgttaaccgcatcgacggcagccgctatatgcagcggctgagctacagcgtgcactgtgaatttctcgaccccgccagacagctgaagatgaaaatcgtcggcaccggcgcggcgtttgacgccaacgtgctgcacaccagcatcaacggtctgggcattaaactgctggcggacggcaagccgtttaacctcaacagcgcgctcaatatcgattacaccacgctgcctgcgctggacgccgtgccggtcaaatccgcctccgccacgctgacggaagggaaattcaccagcggcgccaccatgcagatcgattatttttaa

SEQ ID NO: 442630 - DNA, 960 bp, Serratia marcescens
gtgaaaaaatttgtttttttattatgctgcctggcgccgttgctgctggccggcaaggcgcaggcgtttacctgccggacttccgacggcggttatattccccagggcggctcgacaacgcccgttgacgtacgggtgcgcatcgggccgcagctgtcgtacggtaaaaacgagatcgtcaacgtcagccaggtcacctgtaaaaacgacgtggccagctggaccgactttctaaaaaccgacagcccggcgttaaccatgaacaatgcgatttttggcggcatcggcagcggcaccaccattaacggcgccgactataactccccggtgccggcgggcatcagcgtgatgacgctgaccaacctgaaccagcagacggtgaatatccgggtctatatcgtgctgagccgcttccctaccccggatattaaaatcaacaaaggggacatcatcggccaaatcaatttcaggcagaccaatgaccggccgaactgtccgaactgcggcccctaccgctggcgcctgatcgccgataacgacgcctatttcgtgaccaccagctgcaccatcaacaacggccggcagattaacgtcgactttaaccagatacgccaggacttcctgacgcaaaccgtcacggatgcgcaaatcaagcaggataaggcgctcagttatcagtgcgacgacagcagcgccacccaggatgtgctgatcagactggtcagcgacgccaccgggttttcgccggacttcatcaaaaccagcaacgccaacgtgggcgtcgccatggtgtataaagacgcggtgatcaaacccaacaatgctttccgcacccggatcgtcaacggtatgggcagcgacaccctcacctttgtgccggtaaaaaacaacgtgccttataccagcatcgccaccgggccgctgtccggttcagctacgctgattttcagcgcgccttga

SEQ ID NO: 442631 - DNA, 327 bp, Serratia marcescens
atggaagtgttatcgcccaaaaagaaggaaatacggcagctaaaacagcggctgctgtacgcattattgacattatctcccccgttaactcaggagaatgaactgcctccccagcatgaatggctatctactcgacaactggcggaatatataaacgagggtgtatatagagccaggaatttattactggaaatggttgctaatggcgacgccattgtcagccacggatcggtaaaaaactcgctgagatggtatcccgccgccacggagcaacaaaggatggttgccgcatgccgcaaaacggcgcgtgcactctttaatgactaa

SEQ ID NO: 442632 - DNA, 522 bp, Serratia marcescens
atgaaacttaataaaatcatgctggccgcggcgatggcatttggcgcaacctctttcgctcacgcagccgatcaggggcacggtaaagttaactttattggttctattattgatgcgccttgctctatcgcccctgagtctctcgaccagaccgtcgatctgggccaggtatccaacgtggcgctgaaaaacggcggctcttccaatccgcgttcgtttgatatcaagctggagcagtgcgatatcgccacgctgaagagcgtcaccaccacctttaccggttcggcgtcgccgaccaataaagatctgctgggcattacgggtaccgccagcggcgccggcgttgccatcacttacggcggtaaagccgttgaactgggcaaggccaccactgctcagaacctgaatgaaggcaataacaccttgcgttttgctgcctacctgcagggcgaaggcgcttccgccgccgtggttccgggcgatttctctgccgtagccgatttcaccctggcttatcagtaa

SEQ ID NO: 442633 - DNA, 546 bp, Serratia marcescens
atgttgtcacaatggaaccaggccagcgccattgctttgctggccagctgcgcgctgttttccgccccgggccaggccgcgcctgccgggcaggggtggggccaggtcaatatgcacggcgccattatcgataccgcctgcgcgattgccgccggcagccgcgatcagaccatcgatatggagacggttccgctggggcagataatgcgcgacggtcggggaataacgaaaacgttcagtatcgaattggtgaattgcgtcgtagagcggccgggaaataaacctgactggaagttttttcaggtgacgttcgacggccatgcggacggctcgctattcggcgtgcagggcgaagcccggggcgtcgcgttaaaaattgatgatagcaacggcaaagtggtgatccctggcgaacctctggcgcaggaaagcgtgacgccgggaaaccgcgtgctgaaatattcaatgacattaatgccaaatcaccagccgctgaaggcgggagcatatttttccacagtgcgttttaagctggattacttttga

SEQ ID NO: 442634 - DNA, 2574 bp, Serratia marcescens
atgctttcaccggcagggaagttatttcgcctgcaaacgctggggctgtgcgttgctttggcgtttggcagccccgtaacgtgggtgtttgccgctgaagaaattcagtttaataccgacgtattagatattaacgatcgtcagaatatcgatctgagccagtttacccgcagcggttacattatgccgggtaattacaccatggtggttcacgttaataaaaacgatctgccggagcagcctatccgctttgttgcgccggaaaataatgccaaaggcagtgaagtttgtctgccgccggcattggtcaaacagctgggcgtaaaagaaaagctggaaagtacgctgcgctggacgcacggcgggcagtgtctggatttacacagcctggccggcatggaggcgcgcggcgatttaagctcttcctcgctgtatctcaatattccccaggcctatctggaatacagctcggaaaactgggacccgccgtcgcgctgggataacggtattccggggctgctgctggattacaacctcaatgcgcaaacgcaaaagaacctgaaggcgggcggcgacagctacagcctgagcggcaacggcaccgccggcggcaacctgggcgcctggcgtctgcgcgctgactggcaggccagcgttaaccaccagaccggctcgggcaaggcgagcgacaagcagttcgactggagccgctattacgcctaccgggcgataccggcgctgcgctcccgcctgacgatgggggaggactacctgaattccgatctgttcgacagcctgcgctttaccggcgccagcctgcgttctgacgacaatatgctgccgccgaacctgcgcggctacgcgccggaaatcagcggcgtggcgaaaaccaacgccaaggtggtggtcagccagcaagggcgcgtgctgtatgaaacccaggtggccgccggcccgttccgcattcaggacattaatgatgcggtgtccggcgaactggacgtgcgggtggaagagcaggacggcagcgtgcagcagttcaagatgagcaccgccagcattccctatctgacgcggccgggccgggtgcgctacaagctggccgccggcaaaccgacggagtgggggcaccatctgcgcgggccgctgtttggcaccggcgagttttcctgggggatcagcaacggctggtcgctgtacggcggcgccatcggcggcggggactacaacgcgctgtcgctggggctggggcgcgatctgatgctgttgggggcgctctccttcgacgtcacccagtcgcgggccagactgccgcaggaaggggtcaaaagcggcggttcttaccgcctgagctattcgaaaaactttgacgagtacgacagccaggtcaccttcgccggttaccgcttctcccaggaagattttatgagcatgggggagtatctggacgcccgctatcagggggaccgcaacggcaagagcaaggagatgtacaccctctccttcaataaacaattccgcgatctggggctgagcgcctacctcaactacagccatcagacctactgggaccgggcggcgaacgatcgctacaacctgatgctgtcgcgctatttcgatctgggcgagtttaaaaacctgagcctgtcgctgtcggcctaccgcaaccgctataacgcgcgcaatgacgacggcatgtacctgtcgctgtcggtgccgtggggcagcagcggcacgatcagctacaacaccacgattgaccggaacgacaacacgcaccgcgtcggttactacgaccgggtgaatgaacacgacaactatcagctgagcgccggcgccggacgcagcggagcgacgctcagcggttactacagccacgaaggcgatatggcgcaggtgaacgccaacgccagctaccaggccggccgctacagcgccgtcggcctggccgcgcagggcgggatgacgctcacggcggaaggcgcggcgctacaccgcatcgcgacgccgggcggcacccggctgttgctggataccgacggcgtgcccgacgtgccggtgcgcggttacggcagcacggtggcgaccaaccgctttgggcaggcggtggtgacggatgtgaacagctattaccgcaataaggccagcatcgatctcaacgcgctgggcgacaaggtggaggcgacgcgttcggtggtgcaggccaccctgaccgaaggcgccatcggctaccggcgttttgcggtgatcgccggtgagaaagcgatggcgattatcaaactgacggacggcagcgaaccgccgttcggcgccacggtgatgaatgcgcgtaagcaggaaaccgggatcgtcaacgacggcggcagcgtttacctgtccgggatcaacccgggcgaggtgatgacggtgcactggaacggcgcggcgcagtgcgaggtgcatctgccgacgccgctgccggccgatatgttgatgaataacctgctgctgccttgccgccccgtcggcgcaggcgtgcaggatactccccgacccgatgaccagaccggcgctgcggcgcacggtcaccgataa

SEQ ID NO: 442635 - DNA, 822 bp, Serratia marcescens
atgaccagaccggcgctgcggcgcacggtcaccgataacggactgataactgtgaaaacaatgcttaaccagactcaaaccagactgaacatcgccgtattgggcgcaccgcttgtgattgccgcgctgctgacggccgcgccggcgcagggtgcgattgcgctggatcgcacgcgggtgatttttgacggcgaccagaagacggtcagcctgaatatcagcaatcagaacaaacagctgccttatctggcccagggctggatcgaggatgagcagggcaacaagattcaatcgccgtttacggtgctgccgccggtgcagcgggttgatccgggcaagcccagccaggtgaagattcaggcgctgccggcggccaaactgctgccgcaggaccgcgagacgctctactacttcaacctgcgtgagataccgccgcgcagcaacaagccgaataccctgcagatcgcgctgcagacgcggatcaaaatgttctaccgtccggcggccgtcgcgccgcagaagaacgcggcgcccagccagcagtcgctgacgctgacccgtcagggcgataaatatgtggtgaataacccgacgccttactacgtgacgctggtggacggtgcggcgcgcaagggcggcaagagcgttgccggttttgaaccggtgatggtggcgccgaaaggcagcgcgcccctcggcgtgtccgcttcggcgatcggctccgccccggtgctgacttatatcaatgactacggcggccgtccgcagctggtcttccgctgtacgggcaacctttgcctgacggtggcggacaagcagtaa

SEQ ID NO: 442636 - DNA, 657 bp, Serratia marcescens
atgcgacgcaagagccagaagttgtccggccgggcttttatccgctaccagcggcggctgattggcctgacggtggcggcggcgatgatgctgccgctgacggcgggtgtggtggtgctgctgatgcccccggcgcaggcggtggataactgggacgtcgagggcgcgaacggcgtactgcatgtgcacggcgcgctgagtgaaagcgcctgcagtctggagatggagacggcgcggcaggaggtctggctgggtgagctgggcagcgccggttttcagcacccgggtgaccggggcacgccggtggcttttcaactgcggctgaaggactgcctgcgcgcgccggccagcaatcgcgacccgtgggggggcgcgctggcctggagcggcagccagccggcggtgtcggtcagttttaccgcgcctgccgatgcggatgcgccgtcgctgatcggggtgagcggcgtcagcgggctggcgctgcggctggcggacgatgccggcacgccggtgcggctgggggcacgtaacacaccgcggctgctgacgccggggcagaacacgctgacctataccgtcacgccggtgcgtacgccggcgacgctgggcgtcggcgcctatcgcgccaccattgattttcgcctgtattacgactga

SEQ ID NO: 442637 - DNA, 540 bp, Serratia marcescens
atgagaaccaccgtgagaaaactgcgcggcgcgctgctggcggccggcgtgctgatgctgggcgggccggcggcggcggatgagaacatgcgttttgagggcacgctggtggcggaaccttgcgtgatcccgccgggcgaggagctgattcggctcgatttcggcaccattgtcgacaagtacctgtatctgaacggccggacgctcagccagccgttttctctgcatctggcggagtgcgatctcagcctgggcaatacggtggcggtgaccttcagcggcgctgagaacgccaggctgccggggctgctggcgctggacggcggcagcagcgcctccggcgtcgccatcgggctggaaaacctcgacggcacggcgctgccgctcaatgacgccagtaaaaaatatcgcctggcggcgggcagcaacctgattgcgctgcaggcctatgtgcggggcgaaccacaggcgattgccgacaaaaccatcggacgcggggaattcagtgcgacggccacttttagtctggaatacgaataa

SEQ ID NO: 442638 - DNA, 1767 bp, Serratia marcescens
gtgcgacggccacttttagtctggaatacgaataacgcgctggcggcgggctttctcgccctgctggccgcgtcgctgtgctatctgcccaatatgggcggcagcgggctgaagctgccgctgaatgcgctgacctacgcgttgatggcggcgatgctgctgctgatttgctggcgacagcccgcccgccgcacgtggcgcttcagccgcagcgcggcgtattttttgccgggcgtcgcgctgttggcgttgccgctggcctatgcgccgccggacggttacgcggccgccgcgtggcgggtgagcgcgctgctggccggcggggcctggtactgcggctggctgcaggttcgtcttgccttccgctggcgcacggcgctgattacgctgctgctggcgctggtcatcggccagagcctgattgcgctgctgcagctgttctggcccgcctggagctgggtgccgctgcgcggcagacgcgtcttcggcatcttccagcagccgaacgtgctgggcagttttatcgccaccggcctggtgctggcgctgatgctggcggtactgccgggctatgtgctgcgctcggcgcgggcggagcgcgccagacaaacggggctggcggcgttgctggccctgctggccgccttgctggtatgggtgcagtcgcgcgccggttggctggggggcgtgctggtgctggcggggttttggctggcgttccgccgcgtctgcgccgaccggctgctccgggccgggctggcggtgctgttgggcggggcattcggcgtgggcatgctgctgtggccgggcggtgacggcgggatggcgtatgtgtcccacgcgctgtcgaaccaggcgcggatcgccatgctgcaggacacgctgaaaatgatcgccgcgaagccctggctgggctggggttacggccagtttgagtatgcgtttcagcatttccgcatcgcccagttgccgccgacgccggtgctggagattgccggtcatccgcacaatgagatcctgctgtggtgggtggagggcggcctggtggcgctggcgggcatcgtcctgctgttgctgggcggcgtgcgtctgctgcggcaggcgctgcgcgttgaccgtcgcgctttctcctgtcgccgtcgccatgccggcgaggcgacggcgctgtgtctggcgctgctgccgatgctgctgcacagccagttggagtatccgttttacctttcggccctgcactggctgctgtttacgctgctgctggcgcagctggatcgcctgagcagccgccgcgtcgcgctgacgatccgccgcactgtgccgctgcgcctcggtatcacgctgctgtgcgtgggcgggctggtgctgatgctggcggcgctgcgcgcgggttggctgttgacgcaggcggaacgcggcgggctgcgcgatgtgcgcccgctgcgcgagatgtcgcccgtcgtcgcctggagccagcagccgcggcgggagtttgatttacagacgcaccgcctgctggcctacaaccagacgcgcgatgagcgcgaactgacgcgataccgcgactgggccaggcgctatctgaaggtacgcatcgacgccaacgtctacgccaacctgatcgccattttacgttaccagcgacgcgacgccgaggccgagcaataccgcaccgccgccgcgctgttgttccccgccgaccggcgtttttccggctcgcggcaggtcacgtttaaccacgaaaggaagcaaaaaaaccatgaccgataa

SEQ ID NO: 442639 - DNA, 408 bp, Serratia marcescens
atgaccgataactctgtgcgccttgccgtccgggcgggcattctgatgctggcgctgttaggcgctacggcctgccagaacgtcaagcccaaagcggccgacaagccgcagccggcgccgtccgtcgagacgcagcgtcagcagcgcgaggcaaagcgtttacagcagtgccagcaagaactggcggcgctgcaaaaaatcaatcctgaacgctatcaggacaaccagcgcgctttcgacagcctgatgagcggcgcgtcgcagtatgccggcctgcgcgcccgggtgaacgacgatacgcaggagacggtggatgcgctgtatcgctataaggtcagccggctgtgcgcggagatcgaacagtcggtgctgatcgggctggccgaacgcggggagcaggttaaatga

SEQ ID NO: 442640 - DNA, 1236 bp, Serratia marcescens
atgatgcgccgtgtgcctgtggcggcgtggctggcgctggcggcctgtgcgctgccccggcacgccctggccgatgacggcattcccgccctgctgcagtttgccgagcagtatcaacagcgcagcgatacgccgccggatgaggcgcggaaaacaccgtccgccgcgccgccgcataccgcgaaaaccaccgctagcgcccgcccggtggcaaaaccctcgtctcccgccgccgtaacgctgatgccgcgccgcagcctgctggaacgtgatgaacagctggcccggcagcggctggaactgcaggcattgcggcaggagaacgccgcgttgcgcgccgcagcgcatgagacgccggccccgacggcgctgccggatctgaccccgctgcagcagtggctggccgggctgcgtcgcgcctggcagggcacgccggatagccggcgcgccgctgagctggtcaagcaggcgcagcagcaggtggcgcaggaggcgcagaagcggcgggaacaggaacaacgctttgccaaagagcgtggcgcatggaggcaacagcagcagacgcaggcgcagtggaccgttacgccagagcagctgcaggacgagaataaccgcctgtcctacgcggcgggcagcgcgctggggcgcgatattcagaccatgctgacggagcgccagagctggggcgtgccggtggatcgacgcagcctgctggccggcgtgctggataacctgacggggcgtgaacggctgccgcagcaggagctgaatgcgctgatggccaaggccgatgagaaggccggcgcggcgcgggagcgtattgtcaacgcacagcagcggcgggatcgggcctatgtggcgcagttcagcaaacggccgggcgtgcagcgttcaccggcggggttttggtaccgggtggattatgccggtgaccgggcgttgccgcaggatgcggtgatcgacgtggtggtaaaggaaaaactgacggacggcacggtgatccaggatatggatctgaacggcaaagtgctgtcgctgccgctgtccggttttccgccgttgttccgtgaggcgatcggccatctgcgcgaccacggcagcatcaccatggtggtgccgccggcgctggcctacggcgagaccggctatccgccgaaggtgccgccgaacgccaccatggtgtacgagctgcgtatcgacaacagccgggcgccgcagctggcggcggatgactaa

SEQ ID NO: 442641 - DNA, 633 bp, Serratia marcescens
atgaatgccgtaacgacactggccgtactggacgacaaccgctattttgccggcgggctgcaaaaagcgctgaccgcgcgtttttacgccgccggcgtggaaacccgcgtgctggaggggccgcaggcgtatctggctgacctgctgttccactactttccgcccggcagcccgagctgtttttgccgctatgcagaaaagcggccgtcggcattgccgctctattttgccgtgcggccgccgcatggctacggccacgccgatgtgcggcccgactgccgcctgcaggccggggtgatcgtgcagaatatgccgatcgacgacgtgctgcggcaggtggaaaacgcgctgttgcagcggcgtatcgcgccgccggtgctgccgtatgtgacagagcattgcccttgccagcgctatgcgctgacggttcgcgagcgggaaatcatgctctgcctgcgccaggagatgcggatcacggagatcgcccggcggctggcgatcagcgttaaaaccgccagccagcataagatcaacgtgatgcataaaatggggtttcagcgcaatgcggagctgtatgactggctgcggcaggggtttatcggcgagcggccgtttgaggagcgtttgagctga

SEQ ID NO: 442642 - DNA, 2457 bp, Serratia marcescens
atggccaagatgatcccagcattcggacccgttgataatgatagttatggagaaaaaacggtctatgccctgttaaaagaaggactgcccgatgatttcaccgtgattcatagcctcccgtggttgagttcggcagctcgtcatcttggtatgaaattacctccaagtggtgaaatagattttcttgttctccatcgtatctatggtgttttggctttagaagtaaaaagtggcatatatcgcgtagatggccctatttttgtacatctcaaaacaaataacaatgtcgatgtagtgaagcaaacacgtaacaatgctcatggattagcccgttggttagggggagcaacaacattacggttgcgtattggttatgggtttatttttcctgatagctatttcgatgataaagttataaatacagcaatggttgatgcgtcggtaagaccatttagaaagatattcattgataaaagccaactcccggaagttgcaaagtacactattgatataatgcaatactggaaaactgcattggaaaatagtgatttagggagtgagcgtcttcaattaatcataaagtctatatgtccacattttgatggtactcctgactggggaaccaggattatttatgataatcaactctggttaaaactcacacatgaacaaattaaggtcattgaactcctgtcaaaatatcaacgatttgttgtaactggatggccaggaacaggaaagaccctaattggtattgaattcgccaggcggcttgttagagatcaaaaaaaagttctatttattactttcaataaccgcctttctgaatacattcgtcagcaaactccagattcattatgcgacgtatttacctggcacaaactctgtcatcaggctcgtaatagattagccttgccccccgagtctccaaccgactggtttgaatcaggatgctgcgaggatttgcttagtgcattaaataaaaacaagctaaaggattatgatgctttaattattgatgaagcgcaggcgttgcattcatcgtggttggaaactttattttgttggtttaaaaataaaagaattattgcattttgtgatgaaacacaaacattctcttttgaaaaagggacgaatcacactgatcttcaacggataattaattcccaatttcccttcagcttaactattgttttaagatgtccaaaagctgttactgattatttaatgtctatcagaccgtcttcatatcaaattacctcccccaggagtaacgaacccgacacgttaaaagaattagttgttatcgacccaatcgccacactacttaatgaaattttacgattgaaaaatagttctgtgacacctgatgaaatcacagtccttgttcctactgatttagtgaaaaattttctccagaaagacatgggaacttttgatataaatattgaaaccgtatctcgtttccgtggtatggaatcacctgttgttattactctggattcctcaaacatggaggatgctcagttattctgtgcttattcaagagcgacgacggctttcattgcaatttatgactcggagaagttagcatggagagaacataatagttttttgaaacaactagttaatagaaaggaaattcagcgaacaattaatgaagctaaacataactcttcatcaaaggttcttatggctgatttttttaataaaggagacctgaagcttaatagtgtaaaattagcatggtcagaggatttttatgcgtggcttattgagtttgatgcagaaaattcaccagcggaaacatgggttgattatttacactctcattatacttggccgattatatattggtacgtaaattcacgaagagttatttattacattacaaatcaacaattcgaattaaacacattaggcgcaggaacaaatttatcaataaaaaattgtgccatatgtgaaaagatgataccttttgactctgagaataattgtttgctttgcaataataaaactgaagagtcgtcaccaaccagacacgaaattaatgaaattcgcgagtttgatttaacaatctctcaaggtaattttaattcagctattcaaaaagaaaagagacgattattacccataccgttagcggcggctagcgcccgaagagtggcatttggaaagtcatatagaaataaagtactaagcgaatcattacctagtggaaaacttctctacagaagtgcattagcttttatacaggcttggattgcattattaccaccggatagaacactagtattggatgaaataacagacgcactacgcaaacgctatatctatcttgaccgattagatcgctctgagttacgaagtgctttagctttagcactgtcaacttgctacaataaaaatcatcttattaaagttgaaaagggtaaatactcacccattgatgactag

SEQ ID NO: 442643 - DNA, 1197 bp, Serratia marcescens
atgtttaaggtcgatcaactcaacaacagtctgcaaccgctacaggaaaccaccttcagccatgcaggctttactgaacgccaccacttacaggagtggctggcgaagcatccgcaggcgttaacccgcaacagcgatgatgaactgttgattatccagaaagagtttgccgggtttgacgataccaaagagcgcctcgatctgctggccatcgacaaagacggcaatctggtgatcatcgagaacaaactcgacgattccgggcgcgatgtcgtctggcaggcgctgaaatatgcgggttactgcgccaatttgcgcaaagagcatatcgtggagatattccagcgctaccttgaacaaaacgaaccggatgaaacccggccagcggccgacgtgctggcggagtttctcgaacacgatagcctggaagaggtgcaaattaaccaaagccgctcgcagcgcatcatgttggttgcggcaaatttccgcaaagaagtcaccaatacggcgctctggctgatgcagtttaatattcgcgcccagtgctttaaagtgacgccttactgctacggtaatgatgtgtttatcgatatcaaacaggttatcccgacaccggaagcggaatcctatatgattggtatggcgcagaaagaggccgaagagcagtctacctccggggaatccaaagcccgccaccacttacgcaaggctttctggacccaggccctggagaaattccgcgggagttcatgttcactgtataacaatatcagcccgtcaaccgaccattggctgagcgcgggctctggaatcagcggcgtttcgtacaatcttatcttcagcaaaaaagaaattcgggttgaactttggatcgccaagccctcagcacaaatcaatacgttcgcgtttgactggctttatgagcgcaaacctgcgattgaaaaccgctttggtcatgagattgtctggcaggcattaccggataagaaatcctgccggattacttataaaaaaccgattaacggcattgccgatcgggaaaaatggccggaaatgatcgactggttgagcgaacatatgatgacctttgaaaaggccttttccagatatctacctgaacttaatcagttgattaagcaatcccttaacgggcatgatgaggtggataccaccaaagaagaaacggaacacgtttaa

SEQ ID NO: 442644 - DNA, 1353 bp, Serratia marcescens
atgattcaggttagtcttggcgattttattgattttagaaatggtaagtcatccccagacagaactctcgatggtgagtttgatgtatttggttccaatggaattataggaaagtgcgcagaaaataatacttcagcatttagtttgattattggccgagtaggttcatattgcggtagtatttatcattcaagaaaagcatgttgggttactgataatgctattattggttcattgaaaaataaagatgagttgaatttttggtattttttgttaacaagccttgatatcaatgcaatgagctcgggctcaggacagccgctaattaaccaaaaaacacttaactgtattcaagttagaattcctctatcgtcgataaccagagtggaaattgggaattttcttggcctgttcaatgaaaaaataaagatgaataacgaaactaaccaaaccctcgaacaaatggctcaagccctgttcaaaagctggtttgtcgattttgagccggtgaaagccaaaatagcagtgctggaagcgggtggttcacaggaagaggctacgcttgccgccatgacggctatttctgggaaaaatgcggattccctggtcgtttttgaacgtgagcagccggaaaaatatgctgagcttagagctatggcagagttatttccttctgcaatgcaaagtagtgagttgggtgagctacctgagggatggaacatcttacgattagaagatgtaacttcattaataattgaccatcgaggaaaaaccccaaaaaagttgggaggtgactggtctgaggatggttatccagctatatctgcaaaaaacataaaaagtggccagctagtacggcatgattctattaagtatgttgattcagacttgtatgcaaagtggatgaaagatgtgcttcttgctggtgatattttgatgacatcagaagccccacttggtgaattactgtacttagcgaaggatagcgactatttgctaagtcagcgactctacggtatccgagctgataacgagatgatttctggttgctatctttatttctggttgcaaactagtgatgccaaagcggatctttatggccgagctacggggtccacagttgttggaattcgtcaatctgagttgaagaaagtaaatattatggtaccacaaaaggccgtggtagagtcattttcaaatttaacggctctttatttggaaaaaattgagtctaatgaaaagcaaaacatcgtatttaagaaactccgcgacgccctgctccccaaactcctttccggcgaaatcactctcccggaggccgaagcatcagtaaaggacgctgaacatgtttaa

SEQ ID NO: 442645 - DNA, 1707 bp, Serratia marcescens
atggataacgcagaacaacaatttttgcacgatctggataccaagttctggaaagccgctgacaagctacgcgccaatatggacgcggccaactataagcatgtggtgctggggctgatctttctgaagtatgtatcggatgcctttgatgcacgctggaaagagctgaaaggcctgtttgaagatagcgccaacccggacaatatttacgcgctgtcgcgcgagggttttgactcagaggaagagtatcaacaggcgatttccgaagagctggaagttaaggattactacaccgaaaaaaacgtcttctgggtaccgaagctggcccgctgggaaacgctgaaaagcaacgccgtactgcctgtcggcacggttatcggcaaagatgacagcggcaaggcgatcaccatgacgtcagtatccaagctgattgatattgcgctggataccatcgagaacagcaacccgaagctgaagaacatccttaaccgtatcggtcactatcagctgggtaacgaattgctgattagcctgattaacgtcttttccgataccagctttagcaacccggaacataacggggtgaaacttaacctgaagagtaaggatattctcgggcacgtctacgagtactttcttggtcagtttgccctggcggaagggaagcaaggggggcagtactacacgcccaaaagcattgtgacgctgatcgttgaaatgctgcagccttaccaagggcgcgtctacgatccggcgatgggctccggcggtttctttgtgtcgagcgatcgctttattgaagcgcatgccgacgaacagcattacaacgcggcagagcagaagcgcaatatttctgtttacgggcaggagtccaaccccaccacctggcgcctggcggcgatgaacatggtgattcgcggcattgattttaactttggtaaacagaatgccgacacgttcctgaacgatcagcacccggatctgcgcgccgattttgtgatggccaacccgccgttcaatatgaaggaatggtggcatgcgaagctggaagaggacgtgcgctggcagtacggcacgccgccacagggcaatgccaactttgcctggatgcagcatatgatccaccacctggcgccgaaggggtcaatggcgctgctgctggccaacggctcgatgagttccaataccaacagcgaaggtgaaattcgccgggcaattgttgaggcggatctggtggaatgcatggtggcgctgccggggcagctatttaccaacacccaaatcccggcctgtatctggctactgaccaaagataaaccggggggtaacggtaaggcgcaccgtaaaggtgaagtgttgttcatcgacgcccggcagattggttatatgaaagaccgcgtactgcgcgattttacccgcgaagatatcgctaaaattgctgacaccttccatgcctggcaggcggacaaagcgtatcaggacgtccccggcttctgctttgccgctacgctggaagacatccagaagaacgactttgtgctgactccggggcgctatgtgggcgcggttgagcaggaagaagacgatgagccgtttgctgagaagatgacacgactgacgacgcagcttaaagaacaactggaagagagtgcaaagctggaagcacagattaaggctaatctgggggggctgggttatgagttctga

SEQ ID NO: 442646 - DNA, 294 bp, Serratia marcescens
atgcttttaaccgctaacatagatattatgattgaaggtacgctgaatcagaattttgattatattaccggggcggagacgattgatgatgccatcgatatctatacaaaagagctaacaatgcaagaccgtcaagcgttggaaaaagaggtattagcctttctgtcgaatgatgacgatattatcaagtctgaattcaatatgcgttatgttaattatttttcgccagaggatggcaagggattactgctgcgcgtgcttgagggcattgaaaaagccgagcaggataaataa

SEQ ID NO: 442647 - DNA, 1002 bp, Serratia marcescens
atgaaagccattgtttacagccagaacggtttacccatcgccgacccgcagtcgctgtacgaaaccgagctgcccaagccacagcctggcccgcgcgatctgctggtaaaaatccgcgccatctccgtcaacccggtggataccaaggtacgcaacggtgcgccgaccgatgcgccgcgcatcctgggctgggacgccgtcggtgaagtagaagccgtcggggcagaagtcagcctgtttaaaccgggcgacgaggtgttttacgccggctccatcgtgcgccccggctcttatgccgagtatggtctggtggacgagcgcatcgccggccgcaagccgcagtcgctgagcgacgctgacgcagcggcgctgccgttaacctcgctgaccgcctgggaactgctgtttgaccgactggaagtaaaaccggacgaagacgcagcgctgctgatcgtcggtgccggcggcggcgtcggttccatcatgacccagctggcgcgcaagctgaccggcctgacggtgataggcaccgcctcgcggccggaaaccgccaaatgggtgaaatccctcggtgcgcaccacgtcatcaaccacaaccggccactgacggaagaactgaaaaaaatcggcatcgatcaggtgcgctatgtcgccagcctgacccacaccgataaacacttcggccagattatcgaagcgctggcgccgcaggggaaaatgggcgttatcgacgatccgcagaccctcgacgtgatgccgctcaaacgcaaggctatctcgctgcactgggagctgatgtttacccgctccatgttcgagaccgccgatatgcagcgccagcacgagattttgcaaaacatcagccgcctgatcgacgacggcaccctgcgctcgacgctgggcgatcactacggaccgatcaccgcagacaacctgcgtaaggcccatgccctgatcgaaagcggcaaagcgcgaggcaaaatcgtgctggccgggttttaa

SEQ ID NO: 442648 - DNA, 906 bp, Serratia marcescens
atgattcgtctggaggacgttacgctgtttgtccgctccgccgcgctgggcagtttttccaacgccgcgagggaagcggacctgttgcccggacaggtgagtgcggcggtgcagcggctggagcgggatctggataagcggctgtttgcccgttccacccgcagcctgcgcctgacggcggaaggggaaaaatatctgccctacgcgctggagatgttggcgatcgtgcaggcgggggcggaaagtctgcacaatacggatcatgaattcagcggcgagctgaaaatcgccgtgccttccgacaccggccgcaatctgctgttgccgctgctcaatgccttctgtcggcagcatccgaagctgacgctgcgcctgtcgctctccgatcagataagcgatgtgttccgcgacccggtagacgtggcgattcgctacggcgtgctgaacgacagcagctatgtggcgctgccgctggcggacaataaccggcgggtgctggccgcctcgccagactatctggcgcgccacggccggcctgagacgctggacgcgctggcggatcaccactgcattctgtttaccatcaacggtcacgcttgggaccgctggccgttttatcccgaggaggggagccgggagctgaaggtttacgggcggctgatcagcgatgatgccgacgttgcccggcgttgggcggtggacggcatgggcattgtctataagtcgtggatcgatctctatccggatatcgccgccggcaggctggaagtgttgctgccgcagatcccgggccaggcggcgccgcttaactttatctgcccgcaccggcgccagttttcgccggcgattcgcgaactgtaccggcagttgcagcaggcgctgagcgatatcgccgggcgacggtag

SEQ ID NO: 442649 - DNA, 1164 bp, Serratia marcescens
atgagcagtcacccacacgccgtatttaactctcctcataaggcgttattgcccgatagtcgtctccccaatgttttattacaccgtgaacgggtgcagcgcatattggtgattaaactgcggcactttggcgacgtattactgacgacgccgttgctcagtacgctgcgggcgaattatcccaacgcgctgattgatgtgctggtgtatgacggtaccgaggccatgctggccggcaaccgcgatgtttatctggcctataccgtggaccgcagcctcaaacatcaggggctgaaggcgcaataccgtggcgagtacgcgctgtggaacagcttgcgcaccgggcattatgatttggtcatcaacctctccgatcagtggcgtgcggcgctgtactgccgcttcctcaaacctactttcagccttgggttcacctatccgaagcgtaataaccggctgtggcggcgttgtcattctctgttggtcgataccgaggggcatgagcggcaacataccgtgctcaataacctcagcattttggcgccgctggcgctgccgacgcaggtcacgcgcgtgacgcaatcctggcgacagtgcgatatcgatgacgtggagcggcttggccgccattatcggctcaggaattttgtcctgatccaaccggcggcgcgctgggcgttcaaaacctggacggcggccggcttcagcgaggtgatcaatcacctgaccgccagaggggagacggtggtgctcaccggcgggcgctcggccgaagaggcggcgatgatcgacgccattctggccggctgcatctcgccgcagcgggtgattaatctggcggggcggctggacttgccggaactggcgctactgatttcccgcgccaggctgtttatcggcgtggattcggtgccgatgcatatggccgccgcgctgcagacgccgtccgtggtgctgttcggccccagcaatctggcgcagtgggcgccgtggcaggcatcgcacacgctgctgtgggccggtgattaccggccgctgccgccgccggaagcggtggacaccgcgacggcggaacgctatctggccgcgatcccgcccggcgatgtgatacgggcggtcgaccggcgtttggcgtcgtcggatgcgcccgcttctgtgggttga

SEQ ID NO: 442650 - DNA, 1242 bp, Serratia marcescens
atggtttttgttcctgctcttactgtcccgcagtaccggcaacgattattcgcctttacggccttgttacttggcgcatcgctgccggcctccaacttcctgatgaatgtcgccctggggctggcggtgctctgcctgctgtggcagcgggattgctgtcagtggaaggctttggcggttcatcctctggtatggctgccggcgctgatgttcgtgctgttggcgctgtcgctgctgacgcacagccatgcgtatggggcgtcgatggtcggcaagtataaaaagttactgtatgtgctgccgctggcgctgttttttctggccgaccgccgcctggcggcgcattttctctgcggtttcctgtgggccaatgcgctgatactggccatcagcctggccggcggcgccggactggcgacgcgctggggcatcaaccctgacaacccgacggtgtttaagctgcaaattacccagaatgtctttatggcgttggccgcgctggtctggctgacgcgcgcctttgcctgccacggtatgcgccgctggctgtacggtgcgctggcgttgctggcggcagccaatgtattgctgatggtgcaggggcgaaccggctatgtggcgctggtggtcggcatggggatctggctgctgctgacgctgcgccgccggcagcgggtggccgttatcgcctgcggcatactggccgccgcgatgctgatgctgacccccaatctcgcgatggagcggttggcgctgggcgttcagcaagtgcggcattgcgtactgtcccccgccgagacggcttatcaggcctgtgacaactcgatggggcagcgtaccgcttttgcccgtgaatcatggcggctgattcagcaggcgccgctgctgggcaacggcgccggcagtttctggtacggcaacgcggagaccggctacagcgtgcataatccgcacaatgagtatctgctggaaacggtgcaaaacggcctgttgggcctggcgttatttattggctggatgtggtgctgctatcgtgtggcctggcgacagccggtgcagcgtcgtaacctgctggtggcggtgctgtgcagctatatggcctgtcatctgttcaactcgttcctgctggattcttccgaagggcacctgttcgtggtgattgcggcattgctggcggggtgggcggtgatgccgcgggagatggcggataagaatagtcatcctgcaaataagaagggctaa

SEQ ID NO: 442651 - DNA, 1731 bp, Serratia marcescens
atgaaagggaatttatcctcgcttttatggcgacgggcgctgcctgttccgctgttcgccggcgtattgttgacgctctccatgccgacgctcggtgcgccgacgccggacggtgtattacaacatgccgccgcgcgggacgcgcaggaacagcagcgccagcaggagcgtgaacgcgcgctgcagcagcagaatgcgccgcagagcgacgtacgcctgaaccgccccgacgtcgcgctgcctgattacccgtctgatgaacacccctgttttaccatcaaccgtctgcaactgattggcgaagcagccggacgctttcagtgggcgctggacgcggcgcaagacgccaaaggccgctgtctgggccagcagggcatcgtgctggcgatcaacaaggtgcagaaccgcattctggccgcaggctatgtcaccacccgggtgatggcgcaggagcaggatttgaccagcggcgtgctgacgctgacgctacagcctggccgcattgcccgcgtgcgatttgaggagggtgtctcctggcgcgggcggttgtggaatgcgttgccggcgtcgaccggtgatatcctcaacctgcgtgcgattgagcaggggctggagaattttaagcgtgtgcccagcgtcgaggccgatattaaaatcgctcccggcgaacaagaggcgaccagcgacctgctggtgagctggaaggagggacgcccggtgcgcctgagcctggggctggatgacagcggttcgaaaagcaccggccgctatctgggatccgccacgctggcgattgacgcgccctttgcccaaaacgatctgttttacgccaatatcagcaaaaacctgttcgagcacgggccgttcggcaaccgctcacatacgctgaactacgttttcccgatcggctactggagcctggccgccaactataacgattacacctatcaccagaatatccccaacgccaacgaagtgctgagctacagcggtaaaagcgaaaacctgcagctgacgctgtcccgcctgctgtttcgtaaccagtcccataagctgacgctcaatatgcgcgcttaccgtcgccacaccaccaacgcggccgacggctacaaccttgataaccaggagcgccgcaccgccggctgggagctgggtcttaaccagcgcagctacctcggcagcgccacgctggacgccaacctcaactggcaccgcggcaccgcggcgttcggtgccaaaccggcgccggaagaggcaatgcataccggcagcgcccgcgtcggcatcgctatgggagacgtcagcctgaaccagccattcgctttggggcagcagccctggcgctattacaccagcctgcgcggtcagtggagcgccaacgccctgacgccgcaggagcggatggcgatcggcggccgctacaccgtacgcggcttcgacggtgaattgtcgctgtccggcgagcgcggcatggtgtggcgcaacgaactggcgtggaacgtacagtcgcgcggccatgaactgtataccgcgctggactacggccgcgtgggcggccccggtgcgcgcaataaggtgggtaaacagctggcgggtacggcgctgggcgtgcgcggcgcgctgtggcggcgcttcagctatgacctgttcgccggcgtaccgctgagcaagccggatgcgttccacacctcgggcgccaccgccggcttcagcgtcaatctggaaatttaa

SEQ ID NO: 442652 - DNA, 9981 bp, Serratia marcescens
atgaataaacattgctatcgcctgatttttagccgcacccacggggagctgcgggtggtttccgaactggcgcgcagctgcagcgccgagcccggccagagccgcggcgggcatgcgccgcgcctgtgggtgacggtgcgccgggcggtgtggctgctggggctggcattgttcaccggcccggcctgggcgggcggcatcgtggccgatggcccggcggggcagcgccctgaggtgatcgccacccagaacggactgccgcaggtcaatatcaccgcgcctaaccaggccggggtgtcgcataacaaataccaacagttcgacgtcgatcggcagggcgcgatcctcaataactcgacgacgatgacctcaacccaactggggggcatgatccagggcaacccgaacctgaaccccaacggcgcgccggcgcgggtgatcctgaacgaagtcaacagcaataaccccagccagctgcgcggcttcctggaagtggccggcggccgggcgcaggtgatcgtcgccaacccggcggggatcgtctgtaacggctgcggcaccatcaacgccgggcgcatgacgctgaccaccggcaaaccgcagctgaacgccgacggcagtctgggcggttatcaggtggagcgcggcatggtgcgcatcgagggcggcggcctgaacggtgacgcccggcatgacactgaatatgtcgatattctggcgcgtgcggtggaagtgaacgccggcgtatgggccaaacaggggctgaaggtggtggccggacgcaaccgcgtcagcgccgacggcaacacggcgacgccgctggctgccgacgataaaaaaccggaactggcgatcgatatgggccagatgggcggcatgtacagcggctatatccagatgatcggcaccgaagcgggcgtcggcgtgcgcaaccagggcggccacctgcaggcgagtaaaacgctgaccatcagcagcgaaggcaaactgagctggcagccggcgcagcaggaggcggtcactcaggccggcggcgatatccagctggccgcccgcgacgacattgactaccacggcaagctgcacagcggcggcacgctctcggtgcagagccgtgacggcgagctgcgccagtccggcacgctggcggcggccggcgacgtgcggcttaacgccgcacgcggcatccgcagcagcggcaacttgctggccggcagcgacattaacagccaactggtgcgcgaggcggatctgacgctggccagccagggcgaggtgcaggcaagcggtcaattactgagtaagaaaacgctgaaggtcagcggccggcaggccgatctcagccaggcgacgctcagcgcgcgccgtgcggaagtcagcgctaaggcaggcggcgtggcgctgcggcaggccactgtggacagccgggaactggcgctcagcgcgacgggcgatatcgacgcgcagcaggcgcacatcaaggccgggcgctgggacgtcagcggcaataacctgttcggacaaggagcgatctggtcgcagagcggggacggcgacagccgtttcgcgctgggcggcacattggacaacagcgacggcagcatcgaagcccgacggctgcagctggatgcggcgtctttgaataatcagcgcgggcgtttggtggcgttggatgacgtagctcagcgctggcagatcggcggcttgctggataaccgcagcggcgtattgggcggcaacggcagcctgacgctgacagcgggtgaactgcataaccaggccggcgtggtgcagagccagtcggcgctggatctgacctcggcggcggggatcgacaacgatcgcggtcagctgctggccggccggcagttgacgttgaacgccggcggtgcgctgagcaaccgcgacggcgatatcaacgctgcaggggtgaggctgacggcgcacagcctgaacaacgcgcagggtcggctggtcagccagcgcgggctgcagctgacggcacacgaagggctggacaaccggcaggggctgctggaagcgggcgaagaattaacggttaacagcgcgggcgactgggataaccgcgacggtcgcgctaccggcggaaaacgggcgaccgttgccgtccgccagatcaataacgacggcggtaaactgcagtccggcggcgcgctgacgctcagcagtaccggcaacgtcagcaatcaggacgggttattaaccgcgcagcaggggctgagctggcagggcggtaaaggcagcctgttgaacaacgacggcggcaaggtgctcagcgacggcgatctgtcactgcagggcggcagcctgagcaaccggcagcagggactgatgcagagccgacaggcgctgacgctgggcctggacggcggctgggataaccgggacggcacgctgcttggcggcgggatgacgcgggtgcgcgccgacagcctgctgaacgccggcggcgcggtgcagtcgctggacgcgctggatatgcagttcacccgccagttggataacggcaacggcaagattttcagtcagctgtcgcagaccctgcaggcggaagagctgctgaaccatcacggctggatgggcagccagggcggctggtccgccgtcgcccggcgttttgacaaccgggacggcagcgtacaaagccagcaggatgcgcagctggcaagcgacgcgttggacaatcagcgcggcagcattcagtcggcgggggcgctggcgctgcatatcggccaggatgtggataaccgcggcggtaagctcagcgcgcaggggcagctggaggtgcgcggcgcaaacgcgggcgacgccgtcggcacgctgcacaacgcggcgggccaactgctggccggtgacgcgctcagcgtggcggcgcagcgcctggacaaccggcagggcggcctgctttacagccagcgggcgatgcggctgaacctgaacggcgcgctggataaccgccgggggcggctgcagagcggggagcagctacagctcgacgcgcagtcgctgcttaacgagggcggcacgctggatggccagcagcaggtggcattgcggatcctggggctgctcgacaatacccgtggcgcgatcagaagcaacggtgcgcagcaggttacggcccagcaggtcgagaaccgcgaaggggtgttcagcagtcgtggctcgctggcgctgagcgccgggcggctggataacctgaacggcacgctgattggtcagggcgacggcgactaccgtatcgacctgctgaataaccagcagggcaagatccacagcggtcaggcgctgacgctgcgcggccagcagttgaacaaccagggcggacagctggtttccaccggcgcccaacggctggaggtggtgcagatcgataaccgcggcggcgccgttaccagccaggatcggctgtcgctgcagagcagcggcctgaacaaccgcgacggcggcctgctgatgggcacgacgcacaccgaggtgagcgcgcagacgctggataacggcggcggccgcctgcaaagcgccggttcgctgacgctgtcgctgcttgattcgctgaacaaccagcaggggcgcgtactggccaacggcgcgctggcgattaacggcgaacagcgcgccgtctccgtcctgaagctgctgaaccagggcgggctgatccagagcggcgccacgctggcggtggacgccggcacgctggacaaccagggcggcacgctgctgagccagcaggcgctgacgctgtcgctgcagcaggattacacccagcgcgccggcgatacgctcagcagcaacgaagcgctgacgctgacgctggccggcggcctgaccaacctgacggagtggctgctgccgggcagcctgaccgtcaacagcacgtctatcaccaacctgggttcgctggtggggaaaacgctgcggctgacgaccggcgcgttgctgaacaaggggcggctggaagccgatagcatgacggtcgacgccgacacgctggataacctggcgacggtgatgggcgatgacatcacgctgcgcggcaaaaccatcgacaaccacgggcgcgatgcggtgatcgccgccaccgagcggctgcagctgcaggccggcgaacgcctgagcaaccgcgacggcagcctgatctacagcgccggcagcctgcatctgggcagcggcgatctgatcgagaaccgggcgagcaacatcgaggcggacggtgacgtgacggtggaggccaagcggctggacaacctgcgcgaagggctggagattgagcgcgaggcggaaagcagcgactacaagtggcaccgttacaactactactggcgctcttacgactcaccggttaaccccgataaagagcccatggcgccgaccacgcagaatctgacgttccgcgatgacgcggcggcggcaaacaacccgtacggcaccctgttggcgattgacccggcgggcaagcgtgcgcaggtacgggtaaaaagcgcgaagggagagatgctggacctctgggtgaactacctggcgctgaagcagaacgacgacggcggctacgccatgaccttctacgagacgcgcggcttccggcagaactatgtgccgacgccgtaccacaatacggtgtggcgcgagcacgatcgcgggcgtctggagcagtgggatccggaaaagcatctcgatatcgtcaatgcgccttttgttaccgattacaataacttacgcgaacgcaccgccaccggcacggtcacgcgcgaccggctggtttccgccggcatcggcgggcagatcctggcgggcggcaatatggtgctgcgtatcgccagccagctgttgaacgacgccagcaccatcgccgccaacggcaacctgacgattgaaggcgacggcaaggtgatcaaccgcggctattcggtcaatgagcggcgtcaggagcatatcgtcgaccattatgacaaggacacccaccactggtatccgacgtttaaccgcgacgagaccacggcgctgaccaccattgacggcatcatcagcggcaacggcagcgtcgccattcgcggcgctagcattgagaacaccacggtcaatcaggcgcagatcggcagcgtggaggcggcgcagaaggcggcggaggccgaacgcgcggagctggagcgcaatccgctggcggtaacggttgacggcgtggagtggcagtccggcgatacgcagctgatccccggcggccggccgttaacgccgggcgaattggcgttgaccgacaagcagcatctgggtgacgtggcgacctcaatcccggacaacggcctgttccgccagcatttggaagcggacagcccgtatctggtagtgaccgacgagcgtttcaccagccgcagcaaatttatcagcagcgactatatgctgcagcgggtgggctacgatccggcgcaggtgcataagcgcctgggtgacggcttctatgagcagcgcctggtgcgcgagcagatgctgaagctgaccggccggccgtcggtgcgcggtgaagacgcgatggcgcagtaccagcgcctgatgaacaacggcatcaaggtggcgcaggacttccaactggtgccgggcgtggcgctgcgtcctgaacagattgcggcgctgacgcaggatatcgtctggctggtgagtgagacggtgcagaccgccaatggcccgcagacggtatgggtgccgaaggtttatctggccaataacacgctgcgcctgaacggcgacggcgcgctgatcgccggcggcgagctgcagctgtcggcggacagcatccacaacgccggcaacctgtttgccgataaggcgctgaccatcgacgccggccagcttatgcatcagagcggcgatatccgcgccgaccgcatcaacgtacaggcggacagcctgaccatgagcaccaacctgcaggacgcgctgcgccaggcgtcgatgagcgccaatgacatcagcctgagcggcggcgatatccgtctgcagggggcgaagctggacgcgacgcacaacctgagcctgagcgcgcgcaacaacctggagatcggcgccgccagaagcagccacacggcggatctgcaggtgatttccggcgcgatgggcaaccgcaccagcagcgggctggaagaagccggctcgcggatggcgcaggtcagcggcgagtggcagcaggcgctgggcagcacgctcagcgccggcaacaacctgacgctgaaggccgggcaggatattacgctgcagggcagccaggccaaggccggcggccagctcggtgtacaagcgggcggcgacgttaagctgctggcggagagcaccaccaaccgcaccaacctgaaggctgacagccgcacctcgtcggtgaacaacagccgtgaggaagagcgtctgctgctcagcaccctgagcggcgaccagggcgtgacgctgacggcgggcaacaacctgctggcggagggcgcgcaggttgacagccaggagggacgcatcggcctgagcgggcagaacgtgaccatcaaagaggcgcggcagcaggttaacgaccgcgacagcgagaacaaacgggtcggcaagaccaagagccggcgcgaggaagagagttcgcgcagcgaggcgctgggcagcaccttcagcggccagaacggcgtgacggtggtggcgcgcgacggggatgtgacggtcaccggcagcacgctgcacagcgacgacggggcgatcgctctgcaggcgaaaaatgacgtcatgctcaacagcgccaccgaaagcgaggcgacgtactcggaagagcgctccgagaagaaaggcttcctgaagaagcagagcagccgcacggtgaaaaacgaccgggtgacgcgcgagaagggcagcctgctgagcggcgacagcgtcagcatcagcgccggcaacgatctgacggtgagcggctcggcggttgtcgcagaccatgacgtcaacctgcaggcgggcaacaacgtcgatatttccgccgccaccgagaccgacgcgcactacctgctggaagagaagaaaaagaaagggctgctgagcggcggcgggctgggcttcaccatcggcagccagtccagccggcatcagattgacgagaagggcaccacccagagccagagcgtcagcacggtgggcagcaatcagggcaacgtgaacatcacggcgggcaagcagctgcatatcggcggcgccgatctggtggccggcaaggatatgaccctgagcggcgacagcgtgcagatcgacccgggctacgaccagcgcacccgcacggaaaccttcgagaccaaacagagcgggctgagcgtggcgctgtcgggcgcggtgggcagcgcgctgaatacggcggtgagcaccgcccagcaggcgcgcaaagagagcagcggccggctgcaggcgctgcagggcaccaaggcggcgctgtccggcgtacaggcgatgcaggccgggcggatggatgcggcgaagggtgacgatccgtcgaacaataattcggtggggatcagcctgtcttacggcagccagtcttccaagtccgtgcagcacagcggacagagcaccgcgcagggcagcagcctgacggcgggcgacaacctgacaatccgcgccaaagagggcgacgtcaacgtgacgggcagccagctgcaggcgggcaaggacgtcagtctggaggcggcgcgggatgtgaacctggtatcggcgaagaacaccgagttcctgaccggtaaaaacagcagcaagggcggcagcgttggtctgggacttggcgtaggctccggcggcgcgggcctgagcgtttccgccagcgtgaacaagggcaaaggttcggagagcggtaacggcacaacgcacggggaaaccacggtcaatgcgggccagcgggtcaacatcagcagcggacgtgacaccacgctgaagggcgcgcaggtgagcggcgaacaggtgagcgcggacgtcgggcgcaacctgtcgctgacctcggagcgggacagcgaccgttacgatgccaaacagcagagcggcagcgccggtggcagcttcacctttggttcaatgaacgcatcggcgggtgtcagcgccagccgcgacaaactgcacagcaactacgacagcgtgcaggagcagacgggtatttttgccggcaagggcggttttgacgtcaaggtgggcgagcatacgcagctggaaggcgcggtgataggcagtacggcgacggcggacaagaaccggctggagacggggacgctgggctttaaggatatccacaatcaggcggactttaagaccgagcaccaaagcgtgagcgtgagcagcagcggcagcgtcggcggccagttcctgggtaacgtggcgaacaacctgctggtgggcgcgaaccacgaagggcatgccagttcgacgacgcagtcggcggtgagcgagggcgcgatagttatccgcgaccaggacaagcagcagcaggatgttaacgcgctgagccgcgacgtggagcacgccaatcaggcgctaagcccgatatttgacaaggagaaggagcagaaccggctgaaggaagcacagctgataggggagataggcagtcaactgacgaatattgtggagacggaaggggcgatagcggcgaccaaagaagccagggagaaacagaaagacccggctgcattagcagcggctaaggaaaaactggagaaagaaggcaagccgacgacggcggaagcgatccagaaacaggcctatgaaacggcgtacaatcaggcgctgaatgactccgggtttggtacgggcggcaaggtacagcgtgcgatgcaggcggcgacggcggtgatccaggggctggccggcggagacctgacgaaggcgatagcgggcggttcagcgccgtatattgcgaatatcatcggcagcagtggcctggatgatgcaggcaaggtactggcgcacgccgcggtgaatgccgcgttggcggcggcgcagggcaataatgcgctggttggtgcaggcggtgcggccacgggtgagcttatcgggatgatagcggttaatgcgtacggcaagccggtaagtgaactgagtgagacagaaaaacagacggtgtcggcactggccacgctggcgtcaggcctggcggggggattgatcggtggcagcacagctgatacgttgttgggtgcgcagtctggtgagacgacggttgagaataactctctgagtggtgacaaagcccgtgaatcagtcaggcagagcgctgagtactggaaagagcaggtcagaaacaagctgggtgatggtgcaacatcagccattgcaaacaccataattggtgctcttgcggataccggagactcggcattaggtggagtggattacgcagcggatactgcaatggcgctggcggcctgtgcaaccggagacagctactgtagtaaggctctgagcgacttgtccggtaagaatcaggcggtggctgacagcgttaaggcgctgatgagtagcgaaacctggtcagcggtgaaagatactgtcgtgcaggcgtctgaagggaatcaggctgcgctggaagccactggcgggatgatcgcgggaattatcctgccgggtaagaaggtgccgaatgtatcaaatcgaattgaaacaatacttcaggctgagaaaagctgggaaagtgctcggaacaaggcattggatcttgttggtaatttaggagctgactctaagccagttattggacgtttagaggtcagcgccggaaatggaaaagttattggacggcaatccagcgacggaaaagttggttggcgtgttgattatgaccctgaaaagggaacacacatcaacatatgggattactctcaaggtaaaggtccaggcaaagcagtcaagcaagttataccttttgaaggcaatgagaagtcctttgaaacgatattgaaacagctaaacaggtag

SEQ ID NO: 442653 - DNA, 1320 bp, Serratia marcescens
atgcaggcggcgacggcggtgatccaggggctggccggcggagacctgacgaaggcgatagcgggcggttcagcgccgtatattgcgaatatcatcggcagcagtggcctggatgatgcaggcaaggtactggcgcacgccgcagtgaatgccgcgttggcggcggcgcagggcaataatgcgctggttggtgcaggcggtgcggccacgggtgagcttatcgggatgatcgcggtcaatgcgtacggcaagccggtaagtgaactgagtgagacagaaaaacagacggtgtcggcactggccacgctggcgtcaggcctggcgggaggattgatcggtggcagcacagctgatacggtggcaggaacgcagtctggtaagacgacggttgagaataacttgctgcatgccgagcagattgatgactttgcggcgagagcgaaagggtgtgaagcccgtggcgactgcggaaaagtcgtcaaagaaatggaagatctgagtcttaagcagcagcaggaaatgatagcggtatgctcttccaatccttccgcttgtaaagaaaaatatggagatattccggctaatggaatgctggttcgtgaggcaatcgatagggtcttaggcgcggatgtaccgtcaaaaatgaagaatgatatgtcttcattactggcgcaacagatagaagcggaaggggttgtatcgagcacagagtttgcgaatcagcttaaaaaccgatacggaatagacagccagcaggccgaacttttggctggtgctgctttaggtgctgttaccggtggaatgggtaaaggtggtaaacctgaagcaggtaaaaacatcgttgttgtagactcgggtaagaaaggtgcctggaacaaagcgatgaacaagccagagccgaatacggtttatcaggttgatgggaataagacttaccatactgatgaactttccagaacaactaatgttagtgcaacattaggcttgtctaaaaatgataggaacggttatcagcaatgtaaggcaggtaggtgtggcaatgctggggatgaaggtgggcatctgattgccagtattttcaatggccctggagaaaaattaaaccttgtccctatggatggtaacctcaataaaggtgcttggaaaagcatggaaaattcttgggctaacgctttgaaagatggtaaaaatgttgaggtgaatatccagccaatttactcgggaaatagtaccagacctgatagggtgatagttaaatattcaattgatggtggtaggcccgtaaatgttgacttcaaaaactccccgggagggaaatga

SEQ ID NO: 442654 - DNA, 330 bp, Serratia marcescens
atgcgacagactgacttcgagagaagaatagggcaaatactttatgattgcggccctcgaaacgctcaaaagatagttgccagagttgagattttctctgaaaacgatggcggtaaatatgagtttgattaccttgatgagaatggtgatctagattggtttgatcctgatgggcgggctgtcgcagatttaacagatgtcctgattgcgtataagaacttttttttagaaaacaatatgactaatgggaagcctatttggtcaaaatgtgaaataaccattgatataccggaagagaaaataaacatcagcttcctgtatgatgactaa

SEQ ID NO: 442655 - DNA, 573 bp, Serratia marcescens
gtgcagggcaccaaggcggcgctgtccggcgtacaggcgatgcaggccgggcggatggatgcggcgaagggtgacgatccgtcgaacaataattcggtggggatcagcctgtcttacggcagccagtcttcaaaatccgtgcagcacagcggacagagcagcgcgcagggcagcagcctgacggcgggcgacaacctgaccatccgcgccaaagagggtgacgtcaacgtgacgggcagccagctgcaggcgggcaaggacgtcagtctggaagcggcgcgggatgtgaacctggtgtcggcgaagaacaacgagttcctgactggtaaaaacagcagcaagagggcagcgtcagccagtgcgttacccttgtcgcgacatcaaaaaaccaccggcggcacagtttgccagctcaacgtcgccgcccgctgcaaggcgtgccgatcgccttgctcgctttcggttttttccccggagaaagtacgcagcgccagcatcttgccgactttttcgccgtcaacggcaaacagctgctcggcctgggtgcccatatgcgttttggaggtgacataa

SEQ ID NO: 442656 - DNA, 603 bp, Serratia marcescens
atgccttaccgacaatcagccaacagcaataaatggttcggaaaactggccggagtgctgctcggcatcgccgcctgcctgccggcccttgccaacgccgccccgataacgctgacgccggataggcaagacgcctttcgctccgcgttttatcaggcctacagcgacagcatggaaaaaggcggctggaccaacgtcatcaaggaagggcgaaaacccaaattacacatcgtcgattgcgccaacgatctgtgcgtggtcaatctgattgtcgacgccgggtttgatgagcagccgtatctggtgcgtatcggagccaacaagacgttctcagacatgacggccgtgcgctattacggcagggcgctcggcaaggccgctttcgtcacggttaacaaccggcctgcgatttatgtcacctccaaaacgcatatgggcacccaggccgagcagctgtttgccgttgacggcgaaaaagtcggcaagatgctggcgctgcgtactttctccggggaaaaaaccgaaagcgagcaaggcgatcggcacgccttgcagcgggcggcgacgttgagctggcaaactgtgccgccggtggttttttga

SEQ ID NO: 442657 - DNA, 693 bp, Serratia marcescens
atgcctagcgtcaccccgtcaatcgatccgcagattacccgccttgcgccagccttccgggcgctgagcattctggtggaacccgcgccggtacgccaccctgacgtcggggaaaccgcgctgcagcaggcctgccaggcggtgatggccggcgagccgacgtgggcggacgcgcatctggcggcctgggataacgtgttcaaggcattcggcgccaaacccaaacgcaccccctgttcggcactggcgctgcgcaaacgcgtacagcgcgacggcatgatgcccgccatcgacccggtggtggatctctacaacgcggtcagcctgcgctatgcggtgccggtcggcggcgagaacctggccgcctacgccggtcagccgcggctggtcatcgccgacggcacagagctgttcgacaccatcaaagaggggcagccggcccacgaagcgccggaagcgggggaagtggtatggcgtgatgataccggcgtcacctgccggcgctggaactggcgtcagggcgtcagaacccgcctgagcgtggaaagcccgctgatgtggtttatcctcgaaagcctgccggagatgccgctcgaggcgctgcagcaggccggcgacgcgctgatccagggactggaggcgatgatgcccggcgcggcagtccagcggcagttgatcgggccgggagcgtag

SEQ ID NO: 442658 - DNA, 609 bp, Serratia marcescens
atgaccaaaaaagtcaataaaacgaccgaggcgggggccgatgtcgtctcggtaagcgccgccgtcgccgggcgtatccgggagtttcgccgtcagcagaagctgtcgctcgacgaactgtcgcgccgcgccggcatcagcaaaggcatgctggtggaggtggagaaagcgcaggctaaccccagcatcgccattttgtgcaaaatcgccgccgcgatggggctgtccgtcgccgatattgtcgatgtcgccagtaaaccgcaggcgcacctgatctcacagcaggacattcccacgctgtggcacggaccgcagggcggcagcgcccggctgctggccggcaccagcggcccggatatgctggagctttggcgctgggacatgcagccaggtgaagattttgcctcagaggggcatccggcaggcaccacggaactgctgcatgttgaaagcggtagtctgaccgtgcaggtcggcgatgtgtcgctgacggtgccggcgggcagctccgccgtcgccaaaaccgatgtgccgcacgcctaccgcaatcagggcgcggatgtgctggtgttcaccatgacggtgatggaacgccatatttatcagtag

SEQ ID NO: 442659 - DNA, 624 bp, Serratia marcescens
atgcgctttatcgtcatcaggcatgcagaatcacagggaagtcgcgaagggatcattcagggacagcatgacagcccggtgacggccgatggctatcgccagatcgcagcactgatggcggcgctgaaagacaccacgctgacgcagattttcagttctccttccggccgggcaatgaccaccgcgcaggcgctggcggcgcactgcaagtgcgttgtgcgcagcgatgagcgcctctatgaacaacatttcggctgttatcagggccaatcctaccatcaggccatctccagcgacccaagcggttttgcccgtatttttgccggcgaaccgacggcgactgcgccgcagggcgagtcggcgctgcaggtggtacagcggctgatgtcttttttccgcagtttccccgccggctcctgcggcaccgccggggtggtgacgcacggccatgccattcaggcgctgatctggcagttacagggcgccaaccccaaagaagaaaccagcaagtacggccatctgagcggcagctattcgattgttgaagccggcagtcaggggctgacgctgcagcactggggcatcgccagccatttacgcgcgttgcgccgctcgccgatctga

SEQ ID NO: 442660 - DNA, 750 bp, Serratia marcescens
atgacgttgcgtaatgagataggacgtatcctgattaccggcgccggaggccgggtggccaccgtctatcgacgggctatcgccggacgccatgcgctgcggctggcggagcgcgataccgccctcctgaccgatatcggcgcgcatgatgaaatcatcgcctgcgatatccgcgacctgcaggcctgccgccgcgcctgcgacggcatcgacaccgtgctgcacctggccgccgacccctcgcccgacgccgatttttgcggctcgctcaaagacaacaatatcctcggcacctttaatatcttccgcgccgccaaagacgccggctgccggcgcgtggtgttcgccagcagcgcgcaggcggtggaaggctatccgctggattatcaggtgcggccggacgacgcgccgcgaccgaaaaacctgtacggtgccagcaaggcgttcggcgaaagcatcgccgcctattttgcctatcaggagggattatccgcgctgtcggtgcgtctcgccaacttctgcacgctggagccgggccagcaggtcagcgcccgcgatatgagcgccttcctcagccaccgcgacgctgccgacctgctggaccgctgtattcgcgtcgatggtgtgcattatgcggtagtgcacggcatctccgacaaccgctacaaacggctgtcgctggaggaaacctcccgcctgctggattatcacccgcaggatgatgctttccgtttattggggtttgtctga

SEQ ID NO: 442661 - DNA, 606 bp, Serratia marcescens
atgagcgcaacgctggtagaacgtgcgcgccgctatgccaccaaggcgcatgcggccatcgatcaacgccgtaaatacaccaatgatccctatattgtgcatccgcaggcggtgatggagctggtccgcagcgttccccataccgacgaaatgctggcggcggcctggctgcacgacacggtggaggacacgccaaccacgctggccgacctggaaagccgctttggcccgcaggtggcggaactggtcggcatgctgaccaacgtcagcacgcccggcagcggcaaccgttaccagcgtaagaatgacgaccgacgccacagcgcgcaggcctcaccgcaggcaaaaaccatcaagctggcggatttgatcgacaacacccgctcgctgctgacctacgacagccacttcgcccgcacctatctgattgaaaaacagcgcctgctggaagtcctgaccgaaggggatcgccaactctggcagcaggcccaccatatcgtcgaacaggggctggcggcgctgctgctgccgccgcacagcgtacccgccagttggtttgagcatgcgcgtcagcgctaccgcgacagtgaacgcgcatccgcctga

SEQ ID NO: 442662 - DNA, 459 bp, Serratia marcescens
atgaaagataacaatacattcaacgaaaaaaacgcgctgcagctcgatcaacagatgtgtttcgcgctctactcggccaacctggcgctgcataaggtgtatcgcaaactgctcagccagctggagctgacctatccgcaatatctggtgatgctggtgttgtgggagcgggatgagatcaccgtatccgatattggcgagcggctgtttctggactccgccacgctgacgccgctgctgaaacgtctggaggccgccgggctgttggtgcgctatcgtgccgccgccgacgagcggcaggtgattattgcgctgaccgacgccggccgtgcgctgcgcgccaaggcgcagtcggtgccggaagcggtgatgtgtgcttctgcctgtagcctggaggacgtacagagcctgaagcagcagctggaaacgctgcgcggcaacctgctcggacaggtgtaa

SEQ ID NO: 442663 - DNA, 1740 bp, Serratia marcescens
atgaacaaagttaaatcgctatcacagcagaatttatcgttattgttagcgatctatatcggcatctttttaaacctttccgttttttatcgtcgttttgattcatttgcgcacggcattcaggggattaaggttgtttccgcaataacggaagttgttgctatcgttctgttcaccttctttatcatgcgtctgatatcgctgggcggccggttgttttaccgcatcgtcgcctcgctgctggtattgatctcggtggcggccagctattacatgaccttcttcaacgtggtgatcggctacggcattatcgtgtcggtgatgaccacggatatcgatctgtcgagagaagtggtcggcatgcactttgtggtgtggatgctggtggtcagtgcgctgccgctgctgctgatctggcgcaacgacctgcgtgatacgctgattgaacagctgaaaacgccgggccggcggctgaagccgctgctggtgctgctggcggtggttgcgctggtgtggctgccgctgcgcacgctggataaagagcagaccgcgcaggagaaaatcaccaatatcgacctgccgagctatggcggcgtggtggcgcactcttacctgccgtccaactggctgtcggcgctggggctgtttgcctatacccgctacgatgaaagccaggacgccgccaatatgttcgacccggcgcagcactttacctacgtggcgccggacggcctcgatgatacctatgtggtgtttatcatcggcgaaaccacccgctgggaccatatgggcatgctgggctatgagcgtgacaccacgccgaagctgtcgaaagagaaaaacctggtggcgttccgcggcgagtcctgcgatacctcgaccaagctgtcgctgcgctgcatgtttgtgcgcgaaggcggcacctcggacaacccgcagcgcacgctgaaagagcagaatatttttgcggtgctgaaagaactgggctttacctccgagctgttcgccatgcagagcgaggtgtggttctacaacaacaccgacgtgaataactactccttccgcgagatgatcgcctccgagaagcgcaatgacggtaaatcggtcgacgatatgctgctggtggatgagatgaaagagtcgctggcgcgctatccgaagggcaagcacctggtggtgctgcataccaaaggctcgcactatctgtactcgcagcgctatccgcgcagctatgcgcgctatcagccggagtgcatgggggtggatgatttctgttccaaagatcaactgatcaacgcctatgacaacaccgtgctgtataccgacagctttatcgataaggtgattgaccaggttcgcgataagaaagccatcgtgttctacgctgccgatcatggcgaatcgatcggcgagaactcgcacctgcacggcacgccgcgtgagatggcgccgccggagcagttccgcgtgccgatgatcgtctgggcctcggacaaatatctggcggacgaccataaccgcagcgcgtttgagcgtctgcaggcgcagcagcgggtgggcaaatcccaccgtcacgtcgagctgtttgacaccattctcggctgcctgggctatacctcgccggacggcggtatcgtcgccaagaataactggtgcaacaaccctaatgcggcaccggtatcggccaaggcgacgcctgctccatcggcgccggctgccggcgcggtcgccaagccgtaa

SEQ ID NO: 442664 - DNA, 432 bp, Serratia marcescens
atgaagcgttacgctgcgttacttatttcctctgtgttattgtccggttgcgctacccaggctgtaccgccacaggaggctaaatccccgccgccaagccggctgatgctttatcaaaacctgccgactacgccgtatgccacggtggttgtggtgcgtgacagcggcatgctggccggaagttgccggaccggtgtctacgttgacggtgagtttgccgcgtcactggcgacaaaagagaaggcggagttccgcatgccggtaggcaatcatgtggtcagcattggtcaggatatgatcgaaagccacctgtgcatctggcgcgaaaccgccgggcagcaaccgatgaccctgcgtgccggagacgtccgctacctgcggattggcggtgatatgcagagcggttttatcctgaagccaggacgcggttaa

SEQ ID NO: 442665 - DNA, 216 bp, Serratia marcescens
atggtcaagctttactactccctgtgcggcatcgtttttatcatcggcatcgccatgtctattctcagcgtagagttccccggcagcaccgatagtggcgagatgccattagcttttggtgccggcctggatatcgcatttatcggcattatcggctttgccgtaggcctgatagcaaaatgcctctcgacgatggtaagaaagaaaaacagataa

SEQ ID NO: 442666 - DNA, 189 bp, Serratia marcescens
atgattggaagcctgctcgggtttgttctgctggtcagcccttgtggttatgatgcgtgcgacgcactattggctactgaaacggtttacccgacccgctcggaatgcgtggcggtcaaagacgctatccaacggcgtcttcctgacgtcgtgctgttttgcaccgaagcctatcgatatgaaaactga

SEQ ID NO: 442667 - DNA, 261 bp, Serratia marcescens
atgtgtcgtaaaggtgtctatgtctttgcagaccacggggttagtgctgccggcataaaaaaagacatgcagatgcttctcggggaagtacacaaggtcatcgccattgcgaaagctgattacccgaaaaggcgagccttccgccgttttattgcgttttacacccgccgcaacctgaaagtggcgttcagcccattccaacgtggtcaggccatagttaaagcgcgtgaccgtcatcaaggcccgttctgggcaatctag

SEQ ID NO: 442668 - DNA, 345 bp, Serratia marcescens
atgccgcgcagcaaagcgacgcttatactcacctgcattttcctctcctcaaccctcgccgcctgcgccagggaggaaagcgcccccttcacccccgatcctcaatgccaattcacccacttggcaggcaaacatatcacggccgttcagctatgcgccgatgcaaaaacgggaaatacggttaccgtaatcaaagacgggcaagcctacgatgttgcgcacatcgcctatacccgcttccaacgcttcaaattcagcgccgatcccgatgccttcttcagcaaggtgattgagccgaaccatacggtgacgccttaccagggaagcacgcgtccacacggctga

SEQ ID NO: 442669 - DNA, 762 bp, Serratia marcescens
atggctgtcgatcataatggatatatcaccacgccctgtgcggtcaccttccaacctgcgtttggatgcgttattgatgacgcggtacgtcagctgacgaaaacgctgggcggcgttatccatagcatctatgtgtatggcagcgttgcacgggggaaagcgacggtggggagctcggatctggatctctgcatcatatttcatcgcccggtcctgccggatcaggacactgcgctggcgtctgtccgtgtgaagcttgagaaggcgcaccccgttgtcagcaagattgattttgactgcggcatcctgtcagaggcattggcggcagagtaccggcacagttggggttattggctaaaacatcattgtcgctgtgtgtatggtgtggatctgaccgagcagtttcctcgttttaaaccttcacgagccattgccatggcggtaaacggggactatatcaacgtgttgaacggctatatcgcgcgtattgaacatgcggacgatgttaatcagtacgcgcgcttacggcagtcggcggcgaagaaactgatccgcgccacaagtttgtttcgcggcgagtgtgatagcgactggccggacacgcttgaagagcatgcgataaagtttatccgtcaatacccggagctaacggacgagatcgattacttccttaagcaaagtaaaaatacagcagggcgagacggtgaatttatcgctcggttgcgggcggtaatgaggcaactggttcagttggaaaattag

SEQ ID NO: 442670 - DNA, 1203 bp, Serratia marcescens
atgatgtttgacctgaagaaaacaaacaatagggaagcattttttctttattcgaatgcggaagggaatgtgtctaagcatgcggtcatgaacgtggtcaacaaaggcgattatattcaggggtattcggtcagtcgccgcagttatcgaacattcagaaaagagcgcattgtgacaatgtttgatactcaagctgaactggaggcgttcgacctggcatcgggatgccgcgatagcgttgagccggcgcctatctcacgcagccaattatcacaaaacggcagtctggaaatttgttttacggggtttaataaacaggaaaaggatgagcttaccgctcttgccgcttcgtctcggcttaaagtgagaagcggtgtgacggctaagctgacgtttctgtgctgtggcgctaatgcgggctggcgaaaaatcgaggaagcaaatgccaaaggtgcgctggttctgagcggcgatcagttccggcattttatggcaaccggggaaattccctataaatccgaagaagttgacagcatacacactgaaaatgacgcaaccgacctcgataagttgcaggctctgaaggagaacatggccgctacgtttaatacgctaaggtccttgccgcgcagcaatattttaattgcgcaatttgtcgacggttatgcggtcggctggcgctttgccgtgaagtccgtgttcaaagaggcattagatatcaaacaaacgacggcggtctttgatggctataagtatgaaacctggacgcaggggaatcgctacgcgtttcatcgcggtgatgcgttctatagcgataaactcggttattcggactggccagcatttttaaaactcaaacatgccgctattttaaaggtccggtttgagtgctttgcgggttatgaaacggttgcgacgctggatggccttttttccggcgattttgttccggaacatctgattaccgaacctaaagtatttgaccgcctgcctctgcgcattgaaagtcagtcttacgacccggggacgctggttattgatgtgttacgtccgacgccggatcaggagcgggttgagcgggttgaaacgctgtctttaacccaggatgagtttatcgccctgttgcaaacgggatattactggaaaaaagagaaagggcatgcgccggcgaggatagatatcctgggggaagacggcgtataa

SEQ ID NO: 442671 - DNA, 1041 bp, Serratia marcescens
atgtcttcttcaattaaaaacagcgttaagcgcccgacccttgccgaggtcgccgagctggccggcgtttcgctgggcagtgcttcacgggcgttatcggttcccgaaagggtcaaacctgcgacgctgcagcgcgttcgttctgccgttgagcaactgggctatgtgagcaacggggctgcgcgtgcgctggcctcccggcgcacttataccatcggcgccgttttccccacgatgtataaccaggcttttgtcgatgccttacagaccttacaggcaacgctgtggtcgatgaattatcaggtcattttggcaacgcatgaatatcaggccgagcgcgagtttgacgtgatcaaaacgctggtggaacgcggcgttgagggcatcgttttggtgggttctacgcatgaggaacgggtttatgagctgctgcgccagcgccagctgccgctggttctcacctggcagatggatgagcctccttatggtgtcagtatcggtttcgacaactggcatgcaacatatcggatggcgcaggaggtgattgcgctgggtcatcagactatcgccgtggtctgcggcagccaggcaaataataacagaagtcgtcagcgcgttggcggcattgtgcaggcgatgaaagaacgccggttacggttagacgagtcgcggatagttgaggcgccattcaccattgaaggcgggcgagaggctgcccggcgactcctggccgatggtaaaccaccgacggccattttgtgcatgacagatgtacaggcgctgggcgtgcttaatgagcttgagcaggctggctggcgggtgccgcaggatatatcggtaaccgggatggacaacattgagttttctgcgctgacgcagcccgcattaacgaccattgacgtgccgtcgcgcgatattggcacattggccgcccggcgcattgtcagcatggtggagcaaacaacgtttaccgggcgtgccgaattggcgtgttccctgatcttccggcaaagccttgcggcgccgagggaaacgacataa

SEQ ID NO: 442672 - DNA, 969 bp, Serratia marcescens
atgaattccctgccaacccgcctgcgccgcctgagaagttccgaggcgcgtcgctccctgttccaggaagatgaattacggctgtccgacctggtgttgcctatcttcgttgaggaaggcacctcggaatatctggagctgaacgcactgccgggcatcaaacgcatccctgaatccagactggcttttgagctggaaaaatacgcgaaaagcggtattcgcagcattatgacattcggggtatctcaccataaagacgatatcggcagcgatacctgggacgagaacggtctggtgtcgcgtatggcccgtatctgcaaagataccgtgccggaaatgatcctgatgtcggacacctgtttttgcgaatacaccacccacggccactgcggcgtagtccacgaccactccgtcgacaatgatgcaacgctgctgaacctgcagaaacaggcagtggcggcggcacatgccggcgcggactttatcgccccttctgccgcagcggacggccaggttcaggccatccgtcaggcgctggacgaagccggcttcggcaataccggcattatctcttattccaccaagttcgcctcttccctgtacgggccattccgcgaggccggcggcagcgaactgaaaggcgatcgtaaaacctaccagatgaacccgatgaaccggcgggaagcgctgcgcgagtcgctgattgacgaagccgaaggcgctgacgcgctgatggttaaaccggccagctattacctggatgtcatccgcgatatccgcaacgccagcactctgccggttgcggcctatcaggtcagcggggagtacgcgatgattaaattcgccgctgccgcgggcgcgatcgatgaagctcaggtggtacgcgagtcgctgtcgtcaatcaaacgcgccggcgcggactttatcttctcttacttcgccgccgatctggcgcagcaaggactgtaa

SEQ ID NO: 442673 - DNA, 219 bp, Serratia marcescens
atgtcgattaccgttaaaagcaagaaagaagctaaagttgccatctcgacagggaaagcaaaacgcatcaggctcgattatgcggttagcgctgatgatgtttcagagctgacgatgatatgccgtgagaaaggcgcaaatatcatcaaagacaatgataattttatcattgccatgggcaaccctagcatgcctaaagtggccagcttcccgttctga

SEQ ID NO: 442674 - DNA, 228 bp, Serratia marcescens
atggttgattacagtctgtacgggatgccgcaagataatgccaaaatctaccgggaaaagctgatggttattttcggtgagagcgtgttgcatttgatttcgtcacaacgcatggtgaataaagataatattatgaaatatctggtgcaggaaattgagcgtcagccggaagatattcaaaaatattatcgcgttgctctggaaaccgtcggcgttcatgcgcgttga

SEQ ID NO: 442675 - DNA, 615 bp, Serratia marcescens
atgcagtaccgtactaacctcaatattattgtaaaaaaactctctttctttctgctctattcagcaacgctggccgtgctgatggggctgatttttattgatgtttattggctacataactttgtctatgaaatgtcgttgacggagctgatgcaggaactgtttcttgccgctatcgcggtcggtttctttgtctccgctcgtcgccatgtcgagtatcgcgctgccagggtattgattggcggcttctttctgtgcatgttgattcgcgaactggattttgtgttcgattatctgcatcacggcgcctgggtgtggtttgctctgctgagcacggtgctctgtctgggatacgcggttcgccatgcggcttcagcgctgcatgggttagcccatttctttaaccatccgagctacggcatgatgtgtgccggcttactgtgtattctggtgttttcccgtctgttcggcatgcacctgttatgggaaggtttactgctggatggttatgaccgggtggtaaaaaatatggtggaagaggggtgcgaattggtcggctatgcattctgcctgtttgctacctgtcagtatctggcgaaaccccgccagatgtga

SEQ ID NO: 442676 - DNA, 300 bp, Serratia marcescens
atgtctgaatccgctcaactgcaggaactgatgcaacgtatcgccgtgctggaagcgcgggagaaggcgctgactgcggaatccaatgcttaccaggcgatcctgacgaccctgttgggtaatctggataaatcgttgcgtgataatgttatcggcatgatcgatcgcgcccatgaaattgcctatgcacgtgcgatccaacgcggcaacgccgtgcaacaggacaggatcaaacaggcggatgacgttgcgcagcggatgtttatgtttgcccagggcaaagcctcgcagccgcgttag

SEQ ID NO: 442677 - DNA, 504 bp, Serratia marcescens
atggacgcgataaaaaacattctggtgaaagagatcgagctgatcaaccagcgggaagggcgtgacggtaagccgcgtttcaacagcgaatttgcccgtaatcaccgctatctgtgtctggcgatgttcgccggctatttcgccgtgattgccgtgatgtatccggtgccctatttagggcttggggcgctacttggctttaccgcttttgtgctgtttatgtttgccatgttgctgatggagatcaagcccgtttaccgctttgaagatatcggcgtgcttgatttacgcgtttgttataacggcgagtggtactttacccgcgcgctgccgtcccatgcggtggctgatttgctggcggaaccgtcgattagcccgcttttgaaagcgcgcgtacgcgaaattttagccaacaagggcgaggtcgatttctatgacgtctatgatttggcctacggtaaaaaactgcatacgcccgccgcatcggttgctctggtcaactaa

SEQ ID NO: 442678 - DNA, 132 bp, Serratia marcescens
atgagtgatgagatttttgattttgatattgacgccgaactcgcgaaagcagaaaaaaaagcggcggagaaggccagtgaagtgcctgacatccttgaggatgaggcggactgcgaaggctgcaaaatttaa

SEQ ID NO: 442679 - DNA, 225 bp, Serratia marcescens
atgaccgacccaaacaccacggcccaagacgccgcaccagccaatgccacattacttaaaatcctgggcaggctgctctccgcgctggacgcctcaataagcggcaaggatcgcagcatactggtgcacgacctgtcccacttcaatcttgatggcgtttccgaagcggaaaggaagctggcggcggaattaatcaaacgcgccctacaatccctcgaccattaa

SEQ ID NO: 442680 - DNA, 1134 bp, Serratia marcescens
atgactaacggaaacaaccagcgcgagtttttcctggattctatccgggcatatttaatgttgctcggcatcccttttcatctttctctgatttactccagccatacctggtcggtgaatagcctcacgccatcattttcattaacggtgttgaacgatgtcatccacgctttccgtatgcaggtgttcttcatcatctccggctacttctcctttatgttataccagcgttatgaacgtaaacgctggctcaaggtgcggctggagcgggtggccatcccgctgttaagctccatccccttaattaccctgccgcagtttttcctgctgaaatatgcgacgcataaactggacggctgggacgggtttgacctctatcagaaaattaacgttgccgtttgggagttagtgtcccatttatggtttttattaacgctgtcgctgctcacctgcgccgctttttacctgttccggaaaattaaggcgataaaaacgcctatcgcgccgttcccgataaataatatgaacagtttaggaaagatctcactgtacttctttatctacgggatagcctattcggcggcgcaccggattattttaattaccgctccgcaactacccggcaacggtctattcaattttgtggtgatggaaacgctgttctacctgccgttcttcctcctcggcgcctatgccttcaaatacgcctggttaaaagagattttcctcaccccttcacccaaggcggtgctgggcgcgctgttgctgtttatcgcctatatgctgaaccagaagctgctggctcatagcgacctgatgtttgaagtggaagtcctgatcaagatcgtgctgggcatcctgatgaccaacgtggtgttttcattcggccaccgcctgttgaactatcattcgccacgtatcacctatctggtgaacgcttccttatttatctatctggtgcaccacccgttgacgctgctgtacggcgctttcgttacgccatatatcagtaataatattatgggattcttggtgggactggtatttgtcttcggtctggcttttatattgtatgaagcgcataagcgcgtaccgctgctgcgtttcctgttttccggcaaaccacagaagtaa

SEQ ID NO: 442681 - DNA, 546 bp, Serratia marcescens
atgatcatcaggccggcccagcccgccgattaccccgccattctggcgctgcaggcgcaaaacgtgccggagcatctcagcgctgaacggcggcggcaaggatttatcgtttcgaaaatggatgaagcccagcttgcgcgcatcaatgcggagctaggcattctggtggcggacgcggaaggacaactggccggctttgtctgcctgacgcaggcgcatatgcagcctcgccctgaggtcgtcgacgccatgctggccacactggacgtacagcactttgacaaccggccgattcagcagctgcgctattttctctacggcccggtttgcctggaccaacgctggcgcggcaaaggggtgctgaaacaactgtttgcggcggtaaaaaaccatacgcgggcatcgtacgatctgggagttctgtttatcgacgacgctaacccgcattcgctcgccgcccatcagcaagggctgggcatgacgacggtcacgacatttacctgccggggcaagcgctattccctgctggcattcgccacccgctag

SEQ ID NO: 442682 - DNA, 378 bp, Serratia marcescens
atggacctgtatgacacgctggaagaagcgattgaagcagcgcgcgaagcctttattgagtccaccgacggggaagatgacgaaccgccggcggcgcaacagttcaatttgcaaaaatacgtgatgctggatggtgatatcatgtggcaggcggagttttttgccgaagaaggcgcgtcgacggagtgcctgccgctacgcagcggcgccgccgcccaggccatttttgccggcgactatgacgacatagagatccgcgaagagtggctggacgaaaacaccctttatgaatgggacgacgacgatttccaactggaaccgccgttagataccgaagaggggaaaaccgcagccgacgaatgggatgatgaccgctaa

SEQ ID NO: 442683 - DNA, 399 bp, Serratia marcescens
atgctgcctaaaaataccgttctgcgtatagcacggcccaccgatcggctgcagcctattgcggccatgtattgcgatggcctgggatttagccggttaggggagttttacgatcatcagggttttgacggtgtgatgctggggcatccgcaccatgcctatcacctcgagtttacccatcatcgcggggaatcggcggggcatgcgccaagcaaggacaatttattggtgttctacctgccagatgcctccgaatggcaggcgcagtgccggcaaatgctggcggcgggctttaaccgggttagcgcctataacccgtactgggatattaacggtcagactttcgccgatctggatggttatcgtgtcgtactgcaacggcagacgtggcaggcataa

SEQ ID NO: 442684 - DNA, 1239 bp, Serratia marcescens
atggctccggtatcagaacctattaactggaaacgcaacctcttcgtcgcctggctcggctgctttcttaccggcgccgccttcagcctggtcatgccctttttaccactctacgtcgaattgcttggcgtctccgggcatgaggcgctgaacctgtggtccgggctggtgttcagcattaccttcctgttttccgccgtcgcctcgcctttctggggcggactggccgaccggcgtgggcgcaaactgatgttgctgcgctccgcgctgggcatggccatcgtgatggcgctgatgggtatggcgcaaaacatctggcagtttctggcgctgcgcgcggtgctcggcctgctcggcggctttattcccaatgccaacgcgctgatcgccacccaggtgccgcgcaaccgcagcggctgggcgctgggcaccctctcaaccggcggcgtcagcggtgcattgatcggtccgttgatcggcggcctgttagccgaccagtacggcctgcgcccggtgttctatatcaccgccgccgtcctgtttatctgctttatgctgacgctgtttttcgtcagggaacagttcaccccggtacaacggaaagatatgctgcacgcccgtcaggtgtttgcctcgctgaaaaaccccagattgattttggcgctgttcgtgaccaccatgattattcagatcgccaccggctctattgcaccgatcctgacgctgtacgtgcgcgatttggccggcgatatccataacctggcgttcgtcagcgggctgatcgcctccgtgcccggcgttgccgcgttaatcagcgcgccgcgtctggggaggctgggcgatcgcatcgggccggaacgtattctcgtctgtatgctgctgttctccgtattgctgctgatccctatggcttttgtgcagacgccatggcagctggcggtgctgcgtttcctgcttggtgccgccgacggcgccctgctgcctgcggttcagacgctattaatctacaacagcagcaatcaggtggccgggcgcatcttcagctataaccaatccttccgtgacgtcggcaacgtcaccggcccgctgctcggcgcggcggtttccgccagctacggttttcgggcggtattcggcgtgacggcgctggtggtgatgttcaacgcgctctattcgtggcgctgtctgcagcgtcgtcccaaacgcccgcaggagaaacagctgcaagaggagccataa

SEQ ID NO: 442685 - DNA, 285 bp, Serratia marcescens
atgtatattgtcagtctgacctaccatcgcccgattgaagaagtcgacagccatcttgaagggcatatcgcctggttgaaaaaatatttcgcccaaggtgattttattgccgcagggcgtaaaaacccgcgcaacggcggcgtaatcctcgccaaacagatggcacgttcacagctggacgccattctggcgcaggatccgtttaccgcggtggcgaactacgaggtgaccgaactggcggtaaccgccgccggcgaagatttcagcaacctgctcaacctgtaa

SEQ ID NO: 442686 - DNA, 921 bp, Serratia marcescens
atgacacaacttccttcgtttaatcgttccctgctgcatccgcgttattggctaacctggtttggcattggcctgttatacttgctggtactgctgccttatcccgtcatctaccgcctcggcacctcgctgggccgtttctccatgcgttttctgaagcgccgcgtggtcatcgcgcaacggaatctgacgctgtgtttcccggatatgccgcaggcggagcgtgatgcgctggtagtgaagaattttgagtcggtcggcatgggcctgtttgaaaccggcatggcctggttctggccggactggcgcatcaaacgctggtgccgccctgaagggctggaacatatccagcaggcacgcgacaaccaacagggcgttttgctgatcggcctgcattttttaacgctggaattgggcgcccgtattttcggtatctataaccccggcatcggcgtttatcgcccgcatgacaataagttgttggactggctgcaaacctggggacggatgcgctccaacaaatcgatgctggaccgcaaagatattaaaggcatgatccgcgcgctcaaacagggcgatatcatctggtatgcgccggaccacgactacggcccgcgcagcagcgtcttcgctccgctgtttgccgtagacaacgccgccaccaccaccggcagctatatgctggcgcggatgggcaaaccggcgattatccccttcgctccacgtcgtctgccggatggccagggttatgagttactgattcagccagcggtggaagatttcccactggacagcgaactgagcgccgccacccggatgaaccaggtggtggaacacggcattctgctggcgccggaccaatatatgtggctgcaccgccgttttaaaacccgcccggaaggtgaaccctcgctgtattaa

SEQ ID NO: 442687 - DNA, 1098 bp, Serratia marcescens
atgagccagttattcaaaccgatttcccttgggaaactcagcctgccgaaccgcatcattatcgcgccgatgtgccagtattctgccgaacagggcgccgcgacgccgtggcataccatgcacctcggcagcctggccatgtccggcgccggcctgctgattgtcgaagcaacggcggtatcgccggaagggcgcatttcgccgcaggacctggggttgtgggacgacgccactgaacaggcattggccgaggtcgtcaatgcggtcaaacagcacgccactatgccgctgggcattcagttaggccacgccggacgtaaagcatccaccgcagtgccctgggaaggcggcggccagataggccaggcaaacggcggctggcaaaccatcgctccctccgcaacgccgttccatcccgatgacgaagcaccggaggcgatgagcctgtcgcaaatcgcccagttgaagcaacagttcgtcgacgcggccaaacgcgccgatcgcctgggctttgagctgattgagctgcatggcgcccacggttatctgctgcatcagttcctgtcgccgctggccaaccagcgcgatgaccagtatggcggctcactgcccaaccgtatgcggctgctgctggagattttcagcgaggtacgtgcggtattcccggcgcacaaagccgtcggcgtacgcatctccgccagtgactgggtacaggacggctgggatgagcaacagtcggtagcgctgaccaaggcgctgaaagagctgggctgcgactatattcacgtctccagcggcggcctgtcaccgcagcagcaaattcccgtcggcccgaattatcaggtgcccttcgccgagaccatcaagcgcgagggtggcctgccgatcatcgccgttggtttaatcaccgaaccggagcaggccgaggcgatcgtcgccaccggccaggccgatatggtggcgctggcgcgcggcattctgtacaacccgcgctggccgtggcacgctgcggccaagctgggtgcaaaagccagcgcgccgccgcagtactggcgttcagagcctcacgtgctgaaagggctgttcagcaacggctaa

SEQ ID NO: 442688 - DNA, 555 bp, Serratia marcescens
atgctttggaaaaatacccccgaccgtttcggtcatctgtttattttgatccactggctggttgctcttgtggtgtacggcatgtttgcgcttggcctatggatggtcacgctgggctattacgacgtgtggtatcaccaggcgccggagatccataaaagtatcggcgtattgctgtttatcgtgatggtggtgcgcgttgtctggcgtctgatttctccaccgccaaaaccgctggccagctattcccgcattacccgcgtcggtgccgtactggcgcatctggcgctgtacatcattctgttcgctattcttatcagcggctatctgatatccaccgccgacggccaggcgatcagcgtgttcggctggttcgatgttcccgccagtatcagcggcatgggtgcacaggccgataccgccggtacgattcacctttatctggcctggaccgttgtcgtactgtcggtactgcacgctctggccgcgcttaagcatcactttgtggatcgtgatgtcactttgaaacggatgctgggtcgcagcgccgattaa

SEQ ID NO: 442689 - DNA, 1059 bp, Serratia marcescens
ttgagccggaatttattcatcgatcgcccgttacgtctggcgattatgctggcgatgatcgtggtgatccttgccgggattaaaacctcttcggaaattgtggtgccgtttttgctggcgatctttttaaccatcgtgctaaacccgctggttacccgcatggagcgatggcgggtgccgcgtattttgggcgtgatgctgttggtgacgctggtggtgatagtcctggtgatgttcatcggcatgatgggggcgtcgctgaatgagtttgcccgttcgctgccgcagtatcgtggcatgatggcggagaaaatgcatgaattgcagcgctatgcggaccgtttcaacatcgtgatttcggcggaggcgatcgtgcattatatcgatcccagcgccacgatgaatctggtgacgcgcatgctgagtcacctttccggcgccatgaccaacattttcctgctgctgatgacggtggtatttatgctgtttgaagtgcagctgctgccggcgaagctgcggcaggtattgagcaggcccactcagggcatcgccaacctgcagcgggcggtgcagggggtgacgcactatctggtgattaaaacggcgattagcctggcgaccggtattattgtctgggtctttttggcgattatcggggtgcgctttgcgtttatctgggggttgctggccttcctgctcaactttattcccaatatcggctcggtgatcgccgccgtgcctccgttgattaccgcgctgttatttaacggttttggcgatgcattggtggtggccggcggttttgtgctgatcaacctggtgattggcaacatcctcgagccgcgggtgatggggcgcggacttggtctgtcgacgctggtggtctttctctctctgattttttggggatggctactgggaccggtggggatgctgctgtcggtgccgctcaccatcattgcgcgcattgcactggaagccagtgaaaacggccggaaaatagcggtaatcctgggcgatggccgggatgagcacgctccggatcgccaggcagaataa

SEQ ID NO: 442690 - DNA, 621 bp, Serratia marcescens
atgaaactactcgtcgtggacgaatgcggttatacccgtctcggtattgccagctatctggccgacaatgccgccaataccgttacctgctgtgctacgctcagcgctgcggtacaatgcctccccagctgtaaccctacgcatattctgctgaatctgaccaactactgccggccaaatcaagacgacccatggttacaaacattaatcgacggcagtgccggggccgtgctgtttatttacctcgacactccctatccttacagcgatcggccgatgcgcattgccgataatgcgtttctgttcaataagggggcactgcccaaagcactgcgcatcctgcgcgatacgccgaatgcgttaatggaaagcagtctgcactcgctgttcagtccgcaggagttgacggtaatgaagtactggatggccgaggtaccaaactatcggatcgcccgtaaactgcagatcagcgcacataccgtttatgtgcataaacgccatatcacagagaagattaacgcccgtaaccggcttgagttttattcgctgtacaacatactgcgttttttttatccccctgatgcggccggcctgcgcaccatggtgcggatggcgggctga

SEQ ID NO: 442691 - DNA, 1116 bp, Serratia marcescens
gtggaatatgatttaatcgtcgtcggcagcggttccgttggcgccgccgccggctactacgccacgcaggcaggattgaaagtgctgatggtcgacagcgaaatccccccgcacagcaacggcagccaccacggcgatacgcgtattattcgccatgcctacggcgaaggtgaaaaatatgtcccgttattgctgcgcgcacaggcgctgtggaatggtctgacgcgggacagcggcgagcagctgtttcacgcctgcggcgtccttaacctggggcccaaagacgccgaatttatcgccaacgcccgacaaagcgcacgtactttccgcctgaatactcagttgctgagcgccgatgaggtacaacagcgctggccggagttcagcgcaccggcgcactatgtcggcgtcttcgaaccggatgctggctttctccgctccgagcaggccatcagacaatatattcgcctggcgaaagaggccggttgcagtcagctgtttaactgcccggtaacggcggttaacaccattgacggcggcgttgaagtcactacggcagaaggtagctatcaggcgaaaaaggttctgatcgccgccggtacctgggtcaaagcgctgttgccgcagctgcctatcacgccgctgcgtaaagtattttcctggcatcaggccgacggacgctacagcgaacccaaccggttcccggcctttaccgttgaagcacaggacggttgccactattacggtttccccgctgataacgacggtctgaaggtcggcaagcacaatggcggccagccgattgagacaccgcaacagcgcaaggcgttcggcagcatcgccagcgacggcagcgaagtgtttaatttcctgcgccagcatctgcccggcgtcggcgtgtgtctgcacggcaaagtctgtacctatgacatgagcccggatgaagactttattatcgataccgtgcccggcagtaaaaatatgatggtaatcaccgggctcagcggccacggctttaaattcgccagcgtgctgggtgaaatcgccgcgctgttcgcgcaggataaaaccatcccattcgatctggcaccgttctcgctgcagcgttttaactaa

SEQ ID NO: 442692 - DNA, 279 bp, Serratia marcescens
atggccctggacaaagaaaaatcagaagaagcaatgaccttcggcgaactgctgacggttattgccgatcaaaaacggcgccttagcgtgctggaagtcgccttctcctatctggccttcgggctggatgacaaagctaaccaattgctgatccatagcctgaagctggaagcgcaaaaccaaaatcgcgatgccgaaacgcaacagcacttcgcccaactggcagccgaactggaaaaacatcttcagcctcccgccgtttctcctgcagcagaataa

SEQ ID NO: 442693 - DNA, 240 bp, Serratia marcescens
atgcgtgttgaagtaaccatagataagaccaggccgctgccgccgggggcaattgaagccctgaacggcgaattgagcaaacggattaaccgtcagttcccagatacggtggttcaggtcaggtattccggcgccaacgggctatccgtactcggcggcgtcaaaacagataaagatctgatcgccgagatcctccaggaaacctgggaaagcgccgacgattggttcagtgccgaataa

SEQ ID NO: 442694 - DNA, 1050 bp, Serratia marcescens
atgacagcacaacctcaagccatgaaaattcgccgccctgacgactggcacatccatctgcgtgatgatgagatgttgaaaacggtcctgccctataccagccaggtattcggccgcgcgattgtaatgccgaatctggctccgccgatcaccacccttgacgccgcacagcgttatcgcgaccgcattctggcggcggtgcctgcggaacacaattttaccccgctgatgacctgctacctgaccgacaccctgtcggccgacgtgctgacagaagggtttaagcaaggtattttcaccgccgccaaactctatcctgctaacgccaccaccaactctaaccacggcgtcagcgatgtaacaggcatctatccgctgtttgaacaaatgcagaaaatcgatatgccgctgttaatccacggtgaagttaccgatgccgacgtagatatcttcgaccgcgaagcccgctttatcgcccaggttatggagccgattcgccgcagcttcccggagctgaagatcgttttcgaacatatcaccaccaaagatgcagccgaatatgtacaggccggcgatcgtttcctgggcgccaccatcacgccacagcacctgatgtttaaccgtaaccatatgctggttggcggcatccgtccgcacctgttctgcctgccgatcctcaagcgcaatatccatcaggaagcgctgcgcaaggcggtagccagcggctccgaccgtttcttcctcggcaccgattccgcaccgcacgccaagcaccgcaaagaatccagctgcggctgcgccggcgtgttcaatgcgccaagcgccatgccggcctatgccacggtgtttgagcagttaggcgcgctggagcacctggaagccttctgctcactcaacgggccgcgtttctacggcttgccggtcaacgaagactttatcgagctgcaacgaatcccttccgttcagcctgaagagattgctctgggtaatgaatccatcgtgccattcctggccggtgaaagcgttaactggacggtgaccgccagctaa

SEQ ID NO: 442695 - DNA, 288 bp, Serratia marcescens
atggaaattcgcgtggttgccactttgcaggctaaagcggagtttattgatggcgttaatgaagcggtgcatcagattatcgatgccagccgccaggaactgggaaatctgcagtacgatctgcaccgcgagctggataaacccggcacctttgtattctttgagcgctgggccagcgcggaggcactgaacaaacataatgccaccgaacacttccagcattttgtccgccagattgacggcaagctggatttgctggatatcaagcagctgaaaaaaatagcctga

SEQ ID NO: 442696 - DNA, 3327 bp, Serratia marcescens
atgaaaagaatgttgattaacgcaactcaacaggaagagttgcgtgttgcccttgtagatggacagcggctgtacgatttggatatcgaaagcccgggtcatgagcagaaaaaagcgaacatttacaaaggcaaaatcacccgtatcgaaccaagtcttgaagcagcgtttgttgactacggcgcagaacgacatggtttccttcctcttaaagaaatcgcccgcgaatacttccctaacagctattcctcccatggccgccccaacatcaaagatgtgctgcgcgaaggccaggaagtgatcgtacaggttgataaagaagaacgcggcaacaaaggcgccgctctgaccacctttatcagcctggccggcagctatctggtgttgatgccgaacaacccgcgcgccggcggtatttcccgccgcatcgagggcgacgaccgcaccgaactgaaagaagcgctctcttcactgcaactgcccgacggcatgggcctgatcgtccgcaccgccggcgtcggcaaatccgccgaagcgctgcagtgggacctgtcgttccgtctcaagcactgggaagccatcaagaaagccgccgaaggccgccctgcaccgttcctgattcaccaggaaagcaacgttatcgtccgtgccttccgcgattacctgcgtcctgacatcggtgaaatcctgatcgataacccgaaaattctcgatctggcgaaagaacacattgccgcgctgggacgcccggacttcagcagcaaaattaaaatgtacagcggtgaaatcccgttgttcagccactaccagattgagtcgcagatcgaatccgctttccagcgtgaagtgcgcctgccttccggcggttccatcgttatcgacaccaccgaagcgctgaccgcgatcgacatcaactccgcacgcgccacccgcggcggcgatatcgaagaaaccgcattcaacaccaacctggaagcggcggatgagattgcccgtcagctgcgcctgcgcgaccttggcggcctgatcgtcatcgactttatcgacatgacgccggtacgccaccagcgcgaagtagagaaccgcctgcgtgatgcggtgcgtcaggatcgcgcacgcattcagatcggccgtatttcccgcttcggcctgctggagatgtcccgtcagcgcctcagcccgtcgctgggagagtccagccaccacgtctgcccacgctgtaacggcaccggcaccgtgcgtgacaacgaatcgctggcgctgtccatcctgcgtctgattgaagaagaagcgctgaaggaaaacaccaaagaggtgcacgccatcgtgccggttcaggttgcttcttacctgctgaacgaaaaacgtgaatccgtcagcgccatcgaaaaacgtcaggccggcgtgaaagccgtcatcgtgccgaacgatcagatgcaaaccccgcattactcagtactgcgcgtgcgcaaaggtgaagaaacgccaaccttgagctatctgctgccgaagctgcatgaagaagagatggcgcagccgccggaagagatcccgatggaacgtaagcgtccggagcaaccggcgctggcttccttctctctggccgccgatgcgccgccgccggcggctgaacccgccacggcgaagaaaccgaccgccagccagccggctgtgccagccgcagcgccaggcctgctcagccgcttcttcagcggtctgaaatcgctgttcgccggtgaagagccgcagcccgtcgcggaagagaaaccggttgaaaccgcgaaaagcagcggcggcgagaaccgtcgtcaggatcgtcgtaatcagcgccgtcagggttctggccgtaaagagcgtggtgaacgtggcgatcgtggtgaacgtagcgagcgcaatgagcgtggtgagcgtaaggagcgcggtgaaggccgtgaacgcgacaaccgtgaaggacgcgaacgcgataaccgcgaatctcgtgacgagcagcgccgcaatcgccgtaacgccgcgaataacgcgccggtagccagcgatgcgccggttgatgaagccgcaaaagcgcagcgcgaagagcaacaacagcagcgccgcgagcagcgcgccgagcgtcagcgtcgtcgtcaggaagagaagcgccaggcacagcaagaagcgaagcagcaggagaaggccgccgtcgcaccggtagccgccgctgaagaagataaggaagagcgccatcagcaaccggctcagcgtcgtcaacgccgccagctgtcgcagaaggtgcgtatcctgtcagcagaagaagaactgcagcgcgctgcggaagagctgctggcgccaaaagcaccggcggaaaccgctgaggaagccaaagcgcctgcggcagacgacagcgttaaactgctgccggaaaccgtagccaccaccggcgaagaagaaactcaggaaaaccgtaacggtgaaaacggcatgccgcgccgctcacgtcgttcaccgcgtcatctgcgcgtgagcggccagcgtcgtcgtcgttaccgcgacgagcgttatccgacccagtcgccgatgccgctgacggctgcgtttgcctctccggaaatggcgtctggcaaggtctggatcggttaccctgtcacaacagctgcgcaagcggttgaagagactgaggttaagcgccagcctagcgtcacagctgaacagcagccggtagcggaagttgccgccagcgttgctgcgccggcaatcgtcgccgcccaggaagaggttcaggctccagtcgccgccgctaacgtcgaaccggctgaaagtgcgccagttgccgcgccactgcaggaagaggccaaagcgccgcagccggcagccgttgaggcaccggccgacgtcgccagcgatgttcagcctgcggctgaggccacaccggccccggctcagcctgaagagcagcctgtgcctgccgccgctgaaccggcagccgacgaaactgccgttgaagaagctgaagaaaaagcggtagctgcagagaaggccgttgaggaaccgaccattgcggcgccagccgaagcggtcgtcagcgaaccagctccgcagacggcaagcgatgaggcagcggcagcccctgcgccagtcatcgcggctcagccggcagagacgcgttacaagcacatcgccagcgcaccgatgaccaaagcgcctgccccggcttatcagccggaagcgccgaagcacagtgactggcagcgtccggcctttgattttgaaggcaaaggcagcgccggtggccactcggcggtaaaccaggccaccgccccggccaccaagccacagccggttaacgattaa

SEQ ID NO: 442697 - DNA, 582 bp, Serratia marcescens
atgcaacaacttcttctggcctccacctccccttaccgcaaaatgctgctggaaaaactgcatttgccctttatcaccgccgcgccgcaggtggatgaagcccccctgccgggcgaaagcgccgaagcgctggtgctgcggctggccgccgccaaggcacaggcgttggcggacgcctaccccgatcgcctgatcatcggttccgatcaggtgtgcgtgctgaacggacagattacgggcaagccgcacagcgagcagcaggcctgtgaacagctgcgccaggccagcggcaatatcgtcaccttctataccggcctggcgctgtacaacagccgcacacagcatcttcaggcggtctgcgagccgtatcaggtgcatttccgccctctcggcgcggaggagatcgccaactatgtgcgtatcgaacagccgctgaactgcgcgggcagtttcaaaagtgagggactgggcattgccctgttcgacaaactgacgggccgcgatcccaacgcgctggtcgggctgccgctgattaccctgttggagatgttgcgggccgaagggatcagcccgctggcataa

SEQ ID NO: 442698 - DNA, 1005 bp, Serratia marcescens
atgggcggggacttcggtccctgcgtcacagtgcctgcttcattgcaggcactggcctctaatttacaactccatcttctgctagtcggcgatcccgacgcaatctctcccttactcgccaaagccgatccgcatttgctggagcgtctgcacgtcgtgcccgctacatcggtaatcgccggcgacgccaagctttctcaggcgatccgcgccagccgcggcacgtctatgcgcgtggcgctggagctgataaaaaacggtgaagcgcaggcgtgcgtcagcgccggcaataccggcgtgttgatggggctggccaaactgttgctcaagccgctggacggcattgagcgtccggcgttgatgacggtgcttccgcatcagcaacatggtaaaacagtggtgctcgatctgggcgcgaatgtggaatgcgacagcacgatgctggtgcagtttgccgtgatgggcgccgtgatggcggaagaggtggtcggtatctcacagccgcgcgtggcgctgctgaatatcggcgaagaagagagcaaaggtttagataatattcgcgaagccgccgctgtattaagaaaaactccgacaatcaactatattggttatctggaaggcaatgatctgctcacaggtaaaaccgatgttatggtctgcgacggctttgtcggcaatgttacgctgaagacaatggaaggcgtaataaggctatttttatcgctgctgaaatcgtcaggcgacggtggcaggcaggcgtggtggttaaaattgttgggccgttggttacaaaaacgggtggcgaaacgcttcggccacctgaaccccgaccagtataatggtgcatgtctgttaggattgcggggcaccgtaatcaagagccacggcgctgcgaaccaaaaggcgtttgcggtagctattgaacaggctgtgcaggcggtgcagcggcaaatccccaaccggattgcggcgcgccttgaggctgtattacccaagagtgactga

SEQ ID NO: 442699 - DNA, 798 bp, Serratia marcescens
atgtactggattaatggaacgcagagtgacgcgctggcggctggcgaccgcggtatacagttcggcgacggctgctttaccaccgcacgcgtggttgatggccggatagatctgctgtcctggcatcttgaacgcctgcagcaggcatcacagcgcctgctgctgccgtcgctggactgggcggcactagagcaggaaatgcgtcaggcggcagaatcaatcccgcttggcgtggtcaaaaccatcgtgacgcggggcgtcggcgggcgcggctatagtcctgccggctgtgagcagccaacccgtatcgtgtcatgcggtgcgtatccgcagcactacctgcagtggcgcgagcagggcgtcagcctggcgctaagcccggtgccgctggcgcgtaacccgctgctggcgggcattaaacatctgaaccggctggaacaggtgttgatccgtgcgcatcttgagcagactgacgccgacgaggcgctggtgcttgacaccgcagggctgctggtggaatgctgtgcggctaatttattctggcgtaaggggaaagcggtatatacccccgatttgagtcagtcgggcgtggcgggtttaatgcgtcgccgggtgattgagttactgacggacagcgaatatacgctgcattacgtcgccgagccgccggaaacgctggcggcggcagaagaggtgttgatcagtaacgcgctgatgccgttattgccggtcaataccgcccatttgtggcgctatgattcgcgccagctttatgagtttttacgacaccaaatttaa

SEQ ID NO: 442700 - DNA, 1020 bp, Serratia marcescens
atgaagaaagtaaagtttgttgcactgctcgtcgtcgtgattttggccctgctgttctggggctatcagaaggttgaacgctttgccgatacgccgctggcgattaagcaggagactatctttaaactgccggcgggtaccggacgggtggcgctggaagggctgctggtgcgcgacaaactgatccgcagcggcaaatggttcccgtggttgctgaagattgagccgaaactggcggagtttaaagccggtacctatcgtttcaccccggggatgacggtacgccagatgctggagttgctggccagcggtaaagaagcacagttcaacgcacgttttatcgaaggatcgcgcctgagcgactggatgagtattctgcagcaggcaaaatacctgaagcatacgctggccggtaaaagcgaggcggaaatcgccgctgcgctgggcatgccggaagatgcgcatccggaagggcgtctgtacccggatacctattcctataccgccggcatgagcgatatcgctctgctgaaacgagcccatgtgcggatggaaaaagcgctggacgacgcctggcagaaacgtgacaaggcgctgccgtataaaacgccggagcagctgctgaccatggcctccatcatcgagaaagagaccgccgtggcggcggagcgcggcaaggtggcgtcggtattcgtcaaccgcctgcgcatcggcatgcggctgcagaccgatccgacggtgatctacggcatgggcgcgcgctatactggcaccattacccgtaaggatctggatacgccgacggcctataacacctatacgatcagcggactgccgccgacgccgatcgccatgccgagccaggcatcgctgacggcggcggcacagccggaaaaaacgccttatctctattttgttgctgacggcaagggtgggcacacctttaccaccaatctggccagccataataaggcggtgcggatttatcgccagctagtgaaggaaaagaatgaaaagtaa

SEQ ID NO: 442701 - DNA, 1011 bp, Serratia marcescens
atgaattggtatccgtggctgaatacgccctatcggcaactcgtcgggcaatatgccggcgggcgcggccaccatgcgctgctgctgcacgcggcggccggcaacggcgacgacgcgctggtttacggcatcagtcgctggctgatttgccagcggcgcaacggggaaaaaagctgcggagagtgccacagctgtcgcctgatgatggcgggcagccatccggattatcacgtgttagcggcggaaaaagggaaaagcagcctgggtatcgaaccggtgcgtcaactgagtgaaaccctgtatgcccatgcgcagcagggcggcgccaaagttgtgtggttgccgcaggcggaacagctgaccgaggcggcggccaatgcgttgctcaaaacgctggaagagccgccggcgcacacctattttctgttgagctgccgtgagccgtccaacctgctggcaacgctgcgcagccgctgtctgtactggcacctgtccagccctgatgaagcgctgagcctgcaatggctggagcggcagggagcggccggtactcagacggagcgtctgacggctttacgcctgcatgacggcgcgccgctggctgccgaacgtctgctgcagccggaacgctggcagcagcgcagcgcgctgtgtacggcgcttggcaatgcgctgcagtcgcaggatatgctgcagctgttgccgcagttgaaccacgatgaagccgccgagcggctgcactggctatgtgcgctgttgatggacgctatgaagtggcagcagggcgctgcggcgtttgtgctcaaccaggatcaacagcagctggtgcaactgttggcggcgcggttaagcagcagctcgctgcagcatagcgtgcagcagtggctgcactgccggcatcaattactcagcgtggtgggcgttaaccgtgaactgctgctgaccgaacgtctgctgggctgggaacagatgttcacagccagcggctatactcatcctcattcgctgtaa

SEQ ID NO: 442702 - DNA, 651 bp, Serratia marcescens
gtgacgattcattttggcaagttggcgctcgcgctgggaacgctgcttatcagcagccaggcactggcgcatgcccatcattcacacggtaagccgatgacggacgtcgagctgaaggccgccgcaggcgtttttgacgataagcaggtgcaggacagaacgctaagcgattgggatggcgtctggcagtcggtgtacccttatctgctaaacggcgatctcgacccggtatttaaaaagaaagcggaaaaggacaagagcaaaaccttcgccaaggtgaaggcctattatcgccaagggtacgccacagatgtggacaccataggcattgaaaacggcgtgatggaatttcaccgcggcgataaagtcagcagctgcaaatacgattatgccggccataaaatcctgacctatacgtcaggcaagaaaggcgtgcgctacctgttcgaatgccaggatgccggcagccaggcgcctaaatacgtgcagttcagcgaccatactatcggcccgcgcaaatcggcccactaccatatctttatgggaaatacctctcaggaggcgctgctgaaggagatggataactggccgacctattacccgtatcaactggaagggaagcaggtggtggacgaaatgctgcatcactga

SEQ ID NO: 442703 - DNA, 747 bp, Serratia marcescens
atgacacgattagcagacaaatacgcgctgattaccggcgcaaccagcggcatcgggctggaaaccgcccgtcagtttattgccgaaggcgccaacgtggcgataaccggccgttcgtcacgcggcctggaggaagcgcaacggcagctgggtgaggcaatcgccctgcaaaatgacgccggggatattgcccaacagcgccagctggcgcagcagttggcccaacgctggccacggttggacgtgctgtatatcaacgccggcgacgtcacccaccagccgctggagcggtgggacgagcagggctacgaccgtctgatgaataccaacctcaaggggccatttttcctgatccaggcgctgctgccgctgctggccaacccggcgtcggttattctgtgcggttcggtcagcgcccatatcggtctgccgcaaagcaacgtctacgccgccagcaaagccgccctgctgtcgctggcgcgcaccctgtccggcgagctgcatacccgcggcatccgcgtgaacagcctcagccccggccccaccgagacgccggccttcggcaagctggggctgcaggataaggatgaacaaacgctgaaggacgagatccgcgcgctggtgccgattggccggatgggcaccagctgggagttagccaaaggcgcggtcttcctcgcctctgatgagtcggcgtttatggtaggcactgaactacagatggacggcggcgtgggcaatttatag

SEQ ID NO: 442704 - DNA, 384 bp, Serratia marcescens
atgacgggttccgcgcatagcgagcaggaaaaaaatttggcggcgctgccggcggtggggcagccgtgcccgatggtggattttgttaatttgttgtccgggaagtgggcgataccgattttgtaccgtctgatcctgatggacgcgccggtgcgctttggtgaactgcagcgcgccgtggcgccgattgcacaaaaggagctgacgcgtcagctacgccagttcgaacgacgcggtctggtgacgcgacaaatatttccggaagtgccgccgcgggtggaataccagattaccccgctgggcaagacgctgcgcccgacgctggattcgctggccgactggatgcgcagccatgcgccgcagttaattacggataagaaatag

SEQ ID NO: 442705 - DNA, 447 bp, Serratia marcescens
atgcaaaccggcatggttattaaatggggacatcggctactgacggtcgttttgctaatactggtcgccgcgctgggcggttatctctatgttacgactgcatcgtatgatgacatcctgtatagcaaaaaacagctgacggacgaaatgtggctctatattacccagtatcagcgggcgggggcgactgaccgcgaggtttaccgctactatttgaaccgggacattcgtgaggcgccgctggcgattctgcagcagagcgcgccatttttgacggccgatcgtcctgatgcggtggtgaagggcgacggaaaccgggtaagcatcaacttcaccggtaaagtgtattctttcaccaattcggcgttcttctatggtgataacaatgcggtgccgatgatgcctactctcgacttttcggcgcagggggttagcgcctggcgttaa

SEQ ID NO: 442706 - DNA, 390 bp, Serratia marcescens
atgcgctatcacaaaccgctgcgttgcctaatggcgctggcgctgcccgccgcgatactgatgggctgcagcagcccgcaggggatcgcggttaatgaacgacagacggtggtgatggagccatcggtgctgaccgccggcattttggccgacaggccggtggtaaatgatgcctccggtagagtgatcgctaccgcggtgctcagcaatacgcagccgacctcggtcactctgcgctaccgtttctattggtatgacgaccaggggctggatattcgtccgtttgaaaaaccgcgcgccattaccatcgcgccgaatgcgacggcgcaggtttattcgattaatggcaactttgatgccaagcgtgcgcgcctgtatctatttttataa

SEQ ID NO: 442707 - DNA, 594 bp, Serratia marcescens
atgaaaaagtatctgtttgtggcagcggccgcgttggtattgaccggttgtccacagcgtccgcctgaacagccggaaccgccggcgacgatcacgccggtgacgccggaggagacgacgccggtaccggagcagccggagccgccaacctcggaaccggtgccgcagccgccgaagattcagagttttaactggctgggcagcgtacagccgctgattgcgcagatgctgaaagccgatggcgtgacgccgggcagcgtgctgctgctcgatagcgtgaaaaataataccaacggttctttgcagaccggcaaggcgaccgcggcgttgcacaaagcgctgggtgccaaccagacctttaccgtggtgccgcaggcgcagctgaccagcgccaaacagacgctgggactgtcggcggaagacagcctgggttcacgcagcaaggcgattggcctggcgcgtattgtcaacgcgcaatacgtactgtacagcgacgccagcggcgatgtgaagtcaccgcagttggatatgcagctgatgctggtgcagaccggcgaaatcatctggtcgggcaatggcgcggttaaacgctga

SEQ ID NO: 442708 - DNA, 855 bp, Serratia marcescens
atggcgcggttaaacgctgaggccgagctgcagcaactcttgcaacacaaactgccggcggtgaaaaccgccggtagtcgtttcagcccggtagccggcctgaccggtgaaagctggcgtatccagaccgccgatggcgcagtgctgctggcgcgtcagcagggggcggaaaaagcggtgctgggggtcaaccgccggcgcgaagcgcgcgtgctgcggcgcagcgccggggcgttggggccacagccgctagcgcaagatcggcgctggctggtggtggaatggcttgctggtgacgttgtcactagcgacggttttgagcattaccggcaagggggcgaactggcggcgctgattgccacgctgcatcgccggccgcgcagcggttatcggctgaatctgccggcccaataccgacgctattggcagcagcttgaccggcgacgcattactccggcctggctgcgctggcaacgccattttttgcaggcgaagccgccgcggccgctgaagctggcgccgctgcatatggatattcacccggaaaacttaataaaacagcagacgcggctgcggctgattgactgggaatacgccggcgacggcgatgtggcgctcgaactggcggccctgttccgtttcaatcagtggtctgccgccgcgcagcgtgagtttttgcagcagtacgctcgccagggctatcacgacctgacggcgctgggccgccaggtgcaacgctggctgccatgggttgattacctgatgctgatgtggtttgaagtccgctggcagcagagcggcgatgcgcaatttttgcgttgcgccgcagcgctgcgccagcgtttttgtttatga

SEQ ID NO: 442709 - DNA, 915 bp, Serratia marcescens
atgttctacggttttgatatgggcggcagcaaaattgagctgggggtgttcgacgccgacctgcaacgcgtctggcaaaagcgcgtggcgaccccgcgggacgactatcgccaactgctggcgacgctgcgtgatatgacgctggaggcggacgccgtctgcggcgctgccgggcaggtgggcatcggcattcccggtttgcctaacgatgatgacggcacgctgtttaccgccaacgtgccggcggcgatggggcaggcgctgccgcgcgatttggcggcgctgattggccgggaagtgcgggtggaaaacgacgccaactgcttcgcgctgtcggaggcctgggataaggagttccgtcgctatccggtggtgttcgggctgatcctcggcaccggcgtgggcggcggcctgatcgtcgacggcaaggtggtgtccggccgtaatcatatcgccggcgaattcgggcatttgcgtctgccggttgatgcgctggaagtgctggggcgtgatatacctcgcgttgcctgcggctgcggtcatcatggttgcattgaaaattacatatcaggccgcggatttgagtggctgtacgcgcatttttatcagcagcgcttgtcggcgccgcaaattattgcgcattatcaggccggtgagccgcaggcgcaggctcacgttgagcgttttctcgatctgctggcgatttgtctgggcaatttactgaccgtcatcgatccgcatctggtggtgattggcgggggattatcgaattttgcagcgatctaccaggcgctgccgtcacgtctgccgcgcagcctgttgcgcgtggcgaagatgccgcggatcgaaccggcgcgctatggcgacgccggcggcgtgcgcggggcggcgtttctcaacctggcggatcattga

SEQ ID NO: 442710 - DNA, 1227 bp, Serratia marcescens
gtgaataacgctaatgatagaaccttgcgttttaatcctgcttcgccctcatttaatcatcatatctatcagatttatcagcgtatgcgtcagcagcaaccgctactgcgcatcggcagaacctgggtgttgacgcgctatcaggatgtcagtgctgcattgcgcgcgccgcagttaagctgcaccggcattccgcgacatttgacggcggaattcaagcgcctgcaatgtggtctggagccggcgttggcggagctggtgcaaaatattgcgctgtttcaggataacgttacgcaccgggcacaccgcaagccactgatggcgctgttcggccgcgaaccgctggcgcagctcaaacagctggccgccgatgaaatcaagcggatgatcgccgatctggcgacgaccgaacgtctggatgtgatcgcacagctggcgcgcccgctgtggccgcggctgtttgcccgctggctgaacctttcgccgcagcagtgtcaggtgattgaacaggagaaagagagtatccgtctgctgctcgatcccagcgcgatcgaccgggccgggcttgaacaactggcgttggcgctgcggcggctgaacgaggtattcagtcagctctatcagagctgcgtcaacggccatccttcgccgtttttttccgccctggcgcagggctatggcgccgacagcgtgctgttgcaacgctatttcagcacggactgcatcaccatcctgattggcggcagtgaaaccaccgaggcgttgatcggcaatctgatgcagatcgttgcgcaggatgaacaattacagcagctgctgcggcagcatccgcagtggatagcgcaggcggtgcaggaaacgctgcgttatgaatcgccgttgcagatggcgcgccgcaccgtctgccagccgtgggagctgcatgggcgtactctgcgcgagcaggatgcggtgttgctgtgtctgggggccgccaaccgtgatgaaacacagtttcacgcagcgcatcagttcaatttgcaccgggacaatagccagcgccatctcggatttggcggcagcgcgcatctctgtgcggggcagttgttggcgaagtttcaggcggaaaacgtgtgcgccgcgctgctgcgccattttccgcgacttaaaccgtcggggacggcggagtggcaaacggacagtttgattttacgttcgctgaagtcactgccgttggcactgggctaa

SEQ ID NO: 442711 - DNA, 1263 bp, Serratia marcescens
atgacttgcgataatctgaagggcgccattatggataaactactcgatcgtttttttaactacgtcacctttgatacgcaatccaaagcgaacgttaaacatgtgccaagtacggacgggcagctgaaactggcgcgcgcgttacagcaggagctgctggcgctgggttttgcgcaggtgatgctcagcgaacacggctgcgtcacggcgacgctgccagccaatgtcgcctggccggtgcccgccatcggatttatctcccatcttgatacctcgccggacgtcagcggcaaacaggtgaatccgcaaattgtggagaattatcgcggtggtgatattgcgctgggcatcggcgatgaggtgctgtcgccggtgcgcttcccggtgttgcatcaactgctggggcagacgctgatcaccaccgacggcaaaacgctgctcggggcggatgataaggccggcattgcggaaatcattaccgccatggtgcgtctgcggcagcagcagattccgcacggggatatccgcatcgcctttacgcccgatgaagaagtcggcaaaggggcccgctattttgacgtcgagagctttgacgccgcctgggcctataccattgacggcggtggcgtgggggagctggagtgtgagaacttcaacgctgcctcggcgttggtgaagattgttggcaacaatgcgcatcccggcagcgccaagggcgtgatggtcaacgcgctgacgctggcgacccgtttccaccagtgtctgccggcggatgagacgccggaaaacaccgcggattatcagggcttctatcatctgagcagcatcaaggggcaggtcgaccgcgccgagatgcactatatcctgcgcgactttgagcgcgacggctttgccgcccgcaaacgtcaactgatggcggcggcagagctggtgggcaaagggctgccgcgtgagtgccacatcgacgtcaccattgaggacagctactacaacatgcgcgagctggtggctgagcatccgcacgtggtggaactggcgcagcaggcgatgcgcgactgcggaattgagcccatcattaagccgatccgcggcggtaccgacggcgctcagctctctttcaaagggctgccgtgccccaatctgtttaccggcggctacaatttccacagcaaacacgaatttattacgctggaggggatggagcaggcggtggcggtgattatgcgtatcgcgaccctgacggcggaacgcgccaaaggttga

SEQ ID NO: 442712 - DNA, 1095 bp, Serratia marcescens
atgagttctgagtatcgtatcggcagccagggattagggcggtttgttcaggcgatctggcgccataccggcagttccgcccgtgaggctgagctggtggcggaacacctggtgcaggccaatctggccgggcatgattcgcacggcgtcggcatgatcccgcgctatatgtcatcgctggcgcaggggcatctgcagctgaatacccatgtcagggtggtgaaggatgccggcgcggtgctgacgctggacggcggcaaaggatttggtcaggtggtcgccagcgaagcgatggagcgcggtattgaacgggcgcgccagctgggaattgccgccgtggcgctgcacaatgcccaccatatcggccgcatcggccactgggcggagcagtgcgcgcgtgccggctttgtttctatccatttcgtcaatgtgatgggcgatcctatggtggcgccgtttggcggcagcgaccgccgcttcggcaccaaccctttctgcatgatttttcctcgtcctggccaggcgccgctgttgctggactttgccaccagcggcattgcttacggcaaaacgcgcgttgcgtacaacaaaggcctgacggtagcgcccggctatctgatcgatgagcagggccggccgaccaacgaaccaaaggtaatgcatgaagcgccgtttggttctctgctgccgttcggcgctcataagggctatgcgttggcgacgctgtgcgaaattctgggcggcgcgctgtccggcggacaaaccacccatgatgatacgctgcaggtgaccaacgacgcgatcatcaacggtatgaccactattattctcaacccggacgcctttgaagcgccggcaatgcaggctgaggctgaagcctttgttgactgggtgaaggcctcgccggaaagcggcgacgagccgattcaggtgccgggcgagtgggaggagatgaaccgtgcgctgcgcctgcaggacggtatcccgattgacgccaatacctggcagcagatttgcgctgcggcgcaggcggccggcatgtcgcaggccgagctggaagactatcgcgcgctggcacgggctgaatccgtgtaa

SEQ ID NO: 442713 - DNA, 747 bp, Serratia marcescens
atgcagcagtttaatacccatgcgcaggcttataacgcggtgcgcagcaagattagctatcccgatgcgttgtatgcgtcgctggcggccagagcgccggcgcataacgctgcgcttgatatcggctgcggcaacggtgtctctacggtacgtctgcaggggctgtttcagcaggtggaaggctgcgatatcggtgcggcgctgatcgaaaaggcgcggcagaattacccggcgctggccttcagcgtctgcgcagcggaagattttgcgcctgcccaccgttttgaccttatcaccagcgccacgtcgttttattggatggatcgcaaggcggtgctgatgaaattgccggcgtggctgaatcccggcgggctgttctgcgcgtacaaatatgattttccgctggcgtacgggccgctgcgtgattttatcgagcgggaactggtgaccaactgggcgcgttaccgcgatccccggctgacgcagtacgatgacacgctggaaatcatgcagggctgccgccacctgcagcaggcccgacgcgaggtgttcgccaatatcattttcctgacgccggaagaggtggcgctgttctttttatccaccagctacgtgacgcgctatatcgaagaagagggcgggcaggcgtatatcgaacggttcagcgccgcggtgcgggagattgcgcggtcggagagcgtggcgatgaactttgatattcatgcgtttaccgccgtgctgggctag

SEQ ID NO: 442714 - DNA, 447 bp, Serratia marcescens
atgttcaaaccgcacgttaccgtcgccaacgtggtgcacgccgccggcaagtttttaatcgttgaagagaccgtgaaccacaaggcgctgtggaaccagcccgccggccacctggaggccgacgagacgctgctgcaggccgccgaacgcgaactgtgggaagagaccggcatccgcgccgcgccgcagtcgtttctgaaaatgcaccagtggatcgcgccggacggcacgccgttcctgcgcttttgcttcgtcgtcgaactgccggccatcgtgcctaccgcgccgcaggacagcgatatcgaccgctgcctatggctcagcgccgacgagattctgcacgcccccaacctgcgctcaccgctggtggcggagagcctgcgctgctaccggcagcccgagcgctacccgctttcgttgatcggcagttttaactggccgtactga

SEQ ID NO: 442715 - DNA, 336 bp, Serratia marcescens
atgaaaacgttaggtaccctgctattaaccacgctgctgtgcgccgccggcgcgcaggccgccagttttgattgccgcaaggcggcctcaaaggatgaacaggcgatttgcgccagccgttcgctgagcgataaagacgttgaaatggccaccaaatatcagtttctgcgcggcctgttcgccatgggttttcgcggcgaaatgcaggatcggcaaaacagctggctggcaaaacgtaaacagtgcggcagcgacgtcagctgtctgagcaacagctaccggcagcgcatcggcgagctggacgcgatttacaacaaaatcgaccgaccactgtaa

SEQ ID NO: 442716 - DNA, 657 bp, Serratia marcescens
atgcgcctatcatccgcaagtacaatagatatgaataaattccctgttaaaaaacaccaagttaaacgattcagccgaccgaatagcgccaaacgccccgtcccgccggggccgcgccgggttgtgttattcaacaaacctttcgatgtgctgccacagttcaccgatgaggccggccgcagcacgctgaaggaatttattccctttaatgacgtctacgccgccgggcgcctggaccgcgacagcgaagggctgctggtgctgaccaacgacggcaaactgcaggcgcagctcacccaaccgggcaagcgcaccggcaaagtctattacgtccaggtagaaggctctccgcaggagagcgatctggcgcagttgcgcagcggcgtaacgctgaaggacggccccaccctgcccgccggcgtcgagcgggtggcggagcccgcgtggctgtggccgcgtacgccgccgatccgcgaacgcaaaagcatccccaccagctggttgaaaattacgctgtatgaagggcgaaatcgtcaggtgcgtcgcatgacggcgcatatcgggttccctaccctgcgtctgattcgctacagtatggggaatctttcattaggcgatttacaacctggtgaatggaaaaccacggattcaccgtag

SEQ ID NO: 442717 - DNA, 423 bp, Serratia marcescens
atgactctcttttttccaacgccaaacccggtaaaacttgaacttccgctgttctctgacaaggtgcccgctggttttcccagccctgcagcggattacgtcagctcgcgaatcgatctgaacgaatactgtatcagccatcccaatgcgacatattttctctatgcgaccggcgactcgatgcttgaggctgggatcaccgaaggctcgatgctggttgtcgatcgcagcattgccccggcacatggcgatatcgtcatcgcgtgtattgccggggagttcacggtaaagcgtctctgtttgcatccgcgcgcccagttggagccaatgaatgcaaagtatgacccgatcgttctacatgatgatggggatagcctggaagtggtgggtgttgtcgtgtcttcgattacgaggctcaaataa

SEQ ID NO: 442718 - DNA, 1269 bp, Serratia marcescens
atgtatgcgctcgcggatgtgaacagcttttacgcgagttgcgaaacgctgtggcgcccggacctgcgcggccgtccggtcgtcgttctctcaaataatgacggctgcgtggtggccagaagcgaagaagcaaaggctctcggcattaaaatgggcgtgccttactttaaggttaagcacccttttgagcgtgccggaggcattgccttcagcagcaattatgagctgtatgcggatatgtcgatgcgcgtgatgtctgtacttgaagaggtggcgccgcgcgttgaaatttactcgatcgatgagagctttatggatctgaccggtgtgcgtcactgcgttgatctggcaaccttcggccgccaggtgagggcgaaagtgctgcgcgataccggcctgacggtaggtataggcattgcccaaaccaagacgctggcaaagcttgccaaccatgcggcaaaaaagtggccggggaccggaggcgtggtggatctgtccagcgtcggacgccagcgcaaactgatggggctggtgtctgtcgcagaggtttggggcatcggccggcggatagcgaaaaagctgcaggtcatggggatcgatacggcgctgcagttagccgatgccagcacggcaatgatacgaaagaattttagcgtggtgatagaaaaaacggtgcgtgagctgcgcggcgaaccgtgcctggagcttgaagagtttgcgccaacgaagcagcagattctctgctcgcgttcgttcggcgagcgtatcactgaatatgacgatatgcgccaggcgatctgcatgtacgcgacgcgcgcggcggagaaactacgtggggagcatcagtactgcatgcacatcagcgcctggctcaaaagcagtccgttcgccatcaatgagcaatattacggtaactcggcaagcataaaactgagcacgccaacgcaagatacccgcgacattattgctgcagccatgcgctgctttgacgctatctggcagcccggacatcgctatcaaaaagcgggcgtcatgctgcaggacttcttcagccacggcgtagcgcagctggggttgtttgatgagtaccaaccgcagcataacagcgaacggttgatgagcgttctggatcgtatcaataactcgggtcgggcaaaactgtggtttgcagggcagggaatgtatcagcagtggtcgatgaaacgtgaaatgctgtcgccggcgtacacgacgcgtgtgagtgatttgccacaggcaagagtgtgctaa

SEQ ID NO: 442719 - DNA, 270 bp, Serratia marcescens
atgaaaaaattggctttttacaaatttataatcgggtggggcacggcaaatctggcatacgcatttgcatttttatggctgtttattgtatgggtaattgcatcacataccgttttccgtcatgaagattattttcattttaaaaagatactttttaatattattacctacggtttcaacacctggctggattttgctgctttgtactcaacgatatttgccttgttatgggcgctgatttcggtttataggagtaaatccgtaagctga

SEQ ID NO: 442720 - DNA, 723 bp, Serratia marcescens
atgcaattacattttaaaaaacgcgttgccgtatgctcaatggctgctctgttgttctccgcttccggcgcatttgctgcggaaagtcatgggtttttaacgcctgaaaccgcacctgacagcctgcagatattaccgccgccgccggcggagaataccacggcgtttttaaacgataaggccgcctatgagacgggcaagacgctaaaagatgcgcagcgtcaggcgttggcggccagcgatgcggactataaaaatatctccgccgctttttccgccgcctttggtgaagagatttcgcaagagaaaacgccggctctctatgcgctgcttcagggcgtcctgcaggacagccacgactatgcgatgagagccgccaaggatcactatatgcgcgtgcggccttttgtggtgtacaaggacagcacctgtacgccggagaaggataaatctatggcgaaaacggggtcctatccttccggacacgcctcattcggctgggcgacggcgctggtgctagcggagatcaatccggctcgcgaaaccgagatactgaagcggggttatgactttggtcagagccgcgtggtgtgcggcgcccattggcaaagcgatgtagataacggacgtttgatgggcgcggcagtggtggctgcgctgcacagtaatcaaggttttaccgatgcgttggccaaagccaaggcggagtttggtaaacggtga

SEQ ID NO: 442721 - DNA, 291 bp, Serratia marcescens
atgaaaaaattactcgccgccgtagtgcttgccatgacggttaccggctgtgcacagcaaacgttcaccatgaaacacgagactgtcgctgtacctaagcagacgaccactcaccacttctttgtctccggcattggccagaaaaaagccattgatgcagcggcggtatgcggcggcgcagacaaagtggtacgcaccgaagtgcagcaaaccttcccgaatatcctgctgggcattgtgaccttcggcatctataccccacgcgaagcccgtatttattgcgctcaataa

SEQ ID NO: 442722 - DNA, 1266 bp, Serratia marcescens
atgacgtttacccccgagcgagcgcgctcgcagttcggcgcgctgtcgcagcactatcaggataagccggcgatctttttcgatggccccggcggttcccaggtttcccacagcgtactggaaaaaatgaccggctacctcggcagctataacgccaacctgggcggacactacttttccagccagatgacggaacaggtgatgcataacgcgcgcgcatcggtacgcgcgctactaaacgccccctcgcccgataatatcgtcttcggcatgaatatgacgtcgctgaccttccaccttagccgcatcatcagccgcgactggcagcccggcgatgagattatcgtcactgcgctggatcactacgccaacgtctccagctggcagcaggcggcggaggataaacaggctatcgttcatcatattccgctgcgccctgaggactgtacgctggacaccgagcgcctgtgcgcgcagatcaacgacaaaacccggctggtggcggtaacgcacgcatccaacgtgaccggcagcgtggtggatatccgggccattaccgccgccgcgcagcgggtcggcgcacaggtctacgttgatgccgtgcactatgcgccgcataacctgatcgacgtacaggcgctgggctgcgacttcctggtctgctccgcctataagtttttcggcccgcatatcggtatggcctatattgccccgcagtggttacaacgcctgcgcccgtataaagtggagccagcaaccgatatcggcccgggacgctttgaaaccggcacccagagctttgagggactggccggcgtcaccgcggccattgactatctggcacagtggggcacgccgggcgcaccgttaaggcagcgtctgcaggagagtttcgccgcttaccaccaacatgaagaagatctgtgccgctattttctgcagcgcttacgacagctggaaggcgctcggctttacggctaccccgaaccagacagcacgcgccgcacgccgacctttgccttaacctttaaggacttctcgccggagcagatcgccatgttgttaggccggcataatatctgcgccggcagcgggcatttttacgcgcagggactgatacggcagctcaacctgcaagagcatggcggcgtgttgcgcatcggcatgatgcattacaacacccgccaggagatcgaccgcctgttcgaggtgctggaggatgcgctggccgaggcggacagcccggcagccgtggatgggcgttaa

SEQ ID NO: 442723 - DNA, 645 bp, Serratia marcescens
atgttacctggacacgagaatgtagtaagtatgactagcctaagccgtcaagctacgcagcaattaatgccgtcgttttctgatttaccccatacccagcatgcggatggtaaataccgcttacgccgctactctgtcataaccttccgtaataatcaggttgaggatatcgggcaacgtaacttcgtacagtcggatgaattcaaccactttcagggcaacgtagtccgccacttcgagccgattgacagcgccgtattgcaaagcgaaggcatggcggagatgtgtgccctgtttgctgacgttaacggcctgcccgacggcgcaaaaatagagatccatcagatgcgcgtggtggcgatttacaatgagaccccggtggcgccggaagggatccatcaggacggcttcgagcatatcgccatggcctccatcaaccggcacaatattgtcggcggtgaagttatgctgtacgacgataatcgcagcatgccgttctttaggcgcgtactggcggacagtgaaaccgtgctgttggcggacaataagctctggcattacttcgcgccgatcaccgccgtggcgccgggagaagaaggacatctggatctgctgattctgaccgcacggagagagcacgcatga

SEQ ID NO: 442724 - DNA, 249 bp, Serratia marcescens
atgtttggtaaagctgaagataaagcaaaagaagttgccggtgctgcgcaagaagcgtttggtgaagccacgggttcaccggagcatgagataaaaggtgcggcccgtaaatatgcctcgcaggccagttatgcggtccgcgacggcgccgatgtcgtcagacaccgggtggaatcaaacccgctggccggcgtggcggtggccgctgccgtcggcgtcgtttttggctacctgcttgggcgcaaataa

SEQ ID NO: 442725 - DNA, 615 bp, Serratia marcescens
atgagtcaggtgatttatcgcattgaagggagcattatctttagtccggaagatacaggactttaccgacataaccaggctgatagcattgtcgccatttccagcgccgcagccagactgtttaccttactgatcaaaaataaaggacatatcgtcgagcgggagaccattctggaaaaagtctgggatgaatacggtctgcaggccagtaataataatctcaatcaatgcttgagtatattgcgtcgcattatcaaaaatatgggcatcgataaaaatattattgaaaccattcccaaagtaggactgaggatctctcacgtcatccagatagaagaaattaatctacacccgccggtgcctggcgatccgcccgcgcccgacagacgcagcaggaaaaaaatcaaaaaaaaactgttttactccgcgctactcgttggtttactgctgatgttttctctcttttttaatatttttcatttatataacagctaccagagcaggccggcatcgctttcattattgaattccacacggggacaggccgcgctgtgcgccgtcccgccagcggagacaccgcggctgtcgacggtatctcttcgcacaccccactag

SEQ ID NO: 442726 - DNA, 426 bp, Serratia marcescens
atggcatatcaacatattgtggtagcgacggatctgggagaaaacgcgacgcagttgctgcaaaaaggcgccgaattggccagcgcgttgcgcgccaagctctctctgatctacatcgacatccatcacaccggctactacgcggagctggggatcggcgcttacaattataccgatcaaaaattctctgagcgggcggcgagcattctggagtcgttcagaaatcagacgccgcatcccattgcagaagtgatcatcggccgcggcgaattaagcgaggagttaaacaatgcggcgcaggccaagggatttgatctgattatttttggccaccaccacgatctctggagccgtctattttccgcgacgcgccaggcgatcaatacgctgcagatagacgtattagtgatccctatcgataactga

SEQ ID NO: 442727 - DNA, 1491 bp, Serratia marcescens
atggatttccaccacttgcagtactggcagcaacgggcacaggccctgactattgagaaccgactgtttattaatggccgctatcagccggccgctgaagggggcacctttacggtggaggatcctgccgggcagcgcgaactgacgcaggctgcccgcgccggcagcgccgatgtcgggctggcggtcagcgccgcacgcaccgcctttgagcgcggcgactggtcgcgcgccgcgccgtcccggcgcaaagccgtgctgctggcgctggcggagcagatagagcagcatgcggaaaccctggcgctgctggagacgctggataccggcaagccaatccgccacagcctgcgggatgatataccgggcgccgcccgctgcctgcgctggtacgccgaagccattgataaggtgtacggcgagatcgccccgacgggggccgatgcgctggccctgattgagcgtgaaccggtcggcgtcgtcggcgccattacgccatggaactttccgctgctgctggcctgctggaagctcggcccggcgctggcgacgggcaacagcgtagtgctgaagccatcggaaaaatcgccgctgagcgcgatttacctcggccagctggctcagcaggccgggctgccggacggcgtcctcaatatcatcagcggctttggccatgacgccggcaaggcgctggcgctgcatcctgatgtcgatgccctgacctttaccggctcgacgctggtggccaaacagctgatggtttacgccggcgaatcgaatatgaagcgcgtctggctggaggccggcggcaaaagcgccaatatcattttcgccgactgcccggatattgataaagcggcgcgcgccgccgccgcgggcattttctacaatcaggggcaagtctgcatcgccggcacgcgtctgctggtggaagagagcattcaacagccgttcctgcaggcgctgcacaaacacgccgccgcctttacgcccggcaacccgctggatcccgacacgcagatgggcacgctgattgacagcgggcacagcgccaaagtcgccgactttattaaacaagggctcgatcaaggggcaacgctgtttcttgacgggcgcggcagcggcccgcatgacgcttatctcggcccgaccgtgctgacccaggtggataacaccatgcaggtggcgcgcgaagagatcttcggcccggtgctggccgtcaccccgttcaacggcgagcagcaggccatcgaactggccaacgacagcgactatggcctcggcgccgcgctgtggacgcgcgatctgtcacgcgctcaccgtctggcacgccagctgcgggccggctcggtatttatcaataactacaacaacggcgatatgacggtgcccttcggcggctacaagcagagcggtaacggccgcgacaaatcgttacatgcgctggacaaatttaccgaactgaaaaccacttggatttcgctggaataa

SEQ ID NO: 442728 - DNA, 273 bp, Serratia marcescens
atgcgcagtgatatccagtttcttccccagccggcgattgacgatcagacgtttatgtacggcgataccgtacggctgacgacggctaatttacggcatgaatatcaacttgatgtaaacatcctgcgccgcgcaggccggcagatatatggcgcagtggtcgccgccgcgccgaaaacagacatcccgccgcaggagtgggagattgcacgcggcgacgaggtggtcttccgtgaggaaaatatcgccaaggcggtgccgggcgcacgctga

SEQ ID NO: 442729 - DNA, 177 bp, Serratia marcescens
atgcaaatgacactcatggaatacatcacgcggcatttcaatggcgaccttagccgttatgcacaagcggaaggcgtaagctgtgaacaaatcatcaagtggatcgacaatgaatgctatgtcattaaagggcggttatttatgccggtcaaacacttgcccagccaggacgcctaa

SEQ ID NO: 442730 - DNA, 537 bp, Serratia marcescens
atgaaaaaacgtcgtatgaccatcacggcactggcgctgatcgcttctctgggcgtcagcagcgcgccggtcttcgccgacaaaggcggtaacggcaacggcggtaacggccatggcaacagcggtaaccacggcaataagggttacgatggcaaacatggcaatggcaatggtaaaggcaacggtaacggtaacggcaaaggcgttagcgacgagcatggcaacaaaggcaagcgcggtaatagcgcggacgaccatggcctggtgcgggtcgacctgtcctatgaccgcgcccgctcgctggcgctgaactacggcctgactggttaccagtcgctgcctccggggattgcgaaaaatctggcgcgcggcaagccgctgcccccgggcattgccaagaaaaccgtaccggcatcgctgctgggccagctgccgcactatccgggctatgagtggcgcgtggtgggcgatgacctggtgctgatcgccctgagcactgcgctggttgcatcggtgattaacggcgtgtttgactaa

SEQ ID NO: 442731 - DNA, 528 bp, Serratia marcescens
atgctgaaactctgtctgatggcggggctgctgtgcagcttttccgcgcttgccgataatagcgcgtcgatcgccgacgtggtgaaccagcgtctggcgctgatgaaagacgtagccggttataaggcgcagcagcatttgccgattgaggatctggcgcaggagggcaaagtgctggctaacacgcaggcgcaggcagaaaagctggggttggagccgcagtccgtgaagccgtttatcgttgcgcagatggatgcggccaaggctatccagtaccgctaccgggctgactggctggcacagccggagacgggctggcagccgcagccgctggagaaagtccggccggagatcgcccgcctgagcgacaaaatcctgcagcggctggcgcagcgcctgcggcaagggccgatcgccgagaacgagcgccaggaatttatccaaaccatccaacaggttaatttgaccgctgcggataagcagcgactgtttgacgcgctgttaatggtcaaactcaacgggcagtga

SEQ ID NO: 442732 - DNA, 1539 bp, Serratia marcescens
atgtctgacacccagctacgctggcgtgaagcccgggccacggccgagcgcttactggccggctggcgcctgccgggcgaccccggcggcgctattaccctgtttgatgcacaacacacacaggcggtggcgtgcgccggtctggccgatctggcgcgcggcgaaccctttagcgccgacagcgtggtgcgctacgcgtcgctgaccaagcatatcttcgccgcgctggcgctgaatgcgaccgagggttcgctgcgcctcgaccagacgctgggagaactgctgccgcagctgcgcggcgagccggccgcggtcagcgtcggccaggcgctggatatgaccggcggcctgcccgacgtgcgtgaaacgctcgggctgctcggcatctccggctacagcgtcagccacgcggagccggtaatgacgttcatccaggggctgaagcgcctgaacttcccggcgggcagcgaaatcagctacagcaacaccggttaccgtctggtggaggcggcgctgcaggagcggggctaccgctttgagcagttggttcagcagtatattgcgcagccgctgcaactgcgctggcaggcgccggaaagctggttcgatatcgtccccggcctggcgcccggctactggcgcacgccgcagggttggcagcagagcagcgccggcctgcacctctccgcctcgggcagcctggccggcagcctcggcgatctgacccgctggctgcaggcgctgcttggcgaccgcggcccggccagcggcgtgctgcagcagctgagcgcgccgcgctatctgacaaacggccagcccagcgcctacgggctgggactggcgcgcaccccgctcggtccgcatgtgttactgggccacggcggctctcatgccggctataaaacctatttcctgctggcgccggaacgacaggccggtatggcgctggtggccaaccgcgaagactgcgacagcgccagcatcgccctgcaggtgatggccgccctgttgggtgaaccactgccgccgcgcagccgcgccattcctgacggcatctacgcgacgctggcagaaccgtactggctggaggtcaacaacggtaatgtcgcctatcttggctgcccggagacgctgtatcaggcgggggacggttatgcggtttcgctcagcgcccagcggccaatgcggctgaaatggaacggcgaaaacattgaaggagaagtgggccacgtcgcccgtaccttctggccggtacagaccagcggccgctgtttgtcgcatgtgcagggcacctggtaccacccgcactaccgcaccgcttttgagatccgcggcgaccaggtgcatatcggcgtcggcccggcggcgcataccggcaccctcagcccgctgggcgacggccgcatgctggttgagagccgcgacgggccgtggttaaagcgcttttgtctctacttccgcggttacagcgttgacctgatcgccgagcgcagccgggtgctgaccttcagacgcggcaccggacgccatacggaataa

SEQ ID NO: 442733 - DNA, 804 bp, Serratia marcescens
atgaccattcgcgatccgttccatttccaaaccggcagcctgccgctgttaatcagtattcctcacgccggcacacagctgacgccggccgttgaggccgggctgacgccagacgcgcgcgcgctgccggacaccgactggcatattcctcagctgtatgactttgcccgcgaccttggcgccagcattctggtaggtaattactcgcgttttgttatcgacctcaaccgcccggcggacgataaaccgctctacagcaccgccaccaccgggctgtatccggacgtactgtttaacggcgaacccagctttctgcccggcaaagcgccggatgaccaggagcgcgccggctatctgcaacagatttggcagccgtatcaccagcagttgcaggatgagctggccaggctgaaggcgcagcacggctatgcgctgctgtttgacgcccattccattgcctcggtgattccgcgcctgttcgacggcaagctgccggatctcaacctgggcaccaacgatggcgccagctgcgccgttgcgctcagcgaccggctggtgagctgctgcgagcggcagcaacagttcagccatgtgctgaacggacgctttaaaggcggctatatcacccgcgcctacggcaaaccggcggaaaaccagcatgcggtgcagctggaactggcgcaggtcaattatatgtccgagcagtatccgttcgccttcgacgccgcgcgcgccgcgccgctgcagcaactgctgagccggatgatcgacagcatgatcgactggggcgcgcagcaacgctga

SEQ ID NO: 442734 - DNA, 1221 bp, Serratia marcescens
atgaccagcgagattcactgcgacagcctgtggcacggggcggatatcgtcaccatgcgcgaaggcaaataccatattctgcacgacggcgcgatggcggtgcgcgacggtaaaatcgtctggattggcgaatacgctgcacgcccggcgattaccgcagatgagacggtgaagttcgaaggcggcatcattacccccggcctggtggattgccatacccatctggtgttcggcggcgaccgcagcgcggaatttgaacagcggctgaacggcgtcagctatgccgagatcgccgcgcagggcggcggaatcatttccaccgtcaacgccacccgcgacacctcggaacagcaactgctggagcaggcgcagttccgcctgcgcccgctgctggcggaaggcgtgacctgcgtggaggtcaagtccggctatgggctgacgccgcaaagcgagctgaaaatgctgcgggtggcgcgccggctggccgacacgctgccggtagaagtgaagaccacctgtctggccgcccacgcgctgccgccggaatatgccggccgcgccgatgactatatcgatctggtatgcgacaccattattccgcaagccgccggcgccggcctggccgatgcggtcgacgccttctgcgaacatctggccttttcgccgcagcaggtggaaaaagtgtttgccgccgccgaacgcgccgggctgccggtgaagctgcatgccgagcagctgtccgcactgggcggcagcgctctggcagcgcgtcatcatgcgctgtccgccgaccatcttgaatacgccaccgagcaggacgcgcaggcgatgggcgccgccggcaccgtcgcggtgctgctgccgggggcttactacctgctgcgtgaaacccagtgtccgccgatcgaactgttccgcaaacatcgggtggcgatggcgatcgccagcgacgccaaccccggcacctcgccggcgctgtcgctgcggctgatgatgaacatggcctgcaccctgttccgcctgacgccggaagaggcgctggccggcgtcacgctgcacgccgcccgggcgctggggctgcaggagagccacggctcgctggaaagcggcaaggtggcggacttcgtccactggccgctgtcccggccggctgaactgacttattggctgggcggacagctgccctgcacggtgattttccgaggagaaatacgtcaatga

SEQ ID NO: 442735 - DNA, 750 bp, Serratia marcescens
gtggttgatcaacagagcgtgttacaactggctacggccatgagcgatacccccgcccccatctaccagcgggtgaaacaggcgatcgtggatcagatccgcgccggccactggcagccgcaccagcgcgtgccctcggaaagcgaaatggtggcggagctgggcgtcagccgtatgaccatcaaccgtgcgctgcgtgagctgaccagcgaaggctttctggtgcgtatgcagggcgtcggcacctttgtcgccgaggccaaagcgcacaccgcgctgttggaagtgcataacatcgccgacgaaatcgccgcccgcggtcaccgccacagcagcaagatactgcagatgacggcgcgcaccgccagcgatgaagaggccgccgcgctgggcatagcgccgggacagcagctgttctattcgcagatcgtccactatgaaaacgagatgccggtgcagttggaaaaccgctgcgtcaacccgctggccgcacccgactatcttcagcaggatttcgatcgggtgacgccttatatctacctgacgcaggccgcgcccctgaccgccggcgagcatatcgtcgaagcggtggtcgccagcaagcaggagcgcgagctgctgcagttggaagagcgcgaaccctgcctgctgatccatcgccgcacctggtcaggaaaaaccgtggtcacctcggcgcggctgctgtatcccggcagccgttatcagctgttcggtcgcttcgacgtttaa

SEQ ID NO: 442736 - DNA, 1371 bp, Serratia marcescens
atgcctgcttactacgctaaacgcgcactgcttcccaccggctgggcgcatgccgtccggctggacgtcgacgctcacggttttcttacccaggttaccccggatgccagcccggaaggctgcgcgttgctgcatggcgacgtggtgcccgggatgccgaacctgcactcgcacgcgtttcagcgggtgatggcggggctggccgaggtggcgggcgatccgcaggacagtttctggacctggcgcgatctgatgtaccgcctggtgcagcgcctgacgccggagcaggtcgaaatcattgcccgccaactgtatatcgaaatgttacagggcggctatacccaggtggcggagtttcattatctgcatcatgacgccgacggcaagccatacgccgaccgtggcgaaatgaccggccgcctcagccgcgccgcgcagcaggcggggatcggcatgacgctgctgccggtgttgtacagctatgccggtttcggcgcacagccggcgcaggcggggcagcggcgctttatccaggatgtggacagctatctgacgcagcagcaggttatcacccgtcagctggcggggcagccgctgcagaatcaggggctgtgcttccattcgctgcgcgcggtggaactgtcgcagatggagcaggtgctggcgcaggccgatagcacgctgccggtgcatatccatatcgccgaacagcaaaaagaggtgaacgactgtctgcagtggagcggccagcgcccggtggcgtggttgtatgagcatctgccggtcgacagccgctggtgtctggtgcacgccacccatctggataacgccgagctggagcagctggcacacagccgggcggtggcggggttgtgtctgaccaccgaggccaatctgggcgacggcatcttccccggcgacgcctacctgcagcgtcagggacgctggggcatcggttcggacagccatgtctcgctgaatgtggtggaggagttgcgctggttcgaatatggccagcgcctgcgcgaccggcgccgcaaccgtctgacgacggcggagcagccgtcggtgggcgatgtgctgtatcagcaggcgctgcaagggggggcgcaggcctgcggcgcgccgatcggccggctgcagagcggctaccgcgccgactggctggtgctggacggcgacgacccgtacctggcggcggcggcggacgcggcgatcctcaaccgctggctgtttgccggcggcaaggcgcagatccgcgacgtgtttgttgccggagcgcaggtgatcgagcaggggcgccatgcgctgcagcagcagagccgcgccgagtttatgcaggtgctcaaaactttccagcaggaggcgtga

SEQ ID NO: 442737 - DNA, 561 bp, Serratia marcescens
atgctgattaaccggtttgattttgccgacctgccggtcagcccgtggcgcaacggcggcggagaaacgcgtgaaattgtctgccagccggcagacggcgtcgatttcgactggcgggcgagtatcgccaccatcgcacaggacgggccgttttccgccttcgacggtatcgaccgttcgattaccctgctggagggcgacggcgtccacctgttcggcgacggcattgaccaccggctggagacggcgggcgaacccttcgccttctccggcgatgcggcgctgcaggcgcgcctgctggggggcgtcagccaggattttaatatcatgacccggcgcggacgctggcgcgccacggtgcggcggatgacggcggcgtgtgagctgccgcccgcccacgccggcgtctggtatgtgctgcgcggcgaatggctgttgccggcagaaacccggctcggcgccaggcagggcggttggtggccggaggcggcacatggcgggcaggccgcaccgttgagcgcggatgcgctggcgctgtgggccgatctcagccgggtgtaa

SEQ ID NO: 442738 - DNA, 1002 bp, Serratia marcescens
atggcttcgctgaaagacgttgcaaaactggccggggtttcgttgatgacggtatctcgcgccatcaacgagcctgataaactgcgggcggaaacctaccgccgggtgaagcaggccatcgatcaactggactatgtgccggatctggccgcccgccgcatccgcggcgacggcggccgggtgcagaccatcggcgtactggcgctggataccgccaccacgccgttctcggtcgaaatgatcctgtcgatagaaaaaaccgcgcgcgaacatggctggaacagctttgtcgtcaacctgtttgacgatgaatcggcggagcatacggtggatctgctgctggcgcaccggccggacggcgtgattttcaccaccatggggctgcgccaggtgacgctgccagccaagctgctggataagcggctggtgctggcaaactgtttcagccgtacgcagcgtatcgccagctatatcccggatgatgaacaagggcagtatgacgcggcgcgcgcgctgctcgacaaaggctaccgcgcgccgctgtgtatttatctgccggaagacgtgccggcggcgacgctgcgccgatgcgggctggagcgcgcctggcgggagggcggcggcgatatggcgcagctgcggcagtaccacctcaacctgagcggcggcgatgagcattaccgtgactgcgtcgaactgttggcgcgccatttcgcccccgggcggcaggagtgcgacgtggtggtgtgcggcaacgaccgggtggcgttcctggtgtaccagacgctgctggcgcagggctggcgcataccccagcaggtggcggtgctgggctatgacaacatggtggggattggcgaactgtttcagccgccgctcaccaccgttcaactgccgcactatgaactgggccgccaggcggcgctgcacctgatcgagcagcgtgagcaccgcgacagcgtcaaggtaccgtgcccgctgttgctgcgcgcgtcgctgtag

SEQ ID NO: 442739 - DNA, 1443 bp, Serratia marcescens
atgaaagaactcttagcccaggccgatcacgccgtagaaaaactgcgcgccgcgcgtcaggacgacctgtatccgcgtttccacctggccgcccagaccggctggattaacgaccccaacggactgattttcatcaacggggtataccatgcgttttatcagcatcaccccttcgatgaaaattgggggccgatgcactggggacacgccaccagccgcgatctggtgcactggcagcatcagccgatcgcgctggcgcccggcgacgccgacgaccgcgacggctgcttctccggctgcgcagtcgatgaccacggcgtactgacgctgctgtataccggccatgtctggctcggcgagccgggcgacgactcaaagctgcgcgaggtgcagtgcctggccaccagcgaggacggcatccatttcaccaagcacggcgcggtgctgacgccgccggcgggcatcatgcactttcgcgatccgaaagtgtggcggcaagatgagcagtggtggatggtggtcggcgtcaaagacagcgatctgggccaggtatggctgtaccgttccgacgatctgcgcgactggcgctttgaacgggtgctggccgccgccgagcatgcccggcagggctatatgtgggagtgcccggatttcttcccgctgggggaacgccaactgatgattttttccccgcagggactggcggcgcagggctaccgctatcgcaacctcttccagagcggctacctgctcggtaactggcagccgggcgaggcctttgaagtgacccagccgttcagcgagctggatgccgggcacgacttctatgcgccgcagaccttcaccgccgccgatggccgtcgcctgctgttcggctggatggatatgtgggaatcgccgatgcccagcaaggcgcacggctgggccggcgcgctgacgctgccgcgcgaactgtcgctcagcgccgccgggcaggtgcgcatgcagccggcgcgcgaactgacggcgctgcgccgcgaagcacggcagtttgacgccgtgcgctgccgcaaccagcatctgccgctgggggatgcgctgcacgaactgctgctgacgctggatctgaccggcagcgatgccgaacgctacggcgtaaacctgggcgacgcggcgcgactgtatgtggataatcaggcgcaccggctggtgcttgagcggtccagcgacgatccggcgctgtgcggctgccgcagcgtgccgctgccgaccggcgaccgtctgcagctgcggctgtttatcgatcgctcttcgctggaagtgtttgtcaatgacggcgaaacctgtctgaccagccgcatctatccgcaggacggcgattgccggcccggcctgtttgccgaaagcggcgaggcgcatttcaccgcgatcgccggctggacgttggacagcatctggcaataa

SEQ ID NO: 442740 - DNA, 933 bp, Serratia marcescens
atgctgcaggggctgtccgccggcggtgagttcggcggtgcggtcgcactgctgaccgagttcgccccgcccggcaaacgtggccgcttcggcgcctggcagtcgctgaccgtagcgctcgggctgctggcgggcgccgggctggtggcgttgctcagcgcgctgctcagccacgagcagctgcacgactggggctggcgcatcccgttcctgctggcgctgccgctcggcgcgctggcgctgtggctgcggctaaaactggaggagacgcccagcttcacccgggcgcagcaacggcccgccgccgccgagcgcccggcgtccgccgcgccgcttgtcgtggtcaaaaccataaccgtcggcattggccggatgatgggctggtcggccgccggctacacctttctggtggtgatgcccacctatctgcaaacttcgctgcacgccacgctgcaacaggcgttggcggccaccgtgctggccaacgtcggttttgccctgaccattctgccggccggtatcctcagcgatcggctggggcgtaaaacggtgatgatcggcgccatcagcgcggtgatcctgtttacctttccgctgctgcatctgctgcaggacgccggcgcggcgctgtggcaaaaaggtgcggcggtgctggtggccggcgcggtggtcgggctactggccggccccggcccggcgatgctggcagagatgttccccacccgagtgcgctataccgggctcgggctggcctattcgctgtccaacgcggtgttctccggctccgccgggctgattatcaccggtctgattcgtgaaaccggcaatatcgatattccggcctattacgtggtggctacctcactgatcagcctgctggcgctgatgacgctgcggcgcgacgaccacctgcgcccgctcgacgcggcctaa

SEQ ID NO: 442741 - DNA, 1290 bp, Serratia marcescens
atgaagaagacgctactggcgctgtttctcagcgccgcgccgctgtgggcgcacggtgacgatgcgctgatcaagcgcggcgagtatctggcgcgcgccgccgactgcaccgcctgccataccgcgccgggcggcccggcgtttggcggcggctatccggtcagcacgccgttcggcgtgatttacggcagcaatatctcggccgacaagcagttcggcatcggtaactggagcgatgacgaattcgtcgcggcggtgcgcgacggcgtgggtaaaaacggccagcagctctacccggcgatgccgtacgacgccttcaccaaaatgaagcgcgacgacgtgctggcgatcaaagcctacctgctggcgcaaccggcggtgcatcaggcgacgccgcgcaccgatctggccttcccgttcaaccagcgctggggcatgcggttatggaagctgtttaacttcagcgccggcgaactgcggccggacccggccaaaagcgacgaatggaaccacggccgctatctggtggaagcgctggcgcactgcggcacctgccatacgccgcgcactctcaccatggggatggacgaggacaacgcctttgccggcggcgacctcggcggctggacggcgtataacatcacgccggataaacgcgccggcatcggcagttggtcgcagcaggagctggtcgactacctgaaaaccggcaacgtcgccgggcgcgcctcggccgccgggccgatggcggaggccatcgagcacagtctgcaatacctgccggacagcgatctgcacgccatggcgacctatctgcgcagcgtaaagcccatcgccgatgatgcacagcgcaaggcccgcgacgcctggggacagccgacgcaggactacctgacgctgcgcggcggcaatggcagcgaggcctccggcgcgacgctgttcaaccgccactgcgccagctgtcacggcgccgacggcgccggcaaggggagcggtttccacgcctatccatcgctgctgcatcacggcagcaccggcgccgcggacaataaaaacctggtggcggtgatcctcggtggcgtacagcggcatatgcagcagggggaaatcctgatgccggccttcgccggcgagctgagggatgacgaggtggcgacgctgagcaactacgtcaaccgccagttcggcaacccggcggcggccaacgccagcgccgaacaggtggcgcgccagcggctggatgccaatctgccgcagccgccgacggtgctgcagggcgaccggccgtaa

SEQ ID NO: 442742 - DNA, 1617 bp, Serratia marcescens
atgcctgattcattaagtgccgacgtggtggtcatcggcgccggtattgccggctcgctggcggcattaaagatggcgcaggccggcgcctcggtgctgatgctggagtccggcccggagattaaacgtgacaacgcggtggagctgttccgcaactcgccgttcaagggcgactttaccgagccgtttccgccgcagccctgggcgccgcagcccaaattcgtgccgagcgataacaactacctgatccaaaaagggccggacccctaccgcgcccagtatctgcgcggtatcggcggcactacctggcactgggccgggcaggcgttccgcctgctgccgaacgatatgcgcctgcagagcctgtacggcgtaggccgcgactggccgatcggttacgccgatctggaaccttactattgcgaggccgaataccagatgggggtttccggcgacagcgatctggactcgccgcgctcgcgcccttacccgctgccggggatcccgctgccttacggttttgaacggattaaacagcgcgtcgccgggctgggttatgaggtcggcatcggcccgcaggcgcgcaacagcgttccctacgacggtcgcccggcctgctgcggtaataacaactgtatgccggtctgcccgatcgacgcccagtatcacggcggcatctccgcccgcaaagcgctggaggccggcgtgcgcatcgtcgccaatgcggtggtgtaccgtattgaggccgacgacaagggtaatatcgtggcggtgcactatctggatcgcaataaacacagccaccgggtcagcggcaaacgcttcgtactgaccgccaacggtattgaaagcccgaaaatcctgctgctgtccagcagcgagcgttatcgccacggcatcgccaacagttccggcatggtcggccgtaatctgatggatcatccgggcagttcagtagaattttacgccgacgaaccggtatggttcggccgcgggccgatgcggcccggcagcatcaacaacctgcgcgacggcgcgttccgggcgcagcgttcagccctgcgggtcgatctggccaacacctcgccggtgcgctacctcaccgagcgcctgatccgtcagggctattacggcaaggcgctgaatgaaaagctggcgttccagtccgaacgctacgtacagctgaaatgcctgctggagatgctgcccgagccggaaaaccgcgtgcagctgagcaaaaccgagaaagacgcctggggcatccccaaactggaagtctactaccgctttccggagtatgtgcaccgcggctacgaccagtcgatggtcgacttccggcgtatcgtcaaacagatgggcggcagcgaggcgctgtacagccggcgcggcgtttatgacaacaaccagcacatcaccggcaccatgatgatggggcgcgatccgcgcgattcggtggttgacggcgactgccgcagccacgaccaccccaacctgtttatcgccggcaccggcatcatgccttccgcctccacggtcaactcgacgctgaccggcgtggcactggcgctgcgcatggcggacagcgtgctgagcagtctgcagggaggcatggcatga

SEQ ID NO: 442743 - DNA, 522 bp, Serratia marcescens
atgatcgctctttcacgccgccggctggtgctcggctcggcggggttgctggcggccggcgtcctggcgcaaaacctgttgggacgtgccgcgctggcggcgcctgacgccgcatcgctgccggacgcttttctcaccgtctctcgttcgctgaccggtatgccgctgcccgacccgcagctggcgcagcggctgtatcaggcgctgctgccgcgcttcccgcagctgaatccgctgctcgacgcgctggcaacgctgctgcagcaacacggcacccaggacggcgcagccctgcaacaacagctgaaacagcatgccgcaccgctgacgcgcctgtatcacgcgttgatcggcggctggtatctcggcgttatcggcgatgccgcccggcctgaatgcatcgccttcgaaaacatcgtcagctatcaactggtgcgcgactcattaacgccccccagttactgcccgggcgagccaaatttctggatccgacctccgcataaggagaataaccatgcctga

SEQ ID NO: 442744 - DNA, 462 bp, Serratia marcescens
atgaaaaaaatgctcctgttaaccggcgcgctgctctctgccagcgccggccacgccatggcggcgcccgtcgcgccgctgaccaatcagcaggccaatcaggtgatcgacaacgtgcgccacagcctgcaaacgcagcatagcgtcggctgcgtcgccgtggtggatcgcgccggcctgctgctggcgttccaacgctttgacggcgcgccgctcggctgtgtggacgccgcgctcggcaaggcgcgcacctccgctctctaccgcacgccttcactgacgtttatgcaacggctgcaaaacggcgaaaccaccgtgctcgccatcccgcatgcggtggcgctcggcggcggctacccgctgacgcttggcggcgacgtggtcggcgcggtcggcgtcagcacgccaaaacaagagctggataatcaggcttcgcaaaccgccgcctccgcgctgcagtaa

SEQ ID NO: 442745 - DNA, 888 bp, Serratia marcescens
atgaccacctttaccccacgggtcacgctgatcggcttcggtgaagtcggcagcattctggctcaggcactgagcgctcagggcgcatgcgttaccgcctatgaccagcacattacgccggcgatgctcgccaccgccgagcgctgcggctgcacgctgaccgaacaactgccggcggcgctggccgacgccgagctgattttttccgtcgtcaccgccgccaatacgctggcggtcgccacgcagtgtgctccgctgctgcgcgccggccagtactttttcgacctgaactccgccgccccccataccaaacgcgccgccgctgcggcgattgagcaagccagcgacgcgcgctatgtcgaggttgcggtaatggcgccggtgccacccaagcggctgcaaacgccgctgctgctgggcggcccggcggcggccgagggcggcgcacggctgcagccgttaggatttaacgccaggattcacagcgatcgcatcggcgaggcttcggcgatcaaaatgtgccgcagcgtgatgatcaaggggctggaggcgctgaccgtcgaatgcctgcacgccgcccgccgctacggcgtcgaacggccggtgctcgattcgctgcacgccagtttcccgtcgctgggctgggacgagcggctgccccactacctgattagccgggtagcggagcacgggcaacgccgcgccgaggagatgggggaagtggtgaaaacgctgcaggacgttggcgtggaaccgcaccaaagccgcgcgacggtgttatcgcagcaggggctggtcgacgcgatgaaagcgcaaaatatccgctattcgcaactggaacctttcgtttggcaacaagcacttgaggcgatctacggcaaattgtga

SEQ ID NO: 442746 - DNA, 1080 bp, Serratia marcescens
atgcgccaacgtcggatcccctgcctgctgatgcgcggcggcacctcaaaaggcgcattctttctggcggacgacctgccgtcacagccggcggcgcgcgaccgcgtactgctggcggcgatgggctcgccggatatccgtcaaatcgacggcctcggcggcggcgatccgctgaccagcaaagtggcgatcgtcagccgctcgcagcgtgcagacgccgacgtcgactatctgttcgctcaggtcaacgtcgaccgcccggtggtggattacggccagaactgcggcaatattctggcggcggtcgggccgttcgccatcgagcgcggcctggtggccaccgacgcggcgttcaccgaagtgcgcatctttatgcagaacaccggccaggtggcggtggcgcgcatccccacgccggacggcgaggtgcgctacgacggcgatctgtccatcgacggcgtgcccggcagcgccgccgaaattgtactgaccttccgcgatatcgccggctccagctgcggcgctctgctgccgaccggccgggcctgcgaccagattgacggagtggcggtcacctgtatcgacaacggcatgccggtggtactgctgcgcgcagcggatctcggccgcagcggctacgaaagccgcgagcagctggatgccgaccaacagctcaaacagcggctggagcatattcgcctgcaggccggcccgctgatgaacctgggcgacgtcagccagcgcagcgtgccgaaaatgaccctgctggccgcgccgcgcgccggcggcgccgtcagcagccgcacctttattccccaccgctgccacgcctcgatcggcgtgctgggcgcggtcagcgtcgccagcgcctgtctgctggcgggcagcgtggcgcaaccgctggctcaggcaggcgacgatgaacagcagcgcgtcagcgtggagcatcccagcggcgaattcagcgtcttgctgacccgcacgcccgccggcgaactgacacaggccggcctgctgcgtaccgcccggctgattttcgccggtgaggtgtgcattcccggcgcgatctggccggcctaa

SEQ ID NO: 442747 - DNA, 714 bp, Serratia marcescens
atgagcatcatcggtaaaaaaggcgtggtggtgcgttctgtcccgcgcagcagcgacgccacgctggcggcgctggcggcgttcggcgtcgccacggtgcatgaggcgcagggtcgcaaagggctgctcgatccggccatccggccgattcagcaggatcgcgggatcgccggcaatgcggtcaccgtgctggcggcgccgggcgataactggatgttccacgtggcggtcgagcagtgccggccgggcgatattctggtggtggcgccgacctccccctgcatcgacggctacttcggcgatctgttggccacctcgctgcaggcgcacggcgtgcgcgggctggtggccgatctgggggtgcgcgacacccgcacgctgcgtgaaatgggcttcccggtctggtcgcgggcggtgtatgcgcagggcacggtgaaagagacgctggggtcagtcaatgtgccgctggtgtgcgccgggcagctgatttatccgggcgatgcggtggtcgccgacgatgacggcgtggtggtggtgcgccatgccgaggccgaagcgacgctggcggccagccgccgccgcgccgagctggaggagagcaagcgcctgcggatggccaacggcgagctggggctggatatttaccagatgcgaccacgtctggcggaaaaaggcctgacctactacgactcactggaccagttggaggagtaa

SEQ ID NO: 442748 - DNA, 741 bp, Serratia marcescens
atgagtgagataaccgcaaacaaaaccgccctggtggtcagcgcccattccgccgactttgtctggcgcgccggcggcgccattgcgctgcacggtcagcagggttatcaggtgcatatcgtctgtctgtcgttcggcgagcgtggcgaatcggccaagctgtggcgcaaaggcgagatgaccgagcaaaaagtgaaggctgcccgccgggaagaagcctgcgccgccgccgaaatcctcggcgccagcatcgaattcttcgatatgggcgactacccgctgcgcgccgataaagagcatctgttccgcctggcggacgtgttccgccgggtgcagccgcactttgtgctgacccactcgcaaaaagatccgtacaactacgatcacccgctggcctgcaacctgacgcaggaagcgcgcattatcgcgcaggcggaaggctaccggccgggcgagccgatcgtcgccgcgccgccggtgtacctgtttgaaccccaccagccggagcagtgtgaatggaaaccggacgtgctgctggatatcacctcggtatgggataaaaaatatcaggcaattcagtgcatggccggccaggaacacctgtgggagtactacacccgcgtcgcccagcagcgcggcgtacaggccaagcgcaacgtcggcatcgccagcggcaaaaacatcgtgtatggcgaaggctatcagagcattttcccgcgggtgacggaggatctggcatga

SEQ ID NO: 442749 - DNA, 1224 bp, Serratia marcescens
atggactatgaagaagacgcgctgacaaacctgatgcaaatcagagcattcagccaggttgtcacgcagggcagcgtttcgcgcgccgccgatgagttattcagaacacagtcggccatcacccggtcgattcgcgatctggagcaaaaactggcggtgccgctgtttgagcgtcatgccagcggcatgctgctgaccgatttcggcaagtgcgtgctgccgcgcgcgcggcgggcgattgcggaactgcatcaggtgccggcgctgctggcgcgtctgctgggtaaaggggcggcgcgtaccgacagcgaaccgctgtacctgtttaacgtacgccggctgcagattttcgtctgcctgtgtgaaacgcggcatatgcagaccgtggcgacgctgctgggcctgagccagccggcgatcagtgcggcgctgaaggtgctggaaaacggcgtcggcacgccgctgctggagcggacgccgcacggtatggtgccttcgctggccggacgggaaattgaggccaacatccggcgtgcgctcaatgagctgcaccatattccggcggatatcgccgcccggcgcggggtgctgaccggcgcggtgcgggtcggcgcgctgccgctggggcgtacccggctgctgccgcaggcgattgtccagctgacctcgcgctatcctggcgtcagcgtggtgaccaacgagagtgcgttttccgcgctggtgtctgaattacgctccggcgatatcgattttatttttggcgcgttacgcgccagcgattatgcggcggatgtgtacagcgaaacgctgtttaccgaagagatggtgctgctggcgcgtcgcggtcatccgctggcgcaggccgggctgcagccggcgcagctgaagggcgcgcgctgggtgctgccgcgctcggccaccccggcgcggcgtctgttggacgactgctttctggcgatggcgatgccgccgccgtcgccggtggtggaaaccggcgatctggcgctggtgcgcgggctgttgctcaattcagatatgctggcggcggtgtcggcgcaccagctggagcatgaactggcgtcgggggagttggtgcagctgccgctggcgctgcccaacaccggccgcgccatcggcctgacgttccgtaccggcagcctgcattcgccggcggcgcaggcgctgatcgacagcctgcgcgcgcagtgcgccggtatcggttaa

SEQ ID NO: 442750 - DNA, 432 bp, Serratia marcescens
atgaaaaccatttacgtgcttaacggccccaacctcaacctgctgggcagccgcgaaccggaaacctacggccatgacacgctggccactatcgaagcgctgtgccgccggacggccgccgagctgaatgtggaactggtatttctgcagaccaaccacgaggggcagatgatcgactggatccaggagacgcgcggcaaggcgcaggcgctggtgatcaatccggctgcctggacccacacctcggtggcgattcgtgacgctgtcaccgccgtcgccctgccgctgtttgaagtgcatatcaccaatgtgcacaagcgcgaaccgttccgccaccactcctacctgtccgatgtggcgcacggcgtgatctgcggctttggcattcaaggctaccgctacgcgctgatgcaggccgccagcctgctttaa

SEQ ID NO: 442751 - DNA, 834 bp, Serratia marcescens
atgacaacactatttagccagccgaagatcgactgccaccaccacctgttcgacccgggccatttcccctatgcgccggacagcgcctataacccggccggccatgagctggcgacgttggcccactaccgcgcggtgatgcaggcctacggcattcgccattcgctgattgtcggccccacttcgggctataacaccgacaaccgctgcctgctggcggcgctggccggcggtgaaggccgccataagggcatcgcggtggtgccgttcgacagcagcagcgaatcactggcgcaactgcagacgcagggcgtggtcggcatcgccctcaacgtcgccatgctcggcgtcgcgccgtttctgcagcttgaccggctgatggcgcaattggcggaactggggctgtacgcgcagattcaggtacaggatgaccagttgccggcactgctgccgctgctgcggcgcagccgcgccagactgctgttcgaccacagcggccgccccgacgtcgacgccgggctggagcagccggcctttcaggcgctgctgcagctggcggagcgtgaacatgtgtatatgaaactgtccgggctggcgaagttttcccgtcagcactacccgttcgccgacgcgcagccctatgtgcaggcgctgctggccgcctacggcgcggagaagtgcatgtggggctccgactggccgttcctgcgcgccaccgaacggatggacatgggcacgctgctgatgctgtgcgaaagcctgttccccgacgcgcagacgcgtcaacagattctgtggcacacgccgcagcgcctgtttggttttactgactaa

SEQ ID NO: 442752 - DNA, 1263 bp, Serratia marcescens
atggcaacgatcattggcggactggccgtgtcccacacccccaccatcggctttgcggtggatcacaataaacagcaggagagcgcctgggcgccgattttcgacggtttcgccccgatgcagcaatggctggcggagaaaaaacccgacgtgctgctgtacgtatttaacgaccacgtcacgtcatttttcttcgaccactattcggcatttgcgctggggattgacgacagctacgccgtcgctgacgaaggcggcgggccgcgcgatctgccgcccgtcgccggccatgcggcgctgtcccagcatatcggcgccagcctgatggcggacgaattcgatatggcgttcttccaggacaaaccgctggaccacggcctgttctcaccgctgtccgccctgctgccctggcaggatagcggctggccgacccgggtagtgccgctgcaggtcggcgtgctgcagttcccaatcccgtcagcccgtcgctgctacaaactgggccaggcgctacggcgggcgatcgaaagtttcccggaagatctgaaggtggcggtggtcgccaccggcggcgtctcgcatcaggtgcacggcgaacgctgcggcttcaataacccggaatgggacgctcagtttgtcgatatgctggtgaacgatccgcagcgcctgaccgacatcaccctggcggaatacgccaccctcggcggcctggaaggggcggaggtgattatgtggctgattatgcgcggcgcgctctccgccaacgtggaaaaactgcatgaggcctactacctgccctcgatgaccggcatctccacgctgattctggaaaaccgcgcgcgcgaagcgccggtcgacgtgcagcagcgccagcgcgacaaaatcaatcagcagttggccggcgtggaaaaactgccgggcacctacccgttcacccatgcccgcagcctgaaggcgctgcgcatcaaccgctttctgcaccggctgatccagccggactggcgcgcccgtttccttcaacagcagcaggcgctgtttgatcaggcggcgctgagcgacgaagaacagcgcatgctgcgcgaactcgactggcgggcgatgatccactacggcgtcagcttcttcctgctggagaagctgggcgcggtggtcggcagctccaacctgcatatttacgccgccatgcgcggcgaaacgttggaggagttccagaaaacgcgtaaccagcaggtgctgtattcggtcgcggggaaagacgcatga

SEQ ID NO: 442753 - DNA, 1380 bp, Serratia marcescens
atgagcaaccacaacattgttgacgtcaaagcgtggatcgattcgcgccccatctccggctatcagtggctggtattaatcctgtgcttcatcatcattatgttcgacggttacgacgccgcggtgatgggctttatcgccccggcgctgatcgaagactggggcatttcacggggcgaaatggggccgatcctcggcgcggcgatgctcggcgtcgcccttggcgcgctgatcgccggcccctactccgaccgcttcggccgcaagaaagtgctgctgctgtcgatcctctgtttctcgctgttcagcctgctcagcaccttcgcccgcaccccgctggaaatggccgtgctgcgctttcttaccggcctcgggctgggggcggtgatgcccaactgcgtgacgctggtgtccgaatatatgccggagcgccgccgcagcctgatgatcaccctgatgtacagcggctttaatatcggctccggcgccggcggttttatcgccgccggcatgctgccgagcctggggtggaaatcggtgctgttcctcggcggcctgctgccgctgctgatgctgccgctgctgatgtggatcctgccggaatccaccctgtatatggtggtgcgcaaccaacataaagacaaaatcgcccgcatcctgcggcgcgccggcggcgtattcagcgccggcaccaccttcgtgctgaaaacgccggcgatcgccaagaaggcccgggtgctgcaactgttcagcaacggctacgccagaggcacgctggtactgtggctcacctattttatggggctgtttgtgatttatctgctcaacggctggctgccgaccatcgtgcgcggcgccggtttttcgctggagcgcgcggcgattatcgccggcttatttcagctgggcggcaccatcggcgggctgctggtgggtaacctgatggatcgcttcgtcgccaaacgggtgatcgccctgttctacctgatgggcatgtgctgcctgctggcgcagggcatctggggctttggcccgacggcgctggcggttctggtgtttatcagcggggtatgcatcaacggcgcgcaaaccggcctgcaggcgttctccccggcgttctacccgacggagatgcgcgccaccggcgtcagttggatgcacggcatcggccgcagcggcgcaattatcagttcatcgctcggcggcgtgctgctggggatgttccccggcgccaccagcattttcattatcctcgccaccccggctctgctggcggcgatcaccattatcaatcatcagcacgcgcgtccggcggaaagggtaaaaggcattggccttaacgacctgccagcgctgtcgcgcaccatgaataaccggtaa

SEQ ID NO: 442754 - DNA, 210 bp, Serratia marcescens
atgaagttctcggagcaggagataaaacccgtttgggacgaagtcgcccgcctgatcggcgacggcgtgatgcagctgcgccatcgcggcgaagcgctgtcggtggaaaccttggccaggcagctggcgcgccagtcggcggcctgtcaggatattgagcagcgtattctgctgggcgcggcaattaatatgctcaaagggggagaatga

SEQ ID NO: 442755 - DNA, 165 bp, Serratia marcescens
atgatgagtctggtggagcaactggcggagtattaccgcacatcgcgcacggcggaagttcagcatccgctttgtcgctggtggctgccgcagggagaagaacgcgtagcctatttacgtgaattgctggagccgacggccagaaagcctgtcgcccggcactaa

SEQ ID NO: 442756 - DNA, 393 bp, Serratia marcescens
atggccaaggtaataccggcacactatgagcaggcagagcgctgggcgttcggcgataacgaagaattagcggatgagctggtgcagctgatcctgaacggcagcaagaccgccacctgttccaatctggatgaggacggcattccacaggccggcgatattttcgtggtggtggacggccggggggaaccggcctgcgcgatcaaactgacttcggtcgatgtgcgcagttacgatcaggttgatgaagcgcacgccttcgccgaaggggaaggcgaccgcacgctggcctactggcgccgcgagcaccggcgcttctttgaggcctacgatatgtttgcgccggatatgacgctgatcctgatgcattttaccgtggttgaggcgttttag

SEQ ID NO: 442757 - DNA, 603 bp, Serratia marcescens
atgtgcgcggtgccgtattgttgccagtgggcgacgccggaactggcggccgatctgattgccggccgcgccacgctggcagatgatccgaactgggcggccagcggcgcgctggaacaggcggaatacctggaatgggccaaccacgtgtgcggcatggcctgtctgcggatgattctgcttcaccgggacggcagcgcgccgccgctgctggcattggcgcggcgcagcctgccatacggcgcctatgtgcggcaggacgacgaacggataaaggggctgatttatgcgccttttgttcgttacgtggacgaacagtttgcgctgcaggcggcggtgcaggtcgatatgacggccgcacaactgccggcgctgcttgccgagtggcgctacatcattgcctcggtgcatccctccatccggctgccgctgcagacgccgccgcagcggggcgggcatctggtgctgatcactgcggcgccggcggggcggctgcagttccataacccgtctggcgatcgtccggaaacgcaggaaaacgtgacaatgtcacctgaagcgttcggccgatttttcgccgggcgcgttatcacggtgaaataa

SEQ ID NO: 442758 - DNA, 249 bp, Serratia marcescens
atgagcgtatccgtagtgaaaataggcagttttgaggtcgatgatgccattcattccgctgccgccgaacaggcggagagcaatggcctgctgaccattccatgcaaatcggacccggatttgtgcatgcaactggatggctgggacgagcacaccagcattcccgccacgctgaacggtaagcagttgttgctgtataaacagcattatgatcgtcagcaggacgcctggattatgcgtatcggctga

SEQ ID NO: 442759 - DNA, 1440 bp, Serratia marcescens
gtggttaaaactgcttccgtatttcttccgccggcgtttctcgacgccacacgcgctatcatgcccgccgatctgtcaatggacgattttatcgccgcctgtcaacgcccgttacgccgcagcctgcgcgtaaatacgctgaaaatcagcgtcgccgactttctggcgcgggtaaaagagtacgactggcaattagagcctattccctggtgcgccgagggcttctggatcgcccgcgacgatgaaagtctgcggctgggcagcgcggccgaacacctcagcggcctgttttacatccaggaagccagctccatgctgccggtcagcgcgctgtttgccggcggtgagacgccgacccgggtgctggacgtcgccgccgctccgggttcaaaaaccacccagattgccgcgctgatgcataatcagggcggcatcgtcgccaatgaatacgccgccagccgggtcaaagtgctgcatgctaatgtcagccgctgcggggtcagcaactgcgcgctgacccattttgacggccgggtgttcggcgccgccctgccggaagcctttgacgccatcctgctggacgcgccctgctctggcgaaggcgtagtgcgtaaagaccccgacgccatgagcaactggtcgccggagagcgtcgccgacatcgccgaaacgcagcgcgaactgattgacagcgcgttccacgcgctggcgccgggcggagtactggtctactccacctgcaccctgaatgcgcaggagaaccaggcggtgatcctgagcctgctggccagctatggcgatgcggtcagcatcgagccgctgggcgatctgttccccggcgcgccacaggcgctgacggaggaaggtttcctgcacgtgttcccgcaaatctacgacagcgaaggcttttttgtcgcccgcctgcgcaagcaccgctcggtgccggcgctggcgaaaccgacctataaggtgggtaaattccccttcacgccgatgtcgcgcaaagacggcgagctggtgcgccaggctgccaacgccgccggcctggcctgggatgacgccgcccatgccctgtggacgcgcgacaaagagatctggctgttcccaagggcgctggaagcgctgatcggcaaagtgcgcttctcacgcatcggcctgaagctggccgagcgcttccccaaaggttaccgctggcagcatgaggcggcgatcgcgctggcggacggccaggggccgcaggcgttcgagctggacgcagcgctggcgcaggagtggtaccacggccgcgatctgtatccagacgcgccgccgcagggcgatgagtgtatcgtcacctaccagcaacagccgctgggcatcgccaaacgcatcggcagccggattaaaaacaacctgccccgggaactggtacgcgacggcgcgctcgatttccaccagtaa

SEQ ID NO: 442760 - DNA, 2634 bp, Serratia marcescens
atgcaacaggaaacgccgaatacgccgactgaagcgcgggttaaaaacaaacgccgcatttcacctttttggttactgccgtttatcgccctgctgatcgccggctggctggtgtacaacaattttcaggagcgcggcaccaccatcaccatcgatttccaatcggcggcgggcatcgtcgccggccgtacgccggtacgctatcagggcgtggatgtcggcaccgtccagtcgatccggctgagcaaagatttgggcaagattgtggtggaggccagcatcaaaagcgagctggaagattcactgcgcgacggcacccagttctggctggtgacgccgaaggcctcgctggccggcgtttccgggctggatgcgctggtcggcggcaactatatcggtatgatgccgggcagcggcaaggcgcagacccacttctccgcgctcgatactcaacccaaataccggctcaataccggcgagctgatgattcacctgcatgcggaagatctcggttcgctgaataccggctcactggtgtattaccgtaaaattccggtcggcaaggtgtacgactacaccatcgccaacggtaataaaggcgtcaccatcgacgtgctgatcgaccgccgcttcgccaatctggtgaaaaccgacagccgcttctggaacgtctccggctttaagggcgacttcaacctctcgggcgcctcggtgcagatggagagcctggcggcgctggtcaacggcgccatcgccttcgactcgccggaaaagagccaacaggccaaagccgaccagagctatcagctgtaccctgacctggcccgcagccagcgcggcgtcagtatcacgctggatctgccgagcggcaataacctgagcgccaaccatacgccgctgatctatcagggactgcaggtcggcaccctgaccaaactgacgctgcagccggacaacaaagtgaccggtgaactgaccatcgacccgtcggtggtggatctgatgcgcagcggcacgcgcatcgccatgcgcagcccgaaaatcagcctgaatgacgccaaactcagccagttgctgaccggcaacacgctggagctgatcccgggtgacggcgaaccgcagcaccacttcaacgtgctcgacagcagcgaaacgctgctgcagcagccgggcgtgctcaccctgtcgctgaatgcgccgcagagttacggcattgacgtcggccagccgctgattattcacggtatcaaggtcggccaggtgctgaaccgcacgttgaccaacagcggcgtcaccttccgcatcgccgtcgacgcgcagtaccgcgctctggtgcacaaagacagcaagtttgtggtcaacagccgcctggacgtcaagctggggctggacgggatggaagtggtcggcgccagcgcccaggagtggctggacggcggcatccgcattattcccggcagccgtggcgaaccggcaacacagtatccgctgtacgccaacagcgacaaggccaaggcgggcatcaccggcaatgcaccggcgccgacgctgacgctcaccgcctccagtctgccggacgtgcaatccggctcggtggtgctgtaccgcaagttccaggtgggcgaaattctcgacatccgcccgaaagccaatgcgtttgaggtcgatgtgtatatcgacccgcaataccgcaaactgctgggcaagcagaccgtcttctgggccgaaggcggcgccaaagtccaactgagcggcagcggcctgacggtgcaggcttcaccgctgaaccgggcgctgaaaggcgcgatcagcttcgataacctgcagggcgtggcgctgggcaaaggcgacaagcgggtgctgtacagcaatgaaaccgccgcccgcgcggtcggcagccaaatcaccctgcgcacctataacgccagcaaactggccgccggtatgccgatccgctatctgggcatcgatatcggccaggtggagtcaatgcagctgtcgcctgaccgcacccaggtgctggcgaaagccgtgctgtatccggaatacgtgaacaacttcgcccgcttcggtacccgcttctccatcgtctcgccggagatttccgccgccggggtcaataaccttgataccctgctgcagccgtatattaacgttgagccgggccgcagcagccgtccgctgcgcagctttgagctgcaggaagccagcattaccgattcgcgctatcaggacggcctgagcgtggtgcttgacgctgccgaaaccggctcgctgcagatcggcacgccggtgctgttccgcggcgttgaggtcggcaccgtcaccggcttctatctgggcgcgatgtccgaccgggtgcatgtcgccctgcgcatcagcaagaaatatcagcatctggtgcgtaacaacagcgtgttctggctggcttccggctataacctgcagttcggcctgaccggcggcgtcatcaagagcggcaccttccagcagtttatccgtggcggtatcgccttcgccacgccgccgaccatcccgctggcgccaaaagccgccgccggcaagcacttcatgcttaatgcggaagagccgaagggatggcaagcatggggaaccgccatcccacgcgattaa

SEQ ID NO: 442761 - DNA, 618 bp, Serratia marcescens
atgattgattcagcaaacatctgcgttaaacggggttttttaacatttaatagtgaaggtgataatgtccgctcatcgccttattactcccgtgttgtgcattatccaaaccgcgatatttcaggtgttactattgggcgtggttacgatcttgggggaagatcaccggtagaaatctttactgatttgacccgagcaggtgtaagcaaggttcaagcaaaagctatctcgaaaggcgcgggacttagaggccgagaggctgctgagtttgttagaaaaaatagggtgactataggtgagataaccgagcggcaacaggcagatctatttaatcaaatttatccgttttatgaacgacgtgcaaaaatcgtgtataacgtgagaacggcacacattcatggacgccctgaatgggaaattttgcacccagctattcgcgaagtacttattgatatagtctatcaggggtatcaggcgcgtaagacaatgttgattgcggcaaataacaatcttaacgaaatgataaattttatacgaagcaattctgagttaacccgtgatgagcggggaagaaacagggctggttatttagataaatgcagagagagtggggaatag

SEQ ID NO: 442762 - DNA, 234 bp, Serratia marcescens
gtgcgactggcggagataaggaaggatttggcgaaccttggcgatgccgaatatagcgccgcttttgaaaccgcacagacctcttgggagcgttataaaactgactattgcgcctatctgacggcggggatggaccggcgcggcagcgcttttaagctgcagtcggatctctgtcaggcttcggagaacgagcggcgcttacagacgctacaaggggagccgtcaaccagttaa

SEQ ID NO: 442763 - DNA, 165 bp, Serratia marcescens
atgatgttaaacaaaggttttatacgattagcgggcgtgatatccgttgtttctgtcgccactggcttcacccgctggcctggcgtgatgtttatttccagctgtgcgatgatcgtgatttggatccatgccgaatgggactggcgccggcaggataactcctga

SEQ ID NO: 442764 - DNA, 1410 bp, Serratia marcescens
atggtcacattccgcacgtttatctatgatttaactatgacactctccagctctgacgggttgcccgtgccgcagcgctacggcgcaatcctggccattgcccttggcatcaccgtttccgtactcgacggggccatcgccaatgttgcgctgcccactatcgcccgcgaccttaacgccagcgcggccaactctatctgggttatcaatgcttatcagctggccattaccgtctcgctgctgtcgctggcctcgctgggagacttgctcggctaccgccgtatctaccaatgggggctgttggtttttagcctgacgtcgctgttttgcgccctgtccgacagcctgactaccctgactattgctcgcgtgctgcaagggtttggcgccgcagccatcatgagcgtcaataccgcgctgatccgcattatctatccgcagcgttacctcggccgcggcctggcgattaacgcgttgatcgtcgccttctcgtccgccgccgggccaacggttgccgctggcattttatcgttcgcctcctggccgtggctgttcgcgataaatctgccgatcggtctggcagcgtggctgctgggcatgcgctatctgccggccaacagccagaaaagccgcgggcgctttgacccgctcagcgccgtgatgaatgcgctgacctttggtttgctgatcgccgccctcagcggcttcgcccaaggtcagagtctgacgctggtggcggcggaactggccgccctgctggtgattggctggtttttcgtgcgccgtcagttgcagcaaagcgcgccgttactgccggtcgatttgctgcgtatcccgatctttgcgctgtcgatgggcacctcaatctgctcgttcgccgcccaaatgctggcaatggtgtcgctgccgttctttcttcagcaggtgttagggcgtgacgaagtcgccaccggtctgctgctgacgccttggccgctggcgatcgtggcagttgcgccgcttgccggccggctgattgaacatgtccacgccgggctgctgggcgcgctgggactcggcctgttcgctcttggattattcctgctggcgacgctgccgcagaacccggccgatctggacatcgtctggcggatggcgctgtgcggcatcggttttggcctgtttcagtcgccaaacaaccacaccatcatctcttcggcgccgcgtcaccgcagcggcggggccagcggcatgctgggcaccgcacgcctgctgggtcagacctccggcgccgcactggtggcgttgatgttcaacctgtttccggagaacggcacacatgcatcgctgctgctggccggcagttgcgccacctgtgccgcgttggtcagcgccttacgcatccgtcagccgcgcgccgctgcgcactaa

SEQ ID NO: 442765 - DNA, 792 bp, Serratia marcescens
atggcgaatacggatctagataaacaaccggatgcggtttcatcggtgctgaaagtgtttggtattttgcaggcgctgggtgaggaacgcgaaatcggtattaccgagctttctcagcgggtgatgatgtccaaaagtaccgtttaccgttttctgcaaaccatgaaatcattgggctacgtggcgcaggagggggagtcggaaaaatactccctgacgctgaagctgttcgaactgggcgccaaatcgctgcagaatgtggatctgatccgcagcgcggatatccagatgcgcgagctgtcgcaacagacccgcgagacaatccacctgggcgcgctggatgaagacagtatcgtttacatccataaaattgattctttatacaatttgcgcatgtattcccgtatcggtcgccgtaacccgctgcacagcacggcgatcggcaaagttctgctggcgtggcgcgatgaggccgaagtgggcgatattttgtcgcagatcgagttcactcgcagcacggcgcataccatcaccagcgcggcgcaactgctgccggtgctgacgcaggtgcgccagcaaggatttggtgaagacgtggaggagcaggaagaagggctgcgctgtatcgcggtgccggtgtttgaccgcttcggcgtagtgattgccggcctgagcatctcgttcccgaccatccgcttctccgaagaggcgaaggccggctatgtgcgtcagttgcaccatgcggcgcgtattatttccgaacagcagggctatcacgactacccgttctga

SEQ ID NO: 442766 - DNA, 459 bp, Serratia marcescens
atggacacgattgaagaattaggtgggcgctatttctatgcggggagatatcatctaagcatcggtgagctgtttttcatgatcttctgtgaagagacagctaaccaattaggcattcaggatgttggggcggttgccgctatcttggggggattcaatgtttcaaaaacccggggcaaatttagaggaaatattactgatacctcctatgtttcccggggggctcgtaaggtattcggcaacaaaacttttcccggtaatataaaattaccgtctgttgttggaggatatcctccctctacaatgagagttattttaacgcgtaagttgggaacatttgtggggcgcgctgtacctgtccttgggtggattattttggcgaaagacattaccgagatttcttttcggacggtggttaagtacaacactattgcccgtgggagtgacaagctatggtaa

SEQ ID NO: 442767 - DNA, 333 bp, Serratia marcescens
atggtaacggaacaggaggttttagattttttccgcgatgagttatctgttcctcttacctggacgatgaagatggttccgcttgaactggacactatgctgcaggactacgctgtaggtgacgaattcttctatgcgattgaggactacgctgaaaaattcgatgtagatgtatcgtccatcgatatgcgctactactacccttgggaaaatttatctcgttgggagcgttggaccaaataccaaaaagctgatgtagaaaagaccagaaagcctttaaccgtgcgtatgttcgccgagtctgccaaggccgggcgttggctgtatgattaa

SEQ ID NO: 442768 - DNA, 720 bp, Serratia marcescens
atgaaacaccctcagggcgatctcccccactatctgcagatcaaagcgcagttacagtcacggattagcagcggtgcgctgaaggccggggataagctgccctccgaacgggagctgtgcgcggccttttctactacgcgtatcaccattcgagaaagcctggcgcagttggaggccagcggcgccatctatcgtgccgaccgccgcggctggtttgtcacgcccgaacggctgcgactggacccgacgcagaacaccaattttcaccgtttatgtcaggaacagggacggcaggcgcgcactgcgctgctggcgggggaacacgtcggcgcatcgccggaggtgggacaggcattggcgctcgaaccgggcacgcgaatctacctgctgcgccgggtgcgctatgccgacgaacgggccatctgttattgcgagaaccactgtttaccgcagcgggtgccggggctgctgcagcacgatctgaacggcagcctgaccgagatttatcagcagcattaccaactgctctacagcagcatgcacctgtcgttttaccccaccgcgctgccgcccgaagccgccgccgcgctgggggcaatggtcggcctgcccgccctgctgctgcgccgtctgaattacgatcggcacgggcacattcttgatttggatattgagtactggcgccatgacagcctgcgtattgaggtcgatacacagtaa

SEQ ID NO: 442769 - DNA, 1104 bp, Serratia marcescens
atgaacgatcgcgattacctgctgttgacgcccggcccgctgaccacctctgatacggtgaagcaggcaatgctgttcgacagctgtacctgggatgaggattacaatatcggcgtagtccagacgattcgcgcccgcctgaaaacattggccaccgcctcgtccggctacacctcggtgctgctgcagggcagcggcagctatgcggtggaagcggtgctggggacggcgctcgacgcgcaggataaggtgctgatcgtcagcaacggcgcttatggcgcgcgaatggcggagatggcggcgctgatgggcatcgatcaccactgttatgactgcggagaagtggcggaaccggacgtggcggagatggaagcgctgctgctggccgatgcacgcatcagccatatcgcaatggtgcattgtgaaaccaccaccggcatgcttaatccgttggcgcaggtggcggcgctggcggcacgccgggggaagacctttatcgttgacgcgatgagcagtttcggcggtattccgctggacgtggaggagttggggatcgattttctgatcagctcggccaacaaatgcattcagggcgtgccgggtttcgcctttgtgatcgcccggcgcagcgaactggaaaaatgcgccggccgttcgcgttctctgtcgttggatctgtatgcccagtggcgctgtatggaagaccacgccggaaagtggcgcttcacctcaccgacccacagcgtactggcttttgcgcaggcgctgcgtgagctggatctggaaggcggtatcgccgcgcgctatgcgcgttatggtgaaaaccagcgccggttggtggcggggatgcgcgcactggggtttgaaaccctgctggatgatgcgctgcactcgccgattatcaccgcgttttactccccacgggcggaaaattaccgcttcggcgagttttaccaacgtttaaaacgccaggggtttgttatctaccccggcaaagtgtcgcacagcgactgtttccgtatcggcaacatcggcgaggtctatccgcaggatatcgaccgtctgctggacgccgtcggtcgcgccatgtactggcaacaataa

SEQ ID NO: 442770 - DNA, 810 bp, Serratia marcescens
atgcaacaggttaacgccgttattctcgactgggccggcaccacggtggattttggctcctttgcaccgacacagattttcgtcgaggccttccaacagacctttggtatcgccatcactctggaggaggcgcgtattccgatggggctgggcaaatggcagcatatcgaggcgctgggcaaactgcccgggattgacgcccgctggcgggcgaagctggggcgctcaatgactcctcaggatatcgatgcgctgtaccaggcgtttatgccgctgcagattgccaaggtggtggatttcgccgagccgattgccggcgtgcccgaggtgattgccgaactgcggaggcagggtataaaaatcggctcctgttccggctatccgcgcgcggtgatggacgtgctggcgccggccgccgctgcacgcggctatgcgccggactattgggtggcgacggacgatctggctgccggcggccgcccggggccgtggatggcgctgcagaatgtgattgcgctgggcgtcgacgccgtcggccactgcgtgaaggtggatgatgccgtgccgggcattgccgaagggctgaatgccggcatgtggagcgtggggctggcgctgtccggcaatgagttcggtgttcagtggcaggagtaccaacggatggatgccgccgaggtagcgcggcggcgtgggctggcggcggagaagctctatgccgccggcgcccattacgtgattgacacgctggcggagttgccgggcatattggacgcgatcgaccggcggctggcaaacggcgagcggccgtag

SEQ ID NO: 442771 - DNA, 768 bp, Serratia marcescens
atgtctatgaccatcaattcctttgatttaaccggcaaagtcgccatggtaaccggctgcgacaccgggctcggccaaggtatggcagtcgggttggcgcaggccggctgcgatattatcggcgtcaaccgcagcgatcccgaacacaccagcgcacaggtcagcgcgctgggccggcgctttctcaagctgcatgccgatctcagccgtaccgacgtcatccccgcgctgattgacagcgccgtcgccgaattcggccatatcgatattctggtgaataacgccggaattatccgccgggaagacgcactcgatttcagcgagcaagactgggacgacgtgatgaatatcaataccaagacgctgtttttcctgtcgcaggcggtggcccggcagtttatccagcaaggcggcggcggtaaaattatcaacatcgcctccatgctgtcgtaccagggcggcattcgcgtgccttcttataccgcctccaaaagcgcggtgatggggctgacccgcctgctggccaacgagtgggccaaacacggcatcaacgttaacgctctggcgcccggctatatggccaccaacaacacgcagcagctgcgggccgatgcggggcgtaatcaggagatactggagcgtattcccgccggccgctggggcgtgccgcaggatatgatggggccggtggtctttttggcgtcatcggcgtctgactatgtcaatggctacacgttggcagtggacggcggctggctggcgcgctaa

SEQ ID NO: 442772 - DNA, 837 bp, Serratia marcescens
atggacgtccgtcaaagcattcacagcgatcacgccaaacagctcgacaccgccggattacgccgcgaatttctgattgaaaagattttcgaggacgaccagtacaccatgacctacagccatattgaccgcattatcatcggcggcatccagccgcgccggcaaagcgtcaccatcggcgatgaggtcggtaaacggctgggcgtcagttactttctcgaacggcgggaaatgggcatcatcaatatcggcggtgccggtctgatcgaggtcgacgggcacagttacgagatcggcacggaagaagcgctgtatatcggccagggtgcccgacagctgacgttccgcagcgttgacgccgaacgaccggccaagttctattacaacagtgcgccggcgcatacccactatcccaacaaaaaaatcaccctggacgacgccgcgccgcagaccctgggcgacgacgccaccagcaaccggcgcaccatcaacaaatttatcgtgcccgacgtgttgccgacctgccaactgacgatggggctgaccaagctggccgccggcagcctgtggaacaccatgccgtgccatacccatgaacggcgcatggaggtctacttttacttcgatatggaagatgaaaccgcggtgttccatatgatggggcagccacaggagacccgccatctgctggtgcacaacgaacaggcggtgatctcccccagttggtcgatccatgccggcgtcggcaccaagcgctacacctttatctggggcatggtgggcgaaaatcaggtgttcggcgatatggaccacctggccgtcagcgagctgcgctaa

SEQ ID NO: 442773 - DNA, 666 bp, Serratia marcescens
atggcttattcgcaacgcattgaaagcgcaatttttgatatggacggcttactaattgattcagaacccttatggttgcaggccgagctggatattttcggttcgctcggcttggatctttccgaccgtgacaaactgccggataccctggggctgcgcatcgatctggtcgtagagatgtggtatcaggccatgccgtggcagggggcgtcgcgggagcaggtttccgcccgcattattgagcgcgccattgagctggtgcaggaacgccgcccgctgctgccgggggttacgcaggcgctggagctctgccgcagcctcgatctgaatatcggtctggcttccgcctcgccgctgcatatgcagcaacaggtactgaatatgttcggtctggaacactattttgaccagctggtttccgcagaatatctgccgtacagcaagccgcacccggaagtatatctgattgccgccgaacggctgggcagcgatccgctgcgctgcattacgttggaggactcattcaacggcatgatcgccaccaaggcggcgcgcatgcgctctatcgtggtgccggccgcagagtatcgccaggatgcgcgctgggcactggctgactatcagttgacgtcgctggagcagttgacgccgtctcacctttcctga

SEQ ID NO: 442774 - DNA, 561 bp, Serratia marcescens
atgacgtatcaacaggcagggcgtattggcattatcaaacaaattctggggtgggtgctgtttatcctggcgttagtgtcgacgctgatttcattgctgaattttgtttaccaatacagtgaaaaaactaaaggcatcaatgcggtggtgatcgacttcgtgcacgtcatcgtcgatatggtgcgtttcaatacgccattccttaatctgttctggtataactcgccggtgccggggctggataagagcctgttcagcggcggcaacctgatgtttattattatctacctgctgattttcgtcggtttggcgctgcgcgcttccggctcgcgtatgacgcggcaggtgaagtttatccgcgaacggctggaggaccagctgattctggagcaggcgaaagggacggaaggactgacgcgcgaacagctggagtcgcgtatttcgctgccgcatcacagcattttcctgcagtatttcccgctgtatgtgttgccggtgactattgcggtggtggcttatttcgtgattagcctgctgggcaaactggccgccggcgcgtaa

SEQ ID NO: 442775 - DNA, 870 bp, Serratia marcescens
atgtggcaagccgttagccgtctgttaagtgaacatcttggcagcgcagaaatccgcgaaaggactgaactgcctggtggcgaaatccacccggcatggcgcgtgagttacggtgacagcgaggtgttcgtgaaaaacgacgcccgtgagttactgcctgtttttaccgccgaagccgatcagctggcgctgctggcccgcagtaaaacggtgcgcgtaccggaagtgtatggcgtgggcagcgatcgcgactacagctttctcctgctggagcatctggagctcaaaccgctggaagcgcacggcgcctactgcctgggacagcagttggcaaacctgcaccgctggagcgaacagccgcagttcggcctcgacttcgataaccacctggccacctcaccccaacccaacgcctggcagcgtcgctgggcggaattcttcgccgaacagcgcatcggctggcagctgcagctggcggcggagaaaggcatgtccttcggcgatattgatgagctggtggatatcgtctatctgcgtctgcaacaccaccagccgcagccctcactgctgcacggcgatctctggccggccaactgcgccatgacccgcgacgggccggtactgtttgaccccgcctgttactggggcgaccgggagtgcgatctggcgatgctgccgctctacccgaacctgccgccgcagatctacgacggctaccaaagcatctggccgctgccgacggactttatcaagcgtcagccgctgtaccagctctactacctgctcaaccgtagcaacctgttcggcgggcaacatctggtggcggcgcagcaggccatcgacgcactgctgcatccgcaggacgcctga

SEQ ID NO: 442776 - DNA, 1488 bp, Serratia marcescens
atgccacgcaaagccaaacttattgaaatccctgctatcggcccccttgatcggcaggccgggtcacttagccgccagctgtcgcaggcgctgaggacggcggtgcggcaggggaagctgcaggcgggcgatcccctgccttctacgcgtgcgctggccgtggcgctgcgtctgtcgcgcggtacggtgtccgtcgcctatgaacagctgatcgccgaaggcgtactgacggcactggccgggtcgggaacgcgcgtggcgccgattgattcgccgccgccggcatcggcggtgttgcctggcgcccaatgcggcgagccggcgctttctgagcaggcgcaggcgttcgcccgctttgccggtggtttgaaaccgctgttgcctgctccgtttaccgtgtcgctgcctgtcggtgatacggcgccgggggatatctggcgtcgacttggcaaccgggtgcgcgcgcgcgggccgggcgcgccggatggctatggcgatccgttgggggcgctgccgctgcgtcgcgcaatctgtgagtatgtgcgtcagtcgcgttcggtaatttgtacgccggaacagattgtggtgacctgcggcacccagcagggcttgtatctggcggcgcaaattttactggatgccggcgatcgcgcctgggtcgaggatcctgcctatcccggtgtgaccgcgttgttctcgacggcgctgcgcgaccggcagatggtgcgggtgccggtcggcgcagacggtatcgacgtcgccaccggcaggatgatggcgcccgatgccagggcggcgtttgtcacgccttcgcaccagtacccgctgggaatgccgatgagtatggcgcagcgcagcgcgctgttggcctgggcccgtgaaactaacgcctggattgtggaggacgattacgacagcgagatgcgctatgacggccatccctttcctgcgctgcaagggcaggatccggcgcgcgttatctatctgggcaccttcagtaaggtgctgtttccttcgttgcgactgggttatgccatcgtgccgccgctgctggtcggcgcattttgcggcgcgcgtattttgatggacaggcatccgccgaatgctgaccagtacgtgctggcgcagtttatggcggaggggcatctggcgcgccacctgcggcggatgcgcagtctgtatgcggaaaaacggcgggtggtgatcgacgccgtcggccggcatattaacgccgaactggcggagctgcagccctgcgatcagggcatgcatatggtgctgtggctgcggcgcgggctggacgatcggcatgtcgaacggttggcgcaggaggccggcgtgtcggtacgggcgctgtcgtcgatgtatgccgccggccgcggacgtaccgggttgattctcggcctgggcggctacagcgaccggcaggtggagcaagcggtcatcacgctgaatagcctgttgctgacggccagccggtgcggatga

SEQ ID NO: 442777 - DNA, 891 bp, Serratia marcescens
atgaacagccagaccaaaccgttatctgccgccgtcccgccttccggctgggttaacggctttatcggcatgctgattttcagcggttcgctgcccgccacccggctggcggtctccgcctttgatcccctgtttctcaccgccatccgcgccggcattgccggctgtctggcgttgtgcgccctgctgctgaccaggcaacagcgccccgcacgcgccgacctgatcccgctgctgtgggtcgccgttggcgtggtcgcggggttccccctgctcaccgccctggcgctgcagcatatgacgtcggcgcactcgctggtttatatcggcctgctgccgctgatgaccgcctgttttgccgtctggcgcggcagagaacgcccgaatataaaattttgggccttttccgtcgccggcgccgcgctggtggcggcgtttgccctgacccacagcaacgcaggttccgggttcggcgacctgatgatgctgggggcggtcgctctgtgcggactgggctatgccgaaggcgcggtgctgtcgcgccgcctcggcggctggcaaaccatctcatgggcgttgacgctggcgctgccggccaccatcctgctgacgctgctttacgctccggcctcctggccaaaagccggcgcagacgcctggctgtcactggcctatgtgtctttgttcagtatgtggatcggttttattttctggtatcgcgggctggcgcagggcggcatcgccgccgtcggtcagttgcaactgttgcagccctttttcggcctgctgctggcggcgctgctgctgcatgaacaggtacaaccggcgatgattgccgtaatggccggggtgctgctgtgcgtcgtgggcgccaaacgcttcgcccgctag

SEQ ID NO: 442778 - DNA, 870 bp, Serratia marcescens
atggaaatactctatcagtggctgagcgaaccgttcgcctacccgtttatgcaacgggcgattatcgccgccatcgtcaccggcgtcgtctgcgcggtgctctcctgctacctggtactcaaaggctggtcgctgatgggcgacgctatttcacacgcggtgctgcccggcattgtgctggcgttcgtcaccggtattccgctggccatcggcgcctttctgtccgggattttctgtgcgctggctaccggctatctgaaagagcacagccgggtcaaagaagacaccgtaatgggcatcgtgttttccggcatgttcgccttcggcctggtgctgttttcacgggtggataccgaccagcacctcagtcatattctgtttggcaatatgctcggcattaccgacggcgagctgcggcaaacgctgtggattgccggcatcacgctggcggtggtgttgctgaaacgcaaagactttatgctgtactgcttcgatcccagccacgcgcgcgccgtcggcctgccggtcaaactgctgcactatggcctgctgtgcctgctggcgctgaccatcgtcgccgcgctgcaggcggtgggggtgatattggtgatcgccatgctgattgcgccgggcattatcgccttcctgctgtgccgcagttttgatcgcatgctgttggtcgccatcgtggcgtcggtcttctcctgcgtactcggcacgctgatcagttttcagatagacggcgctaccggcccctgcatcgtgctggtacaggcggtgctgtttgtgctggcgctgctgtacagccgctggcgtacgttacgccgtcacgcctccgctacgttggaaccgccgcgcgctgctgaataa

SEQ ID NO: 442779 - DNA, 900 bp, Serratia marcescens
atgagcgcagaggcatttatccgaccagcgctgcgcgtcgacgatgtcaccgtgacctataacaacggccacaccgccatttacgacgccagctttaccctcgacggcggcgccatctgcgcgctggtcggcgtcaacggcagcggcaagtcgacgctgtttaaaaccattatggggctggtgcgccccacccgcggccaggtatcgctgagcgaccagccgatcgccgcagcgctgaagaaaaacctgatcgcctatgtgccgcagaccgaagacgtggactggaactttccggtattggtcgaggacgtagtgatgatggggcgctacggcaaaatgaacttcctgcgtatccctacgcgggaagaccgggaacgggttgccagcgcgctggagcgcgtggggctgaccgccctgcgccaccgccagatcggcgaactgtccggcggccagaaaaaacgggtgtttctggcgcgcgcgctggcgcaacaaggcacggtgctgctgctggacgaaccctttaccggcgtcgacgtgaaaaccgagaacgccattatcgacctgctgcgggcgctgcgtgacgaagggcacctgatcctggtatccacccataacctcggcagcgtgcccgagttctgcgaccgggtgatcctgatcaaccgcaccgtactggccgccgggccgacggctaccaccttcacccagagcaatctggaacaggcctttggcggcgtactacgccatatcaacctctccggccccgacctgcacgacgacaacgatccacgcaccctgacggtactgaccgacgacgaacgtccggcggtgttctacggccacagcaaaagcgatccgccggccaaaagccagccgaaagggaaagaggagcaacagtcctga

SEQ ID NO: 442780 - DNA, 300 bp, Serratia marcescens
atgagtcaatcggcaaccacgtgttttgtggtgacttttcactatcaggaagccggattaaccgatttggcgaagctgaccggccagctgacccgggaaggtttcaccaccacggtggtggatgaaaacggcgtttctcacgagctgggcagcaacagctatgcgattattaccgcgttgaatcaacaggatatcgaaaaactggcacaggggctggggcaggttgcgttgggaaaaacgccgcaggttaggttgctcgtctgggatgaatatgtcagacagttacatgaggatacataa

SEQ ID NO: 442781 - DNA, 669 bp, Serratia marcescens
gtgagaaccaagattggttgcctgatggcaattacgcttttagcgggctgtgcgaaagacccgcagaccaccaacagcacaacgggcgttggcggcacttcttccgggggctggctgcagccgccgtcgcagcagcagactgcgagcaaccacaccggcacgccggtggcgtacagcgattatattcgccaggccgccagcaattacggcgttgatgaaaacctgattaaagccattattcaggtggaatccggttttaatcccctggcggtgagcaagtcgaatgcggtagggctgatgcagcttaaggcgtcgactgccgggcgtgacgcctatcggatgaaagggcgacgcgggcagccgagttcgcgggagctgaaagatccggcggtgaatatcgatctgggcgcggcctatatcaatatcctgcaggcacagttggccgggatcaacgatccgaaaacccggcagtacgccaccatcgtctcttacgccaacggcgctggcgccatgctgcgtacgttttcctcggaccggcgtgtggcggtcaaccgcattaatcaactgactccggacgagttttaccaacatattcaaaagaaacatccggcgccgcaggcaccgcgttacctgtggaaagtgaccaccgcctatcaggcgatggaatag

SEQ ID NO: 442782 - DNA, 726 bp, Serratia marcescens
atgtcggacaataaaactaacaattctcggcgcgatttcttattgaaatcggtgaccttgattcctgcagcggtgatcggtggcagcagcgttggcgcgctgacggctcccgcaccggccgttgccgctgatgacgcaccaaaaaacaatgactaccaaccgaccttcttcacgcctgaagagtgggcctttatcaacgccgctgtggcgcgtttgattccggccgacgatcgcggtccgggcgcgctggaagccggcgtgccggagtttatcgatcgtcagatgaatacgccgtacgctaccggctccatctggtatatgcaggggccattcaaccctgacgtgccgaaagagatgggctaccagctgccgctggtgccgaagcagatttataacctgggcatcgccgaggcggacgcctacagtaaaaaacagcacggtaaagtgtttgccgagctgacggatgcgcagaaagatgcgctgctgcaagaaatggaagccggtaaagcggcgttcgagcagctgccgtccaaactgtttttctcttacctgctgcaaaacactcgtgaaggtttcttcagcgatccgatccatggcggtaataaagacatggtcggctggaagctgattaattttccgggcgctcgcgccgactttatggactgggttgagcgaggggaacgttatcccttcccgccggtatcaattcgtggggaaaggggataa

SEQ ID NO: 442783 - DNA, 483 bp, Serratia marcescens
atggcgatagatatgtttttaaaggttgaaggtattgaaggcgagtcgaaaaacgccaaacatctcaaatggattgatgttgtctccttcaactggggcgcgaagcagccgggcaatgtcgccgtaggcggcggcggaggcagcggcaaagtcaactaccaagacctgaccatccaggcgctgatcgataaatccactcccgcactgctgaaatactgttctaccggcaaacaccttcccaaactgcaattatccatctgcaaatcaggcggccaggaaatcgaatacaccaagatcacgctggaagaagtgctgcttaccgccaccgagtttatcggccagtcttacggcgccacgctgggcatggcgtattcgttccaggcgggcaaggtttcgctggagtacagtgagcaaaccgccgacggcggtaaagggccttcttccattgccggctgggatatcaaacagaataaagaagtttga

SEQ ID NO: 442784 - DNA, 861 bp, Serratia marcescens
atggcatttctcaaagcgcatgaaatagcagggttaacggtcagtcctacaggtgaacttaacgtagatgcaaatttcctcaccccggaggtcatgagggaagcgcagataatcgtcggttcgatgacgccggatcaggtttccaaactgaccaaagtgtcggaaagccagatcgccttcaccctgaatgactaccgcgataagattaataaactgcagaacactgacagggagcgcggcggcacccggccgggcggcacgatttcacatatcgacaaccgcatttcgttgccgatgatgccgccaagctgggggatcaaggcccagtatctggataacgtcagcaaggtagccggcggcggcgcgacgctggtggctgcgggcgcgatgctgtttagcctgggggcggggggcgccggcagtattttaggccgcagtttgctcacggccggcaccggaggcgccaccggttgggtgacgcacttcgtcaccaagaagatccagtccgttaaccagattgcgggctatctgaagagcctggcggagatgtacaacaccacgcacaactcgctgcttgagttcaacaaggaaatccggcgcaaaaaaatcgcctatgcgcgtgacaatagcgccaatgcgcagagttttgaagataaggtgatgcaggataacgatatctatacccccgccgaaaaagcggagatggataccttgatgcgcgcctttgtcggtaatgattaccagagcgtgaagattaccggcgacagcgtacgtttcatcgagttcaggttcgtgcgcggggactcgctgactgtgagcaagactgcgtatagtcacctggcagatttgaaattctcttaa

SEQ ID NO: 442785 - DNA, 1134 bp, Serratia marcescens
gtgtcccgtcgaattattccgctggtgttagcctgcgccagcgttttctccgcccaggccctggcgacccaatatccgttaaccttaaccgacacctccggccagcgtgtgacgctgaagcaggagccgaagcgcgtcgtggtgcaggacggccgtgatattctgacgctggcgctgctggaccgcgccgatccgttcagccggctggtagcctggaataacctgctgaaaaagagcgacggggcaacctgggacatcctgaaaagcaaatggccggcggccaataacatcctcgatatgggctttagcgaccatggcgaggtcaatctggaaagcgtgatcgccaaacagcctgacctgatgatcgcccagctgcgttcgaaaccctcgctggaacagaccggcgtgctcaagcagctgaaagcgctgggggtgccggtgctgtttatcgataccatgctgaaaccggtggagaatacgccgaaaagcgtgaccttactgggcgaggcgctggatcgtgaacctgaagccaagcagtacaccgacttctatcagcagcactatcagaatatcgtcgcgaaaactaaggccatcgaacccaagccgctggtgtttatcgaagcgaaagccgggctgaacggcctggagtcctgctgctttacccatgcgcatgtcggctggggcgggctggtggaagcggtcggcgcgcgtaatatcggctctgagctgctgcccggcgccaccggcgacgtttcgctggagaaagtcatcagcatgaagccgcaggtgtatatcgtgtccggctcgcagtgggcgacaaaaaccaacgccgcagtgccgtttggttacggtgtcacgcaaaagcaggtggacgacgcctttacccggatgaagcagcgcccgggctttgcccagattgacgcggttaaacaggggcgcttctacgggatctaccataacttctataaccatccgtacaatattgtcgggctggagtatctggcgaaatttatttacccggcgcagttcaaaacgctggatccggcgcagacctatagcgacatcctgaagaactttaccgaagtgcctgaaggcaagggcgtacttggcgctcaggcgccgggcggcaagtaa

SEQ ID NO: 442786 - DNA, 177 bp, Serratia marcescens
atgactgaaataattgccaacgtcatcattaatattgtcggcacgttgctgacgttcctttgtgatattaccgaactggtattttcctgcctgaaaggaccgctgtggcggcggttgttaatttccctgctgattttcctggcgatgctgggcggactgttgtggtgggggcgttaa

SEQ ID NO: 442787 - DNA, 1569 bp, Serratia marcescens
atggaacatgttcagacgggaaaccaggaacggtatgccgttgcgggcgagggaaattataccccagaaatgttcggcgccgccggtgacggtgtggccgacgaccgtacagcgattcaagcggcgattgatgcggcacatcaatcttatttgttgcacgggacgccctgtctcgtgacgctgggagcgagaacgtataccgtatcgaaaaacccggcctcaaccacgattgccggcgaggtctcggctggttttggctgcctgaatatgcgctcgggcgtgacgctgtgcggcagcgggacgattaaattgatgcccggtacggcaggtaccgtcccgggcgcgatcgtgaccaactggagcggtgcttgcaccgatatcagcattgaagggatcaccattgacggtaatgcctcccatgtcagcgcgttaagtatggtggcgatcaatatcgtcgattcccgacgagtccgcattcatcaggtccgggttcataacaataacgtcggtagggccggcggtatttatttacgtagaagcggcagctcaatctcagcatatggttgtcaggagagcatggttaccgcgtgctatgtacaggatgtcgcctatatcggtattcaggcagagcgccctgacgggattatcatctcggggaactacgtgatgaatacgggggataatggcattgatattgaaggtaatacgccggaaagcgcttccggtaccgcccgccagatgaatattaccggcaatatattaagaaataacaagaacggtatttttatcgaatcctgctcgggtgccgttatcaacgcgaatgacatcgctgaggtagcggggattggcattgtcagcaaccgaatcaattccggttcatttaataacgtgattaccggcaacagaattgcaggtacggccagtaacacggcctacggtctgagggtgattaatagttctggcaactgtttgattcagagcaactatttcaccagcctgcagagcgcgatcaggctcaacggcatggcaacgcgggtattcattggtgagaacacccatgctgatattgagcgatttattgtccagctggatgcaacgacggactatccagttgcggccctcagaagcctggttgcccggcagttcattatgggcggacagaaaaacggctttccggcattgatgtcgccgctgggcagcccggggaacttccctaaccgtttctcgataggtacctgcgatcgcgggcatttttctgacttaaacggggcgggagaaatcaacttcgcgcgcggcagcctgatgttgcaatatcacccagattggaaaggatacgccttatataattaccgcggcgacggctatacggaaattttggccacggcggccgtgccgggcgaatatctcctgattaacggcgaaacctacctggtggatgcgggtcatactccgaatcaaagaagagtgaagcgctgggatggcagccgttatgcggatggcgattggagaagctatttagatcgggattatcagggcgagattaaacgccgtgagtggggaacgctttaa

SEQ ID NO: 442788 - DNA, 582 bp, Serratia marcescens
atggttagggctggaaagaaccttacaagacctgaggttgagcacagacggccgctacatcaacaacggaactttgccgacgatgcccggttcggtagggcattacgcaagttggtcagtaatccgcgcacatcgtgggatatagcgaccatcatcatcaatgactgtcttgataaactcccggattccgcaatacaaaaaatttacgacaatatgtcaaccggcgggacgaagcttgcgtcacgtcaggccacgcagttatttgttgtcggctatatcacgaaaaaaatacttgctgatgcattgttgtccgttgccatttcccgcatcactcgaatgtcggtcggagccattgccggtgggctggttattcagggaatgatagcgagggcttcggaggcatcacgcaggcttcttaatgataacccgcgtctgtactggaagctgcgccaccaagattttgacatgctgtattttctttttgaggggatgttaaaaccctatattcaactgagccgcatgcatcatgccggtgatggacgattcgaacaggtgttaaatgaaattgaacgtatgggataa

SEQ ID NO: 442789 - DNA, 219 bp, Serratia marcescens
atgaaattgaacgtatgggataaggtaaaatcgctgttttatgggcttgttcatacccttgttcctgtacttaccggggggatggcggtactggcgtgggtgatttttatcgagcatgagtattttaaatatgtcgtgccggtgtgtgtgatagtggtcggaagcttgattgtctttcttacccctgaccgtcgttcaaacaggaaaacaaacgattaa

SEQ ID NO: 442790 - DNA, 1188 bp, Serratia marcescens
atgtgttcaagtcattctgatgaaagaagtgttttaatactgatgattgcagtagcgattattggctgtaatgctttcctgctcagtcctatcctgaatgacattgcctcgagcctttcggtttcggtagcacaaatagccagagccattgcggcttatggtggggctaccgcactttcctcgttattcctggctccctatgccgctatgattggtgtaacaaggtctatgcgttatgccgcaatgctgatggtgatgggtatagtgctgagtgcgggcgctacgacaggggggatgcttattcttgctcaagcgttgactgggattgccgcggggctgatgttaccggcgacttatgccattacagcgtatgtcgcgccagaggggggctcgtcggctgccctcggtaaggtaatcgcggggtggtcgctggcgatggtggcgggcgtccccctttctgccgccatttctgacatggcaaactggcgtattgcatatggcattctggctataatggggggggtgtttttattcttcagcataaaacttcctgaaatagatacatcagatgagagatcagggttttcattttatgcgtatcgctcgaaccccgaaatattgattgtttttttgattactttgctttacatgacatcattttatggggtgtactcgtttattggtacctttaccagaaacaattttaatgataacgctacgttagccagtggagttaccatgttttatggtgtgggtttcggtctggcaagtataaaatcaggtttaattgatcgctatagtcctaagtcgatagcctggttaatatttgtcgctatatctttggtgtacttttctatctctcagaatagttctagtttgttttttctgtttatgatctgtttgatttggggtggggttaataattttgggttgaatgttattgttagcatgataatacaacttagtcctggatgtaagacgacctcattaggtatttatagtgccttatcatatggaggggcgatgatcggcagttttttatatgggtatatatttaatcagtggggtttttctgttactgctattgtttcgttaattctgtgtcttatatcggcattacttgcctgggttaacgtaaactatgtcggaaaggcacgaagtcacggtgtaaaaaaacagaaaaattga

SEQ ID NO: 442791 - DNA, 930 bp, Serratia marcescens
atgaataaaattgataatactcagcacgatagtgagattatccgtaattttggctttccttcggcagatgtgatcgcggactctaccctttctgggtggcgaagcctctttacggtgttgcataaacagcgactcgatactgatgagtgtcaacgacctgccacggcacagcatcaattggtactgtattgtggcggaacagaaagcggtgaagtgagttttaatcaggagtcatggaaaaaatatactaaaaggaaaaatgagtggtatatagctcctgcaggtggttcaggaagcgtttggcgctggaaaaatatgacggagacagaccaggactcgtatatttttcgcatcctgctgtcagcgcaatctttggctgatgcggctttacagctgaatgccgactcttcgataaatttaatcccgcgaatcggtattgtcgatgattttatgttacagcttgcccggcagcttcgggacgaaatgatagcgcctagcctctatggctgttcgtatggagaggcattatcagcggtactgtcgatacatatcttaaaaaatcacgcagagcttaagacgattgaggtacccggaaacggttctttatccatgcagaaaagggagcttgtgcgagaatatattgcagaaaacctggatggtgtgttgtcgttggatgagatggctgcacttgtatcactcagtaagtttcatttctcaagattatttaaaaacacgtttggtacggccccttaccgttatatatataatgccaggatgaacctgcttgccagattgctggccgatagcgatgagccattatattctctggccgataaagtcggatttagttatagcaccaatttgatcagggcatttaggcgatttaaaggcgtgacgccaatggaatatcgtaaagcgataaggggatga

SEQ ID NO: 442792 - DNA, 141 bp, Serratia marcescens
atgaccaaacgtattatcgccctggtcggcgctgccctgctcaccaccctgttgagcgcctgctgtttcggcccccatggcgacggtggcccgcacggcggcggccacggcggcccgcaagagcactatcgccatcgttaa

SEQ ID NO: 442793 - DNA, 423 bp, Serratia marcescens
atgaataaaatgttgttgctgatgtgcctgctgctgccggtggcggcgcaggcggaggtgtctatcgatatcaatgtgcccggcgtgtcgctgcatctgggcgatcgggatcatcgcggttactactgggatggctacgactggcgtccgccgcagtggtggcatgcgcatcaggggcgcggcatcggcgaacgtaacgaccgtggatattactgggacggcggccgctggcagcctccggcgcagcatggggaaggccgccgcggcgatgcacaccacgctgacgacgaccgcagccatcatgacgggcatccgcatgctgatcacgagcaatcgcatgaaagcaacgatcgtcatgatggtggtcacggcgcgcaggatagcggtaaaccgtacccaaaacggggcgatgaacatcgctga

SEQ ID NO: 442794 - DNA, 1002 bp, Serratia marcescens
atgccaaccagccagactttcacgcttttactgaaaaaccagcgccggcgcgataagcgctatctgtcactgttggcattgggcgtggcggtggcgctggtgttcagcctgagcgccggcgatctttggctgtggccgaaccagtggtttggcgacgccggccggctgtttgtctggcagttgcgtctgccgcgcgcgctggcggtgatgctggtaggcgccagcctggcggtggccggtgcggtaatgcaggcgctgtttgaaaatccgctggcggaaccggggctgctgggcgtcgccaacggtgccggcgtggccctggtgctgacgattctgctgagccacgggctgctgccggtggcgtggatgagcctcagcgcgattatcggcgcgctggcgatgaccttgttactgctcgggtttgcccgccggcgacgtctgaccaatacgcgcctgctgctggtgggggtggctttgggcatcgtctgcagcgccgttatgacctgggcggtctatttcagctccagcctggatctgcgccagctgatgtactggatgatgggcggttttggcggcgtcgactggcggcaaaaatggctgattgtggcgctgttgccggtggtgctgtggctgtgccggcagggtaaggcgctcaacctgatgacgctgggggaaactcaggcgcgtcagctgggcctgccgctgcacctgtggcgcaacctgctggtattggccgtcggctggttagtgggcgtcagcgtggcgctggcgggggtgatcggtttcgtcggtctggtgatcccgcatatgctgcggctgagcggcctgaccgatcagcgttacctgctgcccggctgcgcgctggccggcgccggcgtgctgttggccgccgatgtggtggcgcgtatcacgctgctgtcggcggagctgccgatcggcgtggtaaccgccaccctcggcgcgccgctgtttatctggctactgacccgggtgaaggcgtaa

SEQ ID NO: 442795 - DNA, 555 bp, Serratia marcescens
atgatgacacaggctatttatgacattccgctgaccacgatcgacaaccgccagaccacgctgcaggcgtatcagggcgatgtgctgctggtggtcaatgtggcttcagaatgcgggttgaccaaacagtatgcaggtctggaaaaactgtatgaaacgtatcgtcagcaggggctgacggtgctgggcttcccgtgcaatcagttcctggcgcaggagccgggcagcaatgagcagattcaggcattttgccgcaccaattttggcgtgcagttcccgctgtttagcaagatcgaggtgaacggcgccaaccgtcacccgctgtatcaggcgctgatcgccgcgcagcctgctgcgctggcgccgcagggcagcgaatttatggcgcgacgcatcagtaaggatcaggggccgaaacagcccggcgatatcctgtggaacttcgaaaagttcctgattggccgtgacggccaggtgatccagcgctttgccccggatatgacgccggaagatccgctgctgacggcggcggtggagcaggcgctgagccgttaa

SEQ ID NO: 442796 - DNA, 756 bp, Serratia marcescens
atgctgcagcttagccaggtcggggttacggggcgcctggccccgtttagcgcgcagatcgcggcagggctgcaggtgcatctgatcggcccgaacggcgccggcaagagcagcctgctggcgcgcctggcggggctgttgccgggggacggaacgatcgcgctggacgggcggccgctggactactatcaggccggtgagctggcacggcggcgtgcctatctgagccagcaacagccgccggcggcgctgatgccggtattccagtacctggctctgcaccagccggcgggcgcagcggcgcaggcggtggaaaacgccatgctttacctgtgtcagagcctgaagctgaccgataagctgtcgcgcatgttgcagcagctttccggcggcgagtggcagcgggtgcggctggcggcggcgctgctgcaggtatggcccagcattaatccgcacagccggctgttattgctggatgaaccgaccagcgcgctcgacgtggcgcaaaaagtggcgctggatcgcctgttgcatgagttctgccgcagcgggcgcagcgcgctggtgtgcgcgcacgacctcaaccatacgttacagcaggcagatcgcgtctggctgctgcaggccgggcaggtggtcaggcagggcgtaacccatgaggtgatggagccggctctgttgtcacagatttatgaggtggattttcatatgcagtcgacgggcaatcagcgctggattatgactaccaccgcctaa

SEQ ID NO: 442797 - DNA, 1155 bp, Serratia marcescens
atggatcaattcttgcctttctctcgcccggcaattggcgatgaagaaattgcggcggtaggcaaggtgctgacatccggttggatcactaccgggccgcaaaaccagcagctggaagcggacttttgccgcacctttggctgccggcacgcggtggcggtcagttcagctacggcaggcatgcatattacgttaatggcgctgggtatcggcctgggcgacgaggtgattactccgtcgcaaacctgggtgtccacccttaatatgatcgagttactgggcgcgacgccggtcatgattgacgttgaccgcgagacgctgatggtcagcgctgccgatgtggaagccgcgataacctcccgcaccaaagccattattccggtgcattatgccggcgcgccactgcctctggatgcgctgcgcgacgttgcccgccgtcaccggctgccgctgattgaagacgccgcacacgcggtaggcgcccgctatcaggacgagtggatcggcgcgcgcggcacggcgattttctccttccatgcgataaaaaacctgacctgcgctgaaggcggcctgatcgccaccgacgatgcggaactggccgagcgcgtacggcgcctgaagtttcacggcctgggcgtggatgcgttcgaccgccagactcaggggcgcacgccgcaggcggaggtggtggagcccggctacaaatacaacctgtccgacattcatgcggcgatcgccgtggtgcagctggcgcgtctgccgcagctgaacgcacgccgcaaggcgctggccgaacgctatctgcaggcgctgcaggggtcgccgttccagccgctggggctgccggattatccgcacgatcacgcctggcacctgtttatggtacgggtggacgccgagcgctgtgggtgcgaccgcgatacgctgatggagcgtctgaaggcgcagggcatcggcagcgggctgcatttccgcgccgcccatacgcaaaaattctaccgtgagcgttatccgcagctgagtctgccgcataccgaatggaactcggcgcggctgtgcacgctgccgctgttcccggatatgagcgaggcggacgtcgaccgcgtggtcggtgcgctgttcagtgtactggaggcgtcacgtgtcgcagattga

SEQ ID NO: 442798 - DNA, 906 bp, Serratia marcescens
atgaaaaaagtcggcctgcgggtggatgtagacaccttcagcggcacccgggacggcgtgccgcgcttactggcgctgttcgacaggtacgctatccgcgccagcttcttcttcagcgtcgggccggacaatatggggcgccatctgtggcgcctgctgcggccgcagtttctgtggaagatgctgcgctccaacgccgcctcgctctacggctgggatattttactggcgggcaccgcctggcccggccgccatattgcgcgccggctggcgccgctgatgaaacagaccgctgatgccggccatgaggtcgggctgcacgcctgggatcatcagggctggcaggccaacgccgggcgctggtccgaggcgcagctggcgcggcagatccaactgggcgtcgatgcgctgagcgctgccgccggccagccggtgcgttgttcggcggtcgccggctggcgcgccgatcggcgcgtgctggcggtgaaagagcgttttgcttttgactacaacagcgactgccgcggtacgcatccgttccggccgcggcttgatgacggcagtctgggcacggtgcagattccggtcacgctgccgacttttgatgaggtgattggacgtgaagtcagcatgacggatttcaatgactatatcctgcgggcgatagcgcgagacgccggcgtgccggtttataccatccacaccgaagtcgagggcatgtcgcaggcggcgatgtttgagcagctactgcagcgggcgcagcggcagggcattgaattctgcccgctgagcgcgctgttgccggctgatttgtcgtcgctgccgccgggcgatattgaacgcgggccttttcccggccgtgaaggctggctgggccgccaaaccgacgtgaaggacgttgcatga

SEQ ID NO: 442799 - DNA, 1665 bp, Serratia marcescens
atgaagtcgttaaaaaacgcctgggccatcgttgcatcgctgttttttgtgctggcgtatctgctgccgctcaacggccgcctgctgtggcagccggatgaaacccgctatgcggagatcagccgcgagatgctgcagcgcggcgactgggtcgtgccgcatctgctgggcctgcgctattttgaaaagccggtagcgggttactggatcaataacatcagtcagtggctgtttggcgacagcaacttcgccgtgcgttttggtgcggtattttgcagcggcgtcagcgcgctgctggtgtttgctctggcgatgctgatgtggcgcaacgcgcgccgcgccgggctggcggcgctgattttcctgtcgatggtgctggtgttcagcatcggcacctacagcgtgctcgacccgatgatcgcgttatggatgacggcggcgatggtcagttattacctggccctgcaggccgtctcggtcaggggcaagctgggcgcttacgcgctgctcggtctggcctgcggcatggggtttatgaccaaaggctttctggcgttggcggtgccggtgatcgccgtgctgccgatcgccattactcagcggcgctggcgcgatctgttgatctacggcccgctggcgattgtcacggcggcattgctcagcctgccgtgggcgctggcgatcgctcagcgcgagccggacttctggcgctatttcttctgggtggagcatatccagcgttttgcggagaatgatgcccaacataaagcgccgttctggtattacctgccggtgctgatggccggcgtactgccgtggctggcgctgctgccgggggcgttgttcaaaggctggcgcgagcgcgccgcgcggccggagctgttcttcctgctcagttgggtactgatgccgctgctgtttttcagcatcgccaaaggcaaattgccgacctatattctgccctgcatggcgccgctggcgctgctgatcgcggactatgccgaagcgcggctgagcgcgctgcgcagccgggtattcaggattaatgcgctgcttaacggtctgttcggcgcgctggggctgctcgcgctgttgctgcttggcagcggtctgctgccgggcacgccgctgttcggcccacacgaggggataaagctggcgctgggggcgacggcgtttgccggttggctgctgtttgccgtgctgtcgctgggcgagggcggccggcgttggacgtgggcagccgcttgtccgctgctgctgtgcctgctgatcggttatgccattccgcagcaggtgatcgacgccaaacagccgcagaactttatccgcaccaatcagacgctgctggcgcacagccgctacgtactgagcgacagtgtggggctggctgccggcctctcctggcagttaaagcgcggcgacgtgctgatgtacaacgaacagggtgaggtggggtatgggctgggctatgcggatgcgcacgaccggtttatcagcgagggcgagttcgcgtcatggctggcgcaggcgcgccagcagggcaacgtggcgctggcgctgcagctgtcgcgcggggagagcctgtccgatcggctgccgccgccggataagatgcagcgcatgaaccgctacgttttgtactggtatcagcagcagccatga

SEQ ID NO: 442800 - DNA, 345 bp, Serratia marcescens
atgagcggctacctgctggtcttactggcgtgtctgctgacctgcggcgggcagctgtgtcagaaacaggcggcgcgcggctggcgcttacctgccagggtgcgccgtcgctacctgctgcgctggctggcgctggcgctgacgctgctggcggcggggatggcggtatggctggcggtattgcagcggctgccgctcagccaggcctacccgatgctcagcctcaatttcgtgctggtgacgctggcgtcccgcctgctgtttaaggagtcgatcgcgccgcgtcactggtgcggcgtcgtcgccatcgttgtggggatcctgctgatgagcgcgccgttatga

SEQ ID NO: 442801 - DNA, 387 bp, Serratia marcescens
atgagaaagggctacatctggggcatcgccagcgtgctgctggtcagcgccgcgcagctgctgatgaagtggggcatggtgcagttgccgccgctgtcgctgcatagtctggcgctgccggcggcgggaagcctgccggcgctgctggcggtggcattcggcatcgccggctacgggttgtcgatgctgtgctggctgatggcgctgcgcaccctggcgctgagccgcgcctatccgttgctgggcgtcagttatgtgctggtgtatctggcggcggtggcgttgccgtggtttaacgaatccgccggttggttaaaaagtctgggtacgctgctgatactgctgggggtgtggctgatagcgcggcaggatgctcggaagcgctaa

SEQ ID NO: 442802 - DNA, 1014 bp, Serratia marcescens
atgacagccctgcgcgtattgatttccgattcttacgatccctggttcaatctggcggtggaagagtgcatcttccgcgagatgagcacgcaaaaaatcctgtttctgtggcgcaatgcggaaacggtggtgataggccaatcgcaaaacccgtggaaagagtgcaacacccgccgtatggaacaggacggcattcggctggcgcgccgcagcagcggcggcggggcggtattccacgatttgggcaatacctgttttacctttatggctggcaagccgggctatgataaaagcgtgtcaacgcagattatcctgcaggcgctggcgacgctgggcatccgtgcgacggcttccgggcgcaacgatctggtgatcgacaccgccgagggcacgcgcaaaatctccggttccgcctaccgcgaaacaccggatcgcggctttcaccacggcacgctgctgctgaatgccgatctgaaccgcctggcggactacctgaaccccgatgagaaaaaactgcaggccaagggcattacctcagtgcgttcacgggtggccaatctggcggagtttttgccgacgatcacccatcagcaggtgtgcgacgccatcgtgcaggcgtttttcgcctactacggcggcagcgctgtggcggaggtgatctcgcccgacgtgtatcccgacctgcctaattttgccgaacagtttgccaaacagagcagctgggcgtggaatttcggcaaggcgccggccttcagccacctgctgaacgagcgttttagctggggcggggtggatatcttttttgacgttgagcagggcgctatcagccggtcgcagatttttaccgacagcttgcagccggcggcgctgcagcggctggccgagctgctggtgggctgcgcctaccgcagcgatgcggtggcggcgtgctgccggcaactgattgatgaatatccggcccagcggacggagctggcggaactgtgccgctggctcagcgaaaccatcaaataa

SEQ ID NO: 442803 - DNA, 753 bp, Serratia marcescens
atgaaaatccaatttgaaactgactttaccattcgccatgtattccagcctgtctataccctcagcggacggctgttagcgttagaaattcaaagccgtttcaatagtccggacggcgccctggcgatgccggcggagattggcgttaatttattgcagccagcgcagaaagcagcgttattttatgagcaactcggggtgatagaagcctatgcggattggtttattgagcatcaggtattattaagtattaatattgacgccacgctggcggcactgttgttgcaggataatcaactgtgtcaacgcctgcggcggcagccgtttatcgtagttgaaatcagcgagagttttccccagttgtcggccggaaaaaacaatgcgaccgtccgccggctcagcgaattgttcacgctctggctggatgatttcggctccggtcaggctacgctgacgccgttgtatgacggtttatttacctatgtaaaaatagacaaacgtttttactggcggctgttttcacatccgggatccgatacggtgatggattcgctgctgagaaatatcaatttactgtgtcagggtattatcgttggcggtattgaaaaaaaagcctactttaatcatctcgatcgcgccggtgttttaggactgcagggttttttatggccggccgtcgggggagaacagttggataccttgtgcaaagttccgccagaatttatcgacgctgatgcgccggataatcattaa

SEQ ID NO: 442804 - DNA, 1443 bp, Serratia marcescens
atgccgcagtttgataacgcttattaccggcaactgcccggtttctataccgccttgacgcccaccccgctggaaggcgcgcgcctgctgtaccacagcgcgccgctggcgcagcagctggggctggatgacagctggtttacggcggaaaatacgccggtctggagcggagagcgactgctgccgggcatgcagccgctggcgcaggtctacagcggccatcagtttggcgtctgggccgggcaactgggcgacgggcgcggcattttgctgggggagcagcgcctggcggacggtacgcatctcgactggcacctgaagggggccggcctgacgccgtattcccgcatgggcgacggccgtgcggtgctgcgctcggcaatccgcgagtttctggcgtcggaggcgatgcaccatctgggtatcgccaccacgcgtgcgctgacggtggtaaccagcgaccatccggtctaccgcgagcaggccgagcgcggcgcgatgctgctgcgcgtggcggaaagccacgtgcgtttcggccatttcgagcatttctactaccgccagcagccggaacaggtgcggcaactggctgattttgtcattgaacgccactggccgcagctggccgctcggcaggataaatacctactctggttcaccgacgtggcggagcgcaccgcgcggctgatggcggactggcagacggtcggttttgctcacggcgtgatgaataccgacaatatgtcgattctcggtctgaccatcgactatggcccttacggtttcctcgacgattatcagccgggttatatctgcaaccactcggatcatcaggggcgttacgcctttgacaaccaaccggcggtggcgctgtggaacctgcaccgtctggcgcaggcgctgtcggggctgatgagtccagaacagctgcagcaggcgctggcggcgtatgagccggcgctgatgcgcgcctatggcgaacgcatgcgcgccaagctgggcttcttcagccagcagcggcaggataacgatctgctcaccgagttgctgagcctgatggcgcaggagggacgcgactatacccgcaccttccgtctgttgagcgaggtggagcagcagcaggcgcattcgccgctgcgcgatgagtttatcgaccgcgaggcgtttgacggctggtatcgtcgctaccgcgaacggctgcagcaggaacaggtgagcgatgcgcagcgccggcaggccatgcaggcggtgaacccgaaactgatcctgcgtaactacctggcgcaggaggcgatcgcggcggcagaacaggacgacgtcagcaagctggcgcatctgcaccaggcattgctgaagccgtatgacgacgatgcgcgctatgacgcgctggcggcgctgccgccggagtggggcaagcacctggacatttcctgttccagctga

SEQ ID NO: 442805 - DNA, 786 bp, Serratia marcescens
gtggctaaatccgccagcctgacggcgcagcagttgcgctatcgcctgggcgagcgccggctgattcatgatgtgtcgctgagcatcgccagcggagaaatggtggcgattatcggccccaatggggccggcaaatccaccctgctgcgcctgctgaccggctatctgcagccggactgcggcgagtgccggctgctggggcgaccgctggaacagtggacgcccgaccggctggccaaagtgcgcgcggtgatgcggcagcacagcgaactggccttcccgttcagcgtcgaagacgtggtggcgatggggcgtgcgccgcacggtatgcgcgacgcggcacaggcggtgcatgaggtgatggcgcagaccgactgcctcagtctggcgtcacgggattaccgccggctctccggcggcgagcagcaacgggtgcagctggcgcgggtgctggcgcagctgtggcaaccgcagccgtcgccgcgttggctgtttcttgacgaacccacctcggcgcttgatttgtaccaccagcaacatacgttgcggctgctgcataacctgacgcggcggcagccgctggcggtgtgctgcgtactgcacgatctcaatctggcggcgctgtatgccgatcgcatcctgctgctgcatcaggggcggctggtggccgacggtacaccggacgaggtgctgcaggccgaaaccctcacccgctggtatcaggcagacctcggcgtgatgactcatccggaattcacgacgccgcaggtgtatctgcgccgctga

SEQ ID NO: 442806 - DNA, 1005 bp, Serratia marcescens
atgccgtgccgccgttcgccacggctggcgctggtgacgctgctggctctgctgaccatgctgtcgctgattgccgccaattacggcgcgctgacattgtcattccgcaccctgtggcagcagccgttcggcgatgccgcctggcatatctggctgaatatccgcctgccgcgggtgctgctggcggtgctgatcggctgcgcgctggcggtggccggcacggtgatgcaggggctgttccgtaacccgctggcggaccccagcctgctggggatcagcagcggcggcgcgctgctggtggcgctgtcgattgtgctgccgctcgcgctgccggcgatgttggcgctgtacggccagatgctggcggcatttctcggcagcctgctggtctcggcgctgatttatgccatcagccgcggcggccacggcagcctgtcgcggctgctgctggccggcatcgccattaacgcgctgtgtatggcggcaatcggcgtcttgtcttatctcagcaacgaccagcagctgcgccagttctccctatggatgatgggcagtctgaaccagtcgcagtggccgacgctggcggtggcggcctcgctgattctgcccgcctgcctgctgacactgctgcaggcgcgccgtctcaacctgctgcagttgggggatgaagaggcgcactatctgggcgttaacgtggcgcgggttaaattacaactgctgctgctcagcgccctgctgaccggcgcggcggtcgccgtcagcggcgcgatcggctttatcggcctggtggtgccgcatctgatgcggctgcggctcggcggcgatcaccgctggctgctgcccgcctcggcgctggggggcgcttgcctgctgctggtcagcgataccctggcgcgcacgctggtggcgccggcggagatgccggtcggcctgatgaccagcctgctgggtggcccctattttttatggctggtgatgcgccagcaggagcgtaaccgtggctaa

SEQ ID NO: 442807 - DNA, 828 bp, Serratia marcescens
atgacgcgcttattctcccgcgcgctggcgctgtgcgcggcgctgatgacgccgctggccggggcggcggaacgcatcgtctctatcggcggcgacgtcagtgaaatcgtctatgcactcggcgccggcgatcggctggtggcgcgcgacagcaccagcctctcccccgccgcgctgcaggcgctgccggacgtcggttacatgcgccagctgaacgccgaaggcattctggcgctgaagccgacgctggtgctgaccagcgatctggcgcagccggcgctggtatttcgccaactggccgacagcggcgtgcgcgtggtacatatcccggccgacaacgcgccggaagcggtcagcgaaaaaatcgccgccgtggccgccgcactggatcgtcggcagcagggacaacagctgatcgcgcgctatcgccagcagttggcggcggtcaacacccggccgctgccggtaaaagtgctgtttatcatgagccacggcggcatgacgccaatggccgccgggcaggacaccgccgccgacgccgccattcgcgccgccggcctgcgcaatgcgatgcagggattcagccactaccggccgctgtcgcaggaaggcgtaatcgccagcgcgccggacctgttgctggtgggacgcgacggcgtgaaaaccctcggcggcgtggaacagctgtggaaactgcccggcatcgccctgacgccggcggggaaaaaacgccgcgtgctggtggtcgacgatatggcgctgctggggttcggcctgcaaacgccggacgccctgattaagctgcgccgcgccgcggagcagccgtaa

SEQ ID NO: 442808 - DNA, 1035 bp, Serratia marcescens
atgaacaacgacctctatgcacgctatctgcaggctaaacaggatcaccccggtaaatacgcgcgcgatctggcggcgctgctcgccgtcagcgaagcggaactgacccacgcccgcgtgggccacgacgcccgccgtctgcaggccgacgtccgtacgctgctcggcgagctggaacaggtcggcgtcaccaaatcgctcacccgcaacgactatgcggtgcatgaacagatgggacgctaccgcaatcagcagttaagcggccacgcggggctgatcctcaacccgcgcgaactggacctgcggctgtttctcggccagtgggccagcgccttcagcctgagcgaaagcaaccagcgcggcgtacgccacagcatccagtttttcgatcatcagggcgatgcattgcataaggtatacagcagcgatgaaaccgatctgaccgcctggctggcgctggtcgaacgccatgccgcgccggacaacccgccgctggcgctgcagccgacgccggcccggacggaaaaccgcgacgccgacgccgcgcgcatcgacagtgaatggcgcgccatgaccgacgtgcaccagttcttccagctgctgagccgccatcagatcggtcgtcagcaggcgtttcgcgccgtcggcgacgatctggcctaccgcgtcgataacggcgcgctggcgcagttgctgaacgccgcgcaacaggcgcagaacgaaatcatgattttcgtcagcaaccgcggctgcgtgcagatctttaccggccagattgagcgcctgctgccgcaaaacggctggctgaacgtgtttaaccggcgctttaccctgcatctgatcgaagaggccatcaccgaaagctggatcacccgtaagccgaccaaagacggcatcgtcactagtctggagctgttcgccgccgacggcacgcagatcgcccagctgtacggccagcgcagcgagggccagccggaacaaaccctgtggcgtgagcagatcgccgcactgcagccgcggggcatagccgcatga

SEQ ID NO: 442809 - DNA, 2064 bp, Serratia marcescens
atgcctgctatttttgccaccccgcggcgtctgtccgccctgagcctggccattgcctgcgccctgcctacggtggcttttgccaacaccagccccgtttctgacaccggttcggaaaaagcgaccgacgataccctgacggtagtcgccaccggcaaccagcgcagcagtttcagcgcgccgatgatggtcacggtgatcgacggcacgtcgccgcaggcgcagaccgccggcaccgccagcgacctgttgcgtcaggtgccgggcatcaccgtcactggcaccggccgcagcaacggccaggatattatgatgcgcggctatgaccgccgcggcgtgctgaccctggtggacggcgtgcgtcagggcaccgataccggccatcttaacggcaccttcctcgatccagcgctgatcaagcgggtggaagtggtgcgcggcccgtcggccctgctgtacggcagcggcgcgctgggcggcgtcatctcctatgaaaccgtcgacgccgccgacctgctgctgccggggcacaataccggctttcgggtttacggcagcgccgccagcggcgatcacagcctcggcatgggcgccagcgcctacggcagaagcgataacctggacggtctgctgtcgttcggcacccgcgacgtcggcaatctgcgccagggaaacggctttgacgcgccgaacgatgaaaacatcaataacctgctggccaaaggcacctggaccatcgatgaaaaccaggcgctgagcggtagtttccgctattacaacaaccgcgcgcaggagccgaaaaacccgcagacgccggccgcttccgccagcaacctgcagaccgatcgctccaccattcagcgcgacggacagctgacctataagctcaaaccggtaggacaaggctggctggatgcacaggcgcagctgtactactccgaggtgcagatcaacgcccaccgcgacggcagtgaagatgaggcgcgcaagcaaaccacccgcggcgccaagctggaaaaccgcacccgcctgttcagcgacagcgcggcggcgcacctgttcacctacggcaccgaagcgtataagcaggagcagacgccgggcggcgccaccgagagcttcccgcaggccaagatcaacttcgcctccgcctggctgcaggatgagatcaccctgcgcgatctgccggtatcgattctggccggaacgcgctatgacaactataaaggcagcagcgacggctacgacgacgtcaacgcggacaaatggtcatcacgcggggcggtcagcataacccccaccgactggctgatgctgttcggctcctattcgcaggcgttccgcgcgccgaccatgggcgaaatgtacaacgatgacaaacacttctcgattccgatgggccccaccaccatcaccaacaactgggtgccgaacccgaatctgaagccggagaccaacgccacccaggagtatggtttcggcctgcgcttcgacgacctgctgctggccgacgacagcctgcagttcaaggccagctatttcgataccaaagccaaagactatatctccaccgccgtcaccatggatatcggagccggcccgcgcgggccttactgcatcagctgcaccacctactccaccaatatcgaccgcgccaaaatctggggctgggacgccgcactgaactataaaacccgctggttcggctgggatctggcctataaccgcacccgcggcaaagatgaaaccagcggcgactggatcgccagcatcaacccggacaccgtcaccagcgtgctggacgtgccgctgggcgccagcggtttctccaccggctgggtcgccaccttgacccaacgctcgacccacgtgcccagcggcactgccgagcaggccggctacggcgtcaacgatttctacctcagctacaaaggcagcgccgaactgcaggggctgaccaccaccgtggtgctgggcaacgccttcgataaagaatattactcgccgcagggcattccgcaggacggacgtaacgccaaactgctggtcagctatcagtggtaa

SEQ ID NO: 442810 - DNA, 183 bp, Serratia marcescens
atggataataaacagcacgaggcgcccgtcgcgcctgccgctcccgcgcaggaaacggcccccccacccagctatgacagccggcaattgctcggccgtgacggcgtcgcgattatcacgcatcagggccaacgctatcagctgcgccagaccaaagcgggcaagctgatcctgaccaagtaa

SEQ ID NO: 442811 - DNA, 486 bp, Serratia marcescens
atgctcccatcgctattatccattccctgcactacgctgcagggcgaagccaaaacgctggccgacttcccggcgcgcgcctatctggtggtgaataccgccagcaaatgcggttttaccccgcagtatcgcgggctggagaatctgtggcgctattatcgcgatcgcggcctggtggtgatgggctttccctgcaatcagttcggcgcacaggagccgggcaacgcacaggacatcgccagcttctgcagcctgaactacggcgtcagttttccgctgttcgccaagatcatggtcaacgggccggatgcccatccgctgtttaacgaactgaagcgccgtgcgccggggctgctgggcagtcagcgcattaaatggaacttcaccaaattcctgctcaccgccgacggccagcgcgtgacgcgctttgcgccgctgaccaaaccggagcgcctgttcgagcgtatcgagacgctgctgaaataa

SEQ ID NO: 442812 - DNA, 624 bp, Serratia marcescens
atgggcaaaccctatgtcagattggataaagaccaggcggcggtactgttggttgaccatcaaaccgggctgctatctctggtgcgcgatatcgatccggataaattcaagaacaacgtgctggcgctggctgacctggccagctacttcaagttacccaccatcctgaccaccagctttgaaaccggccccaacggcccgctggtgcctgaactgaaggcgcagtttgccgacgccccctatatcgcccgccccggcaatatcaacgcctgggataatgaagactttgtgaaggcggtggaagccaccggcagaaaacagctgatcatcgccggcgtggtgaccgaggtgtgcgtagcgttcccggcgctgtcggcgattgaagcgggctatgaggtgtttgtggtgaccgacgcctccggcacctttaaccccatcacccgcgatgccgcctggcagcgcatgacccaggccggtgcgcagctgatgaactggttcggcgtcgcctgcgagctgcaccgtgactggcgcaacgatgtcgagggtctgggcaaactgttcagcgaacatattcccgactaccgcaatctgatgagcaactttgactatttaatgcagaaataa

SEQ ID NO: 442813 - DNA, 600 bp, Serratia marcescens
atggcatggttgggatttatcagcgcacgggcgtgccggcactggcaggacgcatcgccgtttctgccggcgttcagcttttacgaaaggcaccagtcagcgccgatcgacgccgcgccacaagccattattcacgcggtgcaggcgctggatatgcaggaggatccgctgatccgtcgcctgctgacgctgcgacaactgccggacaggctgcgccggcgcgcgaagcccgcccgccccttcggctttgacagcttcaccccgctgcatcaggacagccacgaactctccctcggtctggccggccgtttctggcggccaacgctggttctgcccaagccggaggacgcccggcagtttcttcagtttgccgaccccgacgccgccaaactggtgctgcgctttaaggtcgtcgcagatcaaatcggccaaacgcggctacgcaccgaaacctttgtctactgccccacgccgcaggtgaaagcgcgctttgcctgctactggctgctgatccgtccggccagcggctggatcagacgccgcaccctgagcgcggtgcggcgtaagctggctgctaccgcctcatcgttccagccatag

SEQ ID NO: 442814 - DNA, 2181 bp, Serratia marcescens
atgagcaatccaaccgacaaatcaacgtcttcaacgaccgcgaaatgccctttccatgccgacgtacctgagcaatacgccggcggaggcaccaccaatcaggactggtggcccgaccaactgcgtgtggatctgctaaatcagcactccaaccgctctaacccgttgggcgaggatttcaactaccgcgaagaattcaacaagctggattacgccgcgttaaaagcggatatccgtcacctgctgaccgactcgcagtcgtggtggccggcggactggggcagctatatcggcctgtttatccgcatggcctggcacggcgccggcacctaccgcgccgttgacggtcgcggcggctccgggcgcgggcagcagcgcttctcgccggttaactcctggccggacaacgtcagcctcgataaggcgcgccgtctgctgtggccgatcaagcaaaaatatggccaaaaagtctcctgggcggatctgtatattctagccggcaacgtggcgctggaaaactccggcttccgcaccttcggtttcggcggcggtcgcgaagacgtctgggagccggatctcgacgtcgactggggcaatgagaaaacctggctggcgcaccgccacccggaaagcctggcccatcaggcgctgggcgccaccgaaatggggctgatctacgtcaacccggaagggccggaagccagcggcgaaccgctgtcagccgcagccgccatccgcgccaccttcggcaatatgagcatggacgatgaagaaaccgtcgcgctgatcgccggcggccatacgctgggtaaaacacacggcgcagcgtccggcgaccacctcggcccggaaccggctgcggcgccgctggagcggcagggtctcggctgggccagcaactacggcagcggctccggccccgacgccatcacctccggtctggaggttgtctggtcgcaaacgccgacccagtggagcaataatttcttcgaaaacctgttcaaatatgagtgggtacaaacgcgcagcccgggcggcgccatccagttcgaagccaaagacgggccggaaattattcccgatccgttcaacccgggtgtgaagcgtaagccgaccatgctggtaaccgacgtgacgctgcgcctcgaccctgagtttgagaaaatctcgcgtcgcttcctgaacgacccgcaggcgtttaacgaagccttcgcccgcgcctggttcaaactgacccaccgcgatatggggccgaaagcgcgctacctggggccggaagtgccgggcgaagatctgatctggcaggatccgctgccgcaggcggtgcagcagccaagcgcggccgatatcgacagcctgaagacggcgatcaaagcctccgatctcagcgtcagcgagctggtctcggtcgcctgggcctcggccgccaccttccgcggcggcgataagcgtggcggcgccaacggcgcacggctggcgctggcgccacagcgggactgggaagtcaacgccattccggtcagcgtgctgccgaccctgaaggcgattcagcaggcctccggcaaagcgtcgctggcggatgtgatcgtgctggccggcgtggtgggcattgagcaggccgccgccgccgcgggcgtacaggtcagagtgccgttcacgccaggacgcgtcgatgcgcgtcaggatcagaccgacgttgaagcgtttaacctgcttgaaccgctggccgacggcttccgcaactatcgccgttcgccgaacggcccgaccaccgaagagctgctgattgaccgggcgcagctgctgacgctgaccgcgccggaaatgaccgtactggtcggcggcctgcgcgtattgggcgccaacttcgacggcagccagcacggcgtgttcaccgatcgcgtcggcgtactcagcaacgacttcttcgtcaatctgctggatatgcgcaccgaatggcaggccaccgacgccagcgcggagctgtacgaaggccgcgaccgtcaaagcggcgaggtgaaatacaccggtacccgcgccgatctggtgttcggctcccactcggtgctgcgcgcgctggcggaagtgtacgccagcagcgacggtcaggagaagtttgtccgcgacttcgtcgccgcctggaccaaggtgatgaacctggatcgcttcgatctggcgtaa

SEQ ID NO: 442815 - DNA, 2181 bp, Serratia marcescens
atgagattgaaaaacaaagggataattagaaaacaaccggcaacgtcggggcagctgttctatttgttattttcaccttccctcatcctgttgccggcgctgccgggctatgcggcggacgaagagagcatgatcgtcacggcgcaaagcgtgaccgcgccgctgaaaggcccggtggccaaagacagcgccgccggcaccaaaaccgccaccccgctgcgcaaaacgccgcaggcgatttccgtgattacccgccagcagatggacgaccaggccgccctctccgtgtctgatgcgctgaactacaccagcggcctgctgaccaactaccgcggcggctcgaaccgcaacgatgaggtgatcgcccgcggcttccgctatatgcccaagtttcttgacggcctgagctacggcctgtccggccaggccggcgcggcgggccagatcgatccctggctgctggagcgcgtcgaggtggtgcacggcccggcttccgtgctgtatgggcaggtcaaccccgggggcattatcagcatgaccagcaagcgccccaccgccgagagcatccacaaaatccgcctcagcagcggtaaccgtcactacggcgaggcggcgtttgatttcggcggccggctcaacgacgacaacacgctgttctaccggctgaacggcatcgccagcacccagcatcagtcgatgaaagacaacaagcagcagcgtctggccatcgccccggcgctcacctggctgcccaatgccgacaccagctttacgctgctgaccagctaccagaacgaaccgaaggccggcttccgcaacttcctgcccgccaacggcacggtgttcagcaccagcgcgggacgtattccctacgacttcaacgtcagcgacccgagctacaaccaggcaaagcgcgagcaaacctcagtgggctatattttcgaccacagcctcaacgacgtgctcaccttccagcagaacctgcgctacaccaatatggacgagtcctacaaatatctggtgtacacctttgacgccgacgaccgtaacgatcattccatcaaccgccggccgcagcacgataaaatcgagtcgcaggagcttggcatcgacaaccagctgaaggccgaattcgccaccgccgacgtcaagcacacgctgctgggcgggctggattacaaatggagcgacgtggacagcaagctgtggcgcgacagcggcgatcaatacattctcgactgggcgcacccgacccctgtgcatatcgatgaaagcaccttcagcctggccaccagcacccgtaaaaagctggaccagctggggatctacctgcaggatcagctggagtggaaccgctggaacctgctgctgtccggccgtcaggactggtcggaagtccgcacgcaggaccgcgtggcggacagcgacgtgcagcagaacgacagcaagttcagcggccgcgccggcctgctgtatgcgttcgataacggcctgtcgccgtatatcagctacagcacctccttcgagcctaacctgagcagcggtgcgccgggcagcgatccgttcaagcccaccaccggcgagcagaccgaaatcggcctaaaatatcagccgccgggcagcaacacgctgctgaccctgtcggcctttgatatcacccagaaaaacatcaccgcctataacagcgtaaccggctataacgagcaggtcggcaaggtgcgttccaaagggatcgaggccgaagcgcacgcgcagctgacgccggcgatcaacgtcatggccgcctacagctataccgatgtggtcaccaaggagagcgccatcggcgagcaggtcggccatacgcccgccagcattccgcgccacgccgcctccgcctggggcagttaccgcttccggcacggcgcgctgcaggggctgacgctgggcagcggcgtacgctataccggcaccagctggggggattccgaaggcgggtttaaaattccgcactacaccttgtacgacctgatggcgaagtatgagctgggccaggccagtccgtctctgcgcggcgccacgctgcagctgaacgtcaacaacgtggcggacaagcactatgtcgcctcctgcggcaatacctcggcctgcttctacggcagcggccgcagcgttatcgcctcggtggcttacagctggtaa

SEQ ID NO: 442816 - DNA, 1344 bp, Serratia marcescens
atgcatattttgccagccgcccgacagggagcggcagtaagcgcacagagcacggtagcggcagggacagtcagccggtggttgcaggctgaacaggtcgggcaggcggcgtggtggcagcaggtcgcgcagcggggaacgccgatcgtcgaagagcatgatcggcagcaggcgcgcttcacctggctgtggcgcgatccgcacgggaatgagccgcgttcgccgatccggcgggtgtatgtcgatatcaacggcgtgaccgaccaccacagcaccgatccaagtacgctgcagcgtctgccgggcacggatatctggcactggtcaaccctgctgccgcgcgactggcgcggcagttacagcctgatcccggtgcaggatgcgcagcttccccccgttttcagcgccgatcgggcgcagtgccgccagcagcagcgcgcctggtggatctctctgttcccgctggcaattgccgatccgctcaatccctatcccgccgcgtcgacccgcatcggccagccgctgtcgctggcgcaagggccggacgccgtcgatcagcgcgcctggctgaccacgccgccgccgcttgatgcgtcgcggttacaccacttccagtggcgcagcgaaacgctgggcaatcagcgccgcatctgggcgtacgccagcggcgagggcgcctctgcggctgagcggccgctggtgatcctgctggacggtcagaactgggtggacggccagccgctgctgccggtgctggcgcacgaaacggctgccggtcgtctgccgccggcctgctatctgctgattgatgtgatcgacggccagcaccgcgagcgggagctgccttgcaatgccgacttttggctggcgctgcaggcggaattgctgccgctggtgcgccaacgcatggcgttcagcgacagcggcgcgcgcaccgtggtggcggggcagagctacggcgggctggcggcgatgtacgccgggctgcactggccgcagcgcttcggccgggtgctgagccagtccggttcgttctggtggccgacggtgcagtacgtcaccgattttgcccggcgcgcggagtttgacgaaggctggctgacgcagcaggtgcgtcagggccgggtggccgcgggcacgctgacggtatttcaggaagccggcgaccgggaagcggatatcgaatttgtgaatcaacagatgcagcaggcgctgaaggccgccgggcatcgggtcaactaccgggtattttccggcggccatgacgcgctgtgctggcgcggcgggctgctggacggactgcactggctgctttccgatatggacgacatacatttcgactaa

SEQ ID NO: 442817 - DNA, 228 bp, Serratia marcescens
atgactcaggaacaacaaaacccttttgatgatgaaagcctgccgtttttggtgctgatcaaccagcaacagcagtattcgctgtggccgcagtttgccgccgtgccggcaggctggcatgaggtgatggggccggcgacgcgcgccgagtgcatcgcgtttatcgaagcccattggcaggacatgcgccccgcggcgctgaaaaacagcgtaacgccggcgccgtaa

SEQ ID NO: 442818 - DNA, 8529 bp, Serratia marcescens
atgtcagaaaccctttcactgcctgaaacccggctcgactaccaggaatatccgctggttgcggcgcaaccgggcatctggatcgccgatcaaatcgcgctgcggcgcaacagcttcgccgtggcgcactataccgaactgcgcggcgagattgaccgcccgtgcctggagcgcgccattcgccaggggctggcggaggccgacaccgtgcaggcgcgtttctatgagtcggcggacggtgtaccgctgcagcgtctgccgctgcgggccgatgcggcgcaggtcgcgcccgccgagtggctggacttcagccggcaaccggacggggagcaggccgcgctggcgctgatggaagacgatctggcgcagccgctgcccgccgacggcgaacggccgctgtaccgtcaggtggtgatgcaggtcggcgaagggcgctggttctggtaccagcgcttccaccatatcatgctggacggcttcagttttgacgccgttacccgccggatcgccgatatttaccgcgcattgcgtcagggcgagacgccgtcgccgtcgccgttcaccccgttcggcgaggtggtgacggagtaccgtgagtgggcgagttcgccggcggcggagcgggcggcgatgttctggcagcagcggctgcgcgacctgccgccgacgctgtcgctgtcgcatgaaaattgcgtcgttaccggggaggcgcggccgctcaaacagtcgctggtgttgccagcgacgctgttcgactcgctgcagggcgaggaggcgttgcagcaggcacagccggtcgacatcgtcactgcggcgctggtggtgtatctggcgcgcatcagcggtgaaagccgtctgtcggtagggtttccgtttatgcgccgcatgggatcgcaggcgctggcggcgatcgggccggtggtgaatgtgctgccgctgcagctgacggtgacgccgcagatgtcgctggcggaaacctgccgggcggtggtggcggaaatcaaacaggtgcgtcgccatcagcgttatgaggcggagcaaatccggcgtgatttagggctggtggggcagcagcaggagctgtacggcccggtgattaacgtgaaggtgtatcacagcgccttatcctttgacggccagccggcggtgacgcatacgctggcgatggggccggtggacgatctggagtttgaactgggcttccagaacgaggcgctgtacgtctcgctggtggccaacccgcagaaatattccgccgccacgctgcggcagcatgccgaacgcatcggccatctgctgcagcagctggcgcatcagccgcagtggccgaacggcgaactgccgctgatcggcgaagcggaacggcaacggctggccgcctgggggcgcggacgtgaactgacgacgcctgccggcatgacctcgatcatcgacgcgctgctgcagcgggtggcgcagcagccggaggcaacggcggtggcgtgcggcgggcagagcctcagctaccgccagctgtcggaacgggtgatgcagctggcgcgggtgctgattgatcacggcatcggcgctgaagatgtggtggcgatcggcattccgcgctcggtggacacgctggtggcgctgtttgcggtgctggccagcggcgcggcctatatgccgctcgatctggactacccacgcgagcgtctggcgctgatgtgcgacgatgccaaaccggcgctgctgctgacgcagcgcggtacgctgccgcagatgccggaactgccgcaggtattgtgtctggatgatgcgcactgccgggcgctgtgcgcggcggcggcgtcgcatccgattgaggatgccgaacggcgcgagccgctgcatgaggcccatctggcctatatgatctacacctccggctcgaccggacggccgaaaggggtgatgtcgacccattgcggcctgctgaacctgttcctgtcccatcaggcgtatctgttcggcccggcgattgagaaatatcaggcccgccacgggcggcgcatgcgcgccggacacaccgcatcgttctcgttcgactcctcctgggagccgctgttctgcatgatcatgggctgcgagctgtatatcttcgacgaagagctgcggcgcgacgcctgggcgctgctggaacagacccgccagacgccggtggatctgctggatatcacgccgtccttcttctcacagatggtggactgcgggctgctgcagggcgacttcccgcggccgtcgtttgtgatgatcggcggggaggcggcaacgccgacgctgtggaacctgatgcagcagcacccggaagtggaaatccacaactattacgggccgtcggaatacaccgtggatacgctgggcgcgccggttgacgccgccgaacagccggtggtggggcgcgcggtggccaacactgaagtgtggctgctggataaacagctgcagccggtgccgatcggcgtcgccggcgagctgtatatcgccggcaaaggcattgcgcgcggctacctgcgccgcccggatctgaccgcggcgcgctttgtcgccaacccgttcagccgcggcgaggtgatgtaccgcagcggcgacctgatgcgctggagcagcgaggggcagctggtatttatcggccgcaccgatcaccagattaaagtgcgcggcttccgcgtggagctgggcgaggtggaaagcgcgctggcggcgctgccgcaggtggggcgcgcggtggtgatcgccgaagcgatcggcgccacccaccggctgatcggctactgttcggtgcaggatgcggctctgcgggcgtcgccgacgctgcaaagcgatctgttggcagcgctggcgggccgtctgccggactatatggtgccggcgctgctggtggtgatggacgagctgccgctgaacgtcaacggcaaaatcgatcgtcaggcgctgccgcagccgcagcaggcggtgagcaacgtcagccgtgacgcggccaacgacgccgagcggctgatctgtcaggcgatggcgcagctgctgggcatggagcgcgtcggcgccgacgatgatttctttgcgctggggggcgacagcatctcggcgatggggctgggcaccgcgctgcggcgcgccggctatctgctgcggccgcgcgataccttcgcgcagcatacgccggcgcggatggcgaaggcgatgcagccgctgacggcgcagcgacagccgctgcgcgaagtacaacacgggccgatcgacggcctgccgatcctgcatgcgttcggcgaacagggcgatatcaaccgcctgttcgcccacggggtgttcctgcgcgtgccggcggcgctggaggccgggcagctgcgcagcgtactgacgcagctgcgcgcggcgcacccggtattggacgcacgcacccgtgaggggcaactgtgggtcggggaaagcggcggggccgactgtctgcgcgtgcagacgacggaaggcgggctggaagcggccgccgaacaggcgttcgaccaggcgttgagccggctcgatcccgccgccggcgtcatgatgcaggcggtattattgccatgcggcggcgaatcacagggactggtgctggtgatccaccacctggcgaccgacggcgtctcctggcgcatcctgctggaggagctgcgtcaactggcggaagcggcgatgcgcggcgagacgccggcgctaccggcggaagagacgtcgctgtatgaatggtcgcgctggctgcgggaagacagcgcggcacgcgcggcggagctgccgttctggcgggcgatgctggcggacggcgcgccgcggctgggcgctcgggcattggatccggcgcaggatcgtccggcggcgctgtgtgagcgacgcaccctgctggacggtgaactgaccgccgcgctgctgggcgcattgccgcacagataccgcgccaacgttgaagagatcatcctcagcgcgctggcgctggcctgccgtcagcgcttcggcgcctcgcagctgcgcatcggcgttgagtcgcacggccgcgccgaggttggcgccaatgacctggcgcgcaccctgggctggctgacggcggaatatccgctgctgattgcgctggatgcagaaccggcgcatcaggcggtacgcgcggtgaaacaggtggtgcgcgcggtgcgtgaccgcggcatcggctacggccagctgcgctatctgcacccgcagcatcgcgatgcgttgagcgccctggcggcgcgcaatgcgccggagatcctgttcaactatctcggacgtttcggtcaggaacagacgctgtggacgccgcagcgcacgcagcagcgcttccgcgacgtctttgcggtggcgcaggatgcgcaacagacgctgagccatccgttggaagtgaatatttttgtcgaagaaggggagcagccgcgtttggcggtgaactggagctggctgccggcgatcttcagcgagcaggatattgcggcgctgcacgacggtatcgaacaggcgctggccgagctgtcggcgtttgccgcacgtcagccggcgcaggcggcggcgacgctggtggctgccgaactggcgccgctgacgatccgcgatgagcaactgcaacagtggcaacagcgccacgggccgttggcggatgcgctgccgctgctgccgctgcagcacggtctattgttccatgcgcaaaccgccgccatcggcggcagttataactcgctgacccgtctgagcctcagcggcgagctggatgagcagcgtctgcagcaggcgctggatgcggtggtgcgccgtcatccgcagctggcggcgcgctttacccgtgaaggcgagccgctgcagctgctgccgctgttggcggagagcgacagcccgtggccgctggatgtgcagccgttgccggcgcagtcggcacagcaggaggcgcaggcgctgcgcacgctggagcaggaggaactggcgcgcgatttgttcaatcagggcggagcgatgctgcatgcgctgctggtcaggcacggcgacgaagcgcgctatacgctgttcctgaacgctcaccacctgattgtcgacggctggtcgacgccggtggtgctcggcgatctgttgaccgcgctgtatcaggggccgtcggcgctgccgccgctgcgctcacgctacggcgatatcgtgcggcagctgacggcgcgcgatgccgaggcgtcgcggcagatctggcggcagacgctgcagaacgtgcggccgacgctgctgttcggcgagcgctcgcatgatgaacaggtctatgaacgggagatgacgctgccgccggcgctggaacagcggctgctgaacctgtgccgcgagcgtggcctgacgctgaacagcgtgatgcagggcatatgggcgctgcagcttgccagccacagcggtcagcaggacgtggtgttcggttcgccggtgtccggccgtttcggccaggttgacggggtggaagaacatgtcggcctgttcagcaataccttgccggtgcgggtgcggctggacggtcagcgctcgctgtgtgaacagatggcggagctgcagcagcagcagatcgcactgctggagcatgacgatctggggttgggggagatccagcgtctggcgggggccggcacgctgttcgacacgctgctggtggtggaaaattaccccgacaacggcgcgctgctgggcggtgaccggccgctgcgctgcgacgccatcgccaacaaaggctatacccactatccgctgacgctgctggtgctgccgggtgagcgcctgcgcctgctgatggagtaccgcgcgtcggtgccgcagccgcagcgcttcgccgaacggctgatgctgctgctgacgcagtggatcgaacagcccgatcggccgctggcgcagtggcagctgcaaacgccgcaggagcaggcgctgatcgcggcggtgaaccagaccgcgcatccgctgacggcgaccacgctgccgcaggcggtgacgcagcaggcggcgcgaacgcctgacgctgtcgcgctgcaggatgcgcagcactgtctcagctaccgggagatgcagcagcagacgcagcagttggcgcagcggctgcgtcaggccggcatccggccgggggatatcgtcgccgtcgccttgccgcgttcggtgcgactgagcctggccctgagcgcggtggtgcagctcggcgccgcctggctgccgttggataccggctacccggacgaacgtctggcctatatggtggcggacgcgcagccgcggctgattatcagcgacagtgccctgcaggcgcgtttcgccgcgctggcgccggtgctgacgttcgacgaggtgacattgtcacatgaaccgtcgccaacggcggaagcgtggccggcgatcgaccccgatgccccggcctatgtgctgtatacctccggttcaaccggacggccgaaaggggtggtggtcagccaccgggcgattatcaatcggctgtactggatgcagcacgcctacccgctcgacgggcaggatgtggtgctgcagaaaacgccgtgcagtttcgacgtctcggtatgggaattcttctggccgctgatggtgggggcgcgtctggtgatggcgccgccggaggcgcaccgcgacccgcaggcgctgacggcgctgattgatgagtaccgcgtcaccacgctgcacttcgtgccgtcgatgctggccatctgggtggaggcgctggcggagcaggcgtcgccgcagcgcgcccgcagcctgaagcaggtgttctgcagcggcgaggcgctgtcgtgcgagctggcggcccgctatcagacgcaggttggcgcgccgctgcataacctgtacggcccgactgaggcggcggtggacgtcacctatcagccggcctccggcgcggcgctggcggcggtcagcggcgccggggtgccgattggccgtccggtgtggaatacccagctgcacattctggatgcgctgctgcgtccggtgccggtcggctgtgccggcgatctttacctcagcggcgtacagctggcggcgggctatctgcggcgcgccgacctgaccgcccagcgttttgtggcgtcgccggcgggggacggacagcgcatgtaccgcaccggtgatatcgcccgctggctggaggacggcagcgtcgaatatctggggcgcagtgacgatcagctgaagatccgcggtcagcgcatcgaactgggggaaatcgagcaggcgctgctggcgcagcccggcgtggcgcaggcggcggcgcatgccatcgtgctgtcgccgcaggccgctgccgccggcggcgccgatatgcgtcagctggtggcctggctggtgccgcagccgggcatggcgctggatagcgaggtgctggcgcaggcgctggcgcagcgtctgccggcgcatatgctgccggtcagttacgtgctgaccgacagtttcccgctcagcgccaacggcaagctggaccgcaaagccctgccgaaaccgcagtatcagcagacggcggggcgtgcgccgcgcagcgacagcgaactgctggtggccgggctgttcagccggatcctgcagcgcgacggcatctgcgccggggacgatttcttcgcgcttggcgggcattcgctgctcgccatgcggctggcggcggaactgcgtcagcagtcggggcgttcgctgtcggtcgggcagattatgtttgcccgcagcgtggaaaatatggcggcgctgctggatgaggcgcagccgggcggcaacgccgaaagccgtggcgccggcgaaatcctgcggctgcgcggcggcgacggaccggcgctgttctgcctgcatccggcttccggcttcgcctggcagtacgccggcctgatgcgctatctgccgggcgacttcccgatcgtcggcctgcagtcgccgcggccggacggcgttattgcccgctgcgacacgctggatcagatggtcgatcgccatctggcgaacctgcgagacctgcagccgcacggcccgtactatctgttgggctattcgctgggcggcacgctggcccatgcgatggcggcgcgtctgcagcagcagggggaagaagtggcgttcctcggtatgctcgacacctacccgccggaaggacaggactggagcgggccgagcgaggagcaggcgcagcaggaggtagcgcaggagcaggcggagtttatggcggaggacgacggcgatccggcgctgcgcgcggagaaggcggcgatgttcaacgacattgtcgccaactataaggacgcggtacgtctgctgtctaccgcccgcagcgcgcgcttcaacggcacggcgacgctgtttgtcgccagcaaaaccctgccggcggagatggacgtcaacgccacctgggcgccgtatctgcagcggctgacctgctatccgcaggcctgtgagcatgcggatattctgtcgccggcgtcgctggaaacgctcgggccgctgctgcattcgctgttaacgcgccagtaccgtctggcctga

SEQ ID NO: 442819 - DNA, 1287 bp, Serratia marcescens
atggctaaaccctcttttttgcttgatttcagtttactgagaaccaatgcgcacttccgggcgattttctgcgcccgcatgctgtcggtcttttcactgggaatgttggcggtcggcgtgccgattcagatccaggcgatgaccggctcgacgctgcaggtcggggtggcggtggcgctggacggcgtcggcatgtttatcggcctgatgctgggcggcgtgctggccgatcgcttcgaccggcgtaagctgattctgtttgcgcgcggcacctgcggcctgggctttgtggcgctgagtctgaacgccttcgccccggcgccgtcgctgtgggcgctgtatctgctggccgcctgggacggctttttcggcgcgctgggcatgaccgcgctgatggcggtgatcccgctgttggtggggcgggagaatctggccaccgccggggcgctcagcatgattaccgtgcgtctgggggcgattctggcgccggcgctggggggcgtgattatcgtcgccggcggcgtgggggcggcgttcgccgtggcggcggccggcaccctgggcacgctgatcccgctgacgcgcctgccgacgctgcggccgcaggcgcaggagccggaacatccgctacgggcgctggccagcggcgtgcagtttgtctggcggcacaaagtggtgggctcggtggtgctgctggggatgctgatgagcatcgtcggcgcggtgcgtattttgtttccggcgctggcgcaggatacctatcgggtgggcacctcggccatcggcctgatgtattcggcggtgccgctgggcgcgatgctgggcgcctttaccagcggctgggtgccgcgcttccggcggccgggcgcgctgatgctgagcgctgcgatctgcgcctttgccgccatcgcctcgctgggggtgttcagcagtctgctgccggcgctgatcgcgctggtgtgttacggctatgccaacgccatcgcctcgctgctgcagtttatgctgattcagagcaatacgccggatcacctgctggggcgggtgaacagcctcggcaccgcgcaggacgtgaccggtgattcgctgggggcgctggggctgggggtggtcggccgggtgctgacgccgttgctcagcgtgctcacctttggcggcgcggcggcgctgatcggcctgctgctggcgtgcagcgtgcgtacgctgcgccactgtgtgctgcctgcgtcgccgcaggaagaggagctggcggacggggagccggtgacggccgactcccgctcttga

SEQ ID NO: 442820 - DNA, 981 bp, Serratia marcescens
gtgcagccctcgcgtttatttccgctgttttccaccctactgacttttctactgctgctcgccagcccgccaggccgcgccgcggacgccggctggccgcgcaccctgcatacgccacggggcgacgtggtgctgcagcagccgccgcagcgcatcgtctccaccagcgtaacgctgaccggttcgctgctggcgattaacgctccgctggtcggctccggcgctaccgcacgcaactcgacggtggccgacgctcagggctttttcacccagtggagccaggccgcgcaggcgcgtcggctgaagccgctgtatatcagcgagcccaatgccgaagcgatcgccgccgaaacgccggatttaatcgtgatgtccgccaccggcggcgactccgcgctgaagctgtacgaacagctgtcgagcatcgccccgacggtggtgattgattacggcaatatcagctggcaaggtctgacgcagaagttgggagaaataaccggccatgaggcggatgcgcaggccgccgtcacgcgcttcgagcagcgggtggcggcgctgaagcagcgtatcgccctgccgccgcagcccacctcggcgctggtgtattacgaggacggtcgcgggatgaatatctggacgccggcgtcggcgcagggtcagctgctgcaggagctgggctttaccctcgcgccgctgccgccggacatcagcggcaaccacacgcagggtaaacgcaacgatattattcagctcagcggggaaaaaatggcgcgcgcggtcagcggtgccaccatactgctgttttccgccgacgggcggacggtgaagaagtttaccggcaacccgttcctgtcgcagctgccggcggtgcgccagcagcgggtttacgccatggggctggatacgtttcggctggattattacagcgccaacaacctgctggactatctggaacggcagttcgccaacgcggcgtcgtaa

SEQ ID NO: 442821 - DNA, 2193 bp, Serratia marcescens
atgattatggctaaacgccgtggccgtctcctgacctctggcggccggatgatgccggcgctgtcagggattgccgttctggtcgccgccgcgctgcacctgccggatgccgccgcgcaggagacggagcaggaggacaacatcctggtggaggccgccgcaggcgacgatgaggcggcgcagcaggattacagcgtgccgatcacccgggcgggcaccaagatgaacctgaccgcgcgcgatatcccgcagtcggtcagcgttatcggccagccgcgcatgcaggaccagcagatgcagacgctgggggacgtgctgaaaaacaccaccggggtgacggagaaagtggccgactttgatcgcagcaccttctattcgcgcggcttcctgatcgataactacatggtggatgatatccccacggtgtttgaggagcgctggaatctgggggattccgcgtcggataccgcgctgtatgagcggatcgaggtggtgcgcggcgcaaccggcctgatgaccggcgcgggcaacccgtccgccgcggtgaatatggtgcgcaagcatgcggacagccgggagtttaccggcaatgtgtccgccagctacggcagctggaacaagcagcgctatgtgctcgatctttccgcgccgctgaccgcctcgggcaatgtgcgcgggcgcatggtggccggctatcaggataacgacagctatatcgaccgctacagcgccaacaagaagtttatttacggcgtggtggatgccgatctgaccgacagcaccacgctgtcggcgggctacgagtatcaggaaaccaacgccgacaacccgccctggggcggcgtgccgcgctggtatcgcgacggcggcaaaactgactattcacgctcgttcaataccgcgccggactgggcctacaacgacaagcagtcgcgcaaactgttcgccacgctgaaacagcgcttcgacaacggctggcagttcaccctgaacggcacccacaccgaaaccaagctcgacagcaagatgctgtatatcgacggcttttttgaccgcgacagcggtatcggcgtcagttcctatccgaactacccggtggtcggcggcaccggctacaacaccggcacgcgcaaggtgcatgccatcgacgccttcgccagcgggccgtatcagctgttcggccgccagcaccagctgatggccggggtcagctacagccggcagaccaaccgctacctgaacgctttcgccaacctgtcgcccgacgacgtcggcaactttaatcactggaacagccagttcccggaaagcgactggggcgagatgagcgtggcgcagcaggacaccatccatcaaaaatcggcctacgccgcgacgcgtttctcgctggccgactcgctgcacctgattgccggcgcgcgctatacccagtggagcaccagcacgctgacgcagaacatggagaagaacaacgttaccccgtacgccgggctggtgtacgacattaacgacagctggtccgcctatgccagctacacctccgtgttcaagccgcaaacctaccgcgacagcagcggcagctatctgtcgccggtcaccggtaaaaactacgaggccggtgtgaaaagcgactggctgagcagccgtcttaccacctcactggcgatcttccgcatcgagcaggacaacgtggcgcagagcaccggccacgtgatccccggcaccgccgaaaccgcttactccccggcgcagggcaccgtcagtaaaggcatcgagtttgaagtgaacggggcggtgaccgacaacctgcagatgaccttcggcgcgacccgctatgtggcggaggacagcaagggtgaggcggtcaatccgatgttgccgcgcaccagcgtgaagctgtttgccgcctataacccgccggcgctgcgcgagctgaccgtcggcggcggggtgaactggcagacgcacacctggcaggacgttgccggcccggagggcaacggcaccctgcatgccgagcagggcagctatgcgctggtcaacctgttcggccgctatcagctgaccaaacagctgtcgctgcaggccaacctgaacaacctgtttgataaacgctacgacaccagtgtgagtcagtacgtggtctacggcgcgccgcgtaacgtgtccgtgaccgccagctaccgtttttaa

SEQ ID NO: 442822 - DNA, 1089 bp, Serratia marcescens
atgaataagaaaaaatctgcgctgatgttgttggtggggttggcgttggccggttgcagcgcccagcagggcggcggcgcatccgcgacggcgacaggcacgccggccgcggcggccacgcagagcgcgcagctgcaaaagaacgcgctgggggacgggctgtatgaaatggccctcacgccggacggccgggcgctgtatgtcgccagcgcgcagggctttaaggacgtgcagggcggagcaatctataagctggatcccgctacgctgaaggtgctggggatcacccataccgatctgaaaaacttcggcgtggcgatggatccgcagggcaagacgctgtacgtcaccaactcgcttgacggcggcgtcagcgcgctggatatcgccagcggcaagattaccggccgtctgctgttcagcgagcgcaatgagaaaggcttcccgtatggcgcgcgggaaattctctggcatgacggccagctgtttatcggcggcgtggcggatcccggtgtgatctgggtggtggatgccaaaacgctgaagctgaaaaaacgcattaataacgccgggaaatgggtcaccggtctgcactattccgcgcagacccaacgtctgtatgccgccaacggcggcggtgaaattctggtgatcaacccgcgcagctacgcgattgagcaacgctggcagccgctgggtgagaagccggcgctgctgctgaacctggcggaagataagcaaggcggccgcctgttcgtcaccgataattccaaagccaaaaccacgctggtgctggatatccgcagcggcaagctaatcaagcagctggacaacggcgattcgctggcggtcaagtataacccgcagcgccaggagctgtacctgacccagcgcgagtcgggcaaattgctgatcctggatgcgcacagctatgcgaccaagcgcagcgtcagcctgccgccgcacccgaacagtctgctgctgtccgctgacggacaaaccctgtacgtgacggtgaagcaggcgttcaacaaggacggctcgacccaggggccggacagcattgtgcgggtgccgctgaatcaataa

SEQ ID NO: 442823 - DNA, 930 bp, Serratia marcescens
atgatgaatcaacaaaccaaacaagctgtaaaagaatggtcagacagtctggccggtctggggccaatccttacaggtcaggataccgtaacgccgatgagtgaggtccgtaacgcctacacccgtatgctggctaaaaatcctgcacctgccggagtgagctttaatgaggttgatatggggggcgtaccaggcactttggttacgcccgacatccttgaaaccgatgctatcgttatgtacatccacggcggggcctatattgtcggtgaaccagctggctatcacggtattggcggcaactacgccaatatgctgggcgcaagggtctacatgccggactaccgactggctccggagtatcctttccctacgccagttaccgatacggttcgtgcctatgagtggttgattgaacaaggctttgatgccagtaaaatcgtgctggcaggcgagtctgcgggtggagcgatggttgttaccgtcatggttgccgcacgtaacaagggtctcccgcttccggccgctggtgtctctatctcaccatgggccaatcttgaacatacgggtgtatccatgaccaatagggaaggtctcgatcccttaaacacaaaagcaggtttggattttctggcgcgcaccttcctgggtgatgcgttgcctaaccatccaatggcatcaccggtatttgccgatgtgacgggtctaccgccagtgctcgttcaaattggcgaaaacgaacttatgctgagcgacgcgatgcgtctggcaacgcatctgggtgataaccgcgttcgtgtaaatctggaagtctggccgggtatgttccacgcttggcatttcttctcaacgctgcagccagaagcggtacaggctctcgaaagttcagtcgcctttatgaagcaagccctgcaggatgcatccaagtaa

SEQ ID NO: 442824 - DNA, 909 bp, Serratia marcescens
atggagatcaatagtattggtgatattgcagcattcgtcgctgcggtaaaagcggggagttacacccatgcggcgagttcccttgggcttacacgttctgctattggcaaaagtattgtcaggcttgaaacacgtcttggtgttcgtcttcttaaccgtactacgcggcgtctgagtcttactgatgaagggaggataatgtttgatcgttgtcgtcagatactcgaagacctcgaggaggtcgatgccaccatggccatgcgcagagttaagccaacggggactctccggcttagcgcgccgctctcttttggacagcgacatattcttcccgttctggatgcttatctaaagaaatggccagaacttcgcgcggaggtgtcttttagcgacaggtttgtggaccttattgaagaaggttttgatattgccattcgcataggtgaaccgcgcgatgattcgcgcattctgacccgaacgatagcgttgcagcatattgtcacatgcgcatcacctgagtacttgtcctctcgaggtattccaaagacacctgcggatttaatcgaccatgacactatctttcttcttagtgcagagaaaagacgtagctggcggtttgccaccccggaaggggcatttgtgtatgaaggacccgggcgacttaacctcgacagttctgaagccatgcgtgcatcggctattgccgggtttggaatagtccacttaccaacctatttgctcggtgaggatttgcgtagcggaagattgatacccgttcttgaggaatatcctattccaccggaacctattcgggtgatttatcccagtaagcggcatttatcaccgcggattcgctcttttattgacctgcttattgaaagctgggagcagggagcgccttgggaataa

SEQ ID NO: 442825 - DNA, 930 bp, Serratia marcescens
atgcgttctaacataattgaatatattagtatttttatacaggtcgttgagcagggcagcttcaccaaagctgctgatattctgcagctgcaccgccccgcagtgagtaaagcgatacagcagctcgaggacgaacttggcgtaaaactcatacatcgtaccacccgcaagctgagtattacggcgaaaggggacgagttttatcagcatgccaaacacgttctggctgaagtcgatggcatgatggccaacttttcatcaaccttaccaccgcgtgggcggctcaagcttgatgttccgctggcgctggcccataccatccttattccccacctgacgcagttcaagtcgttatatcccgatattgacgtggtgctggtttcatcggataaaaaaaacgatctgatcgccgaaggcgtggactgtgtggtacgcctgggggaactgcaggattcaagctttatctccagacgtctcggggatatcaggatggccacctgcgccgctccctcctatttgcagcggtatgggaggccggcaacactggcagaactggaacagcaccgggcagttaacttcttcagcgaacacagtcgtgacgtgatggagtggaagtttatcgagaatggagaggtggtctcactgcgccctgccagcagcatgctggtcgataattccgatattctgttgtcctgcgccctggccggtctggggattatccaggcctccagtgatgcccttgccccgcatattgcttccggtaagcttgaagaaatcctggcgcagtatccctccgttgccaaacccgtgtcggtgatgtatccggaccggcgctatctttcccctcaggtgcgcgtctttatcgactggttcagcgaggtttttgccggcagatcggcagaaaccgacagattgttactgaatgaataa

SEQ ID NO: 442826 - DNA, 993 bp, Serratia marcescens
atgtctaaagttgtcacgtttaaccgcaccggcggtccggaagttcttgaggttgttgatgtagaggtgccggcgcctgccgcaggggaagtccaaatccgcgtacgtgcaattggcctcaatcgtgctgaaattatgtaccgaaatggtcagtatgtgattgcccccgaattcccggcacgtctgggttatgaagcggctggcgtggttgaggttgtcggtgagaatgtcgaagggttcgccaaaggggatgtggtcagcgtgatcccttcattcatgtttaacgaatatggtatgtacggtgagcgtgttaacgcgccgctacacgcggtggtgaaacatcctggcaatttgtctttcgaagaagcggccgcaagctggatgatgttcgtcacggcttatggcgcactggttgaatacggtaacctgcaggccgggcagaatgttattatccgcgcagcatcaagcagcgttggcctggcagctattcagatcgcgaacatgttgggtgccaaacctgttgccctgacccgaaccagcgaaaaacgcgacatgcttctgcaagcaggggcggccgctgtgatcgcgactgcggagcaggatatggtcgctgaaatcaaccgggcgacacatggcgaaggtgtgcacattgtttttgatcctgttggcggcccggacgtggcaaagttgactcaaatcatggcaccacaaggtatgtacttccagtacggtgcgctcgacagccgtgacatgctggtgcctgtattcgatattctcggtaaacatctcacgctacgcggctatgagctgttcgaaatcaccaccgacgcggaaaaaatggagcgagcgaaatccttcgtttcagaaggtttgcgttctggcaaactgaaaccggtcatcgataaaaccttcaggcttgaagatatcgcagatgcgcatcgctatatggaagcaaacggtcaggtcggtaaaataatcgtgaccgtgggataa

SEQ ID NO: 442827 - DNA, 393 bp, Serratia marcescens
atgaccgaacaacttcatataacacttgtcgtggagctcagccgttggatagaaaaccaccttggccgggccattcagttacccgaactcgccgcctactccggctattcgttatggtatatgcagaaggtttttaaggagatttccggctattcgctgggacgttacatccgcgaacgccggctgatgggtgcgctgcgcaagctgcgcttttccgagcagagcctgtttgatatcgccatcgattttggcttcggctcgcagtcgcacttttgctatatgtttaaaaagcgcttcggcttcaccccgtccgagctgcgcagctcgccggcgctgccggtcacggtcacgctgacgccgccgctgcatgagcagctgccgcaggccgcctaa

SEQ ID NO: 442828 - DNA, 1101 bp, Serratia marcescens
atgacactcccacaacctcgttacgatttaccaaggctaatttttggcgtgctgtttattgccattatgatcatcgcctgcttttgggtggtgcagcccttcatactcggctttgcctgggccggcatggtggtgatcgccacctggccggtgctgctaaaactgcagaagctgctctggggacggcgttcgctggcggtgctggcgatgacgctgctgctggtgctgctgttcgtgatgccgattgcgctgctggtgaacagcgtggtggacaacagcgcgccgctggtcgcctgggccagcacgccgggtaaagtgcatattcccgatctggcctggctgcacgcggtgccgatgatcggcgacaaactgtatgacagctaccatacgctgattcaaagcggcggcggcgcgctgatcgccaaggttcagccctacttcggccgtaccgcgacctggttcgcctcgcaggcggcgcatatcggccgcttcctgatgcactgttcgctgatggtgctgttcagcgcgctgctgtacgcccgcggcgaacaggtggcgctgggcatccgccactttgccgtacgcctcggcgccgaacgcggcgacgccgccgtgctgctgggcggccaggcgatccgcgccgtggctctgggcgtggtggtcaccgcgctggtgcagtcggtgctgggcggcatcgggctggcggtcgccggcattccggcggcggtgctgctggcggtgctgatgttcatcttctgcgtcgcgcagctcgggccgttaccggtgctggtgcccgccattatctggctttactggagcggcgacaccacctggggcaccgtgctgctggtatggagctgcgtggtcggcacgctggataacttcctgcggccggtgctgatccgcatgggcgccgatttgccgatggtgctgatcctgtccggcgtcatcggcggcctgctggccttcggcatgatcgggctgttcatcggtccggtagtgctggccgtctcctaccgcctgctcaccgcctggatgaatgaaacgccggagccgaccgccgatctggaagaagtcgccaaggatttggaagagatgtaa

SEQ ID NO: 442829 - DNA, 330 bp, Serratia marcescens
atggtagatgaaatcgaagaacagatttatgcgttggtccgcaaacatgatggtgtctatctgtttaaggaaaaaacgctcaccccagacactgacctggacacggatctacaactggaagacgatgaagcggaagcattgatgaacgagttttttgaacaatttggcgttgagagggggagttttgccctagaaacctactacccagcggatccgccgctgcgcgaactgttaaatccgttcaagaagagggatatccctatagtccctgattttaccattaatatgctcatcgaatccgccaaggctggccgctggctgtataaatga

SEQ ID NO: 442830 - DNA, 3027 bp, Serratia marcescens
ttggttcagcgggtgctggattttttggaagcgttaaagcacaacggattcaacggcgatatcgccaccagctatgccgatcgcctgacgatggcgaccgataacagcatttaccaactgctgccggaggcggtgctgtttccgcgctccaccgccgatgtggcgctgattgcgcggctggccggcgaggaacgtttcaatacgctgactttcagcccgcgcggcggcggcaccggcaccaacggccagtcgctcaacagcggtatcgtggtagatatgtcgcgccatatgaaccgtattctggacatcaatctggagcagggctgggtgcgggtcgaggccggggtcatcaaagaccagctcaatcagtatctgaagccattcggctacttcttttcaccggaactctccaccagcaaccgcgccacgctgggcggcatgatcaataccgacgcctccgggcagggctcgctggtgtacggcaaaacctccgatcacgtactgggtctgcgcgcggtgctgctgggcggcgacatgatcgacacccgcgccatgccgacggcgctggcggaaacgattgcccaggaagaaaccgccgaagggcgcatttaccacaccgtgctgaaccgctgccgcgaccagcgcgcgctgattctggaaaaattccctcagctcaaccgcttcctgaccggctatgatttgcgccacgtgctgagcgacgatctgcagaccttcgatctgacgcgcattctgaccggcgccgaaggcacgctggcgtttatcaccgaagcgcggctggacattacgccgctgcccaaggtgcgccggctggtgaacgtcaagtacgattcgtttgattcggcgttgcgcaatgcgtcgtttatggtggaggccaaggcgctgtcggtggagaccatcgactccaaggtgctgaatttggcgcgggaagatattgtctggcattcggtcagcgagctgatcgccgacgtgccggataaagagatgctggggctgaatatcgtcgagtttgccggcgatgatgaagcgttgattgaacagcagctggacgacttgtgccagcgtctggactcgctgatggcggagcggcaggccggcgtgattggctaccaggtgtgcggcgatctggccggcatcgagcggatctacggcatgcgtaaaaaggcggtcgggctgctgggcaacgccaaagggcaggccaagccgatcccgttcgcggaagatacctgcgtgccgccgcagcacctggcggactatatcgccgagttccgccagttgctcgacggacacaacctgagctacggcatgttcggccacgttgacgccggggtgctgcatgtgcgtccggcgctggatatgtgcgatccgcagcaggagatgctgatgaagcagatctccgacgacgtggtggcgctcaccgccaaatacggcggcctgctgtggggcgaacacggcaagggcttccgcgccgaatacagctcggcgttcttcggtgagacgctgtatgacgagctgcgccgcatcaaggcggcgttcgacccggacaatcgccttaaccccggcaaaatctgcccgccgctcggcgtcgatgcgccgatgatgaaggtggacgcggtaaaacgcggcacgctggatcgccgcattccgattgccgtgcgtagttccttccgcggcgccatggagtgcaacggcaacggcctgtgcttcaattttgacgcgcgcagcccgatgtgtccgtcgatgaaaatcaccggcagccgcattcattcgccgaaagggcgcgccgcgctggtgcgcgaatggctgcgcctgctcagcgagcagggcgtcgacccgctgcagctggagcaacagctgccgcagcagcgtatgagcttccgtaatctgatcgaaaaaacgcgcaacagctggtacgccgataagggcgagtatgacttctcgcacgaggtgaaagaagcgatgtccggctgcctggcctgtaaggcctgttctacccagtgcccgatcaagattgacgtgccgggattccgctcgcgtttcctgcagctgtaccacacgcgctatctgcgtcccgccagtgactacgtggtggccggcgtggagagctatgcgccgctgatggccaaggcgccgaagatgttcaacttcttcctgaagcagccgtggctgcgcgatttgagccgcaacgccatcggcatggtcgatgtgccgctgctctccagcccgacgctgcgtcagcagctgtccggccatcaggcgatcaatatgacgcttgaacagttggaggcgctgccgcatgccgcgcgcgagcagtatgtgctgatcgtgcaggatccgttcaccagctactacgacgccgtggtggtggcggactttgtccggctggtggaaaaactcggctaccggccggtgctgctgccgttctcaccaaacggcaaggcgcagcatgtgaagggcttcctgacgcgctttgccaaaacggcgcgcaagaccgccgatttccttaaccgcgtcgcccggctggggatgccgatggtcggggtcgatccggccttggtgctgtgctaccgcgatgaataccaggagatcctcggcgagacgcgcggcgatttccgcgtacagctggtgcatgaatggctgcaggcgttgctggcggagcgggcagaacagccggccaccggcgaagcctggtatctgttcggccactgtaccgaaaccaccgcgctgccggccagcagccagcagtgggcgtcgatcttcgcccgcttcggcgccaaactggaaagcgtcagcgtaggctgctgcggcatggccggcacctatggtcatgaaagcaagaacctgcaaaattcgctcgggatttatgagttatcatggcatcaggcgctgcggcggttgccgcgtcaacgttgcctggccaccggctattcctgccgcagccaggtcaaacggattgagggcaacggcgtgcggcatccattacaggcgctgctggagatgattgcgtga

SEQ ID NO: 442831 - DNA, 357 bp, Serratia marcescens
atggtggggcatgtggggattgaatttacccaaatcggcgacgattttctggaagccaccatgccggtagactcgcgcaccacgcagccttttggcttgctgcacggcggcgcgtcggtggtgctggcggagtcgatggggtcgatggccggctacctgtgcaccaccggcgaccagcaggtggtgggggtggagatcaacgccaaccatctgcggccggcgtttgacggccgggtgcgcggcgtctgccgggcgctgcacgccggacggcgcaatcaggtctggcagatcgagattttcgacaagcgggataagctgtgctgcatctcccgcctgaccacggcggtgattgagtaa

SEQ ID NO: 442832 - DNA, 1275 bp, Serratia marcescens
atggctggcttgccgaccaacagtaattcacgcgcgctgcaacagctctacagcctgttcgaggcgcagggcggcgagcactccccgcatgcgctggcgaactggcagcaggcgctgcggctgggctggccgacgcgcaaacatgagaactggaaatacacgccgctggacggcctgctggagcatcagttccatgcgccgcagccggcagcggtcagtgccgagcgctgcgccgagctggcgttgcccctcgatgcctaccggctggtatttgtcgatggccgttaccgcgccgatctgagcgacgccgatctcggcgattaccagctggaaatggcagggtatcagctgccggagccgattcagccggagatcttcctgcacctgaccgagagcctggcgttggaaagcagcctgattcgcctgcctgccggcaaagtcgccgctcgtccgctttacctgctgcatatcagcagcgggcgcagcggcgccggcgaaattaacagcgtgcaccaccgccatcatctggaggtggcggccggtgcgcaggcggaggtgattgagcattacgtcagcctgaacgagcacgcgcactttaccggcgcgcgcctgaccgcgacggtgggcgacaacgcccagctgcatcactgcaagctggcgtttgagaatcagccgagttatcactttgctcataacgatctgaagattggccgcgacgcgcgggtgaaaagcgacagcttcctgctgggggccggtctgactcgccataacaccagcgcacagctgaatggcgaaggcgccaatctgcagctcaacagcctggtgctgccggtagggaaagaaatttgcgatacccgcagctatctggagcacaacaaggggtattgtgaaagccgccaactgcataaaaccgtggtcagcgaccgcgccagagcggtgtttaacggcatgatcaaagtggcgcagcacgccatcaagaccgacggccagatgaccaaccacaacctgttgctgggcaaggtggcggaagtggacaccaagccgcagctggaaatttacgccgatgacgtcaaatgcagccacggcgccaccgttggccgcattgacgaagagcagctgttctacctgcagtcgcgcggtatcgccaagcatgatgcgcagcagatgatcatcttcgcctttgccgcggaactgaccgaaggcatcggcaatgacgtaattcgcgagcgggtgctggcgcatatcgcacagcgtctgccgcgggaggccgtatga

SEQ ID NO: 442833 - DNA, 1218 bp, Serratia marcescens
atgagttatccgatcgaacaggtgcgccgggactttccgctgctgacgcgtgaggtcaacggccagccactggcctacctcgacagcgccgccagcgcgcaaaaaccgcaggcggtgattgagcgcgagatggaattttaccgccatggctacgccgcggtgcaccgcggcattcacagcctgagcgcggaggcgacgcagcaaatggaggcggtgcgtgaacaggcggcgcgctttatcaacgccgcatcggcggaagagatcgtgttcgtcaaaggcaccaccgaaggcatcaatctggtggccaacagctacggcagcctgctgcagccgggcgacagcgtcatcatcaccgagatggagcaccacgccaatattgtgccgtggcagatgctggcgcaggcgcgcggcgtgacgctgcgcgtctggccgctgcagccggacggcacgctggatgtggctgatttgcccggccttatcgatgaccgcacccggctgctggcgattacccaggtctccaacgtgctgggcaccgtcaacccgctacaggaaattatcacccaggcgcacgccgccggggtgaaggtgctggtggacggcgcgcaggcggtgatgcatcagcaggtggacgtacaggcgctggactgcgatttttatgtgttctccggccataagctgtatgggccgtccggcatcggtattctgtatggcaaagccgcgttgctgcagcagatgccgccgtgggaagggggcggctcgatgattcagcaggtcagcctgacgcagggcaccacctatgccgaagcgccgtggcgctttgaggccggctcgcccaataccgccggcatcatggggctgggcgcggcgctgaactatgtgtcgcagctggggctggcgcagatacagcagtatgagcaggcgctgatgcagtatgcgcaggaggcgctgcagcaggtgccgcagctgcgcatctacgggccggcgcagcgcgccggggtgatcgcctttaacctgggcgatcaccatgcctatgacgtcggcagtttcctggaccagtacggcatcgccatccgcaccggtcaccactgcgcgatgccgctgatggcgttttatcaggtgccgagcatgtgccgcgcttcgctggcgatgtacaatacccgcgaggaggtggatcggctggtggccggtctgcagagaattcagcgactgctgggctaa

SEQ ID NO: 442834 - DNA, 414 bp, Serratia marcescens
atggccaacttgccggacaaagataaactggcgcgtaatttttcacgctgcctgaattgggaagagaaatacctgtatgtgatcgagctgggcggccgtctgccgccgctggcggaggaggcgcacagcccggagaacctgatttcgggctgccagagccaggtgtggatcctgatgcggaaaaacgcgcagggccaggtcgagttcagcggcgacagcgacgccgcgattgtcaaagggctgctgaccgtggtgtttattgtctatcgtgacctgacgccgcagcagatcgccctgctggacgtccgtcctttctttgccgatctagcgctcagccagcatctgacgccgtcgcgttcacaggggctggaggcgatgatccgcgccatccggcaaaaagccgcgcagctgtaa

SEQ ID NO: 442835 - DNA, 1017 bp, Serratia marcescens
atgaaacgtgcgttgactttaatgggcgtactattcgcctccgtgttggccggcagccaggccgctaatgcgaccgaatatccgttgccgccggcgaacagccgtctgatcggcgagaataccacctacaccgtaccggatgccggcctttcgctggaggcgattgccgccaaataccagattggcctgctgggcatgctggaggccaaccccggcaccgatccttacctgccgaagccgggcaaagtgctgaccattccgacgcagatgctgctgccggacaccaagcgcgagggcattgtggtcaatctggcggagctgcgtctgtattattacccgaaaggcgaagacaaggtgatcgtctacccgatcggcatcggtcagaccgggatgcacacgccgctgaaagttacctcggtcagccagaagatccctaacccgacctggacgccgaccgccaatatccgcaaacgttatgcggcgaaaggcgagacgctgccggcggtggtgccggccggtccgaataacccgatggggctgttcgccatgcgcctgtcgatggggcatggggagtatctgatccacggcaccaacgccaacttcggcatcggcatgcgcgtcagctccggctgtatccgcctgcgccctgacgatatcgaagcgctgttcaacagcgtgccgaagggcacccgcgtgcagattatcaacgagccggtgaaggtatcggttgagccggacggcaaacgctatgcggaagtgcatcagccgctgtcgaaagttgaaagcgacgatccgcagaccatgccgatttcgctctccaagtcgcagcagaagtttgccgatagcgcagaaacggataagtcggtgtttgacagcgccataacgcgccgctccggcatgccggtgctggtcagcgtcgggcagaaccctgcagacgtccctctgccgtcggtacagctgtttggcggcagtaagcaggccgagacacaggctgcgccgatcagccaggcacagtag

SEQ ID NO: 442836 - DNA, 300 bp, Serratia marcescens
atgttgaaatttattgccgcatcggcgtttaccacgcccgataacggccagtcccgccgtgagggacaattgagcgacggccgcgtcgccgcggaagtccgctttgaagccggcgccttcggccaactgaaaaagcgtgctgacgccgtgcacatccgggtgatcgacggcgactttgaatttaccgtcggcagcgatattctcctgctgcaggccggcgaaagcgtggctgttccggcgcaggtgcccagcggctgcttctgcctgagcgccggtacgctgctggaaatcagcgcctga

SEQ ID NO: 442837 - DNA, 882 bp, Serratia marcescens
atgaatgacatcctcgcttttcttgcggtggctaaagcgcaaagttttacccgggcggcgaaacagctgggcgtcagcccttcggcattaagccataccgtccgtaaccttgaagaacggttaggcgtacgtttattaacgcgcaccacccgtaacgtggcccccaccgaggccggcgagcggctgatgacctccaccggcccgctgttcgagcagataacggcggaaatagataaaatcggcgaactgcgggataagcccgccggcaccatccgcatcacctgctctgacgatgcggcggaacagatcttacgccccgcgctgccggcatttcttgccaaatacccggatatcaacgttgaaatctgcattgattacggctttaccaatatcgtcgagcagcgctttgacgccgggatccggctgggcgaggcgatcagccaggacatgatcgccgtgcggctcggcccggactggcggctatcggtagtcggcgcgccatcctactttgccgctagcccgacgccgctgcacccacgcgatctgacggcccacaactgcatcaatatccgtcactcgccgggtggaagcctctatgcctgggagtttgaaaaagacggccagccattaaccgtgcgggttaagggccagatgaccgccaacagcaatatccatattctcaacgccgcgttggacggcatcgggctggcctatctccccgattttatggtgcagccttacctggacgacgggcggctggttgaggtgctggccgactggagcccctacttcgccggtttccacctgtattaccccaaccggcgcaatgcttctccggcgttttccgcactggttgaggcgatccgctaccgccagccctga

SEQ ID NO: 442838 - DNA, 1218 bp, Serratia marcescens
atgccgtcagttcataccgtttcaacatcgcgtatcgccagcccgcatcccgcctggggcgccgtattttctatggcgctgggcgtggtggtgcttatcgcctccgaatttatgccggtcagtctgctgacgccgattgcgcgggatctcgtcatcagtcagggccaggcggggcaggccatctccgtatccggcctgtttgcggtactgaccagcctgctgaatactccgctgaccggccgcttcgatcggaaaaaagtgctgatcggcttcaccttgctgctgactttttccggactgatcgtgaccttcgccgccaatggcgtgatgtttatgaccggccgcgctctgctgggggttgccatcggcggcttctggtcaatgtccacggcgaccgtgatgcgtctggtacctgtgcatgcggtagccagggggctggcgctgattaacggcggcaatgcgctggcggcgaccatcgccgcgccgctgggcagttttttagggcagtatatcggctggcgcggggcgttttttatcgtcgtgccgctggcgatcgttgcctttgtctggcagtggcgagcgctcccgcatttgcccgctgcgtcgcggcagcagggttcggccaatccgtttcgcctgttgcgtaacccgcaggtggcgctgggaatgaccggcattatgctgttctttatggggcagtttgcggtctttacctatttgcggccatttttggaagaggtgacgcagatttccgtcaatcagctttctctgacgctgctggcgttgggggccttcggcctgctgggcacctggatgattggtcatctgctgcagcgccgcctgttcgcctggctggtggcgatcccgttagccatggcgctgattgccggcctgctgattgaaaccggtgcatcttttatgtttgtcgggccgctgttggcgctctggggactggtggcgacgccggcgccggtggcctgggggctgtggctgagcaaagcgttgcccgatgacgccgagacgggcggcggcctgatggtggcggtgatccagggggcgattactctgggcgcaggtgtgggcggcgtgttgtttgacgcgctcggctggtggagccctttggcgtttggtctgttgctgctgctggggtcggcgctgtttgcctggtttgccatgatcaacagcgtcaggatcgatatggcggcggtggaacattaa

SEQ ID NO: 442839 - DNA, 1374 bp, Serratia marcescens
gtgcagaagtaccttattgaagcgcgtagtttattagccctcgctattccggtcattatcgcgcaaatcgcccagacggcgatgggcgtggtggataccattatggcgggtgcatacagcgccacggacatggctgcagttgcagtcggcacatccatctggctaccggctatcctgttcggccacggcctgctattggcgttaacgccggttatcgcccagcttaacggctccggccgccgcgaccgcatcgcgcatcaaatcagtcagggcttctggctggcgagcggtgtttcgttgctgattatcgccgtgctgtataacagcaaatatatgatcgacatgatgcacaatgtcgatccgcaactggcggaaaaagccgtcggctacctgcacgccattatgtggggcgcgccgggctatttattcttccaggtaatgcgtaaccagtgtgaaggattatccaaaaccaaaccggggatggtgatcggctttattggtctgctggtgaatattcccattaactatattttcatttacggcaaattcggcatgccggaactgggtggcgtcggttgcggcgttgctaccggcagcgtctattgggtgatgttcctgctgatgcgctggtacgtgcgccgcgcgccgtcgcagcgcgacatcaaaccagagcgcgcctggccgccggtcgactgggccacgcagcgacgtctggtcggcatcggcctgccggtcgccctggcgctgttctttgaagtgacgctgttcgccgtggtggcgctgctggtgtcgccgctcggcatcgtcgccgtcgccggccaccagatcgccctgaacttcagctcactgatgttcgtgctgccgctgtcgctcggcgtcggttccaccatccgcgtcggccaccggctgggggaaagcaacgtcgacggcgcgcgcgtcgcagcctacagcgccattggcgtcggtattgccatggcctgcggcaccgcgctgtttaccgccctgctgcgcgagccgatcgcgctgctgtataacgacacgccggcggtggtcgccatggcttcgcacctgatgctgctggccgctgtctaccagatttcagactccattcaggtgatcggcagcggcgtactgcgcggttacaaagatacgcgttcgatcttcttcatcacctttatcgcttactgggtgctggggctgccgagcggctatctgctggcgctgaccgactacatcgtgccggcgatggggccgagcggcttctggatcggctttattatcggcctgaccttcgccgccatcatgatggtgctgcgcatgcgctggctgcagcgtcagcccgccgcgctgattttgcagcgttccacccgctga

SEQ ID NO: 442840 - DNA, 297 bp, Serratia marcescens
gtgaagttttatcggaaaacattgatgttggcggcgctgatgacgctggctgcctgtagcagtacgtcagagaacggcgcctctgcgtcgtcggtcgatgcggatgacacctgcggcgcgtcgcagtatcaaaactacgtgggcaagccgctctcttcactggatggcgtgcagatcgacgcccgtcaggtgcgcaccattccttataattctgcggtcaccatggacttcaacctgacccgcctgaacttcctcggcgatcgggacgataaaatcacacgcgtttactgcggctga

SEQ ID NO: 442841 - DNA, 1206 bp, Serratia marcescens
atgcgaaactttggatttatgttttatctggccggcctgagtatgctcggctttctggccacggatatgtacctgccggccttcggcatgatgcaaaaagatctgcaaatctcccccggcgccattagcgccagcctgagcatcttcctggccggctttgcctttgcgcaactgctgtggggaccgctgtccgatcgactgggacgcaagccggtgctgctgatcggtctggcgctgtttggattgggctgccttggcatgatgtgggcggacaacgcgcagcagctgtggacgctgcgctttatacaggcggtcggcgtctgtgccgccgccgtaacctggcaggccatcgtgatcgaccgctacccgggcagccgcgccaaccaggtgttcgccaccattatgccgctggtcgccctctcgccggcgctggcgccgctggtcggcgcctggttgctgaaccacctgaactggcgcgccattttcgccgtgctgctggccattacgctgttgctgctgttgccgacgctgctgctgcgcgacaaaccgcgtccgcgagccgatgaaggcgctgcgcctggcatcggtttcctgcagttgctgaaatcgccgctgtacagcggcaacgtgctggtgtacgccgcctgctcagccggtttcttcgcctggctgaccggctcgccgtttattctgggcaatatgggctacagcccgaacgatatcggcctgagctatgtgccgcagacgctggcgtttctgctcggggggttcggctgccgcgccgcattgaaccgtacgaacggcaatacgctgctgccgtggttgctcctcatgtatgccgtcagcatggtggcgctgtatctggtcgccaccctgaccacgccgacgctgaccacactactgatcccattctgcctgatggcgctggttaacggcgctacctacccgatcgtggtggcaaatgcgctgacgccgttcccggaaagcaccggcaaagcggcggcgctgcaaaataccctgcaactgggcctgtgttttgtcgccagtatgctggtctccgcctatattgcccagccgctgctggcgacggtgacggtgatggtcgccacggtggcgctggccgccgccggctatctgctgcagcgcggcgacagcgcacggcaaaagaacgccgaacgccgtcagcatgctaactctgcgtcataa

SEQ ID NO: 442842 - DNA, 1242 bp, Serratia marcescens
atgctgaacagtcgcgcggttaacacctctacatctaccgaccgcccgtccagaaagattaaactttctctgatggggccggcatttatcgccgccatcggctatatcgaccccggcaacttcgccaccaatatccagtctggcgcttccttcggctataagctgctgtgggtggtggtgtgggctaacgtaatggcgatgctgatccagcttttgtccgccaaactggggatcgccaccggcaagaatctggctgagcatattcgcgatcgcctgccgcgcccggcagtatgggcctattgggtgcaggcggaaattatcgccatggcgaccgacctggccgagtttatcggtgcggcgataggctttaagctgctgttgggcgtgactctgctggaaggggcgatcctgaccggtattgctactttcctgattctgatgctgcaaaaacgcgggcaaaagccgttggagctgatgatcggcgggttgctgctgttcgttgccgcggcctatattgtcgagctggtgttctcgcagccgcagctgagcgggctggttaaaggcatggcgataccggatctgcctaatggtgatgcggtattcctggccgccggtgtgctcggcgctactatcatgccgcacgtgatttatctgcattcgtcgctgacgcagaccgccggcaacagttccaaggcgcagcgctatgcttcgaccaaggtcgacgtggcgctggcgatgaccattgccggcttcgttaatctggcgatgatggccaccgccgcggcggccttccattttagcggccacagcggcattgccgatcttgaccaggcttacctgacgctgcagccgctgctggggcacgcggcggccacggtattcggcctgagtctggtggcggccggcctctcatctaccgtggtggggacgctggcggggcaggtggtgatgcagggctttgtccgcttctatatcccgctgtgggtgcgccgggtagtgaccatgctgccgtcttttgtggttatcatgctggggatggacgccacgcatattctggtgatgagccaggtgctgctgagtttcggcatcgcgctggcgctggtgccgctgctgaagtttaccggcaaccgcgagctgatgggggagatggtcaacggacgcgtcgttcagaacattggctggctgattgttgccatcgtggtggggttaaacggctatttgttgctgagcagtctgttctaa

SEQ ID NO: 442843 - DNA, 465 bp, Serratia marcescens
atgttcaaacctctgctactggccgccgttttcgtggccgcgaccgttcccctggcgccgcaggcgcaggcggacggcttgaatatcgatttactacccggcgtttctctgcgtatcggcgatcaggaccgacgcggcaactattgggacggctatgactggcgcgatcgcgactggtgggagagccatcgcggccgcgaactgggcgagcgcagccggcgcggctactactgggatggttatcgctggcgcgaccacgattactggcgcaaacattactactaccatgacggacgctatcgtaaatacgataagcacgagtacaaaaggtacaagaaataccagaaagagcgcgaaaaagagtacaggaagtaccaaaaggaacgtgataaagaatataaaaaataccagaaagaacgctacaaagagtataagcaccaccatcgtcaccaccacgatgactga

SEQ ID NO: 442844 - DNA, 990 bp, Serratia marcescens
atggcttatcaggcggacgattcccgttatcaacatatgcactaccagcgctgcgggcgcagcggcctgcagttgccggccattgcgctgggcctgtggcacaacttcggtgaagtatcctcgcaggataacgcgcgccggctggtgcagcacgctttcaacctggggattacccatttcgatctggccaacaactatggcccgccgcccggcgccgccgaagaaagttttggccgtatgctgcaaagcgatctgcggccataccgcgatgagctgattatttcgaccaaggccggctataccatgtggcctggcccttacggcgactggggatccaaaaagtatctggtcgccagccttgaccagagcctgcgccgtctgggggtggagtacgtcgatatcttttatcaccaccggccggatccgcatacgccgctggaagaaaccatggcggcgctggatttgctggtgcgtcagggcaaggcgctgtatatcggcctgtcgaactatccggcacagcgcgccagcgaagcgttcgctatcctgcagcggttgggcacgccctgcctgatccatcagccgaaatactccctgtttgaacgcgatgcagagacgcaattgcttgataccctgcagcaacacggcgtcggctgcatcgccttttcccccctcgcgggcggcatactgaccgatcgctatctgcaggggattccgcaagattcgcgcgccgccagcggcagccagttcctgcgcccggagcagttgactgatgaacggttagacaaagtgcgccacctgaatcagcttgcgctgcaacgaggacagaagctgtcgcagatggcgctggcctgggtgctgcggcatcaagccgtcacgtcggtgctgattggcgccagtaaaacgacgcagatagaggatgcggtcggcatgctggcgcatcgcgactttagtcaggaagagctggcgctaatcgaacagatattaatgtaa

SEQ ID NO: 442845 - DNA, 1662 bp, Serratia marcescens
atgaacgcccactacacggtagctgattatcttctcgatcgtctggcgcagataggcatccgccatctttttggcgtgccgggcgattacaacctgcattttctggatcatgtgatcgatcacccgcaaatccgctgggtaggctgcgccaatgagctgaacgccgcctacgcggccgatggctatgcgcgttgtcagccggccgcggcgttgctgactacttacggcgtgggggagttgagcgccgtcaacggcattgcgggcagctatgccgagtatctgccggtcattcacctggtgggggcgccgatgctgcgcgcccagcgtgccggagagatgctgcaccatacgctgggagacggtgacttcggccactttgcgcgcatggcgcaagaggtgacggcggcgcaggccagcctgacgctggacaacgccaaggcggaaattgaccgcctgctgagcgtggcattaaccgaacggcgaccggtttatctgctgctgccgggcgacgtggcgcaggcaccgctgacgccgccgctatcgccgctgaggttaccggcgtttcattcggcgccggaggcgctggccgggtttatcgccgccgcgcgcgaactcctgcagccggcgtgccacgtcacgctggtggcggattttctcgccgagcgctttggcgtaaggcaggcgttggcgcagtggatgaatgaagtccctttgccgcacgcaaccttgctgatgggcaaaagcgtgctggatgaaacccatgccggatttatcggcacctacagcggcgcggccagcgatccgctggtcaggcagcgagtggaagaggcggatgcgaccatactggtcggcgtgcgcttgaccgacaccatcaccgccggtttcagccagcggttaacgccggaaaaatgtatcgatatccagccgttcgccgcctgcgtcggtcagcagaccttcagcccgctggcgatgcatgatgcggtacaggcgctgcatcagctgacgatgtcgctgaatgggcagtggccgccgctggccgtgagtcgcccggaattacccgccgctgagggcgataaactggatcagcacgcactttggcgtcaactgcaggcatttttgcaacccggtgacgcgatcattgccgatcagggcaccgcctgttttggcgcggcggcgcttagcctgccgcagggttgcctgtttatcaatcagccgctgtgggggtcgatcggctacaccctgccggcggcgtttggcgtgcagacggcgcagccggatcgtcgggtggtgctgctgatcggcgatggcgccgcgcagctgacgatccaggagttgggatcgctactgcgtgacgatctcaaaccggtgattttgctgctgaataatggtggctataccgtcgaacgcgccatccacgggccgcagcagcgctataacgatatcgccgcctgggactggtgcgcgctgccgcaggcgttagggtcggcaacggccagcacggtgcggcgggtcagtacgccgcagcagctgcagagcgcgctgcagacggccggcaacagcgggcggctggcgttgattgaggtgctgctgccgccgatggatgtgccggaattgctgaacagcatctcgcaggcgattcaattacgcaatgatgctgcctag

SEQ ID NO: 442846 - DNA, 867 bp, Serratia marcescens
atgcgctactctcccgaagccttattggcgtttgttgaagccgcggcgctcggttcattttccgccgccgcccgcaagctgaagaaaagtcagtcgaccatcagcaccgctatcgccaatctggaggcggatctcgacttaaccctgttcgaccgacagtcgcgtcagccgacgctgaccgtcgccggccataaagtgctgggacacgtacaggagattctggccgccagcgaacggctggacgccctgagcatccgcctggcggacaagatagaaccacggctgaccatcgttttttctgatacttatcagccgagttatcatgaaaacctgatggcgcagtttgaacagcgctatcaggatattgagctggaatgcatggttggcgaaggggaggacgtgctggacttactgcagagcggccgcgcccatctggggatgctggcggtgcagccggactacccgtccgatatcgcggcggcgcggctgccggagcgcaccgaaatgggcattttcgtctctcgtcagcatccgctggccagcgtcgtccatcccacacaggagcagctcgccagcgcccggcagctgtatctcaacagctatatcaacaaccgaaacaagccgcagggacgcgtctggtcggcccccagctatctgatgctgctggagatggcggaacagggatttggctgggcgattctgccgcactggctggtaaagcaatacgaccacggccacctgaccgaactgcagccacgcggctggccgatgctgatctccgtagatgcggtctggtcaaaacttaccccgccggggccggcggggttctggctgctggagcatctgctgaaagggtcttcaggctag

SEQ ID NO: 442847 - DNA, 441 bp, Serratia marcescens
atgcaactgcaaaacaagtcttttagcgaacgtattgtccacgcggtggggtttgaagcaatcgccgtcatgatctgcgcaccgattggttcgtggatcctgggccgttccatggcgcaggtcggcgctttggcggtcatgctttccagcgttgccatgctgtggaacatcgtttacaacgcggggtttgatcgcctgtggccggtgagccgggtagtacgcaacctgaaagtgcggatgctgcacgcggccggctttgaggccggctttattctgattggcgtaccgattgccgcctttatgctgaacctgacgctggtgcaggcttttatgctggaactgggctttttcctgttcttcctgccgtataccgtattgtataactgggcctatgacgcgctgcgccagcgctggatcgcggctcggctggcggtaaaataa

SEQ ID NO: 442848 - DNA, 696 bp, Serratia marcescens
atgaaagtgctgggactgttaggcgggatgagttgggaatccaccattccttattaccgtatgatcaacgaacaggtgaaaacgcagctgggtggtttgcattcggcgaaaatcgtgctgtacagcgttgatttccatgaagtcgagcagttgcagcatcgcggcgactgggaaggcgccggacgattgctggctcaggcggcgacggcgctgcgtgcggcgggcgccgaagcgatagcgatttgcaccaacaccatgcacaaagtggcggatgtggtggagcaggccagcggcctgccgcttattcatatcgccgatgccacggcgcagcaggtacgccagcaaaatatccgccgcgtcgggctgctgggtacgcgctttaccatggagcaggatttttatcgcgggcggttgcaggataaattcggcatcgaagtggtgacgccggtggcggcggatcgcgacagcgtgcaccgtataatctatgaggagctgtgtctgggccacattcatgtcgcttcgcgcgaggagtatcggcgcattatcagcgatctggaacagcaaggcgcgcaggggattattttcggctgtacggaaatcggcctgttggtcggcccgcaggatgcttcggtaccggtattcgataccacggcgattcatgcgcgtgcggcggcggagtatatcctggcgcgttag

SEQ ID NO: 442849 - DNA, 963 bp, Serratia marcescens
atgacatatgccctcgtaggtgacgttggcggcaccaatgcccgcctggcgctttgctcgcaagagacgggtgaaatcagccaggcgaaaacctactcaggcctggagtttgacagcctggaagcggtgatccgccaatatctgcaggagcatcagctggaggtgcaggacgcctgtatcgccatcgcctgtccggtgacggaagactgggtggcgatgaccaatcattcctgggcattttcgatcagacaaatgaaggcgaacctgggactggcgcacctggaagtcatcaacgacttcaccgcggtgtcgatggcgattccgatgctgacggatgccgacgtgctgcagttcggcggcggtcaggcgcagcaggataaaccgattgccgtttacggcgccggcaccgggctgggggtggcgcatctgatccacgtcaatcgccagtgggtaagcctgccgggcgaaggcggccacgtagacttcgcacccaacagcgaagaagaagacatcattctggaaacgctgcgggcggagatgggccatgtttcggcggagcgcgtgctgtccgggccggggctggtcaacctgtaccgggcgattgtcaaatctgacggccggctgccggagaacctggcgccgaaagatattaccgaacgcgcgctggccgacagctgtatcgactgccgacgcgcgctgtcgctgttttgcgtgattctggggcgtttcggcggcaacctggcgctgacgctgggcactttcggcggcgtttatattgccggcggcatcgtgccgcgctttatggaattctttaaagcttccggcttccgcgcggcgtttgaagacaaggggcgctttaaggattacgtgcaggagatcccggtgtttatgattacccatgcgcagccgggcctgctgggcgccggcgcccacctgcgacagacgctggggattgagctgtaa

SEQ ID NO: 442850 - DNA, 1227 bp, Serratia marcescens
atgagaacaaaaccggtaaatcgcagccttatcgttctgggcaccatcatctgtcagatgggcctgggaactatctatacctggagcctgtttaaccagccgctggtggataaattccactggggcctggcggatgtcgccaccacgttctccatcaccagtttcttcctggcgttttccactctgttcgccggcaaattgcaggaacgcttcggcatccgcaacctgacgctggccgccggcgtgctggtcgggctggggctgatcgccagcgcccacgccagctcgctggatatgatttatctgctggccggcgtggtggtcggtttagccgtcggcatcgcctatatctccaccctgtccaacctgatcaagtggttcccggccaacaaagggctgatttccggcatctccgtcggcgccttcggcagcggcagcctgctgttcaaatacgttaacgccgcgctgattgccaatgcgggcgtctccgccgccttcttctactggggcgttatcgtgatggcgttaatcgtcttcggttcgctgctgctgaaagagccggtcgccgcagcctccaacgcagcggcgcaaggtggccggagcgttaactacagcgtgcgccaaatgctggcgaccaaagaagcctacctgctgtttgccattttcttctccgcctgcatgagcggcctgtacctgatcggcatcgtcaaggatatgggggtgcagctggccggaatggacgttgctaccgccgccaacaccgtctccgccgtggcgattttcaacaccgccggccgtattattctcggcaccctgtcggataaagtcggccggatgcgcgtcatcagctttaccatgctggtcaccgtgctggcgatcgtcgccctgagcgcctttaccctcagccacagcctgttcttcctgtgcgtcggcgccgtcgccttctgcttcggcggcaatatcaccgtattcccggcgattgtcggcgacttcttcggcctgaaaaaccacagcaaaaactacggcatcatctaccagggcttcggactgggcgcgttggccggctcgtttatcgccaaatacttcggcggcttccacaccacctttatggtgattggcgtcctgtcgctgctgtccctgctgattaccctgtttatcaaaacgccgcagccggccatcatggccgaacagaacgaacaccagccggcggatctggtcaaagcctga

SEQ ID NO: 442851 - DNA, 288 bp, Serratia marcescens
atgaaaaaaagagcactattattggcggcgctactggcgctgccgctggtgagccaggccggaatttttattaacgtcaccccggacagcgcatggcgcgtcggcgaccgtgaccaccgcggccactactgggatggccaccgctggcgcgaggcgcgctggtggcgtgcacatcaccgcgattaccggccgccgcgccactaccgcgggcacgaccgtccgccgcaccgggcggatttccgtcagcgggaatggcatcaccaccacgatcaccatcaccgcggctaa

SEQ ID NO: 442852 - DNA, 735 bp, Serratia marcescens
atgaaagccatcattgttgaagatgagtttttggcgcaggaagagctgagctacctgatcaaacagcacagcaacatcaccatcgaggccaccttcgatgacgggctggacgtgctgaaatacctgcaaaatcatcaggtggacgccatcttcctcgatattaatatcccgtctctcgacggtgtgctgctggcgcagaacatcagcaagttcgcccaccggccggcgattatctttattaccgcctataaagagcacgcggtggaagcctttgagatcgaagccttcgactatattctcaagccgtaccacgaggcgcgtatcgtcaccatgctgcaaaagctggaggcgctgcaccagcgttcgctgaaccagcccgaacagcagcagccggccgggcgcggcggccacagcattaacctgataaaaaacgatcgcatcatcgttaccgacatcaacgatatttactatgcggcggccgatgagaaggtgacgcgggtgtacacccgccgtgaagagtttgtgatgccgatgaatatcagcgagttttacgcccggctgccggaagagcatttcttccgctgccaccgctcctactgcgtcaacctggcgaaaatccgcgaaatcgtgccctggttcaataacacctatattctgcggctgagcgacctggagtttgaggtgccggtcagccgcagcaaggtcaaggcgttccgccagctgatgcgtctgtaa

SEQ ID NO: 442853 - DNA, 1491 bp, Serratia marcescens
atgaccacgaccaccgaactaccgcaggtgcacgacctgcgttccgccctggagttgctgcgccacattgatgatgaactgatcgccaccgatgaaccggtcgatccgatggccgaactgtccggcgtttaccgctacgtcggcgcgcacggcaccgtgatgcgcccgacgcgcatcggcccggccatgatgttcaaccgcatcaaaggctatgacgatatgcgggtgctgatcggcctgctggcgtcgcgcaaacgcgtggcccacctgctgggcagtacgccggaacggctggcctggctgctgaaagactcggtgagcaagccgattgcgccggtggagatcccgcgtgagcaggccgcctgccaggaagtggtgcacctggccagcgacccggatttcgacatcctcaaactgctgccggcgccgaccaatacgccggacgatgccggcccctattttacgctgggcatgtgttacgccgccgatccggaaaccggcgaacatgacgtgaccattcaccgcctgtgcgtccagggcaaagatgaaatttcgatgtacttcgtgcccggccgccaccttgataccttccgcatgaaggccgaagcggcaggccagccgctgccgatctccatcagcatcggcgttgatccggccattgagatcggcgcctgttttgagccgcccaccacgccgctgggcttcgacgagctgtcggtggccggcgcgctgcgcaaccgcccggtggaactggcaccgtgcctgacggtggcggcacgcgccatcgcccacgctgaggtggtgattgagggcgaactgctgccgggcgtgcgggtgcgcgaagatcagcacaccaacagcggcaaggcgatgccggagttccccggctataccggggaggccaaagcggcgttgccggtgatcaaagtgaaggcgatcacccaccgcaaacacccgatcctgcaaacctgcatcggcgccagcgatgaacacactaatctggccggcatccccaccgaggccagcattctgcagatggtcgaacgggcgctgcccggctttgtactgaacgtccactgcccttcccccggcaccggcaaatatctggcggtgctgcaggtgaaaaaacgctcggaaaacgacgaaggccgccagcggcaggcggcactgctggcattcgccgccttttcagagctgaaacacgtcatgctggtggacgaggacgtcgacctgttcgatatgaacgacgtgatgtgggcaatgaccacccgctatcagggcgacgtcagcacggtgtttattcccggcgtacgctgccacccgctggatccgtcatcgtcaccggccttcagtccgtccatccgcgcggagggcatcgcctgcaaggccatttttgactgcacggtgccctacgcgctgaaggcgcagttccagcgcagcgcctttatggaggtggacgtcacgcgctttatcccgggctttaaacgctga

SEQ ID NO: 442854 - DNA, 894 bp, Serratia marcescens
atgagcgatatgcgtcagctgtactcgtttattgcgctggccgaagagatgcacttcgggcgcgcggcggccaatgtgcacattgcccagccggcgctgagccagcacatcaagctgttggagcagcgtctggggctgcggctgtttgaacgcgatcgccgccacgtggcgctgacgccggaagggcgcgtgttgctggagaaagcgcgcgatacgataggtcgctatgaagggctgctgcagaccgccgccagcctgcgcagcggcgccgacggcgcgatccggctgggatatgtcggatcggcaatttacgatccggcactgatgacgctgatgcgcgactaccgtcaggcgcggccgggcatcgagctggcgatggaggagcatgatgtgaaccgccagctcaccctgctgcagaacggcgatcttgatgcggcgctggtgcgtacgccggtgccgcagttgcccgggctggtttatcagcaggtggtgcagcggacgttgatcgcggtgctgccaaaggatcatgcgctgagcggatgcggaacgctgtcgctgcggcagctggcgcaggcgccgtttttgatccagaacgatccgccgggcgtcgggctggcctggtcggtactggacgcctgccggcgcgccggctttacgccgcacccgctgaaggccacgcgtgatgtggcggtgaccatcgggctggtggcgctggggatgggcgtggcgctggtgccggagacgcaggcgctggcgcggcgtgaggatatcagctaccacccgctggacgatccgctggcggtgagtacgctgacgctggcctatcggcagaacactcagcaggcggcggtgaaggactttgcccgctttgtccggcagcgcgccgcgcattga

SEQ ID NO: 442855 - DNA, 441 bp, Serratia marcescens
atgtctagccactatccggcccactaccactttgatgacgaagacgactgctggcacatcggctttcgcgatttcccggaatttcaggccgcctgctataaacgtgaagacgtggagctggaagcgcaggactcactgctgaccgccctcgccattgagattgaagaaggccgcgcggtgccgccgccctccgcgaacgatagcgacgaactgcaggtaccgctgcctctgctggtacagctgaaggtcgcgctgcataacgccctgctggcaaaacagatgccgaaagcgttactggcgcgccagctgggctttaacgccgggcagatgaaccgcctgctggatattgcctatgcctcgaaagccgaagcgctggaacaggcgctgttcttgctgggctacgaaatccggctctcggtgcatactggcgataagccataa

SEQ ID NO: 442856 - DNA, 930 bp, Serratia marcescens
atggataataagcaaccaggcgacgcaacagacaatcagcagtccaaaagcgatgtcacagtagacagccaagagcgggagcagggaaaagccgccattgacgtcaacgcggagaacctgccctcccgcgctgcggcggtgcatgaacagatccgtatggaaggggaaaaagagctggagcgtgactggctggcgctgctgtggtcggccatcgccgccgggctgtcgatgggcgcatcgctgatggccaaaggcatcttccacgcccgcctgcccgacgatcccagccgctttttcattgagaatatcggctatacctttggttttgtcatcgtcattatggcgcgtcagcagctatttaccgaaaacaccgtaacggcggtgctgccgatcatgcacaagcccacgccgaagaacctgcttattctgttgcgactgtggggcgtggtgctgttgggcaacctgcttggcaccgggctggcggcgctggcttttacccacctgccgctgtttgacgccgccacccggcaggcctttgtctccctgggacaggaagtgatgcataacaccccgcaggagatgtttgccaatgggatcctcgccggctggattattgccactatggtctggatgctgccgtccgccggcggcgctaaaatctgggtgatcgtgctgatgacctatctggtggcgctgtgcgatctgacccatatcgtcgtcggttcagttgagatcatctatttggtgtgcaacggcgtcatcggctggcaacaatttatttatccgttcgcgctgccgacacttgccggcaatatcatcggcggtacttttatctttgcgttaatcagccatgcgcagattcgcaacgacatcagcaatcaggcgaaagcacaggcaacacgcgccgttgacggtgatgacaaacgctga

SEQ ID NO: 442857 - DNA, 633 bp, Serratia marcescens
atgctggaagccaaaaacctgagttgtgtccgcgatgagcgcaccctgtttagcgggctgagtttttcggtgagtccgggcgatatggtgcaggtggaagggccgaacggcgcgggaaaaaccagcctgctgcgcattctggccggtctggcgcgtccggatgaaggcgaagtgcgctggcggggcgagaatacccgccgcagccgcgaacgctatcatgccgagctgctgttcctcggccaccagccgggcatcaatgcgatgctgacgccgtttgaaaatctgcgcttctatcagcgtgcggcccgcggcggcgacggacaggcaatctggcaggcgttggagcaggtggggctggtcggctatgaggatctaccggtggcgcagctgtccgccgggcaacagcgtcgcgtcgcgttggcacgactgtacctgagcgacagcccgctgtggatcctggacgagcctctgaccgccatcgataaacagggcgtcgccgaattgattcgccattttgaacaacatgcgcaacagggcggtatggtagtgttgaccacccatcaggagctggccggcagccagcggccagtgacgaaaattagcttgtcggacgcagggatggagacggcctga

SEQ ID NO: 442858 - DNA, 249 bp, Serratia marcescens
atgaatgccgcattttcctcctggacggcgttcttcgccatgggcggttacgccttttatgtgtggctggcggtggccgccacgctgattccgttgctgggtctggtgtgccataccctgtggcaacgccggcagctgctggccgatgtgcgccgccgtcaggcgcgcgaacgccgtatccgccaatcacaacatgctaaaacatcggctgcgccgcagtccgccgctgcgcgggagaaatcattgtga

SEQ ID NO: 442859 - DNA, 465 bp, Serratia marcescens
atgaggttcgccgccgtgatattggccgcattgctgagctttagcgccgctgcggccattgatacttaccattttgattcggtggagcaggagcagcagtatcgcgagctgaccgaacagctgcgctgcccgaaatgccagaacaacagcatcgccgattccaacgccatcatcgccgccgatatgcgcgccaaagtctatgagctgatgatgcaggggcagaacaagcagcaggtcatcgattatatggtggcccgctacggcaacttcgttacctatgaaccgccggtgacgccggcgacgctgatcctgtgggtcggcccgctgctgtttgtgctgattggcggcgcggtggtgattatgcgcagccgccgccgcactccggcggataacgacgacttctccgcacaggagcaacagcgtctggcggcgctgctggaagagactgacaggaagaaacgctaa

SEQ ID NO: 442860 - DNA, 1212 bp, Serratia marcescens
atggctttttggctgatgattatcgtgttgctgctgggcgccgccgcgctgttgctggtgccggctatgcggcagaatcgggcggacagcgccaccagccgcgacacgctgaacaaggtgctgtaccaggagcgtctgagtgagctggaacaggatgaacaacagggcgtggtcgccgagcgtcccgaactggtgaaagagctgcaacagaacctgctggacgatattcccggccaggcgacggcgcagagtaaaccgatcaaccgctgggcgctgttgccgggcgtgctgctgctgatcgtggtggcggttggcttttatctgaaaaccggcggtatggcgcaggtggcggcctggcggcaggtgcaggatcagatgccggcgctgcgcgcccgggtcgccaacgagcatgcgcagccgctcagcatggaagagatcgcccgtctggggctggggctgcgcaccgcgctgcagcaggacggccgtaatatcaacgactggatgatgctggggcgggtcggtatggcgctgaataacgccaccaccgccacgcaggcgtttgcccatgcctatcagctggatccgaataatctggaagtccgtctggggtacgccgaggtgttgacgcgttccaacgatccggaagataacaagcaggcgtcgctgatgctgcgtaaaatgatcgctgaagatcacagcaacctgcgtattctcagcctgttggcgtttaacgcttttgaacagggcgactaccggcaggccatcggcgcctggcaggtgatgctaaaattattaccggctgacgatcgccgtgcggaagtgctaaagcgcagtattgaacaagcaaaagtacaggccggcgacgaaactgttaaacttggtgtcaatgtcacgttgtctccagaggcagccaacgcattaccccaacaagggacgctgataatttcggtgaccgatggcaaaagcccggtgccggttgctgtaaaacaattacctctgagccgtttcccgctgtcgttctcgctggatgacagcaacgccatgatgccggagcgtttgctgtcgtcgctgcatcaggtgaaggtgcgcgtacgggtttctcatgacggtctggcaacgccgcaggccggcgactggttcggtgagagtgcgctgcagacgttcagcggtaacgggcaagttagcgttcagatagacaaacaggtcccttaa

SEQ ID NO: 442861 - DNA, 297 bp, Serratia marcescens
atgtcagatgcaattaataaatgcagcgcacaggaaacggcagcatgctgctgtgtggatgtcggcaccgtgatggacaataccgactgcaccgcgtcctacagccagatttttaccgacgagcaagacgcgcagcaaacgctgacggcgctgacggaaaaagcgcgttcggtggagtccgatccctgcgccatcagcagcagcctgcagccggtagacggcggcgtgcagctgaacgctgatttcacctttgcctgtcaggcggaaacgctgatttttcagctgggcctgcgttaa

SEQ ID NO: 442862 - DNA, 2163 bp, Serratia marcescens
atgagcgcagcgaccaatgcactgcatgagcaacgggctccacagacggcgtttcgtctgaccctgcggccggacaacatcggcgtgattaccatcgacgtgccgggagaaaaggtcaatacgctgaaggcggagtttgttgaacagattaatgatgtgctgatccaggcgcagcagcagaccacgctggaaggcctggtcattatctccggtaagcccgattcctttatcgccggcgccgatatcaccatgatcgccgcctgcaacagcgccaaagaggcgcagtcgctggcgaagaaagggcagagcacgctggcgcagctggcggcttttccggtgccggtggtggcggcgatccacggtgcctgtctgggcggcgggcttgaactggcgctggcttgccacagccgggtatgttccctggacgataaaaccgcgctcggcctgccggaagtgcagctggggctgttgccgggatccggcggcacgcagcggctgccgcgtctgattggcgccggcaaagcgctggatatgatgctgaccggcaaacagatccgcgctcgtcaggcgctgcgcatggggctggtggacgatgcggtgccgcacgccattttgcttgagacggcggtcgcgcgcgccaggcagggctggtcggcgcggcgcgaactgccgtggcaggagcggttgctcaacggcccgctcgggcgcagtgcgctgttcgccatcgtgcgcaagaaaacgctggagaagacgcacggcaattatccggcggcggagcggattatccaggtggtgcgtaccggtttggaccagggcagcgccagcggttatgaggccgaggcgcgcgcttttggcgagctggcgatgacgccgcagtcagcggcgctgcgcagcctgttttttgcttccaccgcgctgaaaaaggagcgtggcgccgatgcgcagccgcacgcgcttgaacgggtcggcattctgggcggcggcctgatgggcggcggcattgcctgtgtgacggctacgcgcggcggtttgccggtacgtattaaggacatcagcacccagggcattaatcacgcgctgaaatacagttgggacgtgctgggcaagcgggtgcgccgtaagcgtatgcgtccggcggagcggcaaaagcagatgatgctgatttccggcaccaccgattactgcggtttcgagcaggtggacatcgtggtggaggcggtgttcgaagatctggcgctgaagcagcagatggtggcggagatagagcagcacgccgcgtcgcataccgtctttgcctctaacacctcttcgctgccgattagccagatcgccgccaaggcgcagcggccggagcaggtgatcgggctgcactatttcagcccggtggacaaaatgccgctggtggaggtgataccgcatgccgcaaccagcgccgcaaccatcgccactaccgtagcgttggcgcataagcaggggaaaacggcgatagtggtggccgaccgcgccggtttttacgttaaccgcatcctggcgccctatattaatgaggcggcgcgctgtctgctggccggcgagccgatcgaggcgctggataaggcgctggtggatttcggcttcccggtggggccgattacgctgttggacgaggtcggtatcgacgtcggcaccaaaattattcctattctggtggaagaactggggtcgcgcttcgccgcgccggcggcgtttgatgcggtgctgaaagatggccgcaaagggcgcaagaacggcaagggcttctatctgtatcccagcgaaggccagcagcgccagcgccgaaaacgtgctgacgcttcggtttatacgctgctcggcgtcacgccgaaggcgcatctgccgccggcggaaatcgcccagcgctgcgtgatgatgatgctgaacgaagcggcgcgttgtctggaagaaggcgtgattcgcagcgcccgcgacggcgatatcggcgcggtgttcggcattggcttcccgccgttcctcggcggaccattccgctatatggatgagcttggtgcggagacggtggtgaaaaccctgcagtatctgcagcagcagcacggcgagcattttgcgccgtgcgaacgtctgcagcgcatggcacaacagggcgagcgtttctatccccgctag

SEQ ID NO: 442863 - DNA, 483 bp, Serratia marcescens
atgcaagttttgattatgcgtcacggagaggcggcgctcgacgcggccagcgatgcggtaagacctcttaccctctgcggtcgtgatgagtcacgtcagatggcggcctggttgaacaccaagtctgtggatattgaacgcgtgctggtcagtccttatctgcgcgccgagcagacgctggacacggtgcgcgctgcgctgacgctgccggaaggcgcggaagtgatgccggcgctgaccccgggcggcgacgccgcgctggtcggcagctatctgcaggtcctggcccagcagggggtgaagtcggtgctgatcgtttcccacctgccgctggtcggctatctggtggcggaactgtgcccgggcgagtgcccgccgatgttcgccacctcggcaattgccaacgtcgaactggcgcaggacggccatgcgggcaagctggagtggcaggtcggcccgtctcagctgatggtgaaagcctga

SEQ ID NO: 442864 - DNA, 828 bp, Serratia marcescens
atgaaaaatgggttgttgggtctgatggcgctgctggcgtcaacgtccgcgctggcgttgacgccgtggcaaaaaattgatcatccggtagcggggtcggcgcaggcgattggcggcttttctaacggctgtgtgatcggcgcccggccgctgccgctcaatgcggcggactatcaggtgatgcgccaggatcagcgccgctatttcggtcatccggaactgctggcgtttattcagcgtctgacccgtgagaccgggcagcaggggctgggcacggtgctgatcggcgatatggcgatgccggccggcgggcgtttcagcagcggccatgccagccaccagtccggtctggacgtcgatatctggctgcagctgccgcatcagcgctggagcgagcgacagctgctgaagccgcagccgatagatctggtgagcggcgacggcatgcgggtgcgtaataatcagtggcagccgcagattggttcgctgatcaaactggcggcgcaggacgacaaagtggcgcgcatcttcgttaacccggcgattaaacagcggctgtgcgacgatgccggcagcgatcgcgcctggctgcataaggtgcggccgtggtttggccaccgcgcccatatgcacgtgcggttgagctgtccgccggacagtctggagtgcaaggatcaggatccgccgccgccgggcgacggctgcggtttcgagctggccagttggtttgaaccacaccagccaagctcgaaaccgggcaagcgggttgtgccgccgttgccgccttcctgtcaggcgttgttggataaccatttttctgcggaataa

SEQ ID NO: 442865 - DNA, 282 bp, Serratia marcescens
atgatcgctgaatttgaagcgcgcgttttggcgctgattgatgacatggtagaccacgccagtgatgatgaactgtttgccggtggctatctgcgcggtcatctgacgctggcggtagccgaagcggaagagcagggcgaacacagcgccgaacagctgaaggcgcgggttgaagacagcctgcataacgccatccgcgccggcgagctgtcgccgccggatcaggtgctggtagaagcgatgtgggagaatttgtaccaggccgcattgcctaccgcctga

SEQ ID NO: 442866 - DNA, 2022 bp, Serratia marcescens
gtgagcaactcccccatccaaaccgcagcgctatcctggaacgaacagggtacacctgtttcgaaacagtttgatgacgtctatttttccaatcaggatgggctggaagaaacccgctacgtctttctcggcggcaaccggctgccggcgcgcttcgccgaacacccgcgcccgctgtttatcgcggcggaaaccggcttcggcaccgggctgaactttttaaccctgtggcaggcgtttgaacgccatctgcaggcgaaccccaccgccccgctgcaacgcctgcactttatcagctttgagaaattcccgctgcagccggcggatctggcggcggcgcacgcccgctggccggagctggcgccgtacgccgaccaactgcgcgccagctggccgcaggcgctgcccggctgtcaccgcctgctgctggcggaggggcgcatcacgctcgacctgtggttcggcgacgtcaacgcgctgctgccgcgcttcgatcacagcatcaataatcaggtcgacgcctggttcctcgacggcttcgccccggcgaaaaatcccgatatgtggagcgaacagctgttcgccgccatggcgcgctttgcccggccgggcggcagtttcgccacctttaccgccgccggcttcgtgcgtcgcggcctgcagcaggcgggttttacggtggaaagagtcaaaggcttcggtcagaaacgcgaaatgctggtcggcacgctgccggcggacagcgcgccgacgcccgatccggccccctggtttcaccgtccgcccgccgatgcgacacaggatatcgccctggtcggcggcggtatcgccagcgccctcaccgcgctggcgctgctgcggcgcggcgccaaggtgacgctgtactgcgcggacgatgagccggccgccggcgcttccggcaaccgtcagggggcgctgtatccgctgctcaacggccgcggcgacgtgctggagcgttttttcagcgccgcctttcccttcgcccgccgtctgtatgacgcgctggccgacagcggcgtcgtctttgagcatcagtggtgcggcgtcagccagctggcctacgatgaaaaaagcgcggcgaaaatcgacaatatgctggacaccgactggccgacggcgtttgccttcgccgccgatcgcgatacgctcagccagctgtgcggcgtcgacagcggcttcggcggcatcaattatccgcagggcggctggctctgcccggcggaactgacgcgcggcgcgctggaactggcgcagcgccaagggctacgctgccattaccgccaccggctcagtgcgctgacggcagagcaggacggctggcggcttgatttcagccacggcgacagccgccggcatgatgtggtgctgctggccaacggccaccagttggcgacgctgccccagtgcaccgaactgccgatgtatgcggtgcgcggccaggtctcccatattccgaccacaccggcgctgggccagctgcgacaggtattgtgctatgaaggttatctgacgccggtcagcccgcagcatcagcagcactgcatcggcgccagctaccaacgcggcgtgaccgataccgcctacagcgagcaggaacaacaggaaaaccgcgcgcggctgctgcgctgcctgccgcaacaggcgtggacgcaacaggcggacgtcagcgacgggcaggcccgctgcggcgtgcgctgcgccacacgcgatcatctgccgatggccggcgcgctgccggactaccagcaaacgctggcgtgctaccagaatctgccaaaacggcggcagcgcggggaagagattgataaggcgccgggctacccgaacctgtttatactcggcgggcttggttcacgcgggctgtgttccgcaccgctgacggcggaaattttggcggcgcagctgttcggcgagccgttgccggccgatgccgaggtgctggcggcgcttaatccgaaccggatgtgggtaagaaaactgctgaagggtcgcccgctgtaa

SEQ ID NO: 442867 - DNA, 423 bp, Serratia marcescens
atgtccgttcaggccgtcctttcacagtttatgcatcgtctgcgcttcgttagcaagcgtagcggcgcatggctgttgctgctggtctggctgctgcttaacggccagctggcgcttgccggtcacggctgcgatttgcagcctgacggtagagcggccgccgcacagcatatgtcgcatctgcagcaggcgacgccgggcatggacagccatacgggcgccggtgcgctgtgtgaaaaacactgcgtgccggataacgcgcagcaggatcatgccagcccctcgctggcgatcttgctggtcagcctcagcgtgttgctcgccataccgcgaaccaccgcgcggatttctcttatccactggcaaacgccgccgatagcagggccaccgacagaggttgtattctgtcggttccgtgaatag

SEQ ID NO: 442868 - DNA, 330 bp, Serratia marcescens
atgcgtaatttattgagcgttgccgttttttctcttctgttgttatcccccgtcgtgcaggccgaagagccgacgacctcccaccatgctgccaccgaacacggtgcggcggtcacccacactcagggcgtgttgaaagcctggaatccgcacaaggtgtcgatcgcccacccggttatcgaatccctcggctggccgccgatgaccatgaacttcctgcagccgcagccgccgttggcggagctgcctgccgatacgccgattgaattcagtttccgccaggttgatggcggctaccagctgattaccctcagcgccagccagcagtaa

SEQ ID NO: 442869 - DNA, 1257 bp, Serratia marcescens
atgtccaacttattttctcacccggcacgggtgggctggctgctgcttgtctgctgttcggcgagcgcgcaggcggccggcctgacgctggaacaatcgctgtcggcggcggagcgttactccgccgagctgtccgccaaccgccatcaggtttccgcactgcgcaatatggcggattccgcgctgcagttgcccgatcccaaactgaagctggggattgagaacataccggtacagggcggcaacggccatcgcctgacgcgcgacggcatgacgatgggacgtatcggcatcatgcaggactacgtcagcggcaataagcgtcagcgaaaagccgatacgctgcgggccgaggcggaaaaaacctcggccaacagcgcggcgatccgcgcgcgtttgcagcagcagaccgcacaggcctggctggagctggcgctcagccagcagaccctgcgtgacgccagggcgttggttgcggagagcgagcgccagattagcgcgcagcgcgccggcgtggccagcggcagttcgtcggccagcgaggtggtggacgcacgtctgaccctgctggcgatgcaggaccaaatcagcaccgccgagcgcgacgtgacggtggcgcaggccaggctgacgcagctgaccgggcaacagatcgagcaggtcgttggtaagctgccgcgctttgagcgtttgccggccgacggtgacgtgctgcgccaggcgatacgccagcatccggacgtggtgcaggccggccgcgaagccgatgtggccaaggcgcgctccgcccagtcggcgattgccgccattcccgacgttggcgtggaggtgtattacgcgcgccgcgccgacggctatgaagatatggccggcgtcatgctgagcgtcgacctgccgctgtttaaagcgcagcgacaggataaaaactatgccgccgacgtgtcgcgcaccctggaggccaacgaccagctgaccttgctgatccgcgaccatcgggcgcagctggacaccctgttggcgcagtatcaggcggcgcaggcgcagtggcagcgtcagcagcagcaggcgattccactgcagcagcagcgtctcgatctgctgctggcgcagtaccgcagcggcaacagcaacctttccgctgtgctgtcggcgcgtcgcgcgttgctggatgcccggctgaacgccggccaggccgcccgtcagctggcgcagctgtgggccgccatccgttacctgatcccgcaggagatcctctga

SEQ ID NO: 442870 - DNA, 1335 bp, Serratia marcescens
atgaaaatgcgttttaaccttgcgttattggcggcgctggcggcaggcgccggggccggttactggctggcgacgtcgtcgccatcatcagcgccgacggggagcgcgacgccggcgactgagcgtcaggtgctgtattggtatgacccgatggtgccggggcagcgctttgacaagccggggccttcaccgtttatggatatggatctggtgccgcgctatgccgacgaggtgcaggagcagggcggggtgaccatcagcgcccgccagcaacaaaaccttggcgtgcgcaccgcagcggtggagctgcgcccgctggcgccgcagctggaggcgtacggcagcgtagcgattgacgagcgcggcgtgcaggtgatcgccgcgcgcgccagcggtctggtggagaagctgtgggtgcgcgccagccagcagcaggtgaaaaaaggccaggcgctggcgcagctgtggatcccggcgtggcatgcggcgcagcaggagtatctggcggtgcgacgtctgggggacagcgcgctgagcgccgcggcgcgtcagcgcctgcagctgcagtttatgccggagtcggtgatccgcgaggtggagcgcagcggccggccgcaaacgcgcattaccgtcacggcgcccgccagcggctttatcaacagtctggatgtgcgtgagggcgcgcaggtcagcgccgcgcaggggctgtttgaactggcgacgctcgaccgggtatggatggtgattgactatccgcaggcgcaggccggggtggtgcaggtcggcgatgcggtcagcgccggcagcgccagttggccgggcgaacgtttcagcggcacgatcgatgaactgctgccgaatgtcgatccgctgacgcgcacctttaaggcgcgggtgcagctgcaaaacccgcagcagcggctgaaaccgggtatgtacctgcaggtgcgcctcagccagccggcggcggggcggccggtgccggcaattccgctggaggcgttgatcatgagcggcgatcgtaaccgggtgctggtgagcgaaggcgacggctactttataccggtcgaggtggaaacgggccggcagcagggcggttgggtggagattacgcgcgggctgaaggccggacaacgggtggtgaccgccgggcagttcctgatcgattcagaagccagcctgcgcagcgcgctgccgcagctgacggctgaacaagagcctcacgatcgcggggcacatcagccgcctgcggccgcgatggcgcacggggagcattcgacgccgcaagcgcatggcgaacatgcggatcatcatgcacacggaggtcaccaatga

SEQ ID NO: 442871 - DNA, 3123 bp, Serratia marcescens
atgatcgccgcaatcattcgctggtcgctgcgcaaccggctgctggtgctgctggcggcggcgatgctggccggctggggcgtctgggcgctgcagaaagcgccgctggacgcgctgccggatctgtccgacgttcaggtgatcgtacgcgccagctatccgggcaaagcgccgcaggtggtggaggaccaggtgacctatccgctgaccaccaccatgctgacggtacccggtgcgaaaaccgtgcgcgggttctccatgttcggcgatgcctatgtctacatcctgtttgaggacggcaccgatctgtactgggcgcgctcgcgcgtgctggagtcgctcagccaggtgcagtccgcgctgccgtcgcaggtgaaggtggcgctcgggccggacgccaccggcgtcggctgggtgtatgagtatgcgctggtggacaggagcggccgtcacagcctggcggatctgcgtgcgctgcaggactggacgctgaaattcgagctgaaaaccgtgcccaacgtcgccgaagtggccagcgtgggcggcatggtgcgccagtatcaggtggtgctcaacccggaaagcctgagggcgcttaacgtctcccaccagcaggtggtcaaggcgctgcaggaggccaatcaggagggcggcggtgcgctgctggaaatgggggaagcggagtatatggtgcgcagcgccggttatctgaaaacgacggcggatttcgccaatgtggtgatagcggtgcgcgacggcgtgccgatcctgctgtcccaggtggcgacgctgcgcgaagggccggaaatccgccgcggcgtggcggagctgaacggcgaaggggaagtggccggcggtattgtggtgatgcgttacggccagaacgcgctggaaaccatcaacgcgctgaaagacaagctgcagcagctgcggcagacgctgccgccgggcgtggagatcgtcacggtttacgaccgttcacagctgatcgagcaggcgatcgataacctgtcgttcaagctgctggaggagttcgtggtggtggcgctggtgtgcacgctgttcctgttccacttccgttcagcgctggtggcgatggtgaccctgccgctcggtattctcggcgcgtttgtggtgatgcactatcagggggtgaacgccaacattatgtcgctgggcggcatcgccatagccatcggcgcgatggtggatgcggcgatcgtgatgatcgagaacatgcataaggtgctggagcagtggcggcagcgccatcctgaacggcagccggaagcgcaggactactggcgtattgccgagcaggcggcggttgaggtcgggccggcgctgttcggcagcttattgatcatcacgctgtcgtttattccggtgttcacgctgcaggcgcaggagggcaagatgttcgcgccgctggccttcaccaaaacctacgcgatggcggtggcggccgggctgggcattacgctggtgccggtgctgatgggctactttatccgcggacgtattcctgatgagcaggccaacccgatcaaccgctggctgattcgcctgtaccagcctttgctggcggcggtgctggcgcggccgcgcctcacgctgggcctttccgcgctgctgctggcgctgacgctgtacccgctcagccggctgggcagcgaatttatgccgccgctcgacgaaggggatctgctgtatatgccttcgaccctgccggggatttcggtgcgtgaagcggggcgtctgctgcagctgaccgaccggctgattaaaacggtgccggaggtggagacggtcttcggcaaggtcgggcgggcggaaaccgccaccgacccggcgccgctcaccatgctggaaaccaccatccgttttaaaccgcgcgaccagtggcggccaggcatcaccatggacaagctggtggcggagctggacgaggcggtcaaggtgccgggcattgccaacgtctgggtgccgccgattcgcaaccggctggatatgctgtctaccgggattaaaagcccggtggggatcaaggtcaacggcagcaaccgcgcggatatcgaacgcgtcgccgggcaggttgagcaggtggtgcggcaggtgccgggcgtctcctcggcgctggcggagcggctcagcggcgggcgctatgttgatattgatatcgatcgtcagcgcgctgcccgctatggcgtgtcggtgaccgagctgcaatcaatggtggcctctttagtcggcggcgaaaacgtcggcgaaaccattgaagggcgggcgcgctatccgatcaacgtgcgctatccgcgcgagatccgcgactcactgcaggggctgcgcgatctgccggtggtgacggcgaacggcagtcagctgccgctgtcggcgctggcggatattcgcgtcagcgacggaccgccgatgctgaaaagcgagaacgcccggttgtccgaatggatctatgtcgatctgcgcgggcgggatctgaagtcggcggtggaagagatgcagcacgcggtggcgcagcaggtcaggctgccgtccggcatttcgctgagctggtccgggcagttcgagtatttggaacgcgccagcgcccagctgaaggtcgtgctgccggtcaccctggggattatttttgtgctgctgttcgtcaccttcaacagcgtgcgcgacgcgctgctgattatggcgacgctgccgtttgccctgatcggcggcgtctggctgctgtatctgctggactacaacctgtcggtggccggcgcggtgggctttatcgccctggccggggtggcggcggagttcggcgtgattatggtgctgtatctgaatcaggcgctgcacaagcagcggcagagcggccggccgatgacccgtcagcagctgctggcggccatcagcgaaggggcggtgctgcgcgtccggccgaaggtgatgacggtggcgaccattatggccgggctattgccgattatgtggagcgacggttccggttccgaggtgatgcagcgcatcgccgcgccgatgattggcggcatgatcagcgcgccgattttatcgatgctggtgatcccggcggtgtatctgctgatgcataaaccagaggaataa

SEQ ID NO: 442872 - DNA, 1032 bp, Serratia marcescens
atggcccactctttcgccagaagcctgttgctcggcgtcgcgcttacgctgctcgccgcctgtgataacgccgccacccgcccgcagatggatatcgccggtaaaaccatggggacgttttacagcgtcaagatcagcggcgaggtcgcggaaaaccgccaacagctgcagcaggagatcgacgcgctgctggagcaggccaatgacgatatctccacttaccgcgccgattcggtgctgtcgcgctttaaccgttcacacagcagcgcgccgcagccgatcccgcgcggcatggcggatattatccttaccgcccagcgcatcggccgtgatacccatgacgcgatgaacatcaccgtcggcccgctggtgaacctgtggggcttcggcccggacaaacgtccggtaaccattcccagccagcagcagattgacgccgccaaacgcaacgtcggcctgcagcacctgacgctgaccagcaatgcgcagggcgaatggctgcaaaaggatctgccggggctgtatgtcgatctgtcaacgctgggtgaaggctacggcgcggatctgctggcgcagctgatggcgcgcaaaggtatcaccaactacctggtgtcggtaggcggcgcggtgcgatcgcgcggcgttaacggtcagggcaaaccatggcgcgtggcaatccagaaaccgaccgaccgagaaaatgcggtgcaggcgctggtagatctgcagggctacggcatcagcaccgccggcagctatcgcaactattttgagcaaaacggccagcgctattcgcatattatcgaccccaataccggccggccgattaaccaccgcctggtttcggtaacggtgatcgcccccaccgcactggaagccgacggctgggattccggcctgatggtgctgggcagtgaaaaggccatgaagctggcgcaagagcaagggctggcggtgtatatgatcagcaaaaccgacagcggcttcagcgcgcagatgacgccgcagtttaaggcgtttctgctgcaataa

SEQ ID NO: 442873 - DNA, 1437 bp, Serratia marcescens
atgatgaccaaaacgctgctgacgctgttccaacggccggaacatgccaacgcttcactgcgcgaacgtgtttgcagtacgctgcggcgcgcgattcataccggcgcgctaacgtacggacaacgcctgccctccagccgcacgctggccgcagatttaggcgtctcccgcgtgacggcggaagccgcctatggccagttggaagccgagggatacctgcggcgccgcatcggccagggtacttttgtcgccatttccgtcgccagaatgcggccgcctgcccggccgcagcagcgcccgcagctttcccgccgcggcagccagatcgtcaccaccggcggctgccgcgatccgcagcggccgctgccgttcgctgccggctcccccgacctgcgcctgttccccgtcaaacagtggcagcagctcaccgcgcagcaatggcgcctgcagggggaaacgctgatgcgttacggcgatccgcagggttatctgccactgcgggaggcgattgccgctcacgtcaaccaaacgcgcggcgtcaactgcgatgcgcggcaggttatcgtactgaccagctcacaacaggctctgcagttgattaccgcgctgctgctggacgacggtgaccgggtgtggattgaagatcccgcctaccccggcgcgcgcaacgcgtttctcagcgccggcgcgcagctgacgccggtcgcagttgatgacgccggcatacgaccgcatgacgctctgcccaccccgcgcctgatctacctgaccccctcccaccaataccccagcggagtcacgctcagtctggcccgccggctggctcttctggcgctggcggagaaacagcaggcgtggatcgtggaggacgattacgacagcgagtttcattatgacggccagccgatgcccgccatgcaggggttggatcgtgcaggcaacgtgctgtatatcggcacattttccaaatcgctgttcccgtcgctacggctggcttatctgatcgcgccgccgccgctggttgaaacctttgtcaccgcccgcagcgtctatgacggtcacaccacgcagttgaaccaggccgtcaccgcagagtttatgcgccaggggcactttgccgcccatatccgctatatgcgccagctgtaccgcagccgccgcgaccatctgcaacaacagatagcacatcactggcggcacttcgccacgccgcagccgactcacggcggcctgcagctcagcgtgtggctgccggacggatgcgaggcaacgctaacccgtcaggccagacaggccggcgtgctgacgcccgggctggcggcccattatcagcacgacgccgcgcgccgtgacggctggctgctgggtttttccgcgctcacaccgggagaaatcagtgccgccgtggcgcgcttggcccatttgcgccccggctga

SEQ ID NO: 442874 - DNA, 456 bp, Serratia marcescens
atgacgtatcgttcactggttctggccgttcctcctgctgaaccggaagagaacctggcctatctggccgcgaaactgagtttttacaccgatgcctgggatgtggcggaggatttgcgtcacggcgtcgacgctatcgtcgtcattgatgcgcgttccgaacagcactatctggcggggcatattcccggcgccgtcagtctgccgcaccggctgatggatgaagtcagcacggcggcgttggatcgcgataaagtgtatatcacctactgcgacggcattggctgtaacgcatcgacgcaaggggcctacaaactggcccggatggggtttaaggtcaaagagttgcttggcgggctggatttctggctgcgcgacggctatccggtggccgtcggcgagtcttgcggttcgctgatggggcagcagccgggcgccgactgcggctgtgcctga

SEQ ID NO: 442875 - DNA, 1023 bp, Serratia marcescens
atgcaacctttgagcggccccggcgcccacaacctttccgatcgccccccatccggggagaaaaacaccgcctccgatacgcagccgctctctccggcgcagcgcaccatgctggaaaagctggtggtgaagattatggcgctcagcccggccaaatccgccgagatttgggccagcctgcgccacgatctgggcgccaccgacggcagcgaactgcgggcgcgccactttcagccggcggagcaactgctgcaacagcgtctgagccaggcgcagcagaatcacgccagccgccagctgttgcaacagctgaccgagctgctgccgcaggggaataaccgccaggcggtcagtgattttatccgccagcagttcggccataccgtgctgagccagctcagccaccagcagttacagcaggtgttgagccagctgcagagcggcagcctgaccattccgcatccgcagcagagcgccgtcagcgaccgtcctttactgccggccgaacaccagaacctgcagcagcaggtgacgcgcctgagcgccgccaccggcgaatcgccggctaaaatctggcagagcctgtttaatctggtcggggtaaaaaccaacgacccgctgccggcgcgccatttccagctgttaagtcagtatctgcaggtgaaaacggcgctgagcgcgcagcacgcgccaacgctgaataacctgctgacggtgctcaaacagccggcggaccggcaagagcagcagctgctgctggattactgccagacgcgcttccactgcgcggccaacaccccgctgacccaggcgcagatcaacgaggcggtgacgcagctgttcgcccgccggttggaaaaggccggcgtcacgccgacgattcataacgagacgccgcagccgcagctcaatccgctgatcgccaacgtggcgctgccgctgcaggccgctctcggcaagcggggctgggctctggtcgcactggtgctggtgctggttatcgtgctgatgctggcgctgtag

SEQ ID NO: 442876 - DNA, 366 bp, Serratia marcescens
atggtcaaacggcaacagattgcaaaatggtttttatgcctggcttgcctggtcgtcctgacctgcatgacgcagcgtatggcgagcctgcacgcgctgcaactgacgctgggtattccggcggtcagcgcggcggcggccgacgacaacggtgaagccgttgccgccaccagtccgtgcgaactgagcgccaaatcgctgctggccgcgccgccggtcatctttgaaagcgtactgctggggctgggtctgctgttggcgctgctggccccggtgattgccgcgcgtctgcgcattccgccgccgcgtgcggtttcccctcccaccctcagggtgcacctgcgattatgcgttttccgtgaatga

SEQ ID NO: 442877 - DNA, 2043 bp, Serratia marcescens
atgttgaatacctttaggtcggcattagcctgcctgctgctatggctgccgatgctacaggcggcggacagcggctggctgcaaagcccgaccaacgatcatgccaaggtgcggctgcgcgccgatacttcccaggccggagaaacgcgcctgctgctgtcggtagagctgcagaagggctggaaaacctactggcgctctcccggcgaagggggcatcgcgccggcgatcaagtggcagggcaatccgccgccgtcggccacatggttctggccggcgccgcagcgttttgacgtggcgggcatcaccacgcagggctaccacgacggcgtcactatcccgattgtgattaagggggctgcgccggcgcgtctggccggcaccctgacgctgtccacctgcagcaacgtctgcatcctgaccgactatgcgttcaatctggatctgtcggcggccaatgacgcgcagttcaaccatgactttgcccaggcgatgggcaaggtgccgattgacagtggcctgaccgacaatctgcgcgtcggttaccgcaacggcgagctgcaagtcagcgccgagcgcaacgccggcgcaaactggcgtcagcccgcgctgttttttgacaccttgccggatgcggatatcggcaagccgaccatcagccacagcggcgcaacgatgcaggcgcgggtgccggtcagcgacggctggggcgacgccgcccccgatctgcgcggacaaacgctgacgctggtgatcaccgacgacggcatggcgcagcagacgacgctgaccgtcggcgaaccgctggcgatgtcgtcatcgggcggcgttacgctgtggcaggcggtgctgatggcgctggccggcggtttgattctgaacctgatgccgtgcgtgctgccggtgctggggatgaaactgggttctatcctgcaggtggaacagcgcgatcggcgcagcgtgcgcaagcagttccttgcctccagcgccgggattgtagcgtcgtttctggtgctggcgttgctgatgaccgctttacggctgagcaatcaggcgctgggttggggcatccagttccagaacccgtggttcatcggctttatggtgctggtgacgctgctgttcagcgccaacctgttcggactgttccatctgcagctctcttccggactcagcacccgcctggcgacccacggcggccaggggatgagtggccacttctggcagggggcgttcgctaccttgctggcgacgccgtgtacggcgccgttcctcggcaccgcggtggcctttgcgctggccgcgccgctgccggtgctgtggggcatgttcgtggcgctgggcatcggcatgagcctgccgtggctgctgattgccgcctggccggcactggcgctgcgcctgccgcgtcccgggcgctggatgaacgtgctgcgtctggtgctggggctgctgatgctggcgtcgtcgctgtggctgctgagtctgatgaccaaccatatcggcgttcaggcgacgctggtggtcggtggtgcgctgctgctggggctgctgctggcggtctggcggcgttacggtgcgcgctcggcgggcatcgccggcgccagcctgctggtggtcaccggcctgacgctgcttacgctgtcgctgacggcgaacctgtggcggcagccgctgcaggaccgggtgacgtggcagccgctgagcgagcaggccatcacccaggcgctggcccagaacaagcgagtgttcgtcgatgtgaccgccgactggtgtgtcacctgtaaagccaataaattcaacgtattgatgcgtgacgatgtacagcaggcgctgatggccgatgacgtggtggcgctgcgcggcgactggagccggccttcggccgagattagcgcgtttctgcaacgccgcggtagcgtcggcgtccctttcaaccagatttatggccccgacagcccgaacggcgtggtgttatcaccgttattgacccgcgatgccgttctgcaaaccctgtccgccgctaaaggaactgaacaatga

SEQ ID NO: 442878 - DNA, 717 bp, Serratia marcescens
atgaagaagttactgattattttactgatgatggtatcccccgtgtgggccgctgccccttttaccccggaacaggaggcgcgcgtgaaggagatgatccgtgaaacgctggtgtccaacccggatattctggcgcaggcggtcgacgcctggcagcagcaaacctccgatcaacaggtcagccaggtgatcaagcagcaggcgaaaaccctgtatcaggatccggccagcccgcggctgggggcgaaggacgccaagctgacgatggtgacctttaccgattacaactgtccgtactgcaagcagttcgatccgatgctggaaaaaatcgtcaagaaatacccggacgtggcgctggtggtgaaactgctgccgtttaaaggcgaaagctcggtcagttcggcgcgcatcgcgctgaccacctggcagcaaaacccgcagcagttctgggcgctgcatcagcggctgatggcgaaaaagggcttccatgatgacgccagcatcgccgcggcgcagcagaaaaccggcgtgaaggcggtaacgccgagcgagcagagcatgagcacgctgcgcaccaatatgcagctggcggaacagctgggcgtgcagggtacgccggcgacgctgattggcgatcagatgctgccgggggcggtgtcctacgaacagctggagtcgctggtgaagcagcagctggcgcaggccgaccgtggttag

SEQ ID NO: 442879 - DNA, 501 bp, Serratia marcescens
gtggttaggctgaaacgctgggggcgtgaaatcgcgctgctgttgctgatgttggcggggattctgttcgctatggatctgtggcgcgcaccgcaggcgccgccggcgttcgacacccagcggctgaccactctggacggcgcgtcgttctcgctggcgcagcgcagtcaagaacggccgctgctggtctacttttgggccagctggtgcggcgtctgccgttacactactcccagcgtcgccaagctggcggcgcagggcggcaacgtgctgagcgtggcgctgcgctccggcgatgaccagcaggtggcggcctggctggccgccaagcggctgagtctgccggtggtcaacgatcccgctggtgagctggcggcgcgctggcaggtgggcgttacacccacctttgtcatcatcgataagggcaaggtggtgcagagcaccaccggctggaccagctactggggcatgaagctgcgcctgtggtgggcggcctggtag

SEQ ID NO: 442880 - DNA, 1521 bp, Serratia marcescens
atggatacctggttatatttatcacaagggttcgaggtggcgctgattccacagaacctggttattgcgctgatcggctgcttcgtcggcaccatcgtcgggctgctgccgggcctcgggccgattaacggcgtggcgatcctgctgccgctggccttcgcgctgaagctgccggcggaatcggcgctgattctgctggcgacggtgtatatcggctgtgaatacggcggccgcatctcctccatcctgctgaacgtgcccggggacgccgcggcgatcatgaccgcgctggacggctacccgatggcgcagcaggggcgcgccggcgtggcgctgtccatttccgcggtcagctcgtttatcggctccatcatcgccatcggcggcattattctgttcgccccgctgctggcgcgctggtcgctggccttcggcccggcggagtacttcgcgctgatgatcttcgccatcgcctgtctcggcagcatgatgagccagaacccgctgaagtcgctgctggcggcgctgatcggcctcgggctggcgacggtcggcgtcgatgccaacaccggcgtctaccgctttaccttcgacagcgtgcacctctccgacggcattcagtttatcgtggtggtaatcggcctgttctcggtcagcgaaatcctgctgatgctggagagcaccggcgccggccaaaagctggtgcgtaaaaccgggcggctgctgtttaaccgtaaagaggcgaaagagtgcgccggcccggccctgcgttcttcggtagtcggtttcttcgtcggcatactgccgggcgccggggcaaccatcgccagcgcgctgacctatatgaccgagaagaaaatcagcggcaacagcgacaccttcggcaaaggggatatccgcggcgtggcggcgccagaggcggctaacaacgcatcggcctgcggctcgtttattccgatgctgacgctgggcgtaccgggttccggcaccaccgcagtgatgatgggcgcgctgacgctgtacaacatcacgccggggccggcgatgttcaccgaacagcccgatatcgtctgggggctgatcgccgcgctgctgatcgccaacgtgatgctgctgatcatgaacatcccgctgattggcctgtttacccgcatgctgaccattccgctgtggttcctggtgccggcgatcgccgccgtatcggcagtcggcgtgtacgcggtgcacagcaccaccttcgatctgatgctgatggtcgggctgggggtattcggctatatcctgcgcaaaatgcacttcccgatgtcgccgctgattctgggctttgtgctgggcgaactgctggagcagaacctgcgccgcgcgctgtcgatcagcaacggcgaatacggcattctgtggggcagcggcattgcccaaagcctgctggtattggcggtggcggtactggtggtgccgccggtactgcgcgtgatacgcaaacgccgcagccagacggtagaaaccgccaaggccgaataa

SEQ ID NO: 442881 - DNA, 432 bp, Serratia marcescens
atgagcgatcgtatttttgccggggtgtggctgctgctgtgcatcggcggcctgtatatcggctggggcattcacagcgaatacagttatgagccgctggggccgcgcccgtttccgctgatcatcctcagcctgatggcgctgtgcgccgttctgatgctgctgcgccatccgcaggtggtggcctggccgcaccgcgccaccctgcagcgtctgctgctgctgaccatcacgctgtcgctgtacgcctggtgttttgagctgctgggctttccgctggccaccgccctgctgaccttcagcatcgcactgctgttcggcgcgcgcgtgccggcggcggcgatctccggcgcggtgatgggcgtagcgctgtattacgcctttgaccgcctgctcgacgttacgctgccgctcggcgcctggctgaactga

SEQ ID NO: 442882 - DNA, 981 bp, Serratia marcescens
atgaaaaaaataatcacccgtactctgaccgcaaccgctctgctgttggcagccaatcaggctttcgccattgaagcgcccgaccgtaccgaatgtatcgcgccggccaagcccggcggcggcttcgatctgacctgtaaactgctgcaggtgtctttgcaggaaaccaaagccatcaataaaccgatgcgcgttacctatatgccgggcggcgtcggcgcggtggcctataacgccatcgtcgcccagcgcccggcggagttcggcaccgtggtcgccttctccggcggctcgctgctcaacctgtcgcagggcaaattcggccgctacggcgtggatgacgtcaagtggctggcggcggtcggcaccgattacggcatgatcgccgtgcgcgccgactcgccgtataaaacgctgaaagacctgatggaagccttcaagaaagatcccaccagcgtggtgttcggcgccggcgcctcgatcggcagccaggactggatgaaaaccgcgctgctggcgcgtgaagtgggcgtcgacccgcgcaagatgcgctacgtcgcctttgaaggcggcggcgaaccggtgaccgcgctgctcggcaaccatattcaggcggtatccggcgacctgagcgaaatggtgccttacctgcagggcgacaaaatccgcgtgctggcagtgtattcggaagagcgcctgccgggccagttggccgaggtgccgacggctaaagagcagggctataacctggtgtggccggtgatccgcggtttctacctggggccgaaggtcagcgatgaagagtaccagtggtggaccgatgccttcgccaaactgcagcagaccgaagagttcaaaaagcagcgtgacctgcgcgggctgtttgaatttaacctgcgcggcaaagagctggacgcctacgtgaagaaacaggtcagcgactaccgtgaacaggcgaaagccttcggcctggccaagtaa

SEQ ID NO: 442883 - DNA, 675 bp, Serratia marcescens
atgcgtctcttgttagtggaagatcaccccgaattatcccattggctgcagaaggcgctgaccggcgccggcttcgccgtggacgtggcgtcggacggcgtggtggccgaccatctgctgttaaacgaacattacagtctggtggtgctggacgtggagctgccgcgtctcaacgggctggatctgctggcgcgggtgcgcaaacgcggccagaacctgccggtattgctgctgaccgcccgcgctgacgtcagcgaccgggtcagagggctgaatctcggcgccgatgattacctgagcaaaccgtttgaactggacgagctggaggcgcgcatccgcgcgctgctgcgccgcagcgtgggcgtcacccagcagaccctgcagtttggcgcgctgacttaccacgacgacggctattttctgctggataatcggcccttggcgctgacgccgcgcgaactgtcggtgctgaccacgctgattcaccggcgcggccggccggtcgccaagcagcagctgttcgagcaggtgtttaccctgtctgacgaggccaacccggagagcattgagctgtatgtgcaccgggtgcgtaaaaaattgcacggcagcaatgtggcgatcgttacgctgcgcggtttggggtacagcctggagctgagcgatgacgtggtttaa

SEQ ID NO: 442884 - DNA, 1416 bp, Serratia marcescens
atgacgtggtttaaaccgccggcttcactgttttatcaactgttgctgtttttcggtttgccgctgacgatactgggcggcatctctatttacacccactactttagcgccacccatgccgcgacgttggcctacgaccgcacgctgctggcgtcggcacgcaccgtggcggagcggctggtggtgcgcgagggcaagctgaagatcgacgtgccctatgtggtgctcgacagcttcgagcgtaatatgaatgaccagctgtattacgaggtgatttcgccgcaggggcgcagtatctccggctatgacgatctgccgctgccgccgccgcacctggcgcgttccacgctgtacccggcgctggtgcatttttacgacgctgaatatgccgggcggccgatccgcgtcgccgcgctctatcagccggtgaatgaaggcggcatgatgggcatggcgaccatcctggtggcggaaaccctggaatcgcgcaactatctggcgcgtcagatgctgctgtccgcgctgctcagtcaggggacggtggtggtgttgacgctgacgctggcgtttgtgctgctaaaaaagctgctcaagccgctgcgtaaactgtcgagcgtgatgatgcgccgcgatccgggcgagctgacgccgttgccgaccctgctgttgccgtggtcggaaatgcagccgctgctgctggcgtttaaccgctataccgaacggctgcgggtgatggtggcgcgtcaggagcgtttcagcgccgacgcctcgcaccagctgcgtacgccgctgacggtactgaagacgcaggttggcgtggcgctggccagcgatgatccgcagcagtggcgcgaaagcctgctggcgatcggcaagacgctggataacaccgtggcgctgaccgaccgcctgctgtatctgtcgcggctgaaggcgcacgagccgcacggtgaacgccggctgcagccggtcaatctggcgcaggtgctgcgcgacgcctgcttttcccgtctgccgcaggcgcgcagcaacggtatcgacctgggttatgaaggggaggcggtgtgctggatcggcggcgaggcgctgctgctgacggagatgtgcgccaatctgctggataacgcgctgaagtatacgccgcgccgcggcatggtgacggcgcgcctgagcgcattaaatggagaaggcatactggaaatcgaagacagcgggccgggcattacccagcaggatgcgcagcaggcgctgcagcctttccgtcgtctggataatgtgggcgagcagccgggcgccgggctggggttggcgctggtgaaggatatcgccgcttatcacgcgacgcggccggagctgctgagctctgcagagcttggcggcctgctggtgcgggtgcgtttccgcttattgtcctga

SEQ ID NO: 442885 - DNA, 900 bp, Serratia marcescens
atgaacatattcttccctctggtggcggtactgatctggtccatcaacgccgtggtcagcaaactgtcggccggcgcgatcgacccggcagcgatctctttctatcgctggttgctggcgctgatcgcgctgacgccgtttgtgctgcccggcgtgatccgcaactggcgcacggtgcgcgctaacggcggcaaactgctggtattggggctgctgggcatggtgctctatcagagcctggcctactacgccgcgcacagcgtcagcgcgctgtttatgggcattatcgtgtcgctgatcccgctgctgaccattctgatcagcatcgtactactgcgggtggcgccgaccgtcggcgtagcgctggggagcgtgacttcattatgcggcctgatctggctggtgagcgccggtcagccgggagcgctgttgcagcacggcatcggcaaaggcgaactgatgatgtttgccgccaccgcctcctacgcgctgtacggcgtgctgaccaaacgctgggcgattgctctgtccaactggcaatcgctgtacgtgcagatcgccctcggcgtgctgctgctactgccgaacttcctgatggcaccggacgtcagcctgaacagtcagaacctgtcgctggtgttgtttgccggcattccggcatcgattatcgcgccgttcctgtggattcagggcgttgtccgtctcggcgccaataccacctctatctttatgaacctggcaccggtgttcaccgcggtgatcgccgtgctgttcctgcatgaacagctgcacgcctaccacctggtcggcggcggtatcaccctgctgggggtgatcctctctcaacgcctgcgcacgccgctgggccgtaaaaaaccgcagacggcggtatccaaataa

SEQ ID NO: 442886 - DNA, 774 bp, Serratia marcescens
atgccggaaatccgtcatttctcagaaacgctgatcccggcgccgcagctggtgcagtttcgctgtgaggcgttcaatgtgcgcaccgaatttcagccgcacagccactcctggggacagctgatgtgggtgaccagcggcgtgatggtcacccgtatcggcgggcagcgctttctggcgccgccggagtttgtgctgtgggcgccggcgggcgtggagcactcctgttataaccataaattggcgaagtgccgcatggtggacatcgctctgcctttatgccgtcagatgccggcaacgccctgtctggtcagcgtcacgccgattttccgcgccatcgcggatgatttctacgcgcgcgaacagtatatcccgcagagccgggcggatctgcgcctgtgccgcgtactgattgaccaactccacctgtcgccacggcagcagacctatttaccttcctcgcaggataagtttctggcgccgattctggaggcgctggagcactgtccgtcggacaacacctcgctggcgcagtgggcacggcgggtctataccacggagcgcacgctgtcgcgccgctgccagcaggatctcggcatgtcgttcagcgaatggcgccagcggctgcgctttctgcacgcggtgtcgctgctggagcaggggaagaccgtgcaggaggtggcgctggacgtcgggtacagctccgcttcggcgtttatcgtgatgtttcagcagattgcgggtgctacccccgaacgttttcggcgcgcatag

SEQ ID NO: 442887 - DNA, 1011 bp, Serratia marcescens
atgtctgacggctggaatatcgctctgcttggcgccacgggcgcggtaggtgaagcattgctggaattgttacaggaacgtcagttcccggtgggcgaactctatccgttggccagcgaacgcagcgccggcgaaacggtgcgctttaacggcaaaaccctgcaggtggaaaatgccgacgagttcgactggtcgcaggcacagctggcctttttcgtcgccggtgcggaagcctcggcgcgctatgccgttgacgccggcaatatgggctgtctggtgatcgacagcagcggcctgtttgcgctggagccggacgtgccgctggtggtgccgggcgtcaacccgcaggtgctggccgactaccgcaaccggaatatcgttgccgtggccgacggcatggtcagccagttgctgaccgccatcaagccgctgaccgaacaggccggcctgtcgcgcctgcacgtcaccaccctgatgtcggtgtccgcccgtggtaaagcggcggtggacgatctggcgggccagagcgcgcgcctgctgaacggtatgccggtggaagaggggctgttcgccaaacagctggcgttcaacctgttgccgctgctggcggacgagcagggcagcgtgcgcgaagagcgtctgatcgtcgatcaggtgcgtaaggtgctgcaggacgaagggctgccgatgtcggtgacctgcgtacagtcgccggtgttctacggccatgcgcaggcggtgcaggtggaagggctgcgtccgatcgacgccgatgaggcgcgtgccgaactgcaggacgcggaagatatccagttgagcgacgaagacgactatccgacccaggtcacggaagcctccggcagcgatgcgctgagcatcggctgcctgcgcaatgactacggtatcccgcaggtgctgcaattttggtcggtggccgacaacgtgcgctttggcggcgcgctgatggcgattgaaaccgcagagcgtctgctgcaggagcagctgtactga

SEQ ID NO: 442888 - DNA, 1266 bp, Serratia marcescens
atgcaaaaccaccaaattcctcaagccacgtcgccattgagctcgtggctttactatctggaacgtctgcacagccaggcgatcgaactcggcctggaacgcgtgcaaagcgttgcagcgcatcttgatcttcttactccggccccgacggtgttcaccgttgccggtaccaacggcaaaggcaccacctgtcgcacgctggaggccattttgctggcggccggcctgcgcgtcggcgtttacagctcgccgcatctggtgcgctataccgaacgggtgcgtattcagggggaagagctgagcgaagcggagcactgccgctcgtttgccgccattgaagccggacgcggcgacacttccctgacctattttgaattcggcacgctgtcggccctgcaactgttccgtcaggccaggctggacgtggtgatcctggaagtcggcctcggcgggcggctggacgccactaatatcgtcaacccggacgttgcggtggtcaccagcatcgcgctcgaccacaccgactggctgggcgacgatcgcgacagcatcggccgggaaaaagccggtattttccgcggcggcaagccggcggtagtcggcgagccagatatgccggactcgatccgtcaggtagcggaaacgctgggggcgcagctgtatcggcgcggcgacgcctggacgttcagcgagcagggcgagcgctggcagtggcgcagcgaaggcaccgaactgaacgacctgccgaggcccaacgtgccgctggccaacgccggtacggcgctggcggcgctgcactattccgcgttggaaattgacgagcgcgccattttcgccgggttgcagcaggcgacgctgccggggcgtttccagaccgtgcagcagtcgccgcggctgatcctcgacgtggcgcacaatccgcacgccgccggctatctggccgggcggctggcgcagctgccgcacgatggcggcaaggtgcgcgcggtggtcggcatgctggcggacaaagatattgccggtacgctggcctgcctgctgccgcaggtggatgaatggtactgtgcgccgctggacgggccgcgcggcgccagcgtagagcagctggcgcagcatctgccgcagccgcgctctttcaccgatgttgaaagcgcctggcgacaggcgatgcaggatgcggataatcaggatattgtgatcgtctgtggatcgttccacaccgtcgcgcaggtcatggcggcgttagacgagatgcggggagagtga

SEQ ID NO: 442889 - DNA, 687 bp, Serratia marcescens
gtggcaagtaaatttcagaaccgactggtcggtaccgtagtgttagtggccctgggggtgattatcctgccaggtctgctggacggtaagaaaaaacattatgaggacgaattcgccgcgatcccgctggtgccgaagccgggcgatgcgcgggaaaacgacgccattccgccagtgagccagccgctgccgtcgcagccgccggcgggcaccggggcgttgatggagcagcaggcggccaacgaggcggcgacgcagcaggcggtgactcagccgcagcagaacaccgcgccgccgccggcggtgacgacgccttcgccagcgccgcagccaaaaccggttgaaaccaaacctgcgccgccgccgaagccgaaaccggaagtgaagccgcagccgaagccggaggtgaaaccgcagccgaaaccggctgagaaagcgccgtccggtcaggcctatgtggtgcagttgggggcgctgaaaaacgccgccaaggttaacgagatcgtcgcgtcgctgcgtctgtccggctatcgcgcctttaccgtgccgtctacgccggtgcaggggcagatcacccgtatttacgtcggtccggacgcctcgaagcagaagctgcagtcgtcgctgtcggcgctcaattcgctcagcgggttgaacgggcaggtgaagccgtacagcgcgcgttaa

SEQ ID NO: 442890 - DNA, 906 bp, Serratia marcescens
atgcatatcctgattaccggcgcgaccgggcttatcggccgccgcctgacgcagcgtctgctggccctttcccactcggtgagcgtgctgacccgcgacgtggcgcgcgcacgcggcctgttcggcgagcatgtcgactactggccctcactgcaggataagccgtccctcgacggcattgacgcggtcattaatctggccggcgaaccgatcgccgataaacgctggagcaaagcgcagaaggcgcgcctgtgccacagccgctgggatctgaccgaacggctggcggcgctgatccacgtcagcgaacggccgccggcggtgctgatttccggttctgcggtgggctattacggcgatcaggatcaggcggtggtgaccgaagaggaagcgccgcacgacgaattcactcaccggctctgtcagcgttgggaagcgctggcgctgcgggcgcaaagtaacggcacgcgggtgtgcctgctgcgcaccggcgtggtgctggccccgcacggcggcgcgctggcgaagatgctgccgcctttccgcctgggacttggcggcccgatcggcagcggccggcagtatctgccgtggattcatcttgacgatatggtcagcggcattctgtttctgctcgacacccccaccctgagcggcccattcaatatggtcgccccctatccggcgcataatgaacagtttgccgccctgctggccaaaacgctggggcggccggcctggctgcgcatgccggcctgggcgatcaggctgatgatgggcgaagcggcggtgctggtgctgggcggccagcacgcggtgcccaagcggctggaagatgccggcttccgcttccggtatgtcgacctggagcaggcgctggcatcggtgattcagccgccggcctag

SEQ ID NO: 442891 - DNA, 552 bp, Serratia marcescens
atgaaactgatgtttgcctcggacctgcacggttcgctgccggcgacggccagggtgctggagctgtttgcacaacagggcgccgactggctgattttgctgggcgatttgctgaatcacggcccgcgcaacgcgctgccggacggttaccagccggcgcaggttgccgaacaattgaatcgctatgcgcacaagatcatcgccgttcggggcaattgcgacagcgaggtcgatcagatgctgctgtctttcccgatggatgcgccttggcaacaggtgctatggcaaaaaagacgattgtttttaacccacggtcacctttatcatccctccgcactgccgccgttatcggccggggacgtgctggcttacggccatacgcacctgccgcaggcacagcgctgcggggagatttattgctttaatccggggtcggtcagtttgcccaaaggcggcttcccggccagctacggcatgctggaggaccagactttgcgcgtggtcacgctgtacggcggcgaggttgttgcagaggcggcattaacgcactaa

SEQ ID NO: 442892 - DNA, 1020 bp, Serratia marcescens
atgtcgatcggtaaaaaacgccgcagtaccggcagggttacgctggccgaggtcgcccagctggcgggcgtcggcaccatgacggtgtcgcgcgcgttacgcacgccggaacaggtttcagacaaactgagagagaaaattgaagcggcggtcaatgagctgggctacctgcccaatctggccgccagttcgctggcgtcggcgtcgtcttataccatcgccatggtggtgccgagtttttcggagtccggctgcgccgagatgttcgccggtctgcagcaggtgctgcagccggcgggttatcagatcatgctggcggagtcgcagcactatccggaacgtgaagagaaactgctgaccaccctgctgtcctacaatctggcggcggcggtgctgctcagcgtcgaacactcgccgaccacccgtcaggcgctgcaggccgccaatatcccggtggtggaaatcggcgccctgcgcgatgacccgatcgatatcaccatcggcatcgattatgtcgccgccatgtaccagttaacccacacgctgatcgccggcggctatcagaatatcggcctgctgtgcgccaaccaggaacagtggattttccagcagcatctgcagggctggcatcaggcgctgctgcgcagccatatgtcgccgcaccgggtgatcaacgccgcacagcccgccagtttcgccaccggcgctcaccagctgccggagtttttgctggcctggccggagctggacgccctggtatgcgcctcggacgagctggcctgcggcgcgctgtatgaatgccagcgccggcacgtcaaggtgccggaacagctggcggtggtcggcttcggcaacagcgaggtcagccgggtctgccagccgccgttgaccaccatgacggtgccgcaccgggagatcggcattcaggccggcaaggcgctgctggcgcggctgaatgatcaggaatggcatgctgaaggttcgctgccctcaacgctgtgccgccgcgacagctgctga

SEQ ID NO: 442893 - DNA, 444 bp, Serratia marcescens
gtgctgaaagactggctgaaggcagagcatatccagctgtgcgagcaggtggaagactggcggcaggcgataacgctgagcgcgcagcctttgctgcggggcgggatcatcagcgccgactatctgacggcgatctttcgtcagtatcagacgctgggaccctattttgtgctggcgcccggcatcgccatgccccacgccagaccggaagagggggcaaaggcactcggcctgtcgctgctgaagctgcatcagggcgtgcgtttccattcacaggacaacgacccggtgtttgtggtggtgatgctgtcggcgccggatggtgacagccatatcgaactgattgcgcagttggcggaattatttgccgatgaacgggcgatgagtgcgttattcggcgccaccgatataaaacagattgaggagattatcgcccgctattaa

SEQ ID NO: 442894 - DNA, 840 bp, Serratia marcescens
atgacaacgacagatatcagggaactgcggctgctggcgaaggcaattcgtctggagacgctgaaggcgctgactgggctgggcttcggccactacggcggctgcatgtcggtggtggagacgctggcggtgctgtacggcgaggtaatgcgcatcgatcccggcgatccggactggccgcagcgcgacaattttgtgttgtcgaaggggcatgccggcccggcgctgtacagcacgctggcgctgaaaggctatttcccgctggaagagctgggcacgctgaaccagaacggcacccgcctgcccagccatccggaccgactgcgcacccgaggggtggatgccaccaccggctcgttgggacagggcgtctccatcgccgccggcatggcgctgtcgcaccggctggcgcagcgcgataaccgggtgttttgcctgcttggggacggcgaattgaacgaaggccagtgctgggaggcgttccagtttattgcgcaccacaatctgcacaacctgacgctgtttatcgattacaacaaacagcagctggacggcctgctggatgaggtgatcaaacccttcgatctggcgggcaagttccgcgccttcggcttcgcggccgagagtgtcaaaggggacgatattgcggcgatccgtgcggcggtagcgccgcgccgcagcggcgagcagcggccgctggtggtgattctcgacagtgttaaaggtcagggggtgccctatctggagcaactgagcaactcgcaccacctgcggctgacgccggaggtgcgtcagcatatagaacacgccatagccgaactggaggccgcccatgtttaa

SEQ ID NO: 442895 - DNA, 426 bp, Serratia marcescens
atgaaaaaaatctatacgctgataatcaccgtgttactcagcggctgtatgcttgagaagcagcgtttttatgcggcagaggtcgttttacaggggagcaatctttgtttctctctgccgacagagcatctgagcgcagatgccaaggttaaccttgtcagcattgctatcgatcaacggcaggataagcaaacgcgtgaagtctggcgcaggagtgttatgccgccgcagccggcggagtcgatgagtgccgggcaatgcatcccttattcctttagcgcttttgagaacgatgtactttataccgtggcaatcagtaccgtagcgtcgcaggacgccgatagcaaacgcttctggcaacgcagtttttcgctgaaaatcgacgacggccgtatcttacaggttatcaccggtcaggaaccttga

SEQ ID NO: 442896 - DNA, 495 bp, Serratia marcescens
atggaaatgacccacgcccaacgcctgattctgtctaaccagtataagatgatgacgatgctcgacccgggcaacgccgagcgctaccgccgcctgcaaaccgtggtggagcgcggtttcggcctgcagctgcgtgaactggatcgtgattttgacgagatgagcgaagaggtttgccgcaccatcatcaatattatggaaatgcaccatgcgctgcaggtgtcctgggagaatctcaaggatcgccaggggctggaggcgcgtcgtctggcgttcctcggctttgatgcggcgaccgaggcgcgctacctgagctatgtgcgtttcctggtcaacaccgagggacgctatactcacttcgacgccggcagccacggctttaacgcccagaccaaaatgtgggataaatatcagcgcatgctggcgctgtggctgtcctgtccgcgtcagtatcatttgagcgccgtcgagatagcgcaaattattaatgcttga

SEQ ID NO: 442897 - DNA, 657 bp, Serratia marcescens
gtggagtgtaaaggttttctgttcgacctggatggtacgttggtagattcattgcccgtcgtggagcgcgcctggacccagtgggccaaccggcacggcgtcgatccgcaggaggtgctggattttattcacggtaaacaggccattacctctttgcgccactttatgccgggcgccagcgaggccgatattcagcatgagcacgacctgctggagcaggtggaagcgcaggataccgacggcgtacgcgccctgccgggtgcggcggcgctgctggaacggctgaacacgctgggtattccctgggcgatcgtcacctccggttcggtgccggttgccagcgcgcgccgcgaggcggcggggctgccgctgccggcggtatttgtcaccgccgagcaggtcgagcgcggtaaaccgcagccggacgcttatctgctgggtgcggagcgcctggggctggcgccgcaggcgtgcgtggtggtggaagacgcggcggcgggcatcgcttcgggcctggccgccggctgtcaggtgattgcggtcaatgcgcctgccgatgcgccgcagctggaacaggtcgatctgcgcctttcctccctggagcaattgcaggttgacggcggggcgcacggcgcgcgcatcacgctgcgcgactga

SEQ ID NO: 442898 - DNA, 924 bp, Serratia marcescens
atgaccaatgcaaatcgtccgatacttaatctcgacctcgatctgctaagaacttttgtggctgttgccgatctgaatacgtttgccgcagcggccgtcgccgtctgccgtactcagtccgcggtcagccagcaaatgcagcgattagagcaattggtaggcaaagagttattcgcccgtcacggccgtaataaactgcttaccgagcatggcatacagctgctgggttatgccagaaaaatattgcgctttaacgatgaagcctgcgcctcgttgatgtttaacaatatcaagggcgtgctcaccatcggcgcttccgatgatacggccgacaccattttaccgttcctgttaaaccgcgtaaccgccgtctatccgaagctggcggtcgacgtacgggtaaagcgtagtccatttatgctggatatgctcaatagcggcgaagtggatctggctattaccaccgttgataccgtgggccacccgcatgtggtgctgcgcacctcgccaacgttgtggtactgcgcggcggattaccacttccaggcggatgagccgattccgctggtggtgctggatgagccttgtcctttccgcgcgatggcaattgagcatctggatgaggccgggatcccatggcgtatcgcctatgtggcttccacgctgtcggcggttcgcaccgcctgtaaggcggggctgggcgtaaccgtccggccggtggagatgatgagcccggatctgcgcgtgttgggcgcggcggaaggcctgccgacgctgccggagacgcaatacacgctgtgcaaagatatccagtgcgaaaatgagctggcaatggcgattttcggcgcggtacagcacggcaataccagctacaacttccagaatgccacctccacagaagatgtggtggatgaagacgaataa

SEQ ID NO: 442899 - DNA, 873 bp, Serratia marcescens
atgaattgggatgatgcccgctttttcctcgccgtagcccgctgcggcactttacgtaaggccgcaaatgagctacacgtcgaccaggccaccgtcgggcgacgcatttccgcctttgaggaatccctgggttccaaattatttatccgcacgcccaaagcattctccctcagcccgctgggcgaggagatgctggcggatgtgatgaatatggagaacgcggtacaggccatcgcccgcaaggcgaccagcggcgatgaaagcctgtgcggcaatgtgcgcatcgccaccaccgacaccctggccgaagccttcgttatcccggcgctgcaaaggctgcgcgagcaacacccgcagatcaccgtgacgctgctgaccgcggtaaatatctctgatatttcctatcgcggcgccgatctggcgatccgcggcgcgcgcccggagtccgatgaactgattatcaaacggctggcgaccattgagatggggctgtacgcaacgcagcactatctggacgttcacggtatgccggtcaagggcgaacatctgcgcggccataatctgctgatgtttccgcgtgaactggtgccgcgtcactggagcagcttctgcggtgaaacgctgatcgaccccaacgtggtgctgcagtgcaactcgcagctgctgttgcgctcagccacccgcaacggcctcggcatcggcctgctctcctcattcctggcggataacgatcctgaattggtgcggatactgccggaaaatcaggactgggtggatatctggctggtgctgcatcccgatctgcagcgcgccgcgcgggtacgcgcggtggtacaggcgctggaaacctcctttcaaaactatccacagtaa

SEQ ID NO: 442900 - DNA, 1824 bp, Serratia marcescens
atggcgtctcacgcaggaaatacgtgcgctcccgcagcattggctaacgcggacgcaatcgcaggaggcttcccggccgccgctaaatcagcggtacaaagtaataacgccgatgttattatccaggcgctcgccgagcgcggcattcagcatatctttttggtgccgggcaaactgatttatccattgattaagtccattgacgaatccgcgatcgccgggattgtcgctgctcatgaaaccgcctgcggttttatggccgacggctatgcgcgcgccagcggcaacttcggcgtctgccttggcatctccgggccgggaaccatgaatttcctgccggcaatggcggcggcgcaggcggataagatcccggtgatgtatctggccggcggcatcgccacctatcatgaagcgcagggcgcgttccaggacggcagcaacagcggcatcgatgagctgaccattgtcaaaccgctgctgagcaacgccatcgaggtgaaacagccgcatacgctgcagcatgagctgcgccgcagcctgtcatgcctgaacggccagcggaaagggcgtacctatctgagcgtgccggtcgatatgcaaaagcgtccggcggttgagccgccggcatcgcgcacgtcgcagcgccgtgaaacggcgattgacctgccggcgctggaggcggtgctggataattatctgctgcgcggcctgaatatcgcctgtctggccggcaatcgggtgaataacccgcaggacgccgaactcctgcggcaggtggcggaaaaataccatctgccggtcgccaccacgctcgcagggaagggcgcatttccggaaggacatccgctggcgctgggcctgtacggctttgccggccatacccgggcggtggagaccatcaacggcgacgaagtcgatgtgctgctggtgctggggtgcgatctcaatcagcgtgacagcctgaactggcacccgaaattgcacggcaccaagacgttggtggtgattgatgaagatttcgatcaagtcagctcgcactatcagccggacgtgcagattttctccagcctgagcgcttctctccagtacctgctgacggcggttgacgctgatgacccgcatcttgcctgcgtcaataagctgcgtaatcagtggatggaatacgtcggccaactgccgcttgaacagcgtcagccggaccggactgcgcgcatgatggcggaggaaaaacacctgtaccccggcgaagtgattgagcatttacgccgtcgcaccgctgcggacgctaatgtggtggtggactccggcgcgcaccgtgtttttatggcgcaccattggcagagcagcggcgtgggcgattatcacacttccagcgccttggcaccgatgggctgggcgatttgcgccggaatcggcatcaagctggcggcgccgcagcgcgactgcctggtggtgaccggcgacggctgtatgctgatgcacgggatggaaattcagaccgccgcccgctaccgcctgaaaatgacctttgtggtgatgaataactgcgcacacggcgcgatgcatatcgacacgttacagcagagcggcgtgggagaagcatacaccgcgctgccgtcgcacgactggcgggcgtttgccggcagtctgggcgtggccgccgccaaggccgccacgctggccgagctggatgatgcgctggccgccgccgccgcacatgacggaccatatctgattgaaatgatggtaggaaaccatcgggcacccaatcgttattatgccgagagcgttgctgaatatgagcagcgtatccgggaacaataa

SEQ ID NO: 442901 - DNA, 429 bp, Serratia marcescens
atgatgtatcgatctggcgtaattgccgccatgatggtggcctgtacgaatgcgttggcggaagagacccatggtgaaggcattaataaagaaacgttgctgaaaaccgaaaaatcatgggaagggacgccttacggccactatcccgccggcgcgccgcagatcactatcctgaaggtgaccgttgagccgaatcgggtgctggcctggcatacgcatccctgcatcagcgcggtgcatatgaccgcgggcagcgtttcgctgacggtggcgaaaaccggcgagaagagaactttccgccagggggattcgtttaccgatacggtagatattgtgcatcagggccaggccggcgcgcagggggcggagatgctggtgttttttgcctgttcggataaccgtccgctgaccgtcgccgaagccaaataa

SEQ ID NO: 442902 - DNA, 873 bp, Serratia marcescens
atggttgcgttatggatgttggtggccagcgtgttttttgcgctgatgggcgccagcataaaactggcgtcggcgaaggtcggtttttttgacattatcttttatcgctcgttcatcaatgtgctgattgtcgcggcgctgataaagatcaagaatctcggcttccgcacccggcatctggggctgcatatgaagcgtgcggcgattggcaatgcggcgatgtactgcggtttctattccctgattcatttaccgatcgccaccgccacgacgctgggttacaccaacccgatttttcaatcggtgattacttttgtcaccgccaaaggccaactgaccggcaaactgctgttttcggtcctgctgggctttgtcggtattttggtgctgttgcggccggatatgccgcacggcgagtatgcggcgacgctgatcggcctgttgtccggcctgctgaccgcgctggcctattttaacgtgggcaaactggtgcgcaccggcgagccggaactgcgggtggtgttctatttttctctggtcggcacgctggtggggctggtgatggccggcgccatcggttttgccgcgttggatgccattaccttactgaatgtctgcgcaattggcgttttcggcagcctggggcaaattaccatgacgcgcgcctacggcagcggcaacccggtgattgtcagcattctttcttacagcacgattatcttctctacgctgctcggctatctgatctttgatgagaaacagtcgtatattgccgccgtaggcatggcgctgattattctttccggcggtctggcgattctgcggcgcacgccggcgaaggcacgccagccggccacggcgggcagggggtag

SEQ ID NO: 442903 - DNA, 1245 bp, Serratia marcescens
atgtctgacggagtggccgtagaagaagccgctaaagtgaattcgggtgcgtcgcactttgctattttgctatttttggcgctggcgttaatgtcggctttattgaatagcagtgcgccgacgccgctgtatccgctttatcaacatgagttgggcttaacgtcagtcagtctgacgattatttatggtgcttatgccggcggcgtgctgatttcgctgttcggcgtgggcaacatggccggcaaagtgcgcgatctgcgcagtatgattgtgccggccctgctggtggtattagccggcgcgctgctgttcgccatggcggattcgtttgtgatgatgtttatggcgcgcctgctggccggcatcggcaccggggctttaaccggtgcagcgaacattgcgctggtgcgcttcgggcctaaagacggcggtaaggtggcggcgctgattgctacgctgtcctttaccaccggcctggcgctggggccgatttttagcggtctggcgttgcagacagggttttacaccacgtcactgccgtttatcattattatggcggtggcggcggtggcggctctgggcgtgatgctgaagtggccgggtgaggcggcggttgcgccggcgggtgatgcatcggccagcgcggcgacgccggcaaagagttcgctggctgacggcctgcgggccaccggcatcaagttttatctctgcgccggcgcgctgtttacctgctgggcggtggccgccagtattctggcgattggtccgaacgtagcggaaaaactgctgaatatgcacagccgcggtatgtatggctatgtgattgcggtctatctggtgattgccggcatcagccagattctgagccgccggattaacgctcgccactcgctgatgtttggctgtctggcgcaggcgctgtcggtggtggtgtttgccgaagcgattcagatccactcgctgggtctggccgctgccggaatggtaattgccggctatgcttatggtgcgatttttgtcggcagcgcgacgctggtgaatctgatttcaccaaaatccagccatgcgcgactgatttcgctgttttatgtgattgcttatatcgccaactgggtgcctatcctgttgggggtagttatcgaccatgccagcctgcagctggcggtcaacttactgtttatggtcagtgcagtggtatgtctcgttttgggactgctggtgacgcgagcggggttcccgcgctaa

SEQ ID NO: 442904 - DNA, 492 bp, Serratia marcescens
atgaatgtacttgttgccattgccgttaccaccggcattctttctggcatctggggctgggttgcggtcagtctcgggttgattagctgggcgggctttttgggctgcacggcctatttcgcctgtccgcagggcggcgtaaagggattgttagtcagcacgctgacctgctgcagcggcgttttctgggcgatgctgattattcacggcagcgcgcttgagccggcctggagcctgctcggctatgtgttgaccggcgtggtggcgtttctgatgtgtatccaggcctggcagcagtggctcaattttgtgccggggacctttatcggcgcctgcgccaccttcgccggtggcggcgagtggcgtctggtgacgctgtcgctgctggtggggctattgttcggctttgcgatgaaaaacagcggcctgtggttggcggcgcgtgggcggcgggcggcgttacgctcgacctcggcgacgggagacgcctga

SEQ ID NO: 442905 - DNA, 312 bp, Serratia marcescens
atgacaagatatacggacgaaagtcgtaccacccttgatgacgatctgcgcatgctcagcgataccctgcaggaagtattggactattcgggcgaccgcgccgatcaggcttatgtggatattaagagccatgcggagcaggcgctgaaagaagtaaagtctcgcttgagcggcgcttccgagggatattatgcgcgcgccaaagaggcggtgcatcgcaccgacgattatgtgcgtgataatccctggcatagcgtgggcatcggcgcgacgattggtctcgtcttcgggctattgctggcccggaagtaa

SEQ ID NO: 442906 - DNA, 1293 bp, Serratia marcescens
gtggaacatatctcagcattgttgcagcagttgcgccagcggctggcgcagccttcctcggacgccgctggcttccggcagatttccctccccgtgagcgacgcgctcagcgacgatttgctggcatggctggcggcgcaatccactttcccgcagttttactggcgccatcgggatgagcaggaagaggcggcggtgtgcggcgcgctgcggcagttcagtgatgtggccgccgcgcaggcgtttattgcggcgaaccctgcggcgcgcgtctgggggttaacggcatttgacggttcatcctgtctgtttttaccacggctggcgtggctgagacgtgataattgcacgagtttgacgcttaacctgtttacggaaaacgcatcagcaacggctgattggctggcgacactggcgccggcgacgccgattgctccgctgcggacgacggttgaggcggtagagcatcgtcccgatgccgccggttgggcgcagatgctacagcaggcgctgacggcgatcgccgcagggcggctggagaaggtggtgctggcgcgcaacagccggttgacgctgacgcagccgccgtccgcccccgcgctgatggcggccagccggcgggttaatcaccgctgctaccactttatgctgcgctttagcgcacgttcggccttcctcggctccagcccggaacggctctatctgcgtgacggacgacatttgctgaccgaggcgctggccggcacggttgctaatgacggcgatgatgttcgggcgcagcggctggcgcagtggttgctggacgatcggaagaatcagcatgaaaacctgctggtagtggatgatatttgccagcgcctgcagggcggcgtcagcgcgctggacgtgcagccgccggaagtgctgcgtttgcgtaaggtgcagcatctgcgccgacgcatctccgggcagttgcaggcggcggatgatgcggagtgcctgcagcgtctgcagccgacggcggcggttgcaggcctgccgcgccgggcagcccgggtatttatcgccgcccatgagccggtgacgcgcggctggtacgccggctgcgccgggtatctgtccgccgggcgcgctgagttttgcgttgcgctgcgttcctgccagattgacgacgatagcctgcagctgtatgccggcgccggtatcgtcagcggttcggacccgcagcaggagtggcgggagctggacaacaaggcggcggcgctgcgcagtctgctgcagccggagtcaacggctgcagatgctgctgattaa

SEQ ID NO: 442907 - DNA, 1674 bp, Serratia marcescens
atgtcgacaagtgtctttaaccgccgttgggcggcgttgttgttggaggcggtgtcccgccacggcgtacgacatgtgtgtattgccccgggctcacgctctacgccgctgacgctggcggcggcagccaatcctgcttttatttgccatacccattttgatgaacgcgggctgggccatctggcgcttgggctggcgaaggccgctcgcgagccggtggctgtgatcgttacctccggcactgcagccgctaacctgtatccggcgctgattgaagccgggctgacgggggagcggctggtgtttctcaccgccgaccggccgccggagctgatcgactgcggcgccaatcaggcgattcgccagcgcggcctgtatgcctcccatccgaccctcagtattgacttaccacggccaacgccggatatccccgccagttggctggtttctaccgtcgacgatgcgatggcgcggctgtcgcacggcgcgctacatattaactgtccgtttgccgagccgctgtatggcggcggcgagcagcactatgccggctggtctgcagagcttggagactggtggacaggcaatcagccgtggctgcgcgagatggatacgcaccagatgccgccacagccggactggttcttctggcggcaaaagcgcggcgtggtggtggccgggcgtatcagcgccgaagagggcgctcagctggcgcagtgggcggcgacgctgggctggccgctgattggcgacgtactgtcgcaaaccggccagccgctgccctgcgccgacctgtggctggcgcagccgcgggcgcgccaagtgctggacaatgcgcagctggtgattcagttcggcggcagtctgacgggaaaacgcctgctgcagtggcaggcgagctgtcagccggaggagtactggctgattgacgctctgccgggacggctcgatccggcgcatcatcgcggccgacgtatttgtgctgcgatcagtgactggctggcgcagcatccggcgcagccgcgtacgccctgggccgttgagttgtctgcattggcgcacgacgcgttcgagacggtggcgggcgacgtttatcaccgcttcggcgaagcgcaactggcgcatcgcctgccggagctgttgccgcagaacgggcagctgtttttgggcaacagtctggtggtgcggctggttgacgcgctggcgcagttgcctgccggctatccggtgttcagcaaccgcggcgccagcggcatcgacggcctgatttccaccgccgccggcgtacagcgcgccggcgccaaacccacgctggcgctggtgggcgatttatccgcgctgtatgacctgaactcactggcgttgctgcgtcaatgctcggcgccgacgctgcttgtggtggtgaataacaacggcggacaaattttttcgctgctgccgacgccggaagaggaaagagaacgtttttactgcatgccgcaggcggtggactttagccatgccgccgccatgttccaactggaatatgcgcaggttagcgactgggaagcgctgcagcaggcggttgagcgcggctggcgtcaccacggcgcaacgctgattgagctgcaggttacgcctgccgcgggggcggaaaccttgcagcgcctgctggcgcagatggcggcgcgctga

SEQ ID NO: 442908 - DNA, 768 bp, Serratia marcescens
atgctggccgcacgcatactgcagcagggcgagcgccagcgtccgtggctggtttggctgcatggtctgctgggcaacaataatgagtggcgggtgatcgctgcccgctgcgcgcaatggccgtcgctggccatcgatctgccggggcatggcgaatcggtcggccagcgctgccatagctttgccgaggtcagccgccagattggcgctacgctgcggcagcataagattgagcgctactggctggtggggtattcgctgggcggacgcattgccatgtatcacgcctgctacggcgaaacgactggtttgcaggggctggtgattgaaggcggcaatccggggctgaccaacgatgaactgcgccgtcagcgttttgagcacgacgcccgctgggcggcgcgtttccgcagcgaaccgctgccgcaggtgctggcggactggtatcggcaaccggtgtttcacgaactgagcgcgcctcatcgcgaggcgctgattgaagcgcgctcgctcaatgacggtccggcggtggcggcgatgctggaggccacctcgctggggcgtcagccctggctggcgccgcagttacggcggctgcaactgccgaaactggtgttgtgcggtgccgacgacgacaaatttcaagcgctgacgcgcacggccggcctgccgctgcgcaccgtcgcgcaggccgggcacaatgcacatctggccaatccgcgcgcgtttgccgcgcagctgaatgattttcttgttaatcctgcttaa

SEQ ID NO: 442909 - DNA, 984 bp, Serratia marcescens
atgacggcccctgagcgtagtgccggcgtttaccgctattgcctgccgatggaggcgggcgtggtgctgcgtcaccagcggctgaaaacgcgcgacgggctgttggtgcatctgcagcagggcgaacgcagcggctggggcgagatcgcgccgctgccggaattcagccgcgagacgctggagcaggcgcagcaggcgctgctggcctggttgccaggctggctggacggcgatttaccggccgagagcgggttgccgtcggtggcgttcggcgtcagctgcgcgctggcggagtgcgggcagcagttgccggccgacgccgattaccgcaaggcgccgctgtgcaccggcgaccccgatgcgctgtttgccgaactggcggcgctgccgggcgacaagatcgccaaggtgaaggtcgggctgtatgaagcggtacgtgacggcatggtggtcaatatgctgctggaggcgctgccggatttgcgtctgcgactggacgccaaccgcagctggacgccgtcgcgggccgccggcttcgccaaatacgtcaacccggcgtggcgcaagcgcatcgcgtttattgaagagccctgcaaaacccgcgcagagtcgcgtgcctttgcgcaggagagcggcatcgccatcgcctgggatgaaagcgtgcgcgaggcgggttttgtggtacaggccgagccgggcgtggcggccatcgtgataaaaccgacgctgaccggcagcctgaaccgctgccgcgcgttgattcagcaggcgcatcaggccgggctgacggcggtgatcagctccagcattgagtccagcctggggttgacccaactggcgcggatggcgcattggctgacgccggataccgtaccggggctggatacgctggggctgatgcaggcgcaactgctgcggcgctggccgggcagcccgctgccgctgctggagacggatgcgctggagtgcgtatggcgcagttga

SEQ ID NO: 442910 - DNA, 1392 bp, Serratia marcescens
atggcgcagttgaacgactggccgtggcgttactgggcgcggcagcggccggcggacaccgcgctgacggtaggccaggaggcgataagctggcggcagctgcgccagcagatcgatgcgctgacggcgggctttcagcatcagggcgtgacgccgggctgcggcgtggtgctgtgcggtaagaatgattatccgctgctgctggcctatctggcgctgctgcagtgcggcgcccggctgctgacgctcaatccggcgctgccgtcgcggacgctggaggcgctgctgccgacgctggatatccggttcgccgtagcgccggacgggacgccggcgggaataagcggggtgccggtgctggacgccgatgcggccgacggcggcgaaccgcgcgacatcggctggcaaccccaacgcctggcgacgctgacgttgacctccggctccagcggtctgcccaaggccgcggcgcacagctgcgccgggcatctggccagcgcggaaggagtgctgcagctgatggcgtttcagcccggcgacagctggctgctgtcgctgccgctgtatcatgtttccgggcagggcatcatctggcgctggctggcggcgggggcgcagctggtggtgcgtgccggaatgccgttggcgcaggcgctggccggctgcagccacgcgtcgctggtgccgactcagctgtggcgtttgctcagtcagccgcaggcatcactggcgctgaaagcggtgctgcttggcggcgcaatgatcccggtctccctgacggagcaggcggaggccaaaggcatccgctgctggtgcggctacggcctgaccgaatttgcctcgacggtgtgcgccaagcgtgccgatgcgcagccgggcgtcggtttgccgttggcagggcgggaaatcaggctggtggatgaagaagtgtggatccgcgcggcgagcatggcgctggggtactggcgcgacggccggctgcagccgattggcgatgcgcagggctggttccacagccgcgatcgcggcgtgatggcgcagggcgagctgcgtattatcgggcgcctggataatctgtttttcagcggcggcgagggcgtgcagccggaggatgtggagcgggtgttggcggcgcatccgcaaatctcgcaggtgttcgtggtgccggtggatgacgccgagttcggtcagcgtccggcagtggtgattgaaggggacggcgcgctgtcgctggaagcgctgctgctgtgggcgcaggatcggctggcgaatttccagcggcccgtggcactgtggcatttgccggagcagttaaaaagcggtggcatcaagattgcgcgacggcgggtgcaggagtgggccagccgacagtggcgggcgacgagtcaataa

SEQ ID NO: 442911 - DNA, 543 bp, Serratia marcescens
atgaagaaaagtttagtggcatgcgcagcaggtctgctgctggtcagcggaacggcaagcgccatcggtgtttctgcacaagccgggcgccattacaccaatctgggcgtcggcctgggcagcaacagcgccgggtttggcctgaacggcaactgggcgcgcagcgaccatgacggcaacgtcggcagcctggggctgaccttcagcctgcctgccggcccgctgagtgcgaccgtcggcggcaaggcgctgtatctgagcccgaaagagggcaaagacggcggggcgctggcgctgggcggcggcctggagtggacgattaaccgttacttcagcctgtacggcgaaggctacttcgcgccggaggcctttaccagcggcgtgaagtcgtacagcgaagccaacggcggcctgcgctggaatgtcctgcgtccgctgagcgtggatgtcggctatcgctatatgaagatgaaaggtaaagacgggcaccgtgataacacgctggccgacgggccatatattggcgtcggtttgagtttctga

SEQ ID NO: 442912 - DNA, 1197 bp, Serratia marcescens
atgttaagggttgagatgctcagcaccggcgacgaagtgttgcatgggcaaattattgataccaatgcggcctggctggctgattatctgttccagcagggaatcccgatgagcgggcgtgaaacggtgggggacagcctcgcttccctgattgaaacgctgcaggaacgcagtcaaatcgctgacatcttgatcgtcaacggcggtctggggccgaccagcgacgatctcagcgcgctggcggcggcgacggcctccggcgttgagctggtggagcaggcggcatggatcgcccgcatggaggcgtatttcgccgagcgcggccggccgatggccgattcgaaccgcaagcaggcgcagattccggctaacgccgaacttatcgataaccgcgtcggcaccgcctgtgggtttatgctacggctgaataagtgcctgatgttctttacgcccggcgtaccgtctgaatttaaaaccatggtcacggaacagattgtgccgcgtctgcgtcagcactttacgctgtccgcgccgccgctgtgcctgcggttgactaccttcggctgctcggaaagcgatctggccgccgagctggacggtatgccgttgccggagggcgtggtgctgggttaccgctcttccagcccgattatcgagctgaagctgaccggcccggaaacacaacgcgcggcgatggaagctgcctggcagcgagtgcgccaggtcgccggcgacaatacaatttttgagggcacggtggggctgccggcaacgctggcgcagcaactgcgtcagcaggggctgaagctggcgctcagcgaacagttcagcgccggccttatcaacctgcagttgcaaagcgcagatgcgccgctggccgggggcgaactgttgccttcgcactgtctggaaacgctggaaacggtcatcgcgcgcgcacaatcgctggcgcaactggcgggcgcacagctggcgctggcggtcagcgcgatgcaggatgagcaggtcagtattgcgctgcatacgccgcgcggcagcgtcgggcagacggtgcgctatcgcgcctcacgtcatggtctgcgtctgcggcaggagtcggtggcgatgctggcgctggatatgctgcgtcgctggctggccggtggacaggtatgcggtaaaaacggctggttggagatggtggagattatcgagtaa

SEQ ID NO: 442913 - DNA, 261 bp, Serratia marcescens
atggcaacgccaaccgtcacgctgcgggcttccggcacgcagctaaactgtccggcgcatgaaaacagcctgctcgacgtgctggagttgcacgacgtgcaggtggaatatcagtgccgttccggctattgcggcgcttgtcggctcaagctggtgaaaggccaggtgatctatcgccagcagccgctggcgtttatcaatgacggcgagatcctgccctgctgctgtatgccgcaggcggatatcgagctggaattgtaa

SEQ ID NO: 442914 - DNA, 2715 bp, Serratia marcescens
atgcaaaatcaacaactgaccatcagttccggcaatatcatccgctgttttctggtgtttattgtgctgctgtttgtcagcctcggcctgtatggctacaactataccaacgcctatctgagcgataaaaaatcggcgctgaacaccatcgtcaaaagcctgcaaaagcgcgtggatacctaccgctacgtcaccgaacaggtttatgaacgcttcggcaatacgccgatgctgcaagccgcgccgtcggtgatggaaacgcgtctgcgcccggacgtctactacgtcgataagccgtataaaaaaaccgacgcggtgattttcggcaatcacgacgccaacacgctggcgatgatggcccatatctccgactatctggataaccgctggggcgcaaacaccgaaaactacgcgatgtactacctgaacgggcaggataacagcctgagcctggtgaccacccaatcgctgaaagatctgacgtcacgcttccgggatagctacctgaccaactcggccgaggatcgccgcaccgaaatgctgcagcaggccaatatgctggacgaacgcgagagtttctccaccctgcgcaaacagcgtttccagaacgcctattcgttctctatccgcaccacctttaaccaaccgggccatctggcgacggtgatcgccttcgatctgccgatcaacgacattattccgttcaatatggctcgcgccaacttcgagctacagccggtcgacgacggtatcgatccggcgggcagcgaagacgacactacgaccagcatgcccaacaccccgcaggtgacgctgtcaggcagttgggtcgagttcagcgccagcctgcccaacgcgccgctgaacatggtgtaccgcgtatcggtgctcagcctggccatcgacctgctgcgcaacaacatgtggctgctggtgaccaatctggtgctgttcatgctgtcgctgatcgccatctattttatccgtcaccagtatgtccaaccgagcgaaacgctggccgacgagctggacgccgagcgggcgctgaatcaggagattatcgccagcctgccttcgggactgctggtgtatgacttcgccagcaatacggtgatcgccagcaacaagattgccgagcacctgctgccgcatctcagcctgcagaaaatcgcccatatggcgcagcagcatcacggcgtaatccaggccacggtcaacaacgaagtgtatgagatacgcatcttccgcagccagctgacgccggaaacctatctgttcctgctgaacgatcaggacaaagaggtgatggtcaacaaacgcctgcagcaggcacgccgcgaatacgataaaaacgtgcaggcgcgcaagctgatgctgcataacctcggcattgagctgaaccagccgatgcagcagattcacgacatggccgaccggctgcgcacccaggcggacccgcagcagcaacagcagctggtgaaccaactgtttgatgagtcggcgtcggtgttggcgctgatcgacaatatcaccctgcttacccgcctggaaacgcaggactggcagccggccagccagccgttcagcccggccgcgctggtggatgaactgctcagagatgtgctgccggcgctcaaccgtaaaggtctggcgctgttcaaccactatcagctcgacgtcaaccaaacgtatatcggcgatgccaacgccctgcgcaaggcgctgtcgctgctgatccgctacgccattatcaccactgcctacggcaagatttccgtcgtcgttaaccacgagccggaacgtccggagcagctggtgttccatatcaacgacaccggcgcaggcatctccaacgaagagatcagcaacctgaactatccgttcctcagccagacgctggtcgaccgcttcgaccacggttccggcctgacgtttttcctctgcaaccagctgtgtaaaaaacttaacggccagttggatatccgcagcaaggtggatatcggcacgcgttacaccattcgcgtaccgatggcgctggagcgccaggacgaggaagagcaggagaaattgctggacggcgtcaccgccctgctggaagtgacctccgacgagatccgcggcatcgtcacccgtctgctgcatgcctacggcgctgactgcatcattgccgacgaccggaaaatcaagcgcgactacgacgtactgttgaccgataacccgcagcgggccgatgactataccctgttgctcagcagcgacgagaacggctggcagcagctgaacaaacgctatattcgcgtcaactacaacctcggcagcgcgatgatcgatgccattctgctgctgattgaacagcagatggcggcgctggatcagccggaaaacccgcctgaaatcggcgcagatgatatccaactgtatgaaaaacagctgaaatcaagtgattactatggcttgtttatcgacacagtacccgatgacatcaaaaaactgtatactgaggcgggcagcggtgatttcgaggcgctgtctcaaactgctcaccgcctgaagggggtgtttgccatgttaaacttgcttcccggcaagcaactgtgtgaatcgctagaacagcacatcgctgacggtgatgcgcttaagatcgagaacaacatcagtcagattgattttttcgtcagtagactgctgcagcaaggtaaccaactacatgaataa

SEQ ID NO: 442915 - DNA, 1155 bp, Serratia marcescens
atgacatccactttgtgcaccgaacagcaacagcccggcgttcccgaacagatagccacccgcatcgccttttttgtctccggcctcggcatggcggcctgggcgccgctggtgcctttcgccaaacttcgtctgaacctggatgatggttcgctgggactgttgctgctgtgcatcggcgccgggtcgctgctggccatgccgctgaccgggttgctgaccggcaagctcggctgccggcgcgttatcctgctggccgggctggcattgtgcgtcgatctgccgctgctggtgctgatggattcgacgccgggcatgggactggcgctgctgctgttcggcgccgccatcggcatgattgacgtcgcaatgaacatccaggcggtgattgtcgaacgcgccagcggccgggcgatgatgtccggttttcacggcttcttcagcatcggcgggatcgccggcgccggcggcgtcagcctgttaatgtggctggggcttagcccgctctctgccgtgctgaccacggtgctggccatcgcgctgctgctcgctctggctcagaagaacctgctgcgcgacagcgacgcacaagacgacggtccgctgtttgtgctgccgcgcggctgggtgatgtttctcggcacgctgtgctttattatgtttctggcggaaggctccatgctggactggagcgccctgtttctgacgacgctgcgcggggtcgagcacagccaggccggactgggctatgcgctgttttccatcgccatgaccatcggcaggctgaacggcgaccgggtggtcaacgccctgggacgctataagatattgctgctcggcagcctgtgcgccgcattggggctgacgctggcggtggcctgcgacaacgccgttattgccctgctgggctttatgctggtggggctgggcgcttccaacgtggtgccgattttattcagcgcggcgggtaaccagcgtgatatgccggccaatctggcgatcgcgtcggtaacgaccctcggctatgccggtattctggccgggccggcgctgatcggatttatcgctcaggtctccagcctgaccgtggccttcggctgcgtcaccgcgctgctgctggcggtagccgccagcgccaaagccgttacccgttaa

SEQ ID NO: 442916 - DNA, 405 bp, Serratia marcescens
atgcactctcaactcgaaacccgatggcagcggctacagacctcgccattccgcgccaaattccgcctgaacgataaagatcggctctacctggaaaagaaaggcctcgccgtgatcctcagccacgcacgcgatttcatcgaccagcgtctggccgacgcccagcccaaaaacgacggtaaacagacgccgatgcgcggccacccggcgtttgtcgcccaacacgccaccgctacctgctgtcgcggctgcctggcgaaatggcatgccattcccgccggccaggcgctgaacgaacaacagcggcgctacatcgtgcagttaattgccctatggctggtgcgcaaagccggcgcgcaggccgacgagtgcgcaaatgttttcgaccccgatcgcgctttgtga

SEQ ID NO: 442917 - DNA, 1101 bp, Serratia marcescens
atgaaacttcgagtactctccctgattgtccctgcgatgctggttgccggcaccgcaggcgcagcggaaatctacaacaaagacggtaataaactggatttgttcggtaaaatcgatggtcttcactatttctctgacgacaatggcactgatggcgaccagtcttacctgcgtttcggcctgcgtggcgaaactcagatcagcgaccagctgaccggttacggtgagtgggaatatcaggttcagctgaacaagactgaaaacgaaaacgattcctacacccgtgtcggcttcgccggtctgcgtttcggcgactacggctcactggactacggccgtaactacggcgtgctgtacgacatcggcgcctggaccgacgtgctgccggaattcggcggcgacacctacggcgcggacaacttcctgttccaacgttctagcggcgtgctgacctaccgtaacaatgacttcttcggtctggttgacggcctgaacttcgccctgcagtaccagggtaaaaacgacagcgctaccgagtccaacaacggtcgcgacgtgctggcgcagaacggcgacggttacggcatgtctgccacctacgatctgggctacggcatcagcgcggcggcggcttacttctcttctgaccgtaccaatgagcagaaccgtcttgcgtttggtcatggcgacaaggctgaagcgtacagcggcggcctgaagtatgacgccaacaacgtctacctggcggcgatgtacacccagtcttacaacgcaacccgctttggtaacagcggcagcagcactgcttacggctacgccaacaaagcgcagaacattgaactggttgctcagtaccagttcgatttcggtctgcgtccttccgtggcttacctgcagtctaaaggcaaggacatcgatcgcggctacggcgatcaggacctgatgaagtatgttgacgtgggcgcgacctactacttcaacaaaaacatgtccacctatgttgattacaaaatcaacctgatggacgacaacgacttcactcgtgcggcgaaaatcaacaccgacgacgtagtagcgctgggtctggtttaccagttctaa

SEQ ID NO: 442918 - DNA, 417 bp, Serratia marcescens
atgccgctcacgattgaacgcattatcgaaacggcgctgtatgtcagcgatatgccgcgcgccagccatttttatgaaaccgtattacagctgccggcgatggtggcgaaagcacgctttcgtgcttacaacgttggcggtcagaacgtgctgctgctgtttgtcaaaggcgacgcacaggaaggcttccgtgaagaggcgggctacataccgcctcacgacggcagcggcccctatcatctggggttcgcggtcagtaaggcgcagctgccgcagtgggagcaacggttaaaccagcacggggtggaaatcgaagggcgcatgagctggccgcgcggcggggaaagtatttatttccgtgacccggatggccatctgttggaattagtgacgcccggactgtgggaaaattattaa

SEQ ID NO: 442919 - DNA, 507 bp, Serratia marcescens
atgatgttacactggcgccggcacagcatgccgccttttccattcctcaagggccgattactggtgaaactgtcaaagcactcaatacgcacgctggcctggctgggcctgtttgccatgctgatggtatttgccgggccgttaatctccgcgcagctggtaaaaaactcacaatataacagtgagatgggcatgaatatgccgatgggcgagcatatgatgatgatgcatcatcagacgggcgacgcccccgccgcacggcagcacgcctccggtatgacggatgacggcagcggcgacctttgcggttactgcagcctgttccatcataatccaccgttgcactttacgctgccgcccttcctgcacgcgccgttttccgccggtaaggctattgccgttattattccagaaccggttatcagtgaattattcctgccttaccaaacgcgcgcgccgccaaaaaacattaacgccaataatattatttccacatttatactttaa

SEQ ID NO: 442920 - DNA, 1395 bp, Serratia marcescens
atgactgaacgcgtaaacgcgttaccttcggctgcccgaaatatgcggcagcgggtaacgactcgcagctggtttattccgttgatgatgcgtctgcatttctatattggcgtatttgtcggtccctttttacttattgccgcattaagcggaattttttatgccctgacgccgcagctggaatcttattggtacgccgaacagttgtatcatcacagcagcggacagccgcagacgctacagcggcagattgcggccgcacaggcggtggcgccgacggaggcgcagctctccgccgtacgtccgtcgccggcagccggggagaacacgcgggtgctgtttaacgtcagcggcttgacgtctggcgaacgtctggcggtgtttgtcgatcccgtcacgctgcagacccacggcgcgctggcggtgtacggcaccagcggcgtgctgccgctgcgcacctggctggaccagttgcaccgcagcctgttgctgggagaacttggccgtaactacagcgagctggcggcatcctggctgtgggtggcggcgctgggcggcctgatcctgtggggagcgcgcaaacgcgcggcgcggcgtcagcgcggcgtgcgcgctctgcaccgccaactgggcgtgctgttgtcgctggggctgctgtttttctcgattaccggcctgacctggtcgaactgggccggcgataatatcagtgtattacgtcatcagtttggctgggcgacaccgtcgctgtctaccgccttgcacggcgcatcccatgaggcgatggatgaacatgcggagcaccgcggtcacgccatggcgtcaggcgagatggcgcctgtggcggatgccgctatgtatgaccgggtattgcagcgggcgcgcatcgcgggcattgacgccaataaagtagagattcgtcagccgcagggggcgggccaggcctggtcggtcagcgaaatcgaccgcagctggccgacgcaggtcgatgcggtggcggtagacccgcataccatgatggttgtcgacagcgtgcatttcgccagtttcccgctggcggccaagttgacgcgctggggcatcgatctgcacatgggcattctgttcggtctggtgaatgagctggtgctggtggtctttgccgccgggctggtggcgatggtgatcatggggtatctgatgtggtggcgcaaccggccgacgcgggcggcggaacgcgcgccgcgttcgccgctgatgctgctgcgtcgcacgccaaaagggccgctggcgttgattttactggcgacgctgctgctgggttacagcctgccggttcttggggccagcatcgtgttgttcttgctggctgatgcgctgcgttacggttggctgcgctggcggcaagccgattaa

SEQ ID NO: 442921 - DNA, 864 bp, Serratia marcescens
atgagtcgtaataatgactgctggattatgaccgcccagtgtccggggcggctcggcacggtagatgccgtgaccggtttcctacgggaaaacggctgctacattaccgagcagaactcgtttgacgatcgcgaatccgggcacttctttatccgcaccgagtttcggccgccgtccggttttgacagccaggccttcgaggcgcgcttcgaagagcgggcggcggggttcgagatgaccttcgggctgaccgctcccgggcatcgggtgccggtggtgattatggtctcgcgtaccgatcactgcctgaacgacctgctgtaccgctaccgtaccggccagctgccggtggaggtgtgcgccgtgatctccaaccaccgcgatctggaaccgctggtgacatggcacggcctgccctaccactacctgccggtcaccgccgacacccgaccgcagcaggaagcgcaggtgtggaaaatcattgaggaaaccggcgccgagctggtgattctggcgcgctatatgcaggtgctgtcggacacgatgtgccgccggctggcgggcaaggcgatcaatatccaccattcgctgctgccgggctttaagggcgccaagccctaccatcaggcctgggccaaaggggtcaaactggtgggcgccacggcgcattacatcaatgaggaactggacgaagggccgatcatcgcccagagcgtggagccggtaacccataccgactacccggaggatctgattgaaaaaggacgcgatatcgaacgcgtgaccctggcgcgcgccgtcagttggcacgtagagcggcgggtatttctctatgagaaccgcacggtggtgttcccgcgctga

SEQ ID NO: 442922 - DNA, 645 bp, Serratia marcescens
atgtctgatgccgtaaagataagcacctttaacagccaccccgaggcgcaggtgacgcgcgagtcgccgctggcgttgtcttaccgcaacacgggccgcccggaggccgatgagcgcagcggcgtgacgctgcgggaacggccgttctgcgggcatctgattctgcgcggcggcgccatcgtcctcgatcaggcgctgcgcgacgtgctggggatcgggcttccgggccagccgctggggctggtcagtgaaaacggcggcgagatcagcacccagtggctgtcgccggacgaatggctgctgatcgtgccggaaggcagcgagttcgaggtggaaaaccggctgcgggcggcgctgggcgatgcccactacgccatcaccaacgtcagcggcggccagacgctgttggaactgcggggggaaaaagttcgcgagctgctgatgaagtcggtggtctacgacgtgcacccggacaatttccctgcgggcaaggcggtgaccaccgtcttcgccaaaaccaccgcggtactgcgccggcccgacgatgttcgctgggaactggtggtcagacgcagcttcgcggattacctctggcgctggctgctggacgccggagaagagtacggcatcggcgcgatcccctga

SEQ ID NO: 442923 - DNA, 3027 bp, Serratia marcescens
atgaaacaggtgaatcgtctggccgacggcggccgtattgaccgcagccgaccgctgagttttcgttttaacggccagaccctgcaggggtttgccggcgataccctggcctcggcgctgctggccaacggcgtggatatcgtcaaccgcagctttaagtacgggcgcccgcgcggcattgtcgccgccggcgccgaagaacccaatgccgtggtgcaattgggcagcagcgaagccagccaggtgccgaacgtgcgcgccacccagcaggcgctgtatgacggactgacggcgggcagcaccaacggctggcccagcaccgaacgcgacctgatgggcgccgtgggtaaaatgctcgggcgttttatgccgcccggcttttactataagacctttatgaagccggcctcgatgtggatgacctgggagaagtatatccgcaagggcgccggactgggacgcagccccgtggcgcgcgatccggatcgctacgatcatcttaaccagcactgcgatgtgctgatcatcggcgccggcccggccggtctggctgcggcgctggccgccggccgcagcggcgtacgggtaatgctggcggatgagcaggaagagatgggcggttcgctgctcgacagccgtgagccgttaaacggccgcgacgccgcacactgggtggcggaaaccctgaacgcgctggcggcgctggataatgtacagctgctgccgcgcaccaccgccaccggccgtcatgaccacaacttcgtcaccctgctggagcgacgcaccgaccatctggacgaaaccgcgccggaccatcaggcgcgtctgcgcctgcaccgggtacgggccaaacgcattgtgctggccagcggcgcccacgagcggccgctggtctacgcgggcaacgatattccgggcaacttcatcgccggcgccctctccacctatattcaccgctacggcgtggcgccgggccagcgtctggtgctgtcgaccagcaacgaccacgcctactgcgccgcgctggactggctggacagcggccgggaagtggcggcgattgtcgatgccagagataacccgcagggtgaactggtggcccaggcgcgcgccagaggcattcgtatcatcagcggcagcgccgtgattgaggcccagggcggctccagagttaaccgcgtgcgggtcgcccgcatcgaccacgccggcttccgggtggtggatcgggtggacaccctggagtgcgataccgtggcaagttctggcggctacagcccggtgattcacctggccgtgcacaccggcgcgcggccggtctggcgcgatgaggtgccgggatttgtcgcgccgcaggtggacggtatgatcgccgccggcgcagtgaccggcgcgttcgctaccggaaaagtcctgcaagacggcgcggcggcgggtgctcaggctgccgcagaaaccggcggcgagccagtggaaattgcgctgcctgaagtggcaaaccgcaacgacggcgcagcgctggcgctctatcaggtgccgcacgatcggcccacctcgcgggcgccgaagcagtttgtcgacctgcaaaatgacgtcaccgccgccgccattgagctggcgatacgcgaaggctttgagtccatcgaacatatcaagcgctacaccgtgatgggtttcggcaccgatcagggcaaactgggcaatatcaacggcatggccatcgccgcccgctgtctggggcgcaccatcccggaagtcggcaccaccgtgttccgtcccaactatacgcccgtcgcctttggcgccgtagcgggacgccactgcgccgaactgttcgagccggagcgccataccgcgctgcatcagtggcatcttgatcggggggcggaatttgaagaggtcggccagtggaagcgcccgtggtatttcccgcagcgcgtcaacggacgcagcgaaacgctggaagaagccgtggccagggagtgccgcgccgtacgcagcggcgtggggatcctcgatgcctctaccctcggcaagatcgatattcaggggccggacgcccgcaccttcctggagcgtatctacaccaacaagtgggcgaagctgggctttggccgggtgcgctacggcctgatgtgcaaggacgacggcatggtgatggatgacggcaccaccagttgcctgggggctaaccacttcctgatgaccaccagcaccggcggcgcggcggcagtactggagtggctggagctgtggcaccagaccgaatggccggagctgcaggtgtttttcacctcggtgaccgaccactgggccactatctccctgtccgggccggaatcccgccgcctgctggaagaagtgtgcgatatcgatctgtcgcgcgaagcctttaagtttatggactggcgcgccggcacggtggccggcgttccggcgcgggtgttccgcatctcgtttaccggcgaactcgcctatgaagttaacgtgcaggccaactacgcgcgccacgtctgggaagcgctgttcgagcacggagaaaagtatggcctgacgccttacggcaccgaaacgatgcacgttctgcgcgccgagaaaggctttattatcgccggccaggacaccgacggctccatgacgccggaagatctcggcatgcagtggtgcgtaggctatgacaaaagcttttcctgggtgggcaagcgggcgctgacgcgcgtcgatacccggcgcaccgaccgtaagcagttggtcggcctgcggcctaaagatccgaaagtggtgctggaagaaggcgcacagattgtactggatcccaaccatccgatcccgatgccgatggtgggccacgtcacctccagctactacagcccgaccctggacagcggtttcgcgctggcggtggtgaaagacggccaccagaaaatgggccataccgtctggctgccgatggtcgacggccaggtccatgaggccgaaattgtcagcccgatcttcgtcgatcccaaaggagagcgccaaaatgtctga

SEQ ID NO: 442924 - DNA, 372 bp, Serratia marcescens
atgctgcatatctggtgcccctggtgtggcgaacaccgggaagaagaagagttccaccccaaaggccaggcgcatatcgtgcgcccggcggatcccgacgcctgtagcgacgaagagtggggagagtatctgtttttccgcgataacccacgcggcattcaccgggaactttgggtgcatgccgcgggctgccgcaaattctttaacatggtgcgcaatacggtgagctacgaaattctggaaacctaccggattggcgaacagccgaaaaccggcgccggggccgatgtggtgcccctgccgcgccgcgacgacagcaaaactgaaaccgtgacccctgatgagcggatccaggccggaggtggcgtatga

SEQ ID NO: 442925 - DNA, 1251 bp, Serratia marcescens
atgcaacattattcaggtttgagtctgctgcgccatggcctcaaccaccatgaagactggccgcggatgtggcgcagccccgtgccgaagaaatcttatgacgtaattatcatcggcggcggcggccacgggttgggcaccgcttactacctggcgaaagagttcggcatcaccaatgtggcggtggtggaaaaaggctggctggggggcggcaataccgcccgtaacaccaccatcgtgcgctccaactatctgtgggacgaggccgcagcgctgtttgaacactcaatgaaactgtgggaaggcctgtcgcaggatctcaactacaacgtgatgttctcccaacgcggcgtgctcaatctggggcataccctccaggatatgcgcgacatccgccgccgggtaaacgccaaccgcctgaacggcatcgacggcgaggtgctggacgcccgccaggtgcaggatttggtgccgatgctcgactgttcgaaaaacgcccgctatccggtgctgggcgcctcctggcagcctcgcggcggcgtggcacgccatgatgcggttgcctggggctttgcccgcgcggcggacgccctgggggtggatatcctgcagcagaccgaggtcaccggttttatgatgcgtgacggccaggtctacggcgtgcacaccacccgcggcgatatcgaagcccgcaccgtcggctgcgtggcggcgggcaactccggggtgctggccggcatggccgggctgaagctgccgctggaatcccacccgctgcaggcgctggtgtccgaaccgctgaaaccggtgctggataccgtggtgatgtcaaaccacgtgcacggctacatcagccagtcggataaaggcgatctggtgatcggcgccggtatcgacggctacaacggctacggccagcgcggcagttactccaccatcgagcatacgctgcaggcgatcgtcgagatgttcccggcgttctcgcgggtgcgcatgaaccggcaatggggcggcatcgtcgataccacgccggacgccagcccgattctgtcggccaccaaagtcaaagggctgtggtttaactgcggctggggaaccggcggctttaaagccacgccgggttcagcccacgtcttcgccgccagcctggcggcaggcaagccgcacccgctggcggccccgttctcgatcgatcgattcaataccggcgcattggtggacgaacacggcgccgccggcgttgcccactga

SEQ ID NO: 442926 - DNA, 1317 bp, Serratia marcescens
atgaatgccgatgatttgaacaagaccgacccgcagctcttcgccgccgtcgttggcgaaatggtgcgtcaggaaaaccatatcgaactgatcgcttccgaaaactacgccagctctcaggtgatggcggttcagggaagccagttaaccaacaaatatgctgaaggttatccgggcaagcgctactacggcggctgtgaacacgtcgacgtggtggagcggctggctatcgagcgcgcctgtctgctgttcggcgccgactacgccaacgtgcagccgcactccggcgctcaggcgaacgctgcggcgtttatggcgctggtgaagccgggggacaccatcctggggatgagcctggcccacggcggccacctgacccacggcgcggcgcctaacgtttccggcaaacactacaacgcggtgcagtatggcctcgacccggaaagcggcgagatcaattacgatgaggtgcggagactggcgcttgagcaccagccgaagctgattatcgccggtttctccgcctacgcccgggtggtgaactggcgccgtttccgcgagatcgccgatgaagtcggcgcctggctgctggtggacatggcccacgtcgccgggctggtggcggcccgctgctaccccaacccgctgccccacgcccacgtggtcactaccaccacccataaaacgctgcgcggcccgcgcggcggcatgatcctctccgcctgcggcgatgaggagctgtacaaaaaactgaatgccgcagtcttccctgggcagcagggcggcccgctgatgcacgtgatcgccgccaaggcggtggcgctgcgcgaagcgatgagcgaagagtttgtccgctatcaggcgcgggttatcgacaatgcccgggcgatggcgggggtgttcatccggcgcgggtacgatctggtctccggcggcaccgacaaccatctgttcctggtctcactgattcgccagggcattaccggcaaagaggcggatgccgcgctggggcgcgcccatatcaccgtcaataaaaacgccgtgcccaacgatccccacagccccttcgtcacatcgggactgcgtatcggcaccccggcgatcaccactcgcggctttgatctgcgcgagtgcgaaatgctggcgcattggatctgcgacattctggataccctggctcgcggtaaagaaggcactcacgaagagagcagcaatatcgaggcctgggtacgctccaacgtggcggagctgtgcgcccgctacccggtttacggcgaccctcagggcatgacgctgccccgccccgctttcgcctaa

SEQ ID NO: 442927 - DNA, 1092 bp, Serratia marcescens
atgaccgatgcgtcgcccttgctaacggtaggtttcgttctgctgcagcgctttacgctgctgccgtttgccgctttcgtcgattgtctgcggctggccgccgatgagggagatcgcagccgccagctgcgctgccactggacctttatgaccggcgacggccaaccggcgctctccagctgcggcgccgccgttgcgccctgccagccttttgcggatccgacgcgctttgactatttggtggtaatcggcggcgtgcaggatgagcaagaccacaccgaccgcgtagcgctggactacattcgccgcgccgccgcagccaacgtgccgctggtgggcgtctgtaccggcgtgtttgcgctgattcaggccggcgtgatgcccgggcggcgctgctgcgtcagctggtatcaccatgacgatctgacccggcgctttccgcaggtgacgccggtggccgaccggctgttcgtcgacgacggcgatctgatcacctgcgccggcggcagcgcggcggcggatctggccgcttatctggtggaacgccatctgggccgcgcctgggcgatgaaaagcctgcatattatgctgattgacgaagggcggcgcggcgagcatccccagccgcagcccgtggtgtttgaacgggtggcggatcgggcgctgcgccgggcaatcgatattatttcccagcacctgggcgaatcgctgtcgattgacgatctggcacgacgggtaggcacttcacggcgcaatatcgagcgcaagtttcgcgatgaactcggcgtcaccccgcagcgctttatgcgtaacctgcggctgcgctacggcctgtggttgctgcactataccccgcgcaccgtcaccgatatcggcgagcagtgcggcttttccgataccgctcacttttcgcgtcagttccgtgaaaccttcggctactctccgtcgcgggcgcgcaaaaccggccacgaacaggcggtcgatcccttctttctgcatatcggccagcccgaaagcgctcagcgtcgccacgagccagcggccgttttgcgattgaacgcaaaaatacaaaacgacaccatcaacaaataa

SEQ ID NO: 442928 - DNA, 759 bp, Serratia marcescens
atgttctatatcggcaagcacccgttcaacacgacgtcgcggcaacccatcgccgaatgcgcccccccggtatggccggagcggatggctgagctggcgcaccaggcgcgtcatccggcgctgcgggcattttaccaggctggcgccgtagcacccaacacggcgatcgcccaggcgccgctgctggcgatggattttgagaccaccggcaccgacgcccgccgcgacgatatcgtcagcatcgggctggtgcccatgacgctgcagcgcattcacctgcggcacggccgccattggctgctgaaaccacgggcggtgctgcgcgacgagtcggtggtgatccacggcattacccattccgaagtggaaaaggcgccggacctgaacgcgctgtttatcacgctgctcgaactgatggccggtaaagtgctggtggtacaccaccgcggcatcgagcggcagtttctcgatgccgccctgcagcggcgcatcggggaagggattacctttccctgtatcgataccctggcgctggaagcgcgccagcaccgtcatcgccccgtcagcctggcggcgcggctgttcagtcgccggccgcgggtttcgctgcgcctgcccgaaagccgcacccgctataatctgccccgctacccggcgcacaatgccctcaccgacgccctggcctgcgccgaattgcttcaggctcaggtcgcccaccatttttctgcggatacgccggtcgaatcgctgtggtgctga

SEQ ID NO: 442929 - DNA, 1887 bp, Serratia marcescens
atgcaggccgaacatcaggacatgatcgactttctgcggcgctatccgcccttcgacgcgctgcccgttgaagcgctggctctggcggccgccaatatcgaagtcagctacttcaaggcaggcagccacatattgtccttcggccagcaggtggacgcctggtatgtgctccgcagcggcgccgtcgaggtctaccgacgcaacggcgatctctacaatcgcctcagcgcgggaggatatttcggccagttcggcctgctgcgcgaaagcagcgtgcgctttccggtgaccgcactggaagacacgctggcctggctgatccctgccccggtattccaccagctgtttgcgcagtatgaggcattcgccgacatcgtggaggtggaagaccgcacccggctgcgccacaccgtggctcgcaccgaggacgccaacgaactgctcacctcaagcatcgatacgctgattggccgtcagccggtcaccatcgaaacctccggcaccgtgcgcgaggccgccatcacaatgagcacggaaggggtctcttcgttactggtgatgcaccccggcgtgccggagggcgcaatgggcaacgccacccgtatggccggcatgctcaccgaccgcgacctgcgcacccgggtcgtcgccaaagggctgagcgttgatacgccggtcagcgagatcatgacgccagagctgatttacggcgaacatcatcagatggtgttcgaagccatgctgaccatgatgcgtcacaatgtgcatcatctgccggtgctcagacagggtcagcccatcggcgtgatatcgcagtcggatatcctgcgctatgaatctcagaacagcctgttcgtagtcagccgcatcttccacgccaacagcgtcgccgaactgagcgccctgagcagcgaagtgcgcgcctgcttcaggcgcatcgtgcgtgaagacgccaactcgaagatgatcggcagcgccatggcggtcatcggccgcagttttacccagcgcctgctggagctggcggaacagcagctggggccgccgccggtgccctactgttttctggcgctgggatcgatggcgcgtcaggagcagctgatcgtcaccgaccaggacaatgcgctggtgctcgacaacagtttcgatccgctacgccacgacggctggttccttgagctggcgaccttcgtcagcgacggcctggcggcctgcggctatcgctactgcaacggcggaattatggccaccaacgccaaatggcgccagccgctcgccgtgtgggagcgctactttgccgactggatcggcaaacccacaccgcaaaccctgctcgacagcgctatctttttcgacctcgacggtgtctggggcaacaccgagtgggcggaacatctgaatcagagcattacacagcagacgcgccataacgcccgttttctggcctgcatggcgcgcaacgcgctgctgcgcacgccgccgctcggcttttttaaggggtttgtgatggagccttccggccagcacagccgctccatcaatatgaaacggcgcggcaccgccccgctggcggatctgatccgcgtgcatgcgctggcgatcggctcccgcgcccgtaactcctttgaacgcctgcaggagattatcgaggcggatattctgccgcacgggcgcggccaggatctgcgtgacgcgctggagtttatctcgatggtgcgcatccgccatcaggcgctggatctggatgccgaacgccagccggataacaatatcgagccggaaaacctgtcggatttcgaacgcaaaaacctcaaggatgccttccagatcctgagcaatgcccagaaattcctgaaataccgctatcaggccggacgaatacgctga

SEQ ID NO: 442930 - DNA, 1656 bp, Serratia marcescens
atgccggattcaaaagatccgatggtacccgatggtgaggttaacccgtacgataccgactatcaggtgggccaggacaatatcgtggtcagcgtcggccctttcgggctggatattcataaccgcgtcttcgtcatctccggagtggcgatcgttatctttgtcgtcttgacgctggcgtttcacagccagatggaacccatcttcagcagcgtgcttaaatggctgaccaccaacctgagctggttctttctgagcgtcggcaatatcttcgtgattctctgtctggtgctggtgttttccccgctcggcaaggtgcggctgggcggcaccctggccagaccggactacaactatctggcctggttctccatgctgttcgccgccggtatggggattggcctgatgttctacggcgtttcggaaccgctgtcgcacttctccagcgcgcttggcggcgtcagtatcgaaaacggcgtacgcagcgacaccgcgccgctggccgccgccgcgggcgacccggatgccgcccgccaactggcgatggccaccaccatcttccactgggcgctgcacccctgggccatctatgcgatgctggcgctggggctggcgctgttctcctttaacaaagggctgcctctgaccatgcgctcggtgttctatccgctgctgggggatgcggtctggggctggcccgggcatatcatcgatattctggcggtgctggccacgctgtttggcctggcgacctcgctgggactgggggcttcccaggccgcttccgggctgaactacctgttcggcatcccgatgggcgaaaccacgcagatcctgttggtgatcggcattaccgccattaccctgctgtcggtggtggcggggctggagaaaggcgtacgccgcctgtcggaaatcaatatgatgctggcggcgctgctgctgctgttcgttatcatcgtcggtccgaccctggcgctgctgaccggcttcttctctaatctggcctcctacctgcagtacctgccggcgctctccaaccccttcggccgtgaagacggcaacttcgtcgccagctggaccgccttctactgggcctggtggatctcctggtcgccgtttgtcggcatgtttatcgcccgcgtttcccgtggccggaccgtgcgcgaatttattatctcggtgctgattgtcccgtcgctggcctgtgtgatgtggatgaccatcctcggcaataccgccatccatcagttttttgacctgggacacaaggccgttgccgaagcggaactgccgctgcagctgtttaccatgctcgacacgctgccgctggcgcagattacttcactgatcggcattctgctggtggtggtgtttttcgtcacctcgtcggactccggctcgctggtgatcgatatcatctcggcgggcggaaaagtcaacgcgcccacgccgcagcgagtgttctggtgcagcttccagggcgtcgtcgcgatagcgctgctgctgggcggcggactggtggcgctgcagaccatggtgctgaccaccgggctgccgttcgccatcgtgctgctgattgcggcggtctcggtgctgaaaggtctggcaacggaacctcggctgcgtactaacgccagcgcggaacgcagctga

SEQ ID NO: 442931 - DNA, 1377 bp, Serratia marcescens
atgagtatcagcgtctttgatctgttcaagattggggtcggcccctccagctcacacaccgttgggccgatgcgtgccgcgcagcgctttgtccggcagttaagcgagcagggcgtgcgggatgcggtgacgcgcgtcagggtggcgttgtttggctccctgagcgccaccggcgtggggcacggtaccgataaggcgacgttgatggggctgatgggcgagtcgccggaaacggtcgatccccgcactatcgaccccgcgatccgagcggtgtgcgaaaccggctttctgaccctggccggcggggctggcgtggagtttgactggaaccgcgatctgcatttcgttgatgaagtgctggcatatcatcccaacgccatgcgtttgaccgccttcaactcgcagggcgtggcgtatgagaacacctactattcggtagggggcggttttgtgctggatgagagcgaggccaccgcgagcgcgcatctggtgccgcaggtggaactgccttacgactttaacacctgcgcggaactgctggcgcactgccggcggcaggggttaagaatcagtgagctgatgctggaaaatgaaaaggtatggcgtgatgaggccgaaatccgcgccggtatcgccgccctctggcaggcgatgcaggattgtattgcccaggggctggagaatgagggcgtcctgccgggcgggctgaacgtcaagcgccgtgctcccgggctgtatcgttccctgcagcgggcgacaggggcgaatgtgattggcaccacgctgtcggcgatggactgggtcaatctctatgcgctggcggtcaatgaggagaacgctgcaggggggcgtatggtgacagcgcccaccaacggtgcggccggtatcgtgccggcggtgttgatgtattacatgcgcttcagcgagcagacgcgggagcaggacgtggtggactttctgctggcagcggcggcggtaggggcgctgtgtaagaaaaatgcctcgatttccggcgcagaggtgggctgccagggcgaggtcggctcagcctgtgccatggccgccgccgggctgaccgaagtgctgggcggtacgccggagcaggtggaaaatgcggcggagattgcgctggagcataacctggggctgacctgcgatccggtggccgggttggtgcaggtgccctgtattgagcgcaatgccatcgccgcgatgaaagcgatcaacgccgcgcagatggcgctgcggggagacgggcagcactttgtttcgctcgataaagtgatccgcaccatgcgcgataccggacgggatatgcaggacaagtataaggagacgtcgcgcggcggtctggcggtgaacgcgatagagtgctga

SEQ ID NO: 442932 - DNA, 1155 bp, Serratia marcescens
atgtctgaaacaaatgcatcatcccgggattctatcaataacaataagacgcataccgttggttttttactggtgaacaatttcaccatgatggcgctggcgacggcggttgagccgctgcgcatggcgaaccagttaagcggccgcgagctgtatgactggcataccatcagcgaggatggcggcgtggtgatggccagcgacggcattcacattacgccggattgctccatggccgattccagcgcgctggatgtgctgatcgtggtcggcggcgtcaatattacccgcagctacagccgacgacaggtgagctggctgcaggcgatggcgcgcaagcaaattctgattggcggcgtctgtaccggcccttatctgctggcggaagccgggctgctggacggttaccactgcagcgcgcattgggagtgtatcgcctcgatgcaggaagcctatcccaaagtgcgatgtaccaatcaattgttcgttatcgagcgcgaccgcatgacctgcagcggcggcacggtgccgatggatatgatgctcagcatgatcaagcgcgattttggctatcagctgacggcggcgatctcggagatgtttatctgcgatcgggtgcgcaacgagtcggactaccagcgcatcccgctgcgccacgtgctggggaccgcgcagccgaacctggtggaggcggtgtcgctgatggaggccaatatcgaagagccgatcgatctggacgagctggccacctatgtggggctgtcccggcgccagcttgaacgtctgtttcagaagtatctgcaatgctcgccctcccgctactatatgaagctccgcctgttccgggcacggcaactgctgaagcagacctcgatgtcgattatcgaaatcgcgctggcctgcggttttgtctctacgccgcactttagcaaatgctaccgcgagcatatcggtattccgccgcgcgaggagcgacgcggtatacgcagccaggtgctgagtgaaaccctgccgcagttggtgaccaccgcgctgcccggcctgaacggcaagaaggagcgcgtggcgtcggcggtggcggtgcgcgccctgagcgaggcgcgctttgagccgacctacggttcggtgacgctgggttggagctcgccgccctga

SEQ ID NO: 442933 - DNA, 978 bp, Serratia marcescens
atggacgcagaacagttgcacaacgacgccattattatcgatggtctggtgattgcgaagtgggatcgcgggctgtttgaggatatgcggcgcggcggcctgaccgcggcgaactgtacggtgtcggtctgggaagggtttcagagcaccgtggacaatatcgtcgcgatgaacgcgctgctcgagcagaattcggatctggtgataaaggtgcgtaccacagacgatattcgccgcgccaaagcggcgggcaagaccggcgtgctgatggggttccagaatgctaatgcctttgaggatcagctcggctacgtgcagatattcaaggatcttggcgttggggtggtgcagatggcctacaacacccagaacctggtgggcaccggctgctatgagcgcgacggcggtctgtccggctatggccgggaagtggtggcggaaatgaaccgcgccggcgtcatgtgcgatctctcccacgtcggcgccaaaacctctgaagaggtgattctggcgtcggaaaagccggtctgctattcgcactgtctgccttccggcctgaaggatcatccgcgcaataagtccgatgcggagctgaagtttattgccgatcacggaggctttgtcggcgtcaccatgtttacgccgttcctgaaaaacggcatccactccaccatcgacgactatgtcgaggccatcgaatacatcttcaacctggtgggagaggatcagatcggtatcggcaccgacttcacccagggccaggatcaggcctttttcgagtggcttacccatgacaaaggttacgcccgccatctgaccagcttcggcaagatcatcaaccctgaagggatccgcaccctcggtgaattccccaatctgaccgaggccctgctgcgtcacggattcagcgaacatcaggtgcgcaagattatgggcgagaactgggtccgcgttctggctgaggtatggggcgaataa

SEQ ID NO: 442934 - DNA, 531 bp, Serratia marcescens
atgagctcacatgcacctgaactgccgattgcggtagacgacgaaactggcgtctggaccagcgatgcgctgccgatgctgtacgtaccgcgtcactttttcgtcaacaaccatatggcgattgaagaagagattggcgcagaacgctatgcggcgatcctgtataaggcgggttacaaatccgcctactactggtgtgaaaaggaggcggaagcccacggcatcagcggcgctgcggtgtttgagcactatatgaaacggctctcccagcgcggctgggggctgtttatcatcgaggcgctcgatctggagcagggcacggcccgtatccgtctggaacactccgcgtttgtttatcagtacggcaaggtcaaccgcaaagtcgattacatgtttaccggctggttcgccggcgccatggatcaggtagcccagagcctgggctatgcggtcagaacccgggcggttcagacccggagcgctgccgaagagggaagtgactacggcgtgtttgaggtagcgccgctgtaa

SEQ ID NO: 442935 - DNA, 2064 bp, Serratia marcescens
atgtcccagtttgatctcctgttccagccgttgaatatcaataagctgaccatccgtaaccgcatcgtcagtaccgcccacgccgaggtgtatgccaccgacggcggcatgaccaccgatcgctatgtcaaatattacgaagagaaagcgaaaggaggctgcggcctctgtatctgcggcggctccagcgtggtgtcgatcgacagcccgcagagctggtggagttcggtgaacctgtcgaccgaccgcatcatccctcatttccagaacctggccgatgcggtgcacaaacacggcggcaggatcatgatccagatttcccatatggggcgtcgctcacgctgggacggtgaaaactggcccaacctgatgtcgccgtcgggcattcgcgagccggtgcaccgcgcgacctgcaaaaccatcgaggtggaagagatccggcgggtgatcggcgatttcgcccgggcggcggtgcgcgccaaagaggggggcctcgacggcgtggagctttccgccgtgcatcagcacatgatcgatcagttctggtcgccgcgggtcaacaagcgtaccgacgagtggggcggcagctttgaaaaccgcatgcgtttcggtatggaagtgctgaaggcggtgcgcgaagcggtaggcccggattttgtggtgggcatgcgcatcaccggtgatgagttccaccctgacggcctgagccatgaggatatgaagcagatcgctgcctactacgacggaaccggcatggtggactactttggcgtggtcggctcgggctgcgatacccataacacgctggccaacgttattccgaatatgagctacccgccggagccgttcctgcacctggcggccgggatcaaagacgtggtgtcggtgccggtgatccacgctcagaacatcaaggatccgaaccaggcgcagcgcattctggagcagggctatgttgattttgtcggcatgacccgggcccatatcgccgatccgcacctgatcgccaagatcaaactgaatcaggttgaccagattcgccagtgcgtgggcgccaattactgcatcgaccgccagtatatggggctggacgtgctgtgcatccagaacgcggcgacctcgcgcgagtatatggggctgccgcatagtattaccaagagcgacggcccgcagcgcaaggtggtggtggtcggcggcggtcccggcgggatggaggcggcgcgggtggcggccgagcgcggtcatcaggtcacgttgctggaacgcggcgcggagctgggcgggcagatatcgatcgccgccagagcgccgcagcgcgatcagatggcgggtattacccgctggctggcgatggagctgcagcggctgggggtggcgattcagttgaataccgaagcggatgccgccacggtgcgcgatctgcggccggatgtctgcattctggcgaccggcggtcgtccgttcctggagcaaaacctggagtggggcgcggacgacgggcgggtggtgtccagctgggacatcctgaccggcgccgtcgagccgggtaaaaacgtgctgatttacgacacaatctgtgaattcaccggcatgtcgaccgccgactacctgaccgccaaaggggcgctggtggaactggtgaccgatgatatcaagcccggcgtcggcatcggcggcaccaccttcccgacctattatcgcagcctgtatgaaaaggcggtgatcatgacctcggatctggcgctggaggcggtataccgcgaaggcgacaagctggtggcggtgctggaaaacgagtacaccggccagaaagaggagcgggtggtggaccaagtggtggtcgaaaacggcacccggccaaacgaagagctgtactaccagctgaaggcggaatcgcgcaatcaggggcagatcgataacgaggcgctgtttgccgctcaggcgcagccggtactggcagagacgggcgagggcatgatcctctggcggctgggggactgtgtgtcgcagcgcaatgtccatgcggcgatctacgacgcactgcgcctgtgcaaggatctgtaa

SEQ ID NO: 442936 - DNA, 1962 bp, Serratia marcescens
atgatactcgacagattactccccgtgttgctggtgatggcattgctgctggcggcggtcggtatgatccggcggatccgcctctggcgcgccggccggccggaaaaagtggccctgctggccgggctgatggcgatgccgcgccgctatctggtggatctgcaccatgtggtggcgcgggataaggtgatgtcgaacacccacgtggcgaccgcgggcggttttgtgctgtcgatgcttttgatcctggcggttcacctgttcggcatccatagccgttggctggctggcgcgctgttaggtgcgttggcgctgatgctgaccggggcgctgtttgtctatcgccgccgtcgccatccgccggcgcggctgtcgaaggggccgtggatgcggctgccgaaaagcctgctggtcttcgcggccagcttttttatcgccacgctgcccgcggcgggcatcctgcctgaaggcagcggcggctggctcttggcggcgctgctggccggcgggatcgtctgggggctgggggaactgctgttcggcatggcctggggcgggccgatgaagcacgcttttgccggcgcgctgcacctggcatttcaccggcggccggagcgctttggcggcggacgttccaccgcgctgaaagcggtggatttggctgcgccgaagctgggggtggagaagcccgccgattttacctggaaccagctgctcggtttcgacgcctgtgtgcagtgcggccgctgcgaggcggtgtgtccggcgtttgccgccgggcagccgctgaaccccaagaaactgattcaggacatggtggttggcctggccggcggctcggacgcccgttttgccggcagcccctacccgggcatcgaggtcggcaaggcgtgcggcgctccgcatcagcctatcgtctccgggctgatcagtccggagacgctgtggtcctgcaccacctgccgcgcctgcgttgaggaatgcccgatgatgatcgagcacgtggacgccatcgttgatatgcgccgcttcctgacgctggagaaaggcagcaccccgaataagggggccgaagtgctggataacctgatcgtgaccgacaacccgaacggttttaacccgcgcagccgcaccaactgggcggcggatcagaacctgcgggtgatgaaagaggtgaagcaggcggacgtgctgttctgggtctccgacggcgcattcgatatgcgcagccagcgcattctgcgcgcctttgtgaagatcctgaaggcggcgggagtggactttgccgtgctgggggacgaagaactggactgcggcgacgtggcgcgccgtctgggggatgacgccaccttccaacggctggcgaagcgtaatctcgccaccctgggcaaataccgcttcaaccgcatcgtcaccaccgatccgcacgcttttcactgcctgcgcaatgagtacccggaattcagccccgaaggcgagaagccggattacgaagtgctgcaccataccacctttatcaatgagctggtgaaggcgcagctgctgaccctgaatgactacaagggcggcagcgtgacctggcacgacccctgctatctggggcgctataacggcgaatatgaagccccccgcgagctgctggcggaactgggtattcagccggccgagatggaacgttccggctttcgttcccgctgctgcggcggtggtggcggcgcgccgattaccgatatccccggcgagaggcggattgccgatatgcgcatggaggatgcccgcgccaccggcgccgaactggtcgccgtcggctgtcagcagtgcaccgcgatgcttgaaggcgtggtggagccgcgtccggtggtgaaggatattgccgaactggtggccgaggcgctggtggagccgagcgcaccgccggcggccaggcgcaagagtgaacaacctgcgatggaggtagcctga

SEQ ID NO: 442937 - DNA, 1239 bp, Serratia marcescens
atgagcgagattctgcgcagagacccgcgcgccgaatggattgcgcgcaaccgcctgcacccgcagcatgcggccatgatgatgccggcgggcgaatcacgtggcccgtccgggctgattcgccgcaacccgcacgccgtaggttttatcggcccgaacggcctccgccgcattgaccggatgaatgtcggcgctccggtcggccgcgccgggccgcggacggtcagcgcgctgcagacgacggcgctgccgctgcaccgggtggagcaggtggaatactacattgcggtagtgcccgatatggtgggtggccggctgagcgatcacgaccgggatgtgttgggtcaggcccatgcgctgattcgcgaaatcggcggcgccggagcggtgctggccgtggtgttcggcgatcaccgcgaacaggcgtttgataccgccggcgtcgaccggctgttggaactgaacggcgacggctatcaggcgtatgcgccggagctgcgggtcgccgtcctgaacgaggtcgacagccagtttgcaccgcgtcactggctgctgccggacagcgtagccggcggctttgagctgggatgccggctggcggcgcgtcttggcgaacggccggcgacgcaggcctggcgggttgatgccgcacagagcgtctgccgcggcgccggcggcagcaccgatattatccgcgccacgccgcgtatgctgctgctggcatcggagtgcgccgaaccggttgacgaaacccgccacgaggcattgccggtgcagttgcaccagacggtaagcgtggcggcgcgcattcgtgatgacgggcaggtggcggtggatcccaacgcggtggcgctggcagaggcggagtttatcctttcggcgggcaacggcgtgcaggactggacgctgtttcaccagtgcgccgaagcgctcggcgcgacggaaggcgccagccgggtggcggtggacgatggccatatgccgcgccagcgtcaggttggcgctaccggcacctgggtcaccgcccgggtttatgtggcggtgggcatttccggcgccattcagcatttgcagggcatcgggcagtgcgacaaggtgatcgccattaacaccgatgccggctgcgatatggtgaagcgcgcggcgctcagcgtgattggcgacagcagcgagattatggcccagctgatccggctggtcagggagcaccatcagggggagtttgaacatgcagcctga

SEQ ID NO: 442938 - DNA, 804 bp, Serratia marcescens
atgcagcctgaaaagcatcatgcagacctgcgcgtgacagcgctggtatcgattggcaagcaccccggctctgcgcgcgagcgccgcgccgggcaggacgcccgggccgtcgagctgggcatgacgctggcgtctgatgggctggaagtgcttcatgcgggcgatcctcacgccgaggcgctgcgcagctatgcagggatggggctggacgtcctgcgggttctggatcaggaggaggatgcggatgtggtgccggcgctgtgccgttatctgagccaggataaaccggatattatcctgaccggcgtacgggccgagagcggcgaatcgtccggtatgctgccttacctgctgggggaggcgctgggtatgccggtggtgaccggcattgccgatattgtcgctgtcgatggcggcgaggcgcagctgctgcaggcgttgccgcgcggccagcgccgggcgctcagggtgccgctgccgtttatcgccagcgttgatatggcggcgccggcgccgcgccagagcgcatttggccccgccagccgggcgcggctggaaagcacgccggcaggcattgcctgtcccgatgaggtcagggcgcagtggagcgaagcgccggcccgcaagcggccgaagcgcctgcaggtggtgaaggcgaaaaccgccgccgaccgtttcaaggcggcgaccgcgaagtcgcagggcgacggcggccgtatcctgcgcgataagccggcgcctgagatggcacaggcgatattcgatctgctgttggaggaaggcgtggtgcgtggcggccggtga

SEQ ID NO: 442939 - DNA, 1323 bp, Serratia marcescens
atgagtcataacgatctgctgaatatcacctgcgccagcattaccgatgcgcgcgaacagatggccgacttgctcaaaaggcgccagccaaactattcgctgccgcagccgctgtataacgatccggccctattccgcattgatatggaggaagtgtttcagaaagagtggctgttcgttggcatgaccagcgaaatcccgaaaaagggcgactacttcacccttgaaatcggccagaacccggtgctggtggtgcgcgacgccgacggcgcggtcaacgctttccacaatacctgccgccaccgcggctcgcgcatctgtcagcagccgcgcggcaaggtagcgaacctggtctgcccgtaccaccagtggacctacgatctgaagggcaacctgctgtttgccggcacccatatgggggacggcttcgagccgcgtcagcacggcctgaagccggcgttttgccgcaccgccggtggttttatctttgtctgcatcgcggagcagcagccggaatccgacttcgatgacttcctggcgacgctcgaagaatatatggcgccgtacgacgtggagaacaccaagctggcgaccgaatccgagatgtatgaaaaggccaactggaagctggtgctggaaaataaccgcgaatgctaccactgcgcaggcagccacccggaactgctcaacaccctgctggagtgggacgacaccaacgatccgcgcgccacgccggagtttatcgactactacaaccagcaggccgaacggtgggatcaggaagggatcccgcatcgccaccaaagctttggccagcgcaaccgcatcgtgcgtatgccgctgaaaccgggggccaacgtgatgaccatcgacggcagcgaaggctgcaccaaactgcttggccgcattcagagccgccagttgggatcgatgcgcatcctgcacctgcccaactcctggaaccacatgcagagcgatcactttatcgtgttccgggtgctgccgatctcggcccaggagtcactggtgaccaccaaatggtttgtgcataaggatgcggtgccgggcgtcgactacgatccggagcgcctgcgccaggtctgggatgccaccaacgatcaggatcgcgttctgggtgaagagaaccagcgcggcattaactccatcggctatcagcccggtccttactccgaaacctacgagttcggcgtgatcaacttcctggagtggtacagcgataccgtgctgaaaaatctgggcgagacggataacagcgagcactacccgatcggcgtgcccgacgtcgaacgacaatatggctga

SEQ ID NO: 442940 - DNA, 1128 bp, Serratia marcescens
atgaccaaccagactatttcggtagtaaatagcggcgcttttgagcccgtaaccacccagacttggatcaacggtcgtcatgctgtgcgttgcgtcaaagtgattcaggaaacctgggatgtaaaaacctactgctttatggccgagcagccgatcatgttcttctttaagcccggccagttcgtcactctggagctggagatcgacagcgagcaggtgttccgttcctacaccatttccagctcgccgtcggtgccctacagtttctcgatcacggtcaaacgggtgccggggggtaaggtgtccaactggctgcatgacaacatgagcgaggggatggagctggcggtgcatggtccggttggccagtttaactgtatcgataacccgagcgaccgggtgctgtttctgtcggggggcgtcggcattacgccggtgatgtcgatggcgcgctggtattttgataccaacgccgacgtcgatatggtgtttgttcacagcgcgcgtacgccgcgagacattattttccagcgcgatctggagaatatggccgcgcgcatcgccaactttaagctgaacctgatttgcgaacgctatgagtcaggccagaactggggcggctatcgcggcttctttaatcacgcgatgctggaaatgatggcccccgattttatggagcgcgaagtctactgctgcggtccggcgccttatatgaaggcggtgcgcaacatgctgcaggaagccgggtttgatatgcgtcgctatcacgaggaatcgttcggcgcgacgccggagccggtaaaagagcaggcgcagcaggatgccgaacaggcggccgaagaggccgaagcgataccgcgttccgacctgattcaggtgttcttcgccagcacgggcaagagcgtgcagatcgcgccgggggaaaccgtacacgccgccgccgccaaactggggctgcacatccccaaagcctgcggcatgggaatctgcggcacctgcaaggtgaagcggctggagggcgcggtcgagatggcgcataacggcggcattaccgatgaggatgtcgaagagggctatattctctcctgctgcagcgtgccgacgggggatgtggtggtggagtattaa

SEQ ID NO: 442941 - DNA, 1290 bp, Serratia marcescens
atgagtacgcccgcccacacgccggctgccggcaataagcagcatctctacaaaacgctgttcgccacctgcatcggcaacgccctggaatggttcgatatcgccgtttacggctttttcgccaactatatcgcccatgccttctttcccaccgaagatcccgccgtctcaatgctgctgaccttcggcagcttcggcgtctcctttctgatccgcccgctgggtgccgtagtgctgggcgcctacgccgaccgcgtcggacgtaaaaaagccctgctggcgtcaatcagcctgatgatgctcggcggcgttatcatcacctttatgccgtcttacgccaccatcgggctggcggcaccgctgatgatcctgctcgcccgtctgatccagggtttctccgccggcggcgagttcggcagctcaaccgcgtttctggtagaacacttccccgaacgcaaggcgtttatcgccagctggcagtttgctacccagggggccagtaccctgctggcctcggcgtttggtctgggcatgacctactggttgagcgaagcgcagattcaggaatggggctggcgcattcccttcgccttcggcctgttgattggcccggtagggctgtatattcgccgtcacgtccatgagccgcccaccttcaaacagcatgtgaaagccagagcgccgctcaagacgctgctgggcagtcaaaaacgactgctgctgttggctatcgggctgatggtgatctccaccgccatcaactacatgctcaactatgtgccgacctacgccaccaagaacctgcatctgccggggtcggtggccttcagtgcaacgctgctggccggcgtaatcctgacggtggtgacgccgctggtgggactatgggcggaaaaagtcggccggctgccgttgatgtggggttcgctgctgttgctggtggtcagcatctacccggcattccgtctggtggtcaaccacaccacgccgctgaccctgatgctgctggtcggctggatggcgctgctgaaatcggtgtatttctccacggtgccgtcggtgatggcggatctgttcccgatggagacccgcgccagcggtatggcgatcggctataacgtggcggtgacggtgttcggcggctttgcgccgctgatttgcaccttgctgatcagcatgaccggcaccagcctggcgccaagctactacctgatgatggtggcgctgctgagcggctgggcgttgctgagcagccaacaccagctgcgcggcgtcgcgcgcgcatcataa

SEQ ID NO: 442942 - DNA, 1416 bp, Serratia marcescens
atgacgggtgaacaggtggtacaacaggcaaacgcctattttgacagcggggcttttcggcaggtgctggcgcgccgtattgccctgcaaacggaaagccagcggcaggatcgcgatgcgctgctgatgcaatacctgcagcaggagatcatgccgccgctgcgcgcgctcggctttgaacttcatctgtgcgataacccggaagcggccaaccgaccgtttctgatcgccgtacgcatcgaggatcctgcgctgccgaccctgctgagctacggccacggcgacgtcgtcttcggcgatgatgacaactggcgcagcgatctctccccgtggcagttgcatgaggaaggcgatcgctggtacgggcgcggcagcgccgataacaaagggcagcacagcatcaacctcgccgctctggagcaggtgtttcaggcgcgcggcggcaggctgggttttaactgcaaactgatcttcgaaatgggggaagagatcagctccccgggactggcggagatctgccgccgtcagcgagatctgctgcaggccgatctgtttatcgcctccgacggcccgcggctgaacgccatgcagccgacgctgttcctcggctcacgcggctgcgtcaatttccgcctgagcattcgcgcgcgggataacgcctaccattccggcaactggggcggcctgctcagcaaccccggcacccagcttgccaacgccctcgcctcgctggtcaatcagcacggtcagctgcaggtcgccgcattacagccgccggcgctggatgacgccatgcgcgctattttgcgcgagctggatgtcggcggccaaccccacgacccgcagattgatgaaaactggggtgaaacaggattaacgcccagcgagcggctctacggctggaatacgctggaagtactggcctaccagaccggcaatccgcaacggccgatgaatgccatccctgccagcgccacggcggtctgccagctgcgctttgtggtcggcaccgactggcagcggctggtcgagcacctgcaggcccacctgcaagcgcacggctttggcaatgtcgaggtggagtggctgcgcggctcccccgccacccgcctcgatcctcaggatccgctggtacactgggcgcttgatatcatgcagcgcaccagcggtaaaaaaccggcgttgctgcctaacctcggcggttcgctgcctaacgacgtgttcgccgatattctggggctgcccacgctgtgggtgccgcattcctatccggcctgcggccagcacggtgtaaatgaacatatgctgcaatctatcgcccgtgaggggttgcagattatgacgcgcctgttctgggatctcggcgagaacggtggtgacgtgctggcgcagcgccggcgggaggcgacacgatga

SEQ ID NO: 442943 - DNA, 921 bp, Serratia marcescens
atgatcagtagtgaagtgcgtttttttctggcggtggccagcagcggttcgctgagtgccgccagcgaacagttgtttgtggcggtatcggccatcagccgcaagattcagcgcctggaagcgcaggtgggggcgccgttgtttgagcgccatgcgcgcggtatggtgctgaccgaagccgggcagatttttgagaatcacctgcgcaagagcttgctgaatattgaacaggcgatggcggaaattaaggggctgaaagcggtgcggcgcacggcgctgcgcgtggcgtgttccaacggcctggccttttcgctgctgccgcaattgatggcccgttttcgtcagcagaatccggaggtgacttttgtgctgacggtggcggacagcaaaaccctggcgcgtctggtgcgcaacggcgaatgcgatctggcgctgcagttcagcctacaccccgagcagggggtggacgtgcttgcctcgtgggcggcgccggtattgctgctgatgcacagcgatcatccgttggcgaatcagcaggtggcgctgaccgacctgtgtcagtatccggtgtgtttgccggagccgagcaccaccatacgccagctgtttgatatctgctgccagatgagcggcacctttattgagccggttttgacctgcgataactttgccgcgttgttcaattttttgcaggtttcaccgcgcgcggtgtctatttgcagccaattcaccgtattgccgctgttgcaacagcccatcaccatcaaatcttttggcgttgaccagctcagccagcgtacgctgcagttacagctgccgccgggccggcagcgcagcgccgcgctgcagctgtttgttgaatttgtcagcgacacgctgaaccaggaggatagcactgtacgccggcgctatgcgctatag

SEQ ID NO: 442944 - DNA, 546 bp, Serratia marcescens
atgactaatcaaagaattattctgaccggtggcccgggatcgggcaaaagcacactgattgacgccctgacccggcgcggctatgcatgcaccacggaatcaggcagagccattattcaggaacaagtcgccagtggcggtaatgcgctgccctgggaagagcgccaggcgtttgccgaactgatgctgagccgggagatacgtgcatggcacagcgccggcaataccgacgctccatactttttcgaccgcggcatccctgacgtggcgggctatctaacgctttgccaactttccgtacctgctcatctggagcaggcgatagcgcactttcgctatgccgagcgtgtgtttatcgccccgccgtggcgtgaaatttatgctcaggatgcagagcgcaagcagtcgttcaccgaggcggagatgacataccgggtaatgcgcgaaacctatcagcaatacggttaccagctgctggaactgccgcgcgcgtcggtcgctgaaagagtaagtttcgtgctcgccgccttgcgacattcagactga

SEQ ID NO: 442945 - DNA, 642 bp, Serratia marcescens
atggatgctaaagcactggctcaagccatagcctctggactgatctccgtccctgttgatttctatttgggtgtcgagagaacccttcaggatctcaacctcgcggacggaggtgttcgagttcagcgcagaaatttcaacgatgatcagcgtgtgtaccgggcattgcggaacctataccgcgacaggagtacactgtctaaaatcgctaaaatcatcatcaacgatgccctatcccacctacctgaacccgctttaaggaaaatccacgatacgatggttggcggtgccaccacgttaggttcacgctttacacttcagctggccatatcaagttatctggggtcaaaagtggttagtggtgcaatgatgggagctgcggcaaaactattcaccaggctaggcactggcgcgatgtttggcggcgttgttctccaggggcttatctcccgggcttgtagcgcctcccgtagactgcagatgagcaatcccaagctatggcaactgctggctatcaacgactacgatatgctgtacttccttttcgaagagccactgaagccgatcactgaactcagtgaaacattgcggaaaaacccagctaagtcggagcaattcttacgtgaaatcgaaaatctttag

SEQ ID NO: 442946 - DNA, 1779 bp, Serratia marcescens
atggtgacaaaccgtcagcgttatcgtgaaaaagtctcccagatgatcagctgggggcactggttcgccttgttcaatattctgctcagcattgggttgggcagccgctacctgtttgtcaccgactggccggcctcgctgctcggccgcgtctatgccatggtcagcgtgttgggacacttcagctttatcgtgttcgccagctatctgctgatcatcttcccgctcaccttcgtggtgatgtcgcagcgactattgcgctttatctccgccacgctggcgaccgccgggctgacgctgctgctggtcgacagcgaggtcttcacccgcttccacctgcacctcaaccccgtggtgtgggaactggtggtcaacccggaccagagcgaactggcgcgcgactggcagctgatgtttatctgcgtgccggtcattttcctgatcgagatgctgttcggcacctggagctggcagaagctgcgcagcctgaaccgacgcagcttcggcaaaccgttggcggcactgtttatcgtctccttttttgcctcgcacctgatttatatctgggcggacgccaatttctatcgccctattaccatgcagcgcgccaacctgccgctgtcatacccgatgaccgcgcgcaagttcctggagaagcatggtctgctcgaccctcaagagtttgagcgacggctggtgcagcagggcgatccggaagcggcaacggtcgagtatccgcttaacgatctgagctaccgtgataacggcagcggctacaacctgctgatgattgtggtgaacggtatccgcaatcaggatgtggcgcaggatatgccggccctcacccgcttcgcgcaggaaaatgttcgcttcaccgatcattacagttcaggcaaccgcgctgacaccggcctgatggggctgttctacggcatttctccgacctatctggacggcattctggcctcgcgcaagccttcggcgttgattaacgcgctcggcgcgcagggctatcagttcggcctgttctcctcagacggctttaatgcgccgctgtatcgtcaggcgttgctgaccgacttctcgctgcctgccccgcaggcgcaaagcgatgccgccaccacgcagcagtggcagcattggctgaccgctcagggcggcgctatgccatggttctcgtacctcaacttccgcggcggcgacgcgcaggacgcgactccgacagcgcctgacgactttatgcaacgctaccgcagcggcgcgcaggatgtcgatgcgcaaatcgcccaggtgctgaacacgctgaaagcccgcggcatgctggagaaaaccgtggtggtcatcaccgccgagcatggcgtagagttcaacgacagcggtaaggatcaatggggcgcgggcagcagcttcagcccgctgcaactgcaggtgccattggtgattcactggccgggtacgccggcgcagaccatcaataagatgaccagccacaacgacgtgatgcgcaccttgatgcaacgcttgctgcacgtaaaaaccgctgccaacgactattcccagggcgaagatctgtttaccgcccagcgccgccataattgggtgacgaccggcgacagcaagcagttggtgattaccacgccggaacagaccatcgtgctggataataacggcagctaccgttcatacgataagaacgaccgtgagataaaagatgaaaaaccgcagctggccctgctgctgcaggttctgaccgatgtaaaacgctttatcgccaactaa

SEQ ID NO: 442947 - DNA, 285 bp, Serratia marcescens
atgttcactatcaatgcagaagtacgtaaagagcagggtaagggtgcgagccgccgcctgcgcgcagccagcaaattcccagctatcatttacggtggcgaagaggctgcaatcgctatcgaactggaccatgattctgtaaagaacatggaagctaagccagaattctacgatgaagctatcgtgctggttatcgacggcaaagaaactaaagtgaaagttcaggcagtgcaacgtcacccgttcaagcctaaactggctcacatcgacttcgttcgcgcttaa

SEQ ID NO: 442948 - DNA, 345 bp, Serratia marcescens
gtggacagtatccaactttcggtagtgcatcgcttgccgcaaagttaccgttggctatcggggttcaccggcgttaaggttgagccgctgccgttgaacggtatcgacgaagataacaacctgattggcctgaaactgctcagtcacgatggcaatgaagcctggcgcgtgatgcaacagcttaaactttccctgcaggaaattcaggtcgactgcgccgtggtggaatgggaaggggagccttgtctgttcgttcacagccgggacgagagcgccaccatctgtcgcctgaaaaatgtcggtgcggcgatcgccgaaccgatgagcgcgcaatatcctttctga

SEQ ID NO: 442949 - DNA, 1803 bp, Serratia marcescens
atgtccatgcgcgtttttgctgctctggtgctttcagccctgagtttaggtgtacacgccgaacagcttaatgagagctacgctttcgcgttgctcggcgatcccaaatactcaaacgatttcagccactacgactacgtcaatccggcggcgcccaagggcggcgatatccggttggcggccatcggcggctatgacagcttcaaccgctacgccagccgcggcgtgccgggtcaacgcaccggcgagctgtacgatccgctgttcgccacctcggatgacgaaccggggagctactacccgctgattgccgaatcggcgcgttatccgcaggatatgcgctggatggagctgaatatcaacgcccttgcccgttttcaggacggcagcccgattaccgccgccgacgtggcgttcagcttcaataagtttatgactgaaggcgtgccgcagttccgggcttattaccggggcattaccgtcaaagcgatctcccgcctgacggtgcgcattgaacagtccagaccggatcgcgtgcagatgctcagcctgctcggcctgaaagtgctgccgcagagcttctggcaaaaccataagctcagcgaaccgctcagcacgccgccgctcggcagcgggccgtataaaatcagcgactatcggctcggccaatctatcacctatcagcgcgtgcgtaattactgggccgcaggtctgccggtcaaccgtggccgtttcaatttcgatactatccgctacgagtactacccggacgagcaggcggcgctggaggcctttaaggccggtgcctatgatttccgcagtgaaagttcgcccaaaagctgggccagccagtatcagggcgacaatttcacccgcggctatatcgtcaaacgcgacgacgtcagtcaggcggcgcaaaacgcacgctggctggcgttcaatattcagcggccgccctttaacgaccgtcgggtgcgtgaagccattacgctggccttcgacttcgagtggatgaataaaaccctctacaacaatgcctaccaacgcgccgacagctattttcagaacacgccttatgcggccaaaagctacccgaacgccgaagaactggcgctgctggcgccgctgaagggcaaagtgccgccggaagtgtttaccggtatttatcagccgccgcgctcggacggcagcggcaacgatcggcaaaacctgcttaaagcggcccagctgttgaaagaggccggctgggaacccggcgaccagcggctggttaatgcccaaggtcaaccgctgacctttgaactgctgctgccagacaacagcacattccagtatgtacagccgttccagcgcaacctgcagcggctgggcatcagtatgaagctgcgcaacgtcagtgcaacccagtacgcccagcgcctgcgcaagcgcgattacgatatggttgcgatagtctatccggccatgccgtatcccaacgccgatttaccgttttattggagcagcggcaggcttgatgccggccataacgcctccggcgtcagcgatccggcggtcgatacactgatcgcgcagatcgttaaaaaccaaaataacgcgaaagcgctgctgccgctcggtcgcgcgctggatcgggtgctgacctggaaccattatatgctgccgatgtggtactccagccacgttcgctacgccttctgggataagttttcctccccggcgatccgccctgccaacgctatcggtcttgatgactggtggttcgacgtaaataaagccgcgcgtttaccggcgcagcggtaa

SEQ ID NO: 442950 - DNA, 1593 bp, Serratia marcescens
atgggtttaaaaaaggcatttacccgccatctatcacatcgtcggcgtagtctggttaaaagttgtatggtggctctggtcttttttatccttttcagctcggtaacgctgtccctgatctatcaccagcgcgcgcaatttcatcacgaactggcacagcgcacgcaacggttcaccattaattatttaaataccctgaccggcgtgatgcgcaatatactgccgctgacccaggaaagttgtcggtcggcgcagccgaatatcggctatcgcgccgcttttacccccgatgttcgcacttttctgctgatcaaaaacggcgtcgcttattgttcatccgccaccggcgatatgaggctcggcctgaaagccatttcaccggaaattaactggcatcagccgctggatatgaaattgcagtcaggcacgccaatgatcccgtaccggccggcggtgatgatctggctgcgtaaacccggcagcagcgccgacggcgtcctcgccacgctggatatcgatatgctgccctacttactcagtgcccccggctccaaaagatccggcgtggccgtgattatgggcacccgcgccttaaccaccttctctaccgatctgatcccgctgaaccgtttgccagattatcagtccgaccgattatccatccccggctatccgctggcgctgctgttctataatcagaagctcaccagcaacgatatccgcctgacgttgcttgccgggttgatcctgtccctgttgatcggcgtgctgtgctattacgccatgctgctgcggcaaagcccggaacgcgcgctgatacgcggcataaagcgcaatgaattcttcattgaatatcagccggtattccataccgccagcaatgccgtttccggtctggaggcgctactacgctggcaacacccgacagagggccgcatcccgccggatctgtttattccctatgccgaaagcgaaaatctgatcgtgccgctgacgcgccacctgttcaaactgattgccgacgatgccgccaggctggcccaggcgctgccgccgggcgccaaactggggatgaatatcgcgccttcgcatctgcgcgctccgagcttccatcaggatgtgctggagctattaacccagttgccgcagcacgaccttacgctggtattcgaaatcaccgagcgcgatatggtggaggaagactgcgcacagcaagagtttgactggctacaccgccaggggatcgaaatcgcgattgatgatttcggcaccggccacagcgcgctgatctatctgcaacgctttagcatggactacctgaaaatcgaccgcggattcgtcaataccatcggccgggagaccgtcaccgcgccggtgctggatgcggtgttggcgctggcggataaactgaagatgcgtacggtggccgaaggggtggaaaccaccgaacaggttcgtttcctgcagcagcgcggagtgagtttcatgcagggatactactttagcaagccgttgaaaatagatgattttgttgatttttgtcaaacgaactcggtctataatagcctgaccggcgaaaccaccggtccctga

SEQ ID NO: 442951 - DNA, 654 bp, Serratia marcescens
ttgagtacacctcgcgaaacatccgcaaaaaacacccgcaaaaatgaccccgaagggctgaagcaacgtattttcgccagtgcgctggcggagttctccgaggcaggcctgaagggcgcgcgcctggagcgcattgccgagcaggctgacaccaccaaacgcatggtggtttatcacttcaagaataaagagtcgctgtatatcgccgtgctggaatacgcctatgcgcatatccgccaggatgagatggcgctcaatctggcgacgctgccgccgcaggccgccatgcagcgcctgattgaggccaacttcgactatcacatcgcccatccggcatttatccgcctggtcagcctggaaaacatgcagcgcggtcagtacgcccgccagtcggaaaagttgaaattactcaatatcagcgcgctgcagacgctggaggatattttacagcggggtaaacggtcgggattattctccgaaaaaatgaacgcgcgcgatgtgcaccgtattatcagcgccctgtgttttcaccacgccgccaaccaatatacgttcgataccttatttgaaggcaaccgcacggcggaagaaaaattggcccactaccgacaaatgacggtggaagtggtgatgcgttatttacagtgcgaataa

SEQ ID NO: 442952 - DNA, 579 bp, Serratia marcescens
atggtcaaatctcaaccttttctgagatacatgttgcggttggtacccgcaatggcggcagcggtcctgctctccgcatgtagttcgactcacacggccaatccggatagcgcgcaaactgagatgcgtgcagttaatgacaaagacggtcttttactgcaagcctctcaggatgaattcgaggccatggtgcgtaatgttgacatcaagtcaaaaattctggaccagtatgccgactggaaaggcgttcgctaccgtctgggcggcgaaagcaaacgcggcatcgactgctctgcctttgtgcaacgcaccttccgcgagcagttcggcatggatctgccgcgctcgacctatcagcaggaagatatgggcaagagagtgcagcgtagcaagctgcgtccgggcgacctggtactgttccgttccggttccaccggtcgccatgtcggcatctatctgggtaacgatcagttcgttcatgcgtcgaccagcaatggcgtgatgatttccaaactgtccaacgtttactggaacaagcgctatcacgaagcgcggcgggtgttgaccaacaacagctga

SEQ ID NO: 442953 - DNA, 711 bp, Serratia marcescens
atgacgcgccgtaatcttccccgtattctgctccttaatatcctgggcatcgccttatttttgtcctggtatttacctgccaaccacgggctgtggtttaaaatggattcggccattttcttcttctttaaccagcacctggccagcgacccaacgtttttgcacctggtcgccattaccaataaccgcgcctttgacggcatttcactgatcgccatggggctgctgtatctccatttttatctgaaacaggacgccagcggccgccgtcgtttgctggtgaccggcgtggtgatgctgctgactgcggtagtgctgaaccagttagggcacctgctgccggtaaaacaccccagtccgactctgacctttgacaatatcaatcgcgtcagcgagctgaccggcatcccgaccaaagatgcctccagcgacagttttcccggcgaccacggcatgatgctgattattttcgcctgctttatgctgcgttactttagcgtctgggcctttatggtcgccctggcgatcgttgtggtattttcgctgccgcgggtgatgatcggcgcgcactggttcaccgatattgcggtcggttcgctgtccgtggtgctggtcggcgccagctggtggctgatgacgccggccagcgacgccctgattgacgggttaaatcgcctgttgcccggcaaacaccgcccgggccggtcataa

SEQ ID NO: 442954 - DNA, 312 bp, Serratia marcescens
atgaatacccataggtttgtcactgccgtaggcgcattgtgtttatggatggcggccggcgatgtcggtgcgctcggcggcaccgtccattttattggtgcagtggtggaaagcccttgcgagctgaatattacggcaacggcggcgcggacggaatgttatcgtaacgggcgcgactatcaaagcctgcagcacaccctgccaaacttcgatactacacgcaaagaactgccgcggaatttaggcactacagaaattcgctgggtggaccagcagcagcaactcgccatgatgacggtggactatcgttaa

SEQ ID NO: 442955 - DNA, 1479 bp, Serratia marcescens
atgaacacgatcgccaaccagccgcttcccgccgatgtccaacagccgagttacgaccgcagcgccctgcgcagccgcatcgtgcatatcggcttcggcgcatttcaccgcgctcatcaggcattactgaccgaccgggtgcttaaccgtcagggcggcgactgggggctgtgtgaaatcagccagttcagcggcgacaagctgtttgaaacgctgcgccggcaggatcatcgttatacggtgctggaaaaaggcgccgccggtaatcaggcgatcgtcatcggcgcggtgcatgaaagcgtccaccgtaaactggaaggcgtggaggcggtgctggaaaaacttgccgaaccgcaggtggcgatcgtgtccatgaccatcaccgaaaaaggctactgcatcgaacccggcagcggacgactggatctgcagcatcaggcgattcgcgacgatctggccaaccccggccagccgagcagcgtgccgggactgctggttgaagccctgcgcctgcgccgtcagcgcggcctgccgccgtttaccgtattgtcctgcgataatattccggaaaacggccgcgtcgtgcgccatgcggtgatcgatctggcgcaggcgcgcgatgccgacctggcggaatggatcgcggagcaggtcaccttccccagcaccatggtcgaccgcatcgtgccggcggccacgccggaaacgctggatgaaattgcaaccgcgctgggcggcgtccaggatgagtgcgccatcgcctgcgagccatttattcagtgggtggtggaagacaatttcgtcgccggccgccccgagtgggaggtcgccggcgcacaactggtggacgatgtgctgccgttcgaacagatgaagctgcgtatgctgaacggcagccactccttcctcgcctacctcggctatcttggcgggtatcaacatatcaatgactgtatgaccgacgccagctaccgtcaggccgcccgccggctgatgctggcggaacaggcgccgacgctcagcgtcagcggtatcgatctcgccgcctatgccgaccagttgatcgaacgttacagcaactcggcgctgcagcaccgcacctggcagatcgccatggacggctcgcaaaaactgccgcagcgtatgctggattccgtgcgctggcatctggcgcacggcggcgattataccggcctggcgctgggcgttgcaggctggatgcgctacgtcggcggcattgacgacgccgggcaaccgatagacattcgcgacccgatgctgagcaccctgcagcaggtggtcggcagcacgccggacgacgaacgccgggtacaggcgctgctggcgttaaacgccattttcggcgaggccttgccggagagccaggcatttgtcgaagcggtgacgcaggcctatctgtcgctgcgcgatcgcggtgcgcgccagacggtgcaggcgtgggtcagtaaaggggaataa

SEQ ID NO: 442956 - DNA, 1242 bp, Serratia marcescens
atgtctgcggacagtatccagaaaatttcccgcccctcagtacttggcggcgccatgatcattgccggcaccgccgtcggcgccggtatgttctccatccctattgtaacttccggcgtatggttcagcggttcggtcgcgctgctgatttatacctgggcctgtatgctgatttccggcctgatgatcctggaagccacgctgcactacccggccggcgccagcttccataccgtggtcaaagatctgctcggcaacgtctggagcggtatcaacggcctgtcgatcgccttcgtgctgtatattctgacctacgcctatatttccgccggcggctcgattatcgcccatacgctggggaacagcgtcggcgcgggccagaccggcgccggcctggtgtttgccgtgctggtggcctttatcgtctggctgtcgacacgcgccgtcgaccggctcagcaccattcttatcggcggcatggtgattaccttcgcgctgtcggtcggcaatatgttcactcaggtgcagccggcggtgctgttcgatctgcataacagcgacgccagctacatgccgtatgcgctggccgcgctgccctatctgctgacatcgttcggctatcacggcaacgtgccggggctggtgaagtattaccataaagacagccgcgcggtggtgcgcagcctggtgtacggcacgctgctggcgctggcgatttacatcctgtggcaatatgtgattcagggcaatatcgcgcgcgacgcctttaaacaggtgatcgccgaaggcggcaatatcggcagcctgctgaagcagatgggcaacagcagcagccagaccgtcagccagctgctgaacgtgttctcctatatggcgctggccagttcattcctcggcgtatcgctcggcctgtttgactatattgccgactttttcaaattcagcgacgacggctgcggacgagccaaaagcgcgctggtgaccttcgcgccgccaacgctggcggccctgctgttcccgaacggtttcctgtacgccatcggctttgccggcctggcggcgacggtgtgggcggtgatcgtgccggcgctgatggcgcgcgccagccgccgccgcttcgcgcagtcagactatcgtgcgcccggcggcctcggcatgattgcctttattattctgttcggcctgattaacgccgtcgcacactgtctggcgctgctgggcatgctgcctgaatttaaataa

SEQ ID NO: 442957 - DNA, 255 bp, Serratia marcescens
atggaatgccgtattgattgtggggcctgttgtaccgcgccttccatatccagcccgataccgggcatgccggatggcaagccggccaatactccctgtatccatctggatgagcgcctgcgctgcgggttgttccactcgccattgcgcccgaaagtctgcgccggtctgcagcccagccgcgagatgtgcgccgacagccgggatgaggcgctgatctatcttactcgcctggaggcggacaccgccccttaa

SEQ ID NO: 442958 - DNA, 423 bp, Serratia marcescens
atggcggtgttaacgggcatcggggtgattatcgtcaacccacagggggaagtcttggtgggcaaacgctgcggcagacacgcgccctactggtcgattcccggcggccatctggaggccggcgaaagcttcgaacgctgcgcccaacgcgaagtggcggaagagaccgggctgcatatcgctacaccgcagtttgtcggcgtatgcaataacctgcaaacctggcgcgaagaaggcaaacacaccgtatccatctgcctggtcaccgcacaccccggcggcgaagcggtgctgaaagagccggaaaagtgtgccgaatggcgctggtgccggccggaggcgctgcccgagccccactttgaagccagccgcatggcgatctacctctggcagcaccagctggcctaccacgccccacgctga

SEQ ID NO: 442959 - DNA, 1692 bp, Serratia marcescens
atgaaaacgctgctgataattgacagttcacaggggcaggcgcgcgggcacctggcgcaacgcatgctcagcgctgcggcggccaaagccggcctgcagttggttgatgcgccggcggaggccgaactggtggtggtcgccggggcggccgtgccggcggacgaagcgctgagcggcaaggccgtgtatctgggcgatgttgaacacgcggtgcgtgatgccgacgccttcctggcgcaggccaaacgcgacgcggcgccgtatcaggcgccggccgccgcgccggttgcggcgcaggccagcggacaaaaacgtatcgtggcggtgaccgcctgtccgaccggcgtggcgcacacctttatggccgccgaggcgattgaaagcgaagcgaagaaacgtggctggtgggtgaaagtggaaacccgcggctccgtcggcgccggcaataccattacgccggaagaggtggccgaggcggatctggtgctggtagccgctgatatcgaagtggatttggacaagttcgccggcaagccgatgtaccgcacctctaccgggctggcgctgaagaaaaccgcgcaggagctggacaaggcgctggcggaagcggaagtgtttcagccgcagaaaggcggcgccgcccagtctaccggtgcgcagaagaaagagggcaacgggccgtatcgccacctgttgaccggggtctcctatatgctgccgatggtggtggcgggcggcctgtgtattgcgctgtcctttatgttcggcatcaaggcgtttgaagagccaggcacgctggcggcggcgctgatgcagattggcggcggttcggcgctggcgctgatggtgccggtactggccggctatattgccttctccattgctgaccgtccgggcctgacgccgggcctgatcggcggcatgctggcggtgagcaccaacgccggcttcctcggcgggattatcgccggtttcctggcgggctatgtcgccaaagccatcagcggcaagctgcgtctgccgccgagtatggaagcgctgaaaccgatcctgatcattccgctgtttgccagcctgatcaccggtctggtgatgatctatgtggtcggtacgccggtcgcgagaatcatggaaggcctgacccactggctgcagtcgctgggtacggcgaacgcggtgctgctgggggcgattctgggcgccatgatgtgcaccgatatgggcggcccggtcaacaaggcggcctacgcgtttggcgtggcgctgctcagttcctcggtctatgcgccgatggcggccattatggcggcgggcatggtaccgccgctggcaatggggctggcgaccttgctggcgcggcgtaaattcgacaagtcgcagcaggaaggcggcaaggcggcgctggtgctggggctgtgctttatcagtgaaggggcgattccgtttgcggcgcgtgacccgatgcgcgtcctgccgtgctgcatcgccggcggtgcgctgaccggcgcgctgtccatgatgttcggcgccaagctgatggcgccgcacggcggcctgtttgtcctgctgatcccgggcgcgatttcaccggtgctgatgtatctgctggcgatcgttgccggcacgctactggcggggatttcctacgcgctggtcaaacgcgccgacgtggcggtgaaagcggaagcctga

SEQ ID NO: 442960 - DNA, 1077 bp, Serratia marcescens
atggcgactgaaacaacaacaacctatcctgaacggcgcttcccgttattgggcctgccgcgtctggtgcccggactggcactgaccgccgcgttaaccgcgctcgccatctgggcgggcgacgtaccctggatagccgggctgggcctcggcgcactgacgctggccattttgttcggcatcgtgataggcaatacgctgtatccctggctgcagcccagctgccatgccggcgtacagctggcgaaacagcgcctgctgcgtctgggcattatcctgtacggctttcgtttaacctttcagcaaatcgccgacgtcggcgccaccggcattctgatcgacgcgctgacgctgagcagcacctttctgctggcctgctggctgggtaaaaaggtgttcggcatcgacagccagaccgccatgctgatcggcgccggcagcagcatctgcggcgcggcggcggtgatggccaccgaaccggtgctgaaagccgaatccagcaaggtagccgttgcggtatccaccgtggtggtgttcggcacgctggcgatcttcgcctacccgtggctgtatcatttaaatctgcagtaccagtggctgccgttcagccaggaaaccttcggtatctataccggctcgactattcatgaagtagcgcaggtggtggccgccggtcatgccatcggcccggacgccgaaaacgccgcggtaatcgccaagatgatccgcgtaatgatgctggccccgttcctgctgctgctttcaggctatatcagccgcagcagcggcgccggcaaagcggaaaaatccgcgataaccatcccgtggttcgccgtgctgtttatcgccgttgccgggttcaactccttcaacctgctgccggccgcgctggtgcagcagttgattaccgccgacacctggatgctggcaatggcgatggcggcgctgggcctcaccacccatatcagcgccgtacgtcaggcgggggtcaaaccgattctgctggcaaccctgctgtttatctggctgattgtcggcggcggcgtgattaaccaggccgtgcagcatctgttctaa

SEQ ID NO: 442961 - DNA, 846 bp, Serratia marcescens
atgaataacgctatatttccacagacgatatttacgacacagcgccgtttcaatgactatggcgcaagtgatatgcggtacggtgacatatcgggagacaggctgcagagagagttcggactgaagaatatatcgaacatgatagatccgtatacactaactcggctgacaacatttgataatccacagtccaggtttgcgggtgtctacggtggtattcgacgtggcggtacgatcagtgctcaggaatgcgccaacttattatttaaagagatgcagacgacctctttgccctatgcttttgttggaccctatcggaacttgattaaccagatgctgacgcatttccagcgttcaacaggaacaccttttcatgacgacaagctgaatgtggcataccgtcaaaagcttctttccgattacacaaagaagaatacaaaatcgattatgcaggaagctattgggctatttatagattacaaaactaaagggttgccacaagaaaggttaagggatgttaaatctgcgatcggtggctccatccttccaaaatttgactctccagttcttgataaaataaatggaatggggatcacggttcacgatgttcatgctacgaaaatagacatactcagacttgatgtaggcgaaagaagctggaaggccagggtaaaatttaccgggcaggatcactttggtctagacacggatgatatccgcaagacgaaatttcgtcagtttcacttttttagaatatggtttgtcctgcagcggtttaatagatttggtttccgcccatttctaactaatatggaagcgattgttgatataggaggagggaattga

SEQ ID NO: 442962 - DNA, 390 bp, Serratia marcescens
atgcgtctattcgcaatcgcaattttgctcgcattgctgggaggtttttactacatttctctcggagagcgcgatgtagccgttatcgatgcgcattatgacggaagtaccgctgcggtcatcgttgatgggttgcctttcaccgaatcggacaagatcgattggtggaaaaataatcagaaaaggattagagaaaaataccgtattccttccggtgatacaggtccattcttgataacggtgtatgcatttggcgatgggtacaaagaagaggggaaggaagatcggatgtgctttagtgatatgaagccacctcggaattgcatcgataaaaatatactcatgatggtctggcgtacgcgcgaaggtggcgtcaaatatgagttttaa

SEQ ID NO: 442963 - DNA, 1992 bp, Serratia marcescens
atggaaaagccaagctataacaaactcaccgcattcattatcgccgcgctcaccagccaggccgccctcgccgccgatccggaaagcgcgcaagacaccatggtggtcaccgcttctggtttccaacagaagatccaggattccgccgcctccatctcggtgatcccacgtcagcagatcgaaaataaagcctatcgcgacgtgaccgacgcactgaaagacgtgccgggcgtggtggtcaccggcggcggcagcagcagcgatatcagcatccgcggcatgtcgtccaaatacaccctgattctgatcgatggcaaacgcgtggatacccgcggcacccgccctaacagcgacaacgccgggattgagcaaggctggctgccgccgctggaagccatcgaacgcatcgaagtggtgcgcgggccgatgtcctcgctgtacggctccgacgcgatgggcggcgtgattaacatcatcacccgtaaaacctccaccacgcagggctggcgcggctcggtgcacgccgacgccaccttccaggaaaaccgcgactccggcgacctgtaccagaccaacgcctacgcctccggcccgctgattgaaggcctgctcggcctgcgcgtcaacggcctgctgtcccaccgcgccgaagacaaaatcgtcaacggctataatgaacagcgcatgcgcagcggtaccgctgtcttcagcctgacgccggatgagcagaatgagtttgagtttgaagtcggccgctcgctgcaggaccgcaacagcacgccgggcaaatccacggcgacggaaagctgccgcaaaggcagctgtaaacccaaccagccaagcgacagcctgtatacccgcaccaactactcgctgacgcacaacggctattacgatatcggcaataccaccagctatatccagcgtgaagagaccaacaacccgggccgcaacatgaagatgtacaacaccatcttcaatacccagaatcagttcgcgctgggtgaccatatgctgaatatcggcggccagtaccgctatgaaaaactgagcgacagcggcaacaagctggaatctgcgcagggcgtcaaccagctgacccgttggagctgggcgctgttcgccgaagacgaatgggcaatgaccaatgatttcagcctgaccagcggcatccgtatggaccgcgaccaaaactacggcagccactggacgccgcgcctgtacggcgtctggcatctggccgagcagtggacgctgaagggcggcgtttccgccggctatcgttcgccggatctgcgccagtcgtcagccagctggggccaggccaccggtggcgggtcgcgcgaaggcatgattgtcggcaacccggacctgaagccggaaaagagcctgagcgaagagatcgccctgctgtgggataaccagcaaaatctgaacgccgggattaccctgttcaacaccgacttcaaagacaagatcaccgaagtcagacgctgcgaggatgagccgggctgctctctcggcggcaccgattacgactttatcagcgaccgcgttaacgtcgacaaggccaatatgcgcggtgtagaagccaccgctggctggaagatcgccaaagactggcagctgaccgccaactatacctataccgaatcggaacagaaaagcggccagttccagggccagccgctgaaccagatgccgaaacatatgttcaacaccgtgctggactggcaggcggcgcacgatctcgatgtgtggacccgcgtcaacttccgcagtaaaacctcggagtacctgagccgcacctcgatggccaaaagcacgccgtcctatacctttgtcgacgtcggcgtcagctatcaggcggcgaaaaacctgcagctgaccggcggggtgtataacatcctcgataaaaccgtggattacgagcactacaacaccacgctggacggccgtcgctataccgtagggatgagctataacttctga

SEQ ID NO: 442964 - DNA, 1029 bp, Serratia marcescens
atgagttttacacctgccaaacggacattcatcctggcgctgctactgctgctgttgctggcctgcgcctttgccatctggtcattcagcaaccgtcacgactacagcaccaccgatgcagtggtcaccgccgactatacgctggtggcccccaaggtgtccggctatatccgcagcgtcaacgtcgaggacaaccaacaggttaaagccggcgatgtactggcgacgatcgatgaccgcgattaccgcgtcgcgctggaaaccgccgaagccagcctgcagctcagtcaggccaagctggccagcattcaggcccagctggaacagcagcaggccaatatcgtccaggccgaagcggccgtcagcgccagccaggcaacgctgaactacgccggtcaaaatgccgagcgctaccgccgcctgctgaaaagccatgccatttcggccgatgaacagctgaagtccgcctcctcgatgcagagcgccgccgcacaggttaagcagaatcaggccgccgtcgtatccgcacgcaagcaagtcggcgtgctgcaagccagccggcagcaggcaaccgccgatatcgccgccgcgcaggccagcgtcgatcaggcacgtctgaacctctcctatacccgcatcgtggcgcctatcgacggcatgatcggccagcgggcagtgcgtcagggtgcctgggtcagcgccggtacgcggctgctggcggtcgtgccgcttgagcagagctatgtgctggccaatttcctggaaacccagctgtccaacgtcagccgcggccagccggtcaccatcagcgtcgatgccctgcccggcgtcaccctgcgcggccacgtcgacagcatcgcaccggccaccggcgccacctttgccgccatcagcgccgacaacgccaccggtaactacaccaaagtggtgcagcgcctgccggtgaaaatccagctggaaccgaaccagcgcgacgtcgcgcgcctgcgcgtcggcatgtcggtaatcccgcggctggaaatgcgctga

SEQ ID NO: 442965 - DNA, 1605 bp, Serratia marcescens
atgacaacccagcctgcggccgcgccgccgccgcacccttttaccctgcgtttagcgctggggttagtcggcgtgctgattgccgcgttgacgtccggattgaacgatcgtatctccagtctggcgctggcggatatccgcgcggcgatcggtattgattatgacacgggcagttggatcacctccgcctatcaggccgccgaagtggcggcgatgatggtagcgccctggctggccgtcaccttttccctgcggcgcttcgccctgatcgtcatcaccggcttcgctgcggtgggcatactgcagcccttcgccaccggcgccgcgccgtttattaccctgcgggtgattcagggactgttcggcggcgcactgccaccgctgctgatgacggtggcgctgcgctttctgccgcccaaaattaaactctacggtctggccgcctatgcgctgaccgccaccttcgggcctaacgtcgccgcatcgctgacggcactgtggaccgacagcgtcggctggcagttcgccttttggcaggccgtgccgctgtgtctgatcgccgcgccgctgataggctggggactgccgcaggacccgctgcggctggagcggctgaagcaggccgatctgttcggcatgctgaccggctgcagcggcattgcactgctgatcctggcgctcacccagggggaacggctggactggctgaattcgccgttgatcggcgccatgctgctggcctccgccgcgctgctggtcgttttcctgattaacgagtggttccatccgctaccgctgttcaagctgcagatgctggaacgcagaaacctggctttcggcctgctggcgctcgccgcggtgctgacgctgtcgctgtccggctcgtcactgccgtccgcctatttcgcacaggtggaagggttccgcaccacccagtttgcgccgctggcgctggccgtcggcctgccgcagctgattatcgcgccgtttatcgccatgctgctgaactggcgctgggtcgatagccgctggatgctggccttgggcgccggcgcgatgatgctctcctgcctgctgggcatgcagctgaccgccgaatgggcgcggcagaacttctggctgatccagacgctgcaggcgttcggccaaccgatgatgatcttgccgatcctgatgggctcaaccagcgtggtggcgccgccggaagggccgttcgcctccgccatgttcaataccgtgcgcggtttttccagcgtggcggccggcgtattcgttacccacttcctcaaccggcgcgagcagttccattcacacattctggtcgaccaactgggcaaccgcccatggctgatgaccgccgccaccggtgacagcgccggctacagtacgccgctgctgcccgacggcaccgtcagttcggcggaaaacctcggccatttttcaacgctggtgaaacatcaggcgctgatcctcggcatcagcgatgcctatttactgatcatcggctgcgcgctgttgctggtactgctgaccctctggctgccaaaacgcgtctatccgccacaaacgctgttacctttagctcctaaaacatcgagaccataa

SEQ ID NO: 442966 - DNA, 822 bp, Serratia marcescens
atggacgtgaaccgcacgaaaagggaaagtgttatgtctgaatcgccaatagcccgcgacgacgaaaggacgaggggtattcaggtcatcgctcgcgcagcgaagatcctcaacgcgttgggcgaaaagccaaacggtatgagtctgggcgagatcgcccagcgggtcgatctgccgcgttctacggtgcagcgtattgtcggcgcgctggacgatgctcaactggtacgcagccacggcagcgtcggcggggtacgtctggggccggcgctgctgcgtctgattaccaacgtgcataccgacgtggtggcgatcgcccagccctggctgcaggcgctgagcgatgcgaccggggaaaccgtgtcgctggcgcgggccaacggcctgcagctggcggtggtgcactatattgttgccgagcgcgagctgcgcgtggtgccgcggttgggtatgaacctgccgctgtacagcacctccggcggccgggcgctgctggcgctggataacgacgatgcggcccgcacgctgctgggtgaggcctacccggcgattactgatttaacggtgcgtgattttcccgcgctgatgacgcgtctggcggagattcgccgaactgggctggcttacgatcgcggtgagacgctggaaggcatttccaccatggcggtggcgatcgacaccatcctggggcgtttctccatcagtctgttgatccccggcccgcgcctgcagaaaaatgaggcgcattaccggactgaaattctgaagtgcaaagaggcgctgatcgatgaaatcggcaaggcggcgctgcgtgatgaatag

SEQ ID NO: 442967 - DNA, 453 bp, Serratia marcescens
atgaaaacgttgttggtggcggtggataattcggacgcgacgcaatatgtgctggccctggccgccgaacaggcgcgggcgctgcaggcgcaggcgctggcggtatgctgcatcgatgcgggttacgcgctggttgtgaacggcgatgaagaaggcggcgaagacccggctgactttgcctatgccaatgacgagcagcaggcggccgaaacggtggtacggcaggcgctggcggtgctgagcgaggccggtgtcagtgccagcggcaaggtgctggtcggcgagccggcggaagcgattgtcgcggaagcgaaggcgcagaaggcggcgatgatcgtgatggggcgtcgccagatgtcatcctttaaccgcctgttgaaaggttcgtgcagcgtggcggtgattgaacatgcgccttgcccggtgctgatcgacgtgcgcattgacgaataa

SEQ ID NO: 442968 - DNA, 1431 bp, Serratia marcescens
gtgaaaaacaacagcagacagaatacgttttacatccacgactatgagacctttggcaaaagtccgtcgctggatcgtccggcccagtttgccggcgtgcgcaccgatatggacttcaatatcatcgaagagccgctggtgatctactgcaccccggcggatgactacctgccggatccggaagctgtgatgattaccggcattacgccgcaggaagcgctggccaaaggcgtttgcgaagccgagtttgcccgtcagatcaacgaagccttcagcgttcccggcacctgtatcctcggctacaacaatattcgtttcgatgatgaggtcagccgcaatattttttaccgcaacttccacgatccttacgcctacagctggcaaaacggtaattcacgctgggatctgctggatgtgatgcgcgcctgttacgccctgcggccagagggaattgtctggccggaaaatgacgagggcttccccagcttccgtctggagcacctgacccgcgccaacggcgtcgagcatgaacaggcgcacgacgcgatgtcggacgtgtatgccaccattgccatggccaagctgctgaagcaggcgcagccgcgcctgttcgactacctgctgcagcaccgcaacaagcacaagctgaatgcattgatcgacattgccgagatgacgccgctggtgcacgtttccggcatgttcggcgcggcacgcagcaacaccagctggatcgcgccgctggcctggcacccggagaataaaaatgcggtgatcgtctgcgatctggccggcgacatctccccgctactggatctgaatgccgatcagttgcgcgaacgcttatatacccgccgcgaccagctggcggccgatcagccgccggcgccgatcaaactggtgcatatcaataaatgcccggtgctggcgccggccaaaaccctgctgccggaaaatgccgaacggctgggcatcgatcgtcaggcctgcctggataacctgcagattctgcgtcagcacccggaagtccgcgagaaagtggtagcgctgtatgccgaagcggagcccttcaccccggccgacgacgtcgacgccaaactgtacgatggtttcttcagcgatgccgataaagcggcgatgaaaatcattttgcaaaccaagccgcaaaacctgccggcgctggatctggcctttggcgacggccgcatgaaggagttgctgttccgctaccgcgcacgcaactatccgaacacgctggacgatgccgaacaacaacgctggctgcagcaccgtcgggaagtgctcaacgccgagcgggtgcaggcctatattctgcagttggaagcgctgtataacctgcatgaaggcgacaacgccaaaatggcgcagctaaaagcgctgtttgattatggtaagcagctggtcgggtaa

SEQ ID NO: 442969 - DNA, 159 bp, Serratia marcescens
atgaataccttcataaaaatcttggttcgtattggcgcagctatcgctgcggtatcccttatgtcaggaaaattcagctgggatgagccaatgttcatcacaaactttttaatgttgctcatttgggttcatgcagagtgggactggtaccgtaagtga

SEQ ID NO: 442970 - DNA, 240 bp, Serratia marcescens
atgttcgtagaactaatttttgatcggcgtaatgttcatggtttgcctaatgcggcggagattatcaaggaagaattaaccaggcgggtgcacaaaatttttcccgatgccgacgtgagggtcaagcctatgcaggctaacggcctgaatactgacgcgagcaaaagcgataaagagaagctgaaccgcctgctggaagagatgtttgaagagtctgagcagtggctggttagcgattga

SEQ ID NO: 442971 - DNA, 1812 bp, Serratia marcescens
gtgggggtggatatattcttcgtcatatcaggttatctgatgacaagaataattattgaaggtttgaatgctgaatctttttcattatggaaattctatttttccagatgtaaaagaattattccccctttaatggttctatgcttaatcttgctcgttctgggctattattttatccctcctagtgaatatgaaacgctctccaagcatgtgttagccagtatcacctttacatccaatatggtgtattacacagaagctggctattttgatgccggagcggtttataagtggttgcttcacacctggtcgctgtctgtggagtggcagttttatcttgccttgccgatatttttgatgttagtggcttctttctttaaaggaaggtataaggcggcgctgattatttcctttgttttatcgctgcttatggcgctgtacctttctgaaaaaagaccgtcgctatcttatttcttcttcggttcacgggcgtgggaaatgctcgcgggcggtttggcatatgcttatagtatcaatgggttgtctgataaggtacgtaaaatcacaacctatctttgcatgtcagtgttgatactaagctcaatatttattaatgaatatgtggcttggcctgggctcctgactattattcccgtagcggcaacggcgataatgatagccataaccggagaagggtatattgttaacaacagggtagcgcaaaaaataggtgcgtggtcgtattcaatatacttatatcattggcctatcctggttgcctcgggtattttcgttattgaaagaacgttattggaagggttgtcgctggttgctttgtccatatttttaggttggctgtcatatacgttgctcgaagataaaaaggggacgctgtttaccgcattttcccgacctggcctgatattcccatccgcgatcattatcgtcggggtaagttcggctctttacttatccggcgggattccgtcgcacgcgacagagcgagtaaactacatttcgtcctttgttgatgacaaaaatcacgatgctaaaaagtgtttcgtgatcaatgatgtcagatcgcctgaatgtaaatttggccccgccaaggcagacgataaagtcgaccttgtggttattggcgatagccatgcttacgcggtactgtcggcggtgattgcctcaaaccctgccgcatcaatagtatttatcgcgcaatccggttgcccgccagtgcctggtattattaagaatgacagaccttattgtggcgactttatgaaaaacgcgttctccagcgttaggaataagtataagaatgcgtctgtgctaatcgccagcagtctgtcgcaatatttccatgggaaaaatggtggtgcaggtagagatgctgagttttctttcaataatcaacctgggacgcttgtatcgttcatatccaacctgaatacgtctcttaagtctctcgccataaatcgtagcgtgtttatactgtcaccaattcctgactatccttataatgttgtgtttagaatgagcagaaatgccatgctgggcgaaaatacggatataaaagaagagttggctgagtataaagagcgcagtgatgatattaatgcagcactgcgttcgttgactacgggggcgggaaatgtacaggtcttaaatagtgcagaatatctgtgcgataacaatgaatgcttcggcagcaggaatggtgtccctctatatagtgataataaccatctttctgaaacaggaaacaagatattgttaccgttgtttaaaaagatgtggtcggtaacaaaatag

SEQ ID NO: 442972 - DNA, 1110 bp, Serratia marcescens
atgaaaacattgttactgacgggcgctaccggctttctgggtggtgcggttctggaaaaattattaattgaaaatcagcagataaactatctgctgctggtacgcgctgaaaataaagaacaggggctggcacggattaaaaataatatggccaagtttaacctgacgcctgaagtattagatagaattacaccggaaagtattttgttgggggatttggccgacgcggaaagtttcctgagggatgcgcgcttgaataatgtgacgcacgtgattaactgtgcggcggtggcgtcatttggcaataacccgctgatctggaaagttaacgttgagggtacgctggcactggccagcagaatggcgcaggtggaagggctgcagcgttttttacacgtcggcaccgccatgtcctgtacgccggaaccgggcacgctggtggcagaaagcggcgagttcgccgaagacgccgagcatctggtggaatacacccgttccaaatctgccattgaacagctgatgcgtcagcaactgccgcagctgccgttggtgattgcccggccgtcgatcgtcgtcggccacacgcgccttggttgccagccatccagcagcattttttgggtattcagcatggcgctgatgctgcgcaaatttatgtgttcgctacaggacaaaattgacgtgatcccggcggattactgcgccgatgcgttggtgatgttgctgaacggcgaacggctggagaacgatgtgtaccatatctccgccggggcggagcgcagcgtcagctttgccgatatcgaccgcgccatggccagcgctttggagcaggcgccggttggcgaacactatgcgcaggtcagctatgaggcgctggtgaagatgcgccgtcaacttaaggatatcttcggcccgtgcaacgaacggctgatgctgaaagcgatgcgcctgtacggctcgttcgccatgctcaacgtgcgttttagcaatgataaactgctgaagctggggatgccgcagccgccgcgttttaccgattatctcgcacactgcgtggccagcacccgcggccagtcgattccgcagcagatggcggtggacttcaaataa

SEQ ID NO: 442973 - DNA, 768 bp, Serratia marcescens
atgttcactatcgattacaacagctaccgttcggtggccagctttaaccgccgtgtgcgctttctggtgctgcattataccgcgcaaaattttgccgactcgatcacttcgctgaccggcaacgccgtcagcgctcactatctggtgccggatccgcaggatcccagctatcaggcggccgggttcgacgggctgcgcatctttaacctggtggatgagcaggagcgcgcctggcacgccggcgtcagtcagtggggcgcgcgcaacagcctgaacgacacctcgatcggcattgagatcgttaatctggccagcggcgacggcgaagatataacgttcccgccgtttgacccacagcagattgaggcggtgatccagctgacgcgcaatattctgcagcgctacccggacatttctccggtcaacgtggtggcgcattcggacattgcgcccggccgcaagagcgaccccggtccgcagttcccgtggcatcagctgtatcaggccggcgtcggcgcctggtatgaggaagaaacgcgtcagcgctatcagcactactattgcaaccaggggctgcctgaccggcagcaactgctggcgctgtttgccaaatatggttatgacgtcagcgccgccggcgatgacgaaggctaccgccagctggtgcgggcgtttcagctgcatttccgtccgcagaaatatgacggcgtaatggatgcggaaaccgcggcgatcctgcaggcgctggtggataaatacgttgcataa

SEQ ID NO: 442974 - DNA, 1065 bp, Serratia marcescens
gtgcgtctggatcgtggcatttcctcatttgaacacctgatataccgtcattaccgcattgtgcacggtgtgcgcatcgggctggcctttattctcacctttttactgatccgcctgctggaggttccggaaggcacctggccgctgattacgctggtggtggtgatggggccgatatcgttttggggcaacgtgtcgcagcgggcgctgcagcgcattgccggcacggtgttcggcgccgcctccgggctggtggcgttgtatctggcaatctattcattgccgctgatgctgctgtggtgcggggtggtgatgttcgtctgcggctactttaccctgggtaaacggccctatatggcgctgctgatcggcattacgctggcggtggtgtgcggcgaaggcagcggcgatatgcaaaccgcgctgtggcgcagcggcgatgtcatcttcgggtcgatactggcgctgctgtttaccagcatttatccgcagcgcgcctatattctgtggcggatgcagatggcggagtgttttcgcaccgccgggcaggtttatggcgcctatttgtcgccgaacgtggtggagaggccgcggctggagctgcgcctgaagcgcctgctgaatcaggtggtgaagctgcgcagtctgattgcccccagcagtaaggaaagccatatctccatcgaagtgtttgaagcggtgcagaccctgagccgcaatctggtgtgcacgctggaactgctggccgatgcctattgggcatcgcgtgaaacgcactttattatgctgaacgctaaaaagctgcgcagcgctcaactgctgacgctgcattcgctagaggcgctggcggcgatgatggagcacggcggccccggtctgccacagcaaaccattggcgagctgggggaaatctccgccgaactgaaaaccctgatgcaggaagccggcgggcagcacgttgaagcgccgatttacggctatgtgtggctcagtatgcagctggcgcagcagttggaagaactgggcgatctgcttaaagtctgtaccgccgacagcgcggaatag

SEQ ID NO: 442975 - DNA, 1035 bp, Serratia marcescens
atgacttattgtgcaaatgcttcccgatatgaccagatgcaataccgttactgcggcaacagcgggctacagctgcctgcgctgtcgttgggactgtggcacaactttagcgatggtcacagtctctcttcccagcgggcgctgctgcgtaaagcgtttgatctgggaattacccacttcgatctggcaaacaactacggtccgccgccgggttcggcggaaagccatttcggccggctgttgcagcaggactttctgccgtatcgcgatcagctgattatttccaccaaggcgggttacgatatgtggcccggcccttacggcagcggcagctcacgcaaatacctgctggccagcctcgaccagagcctgaagcgcatggggctggactacgttgatatcttttattcgcaccgggtggatgaacatacgccgatggaagaaaccgccgcggcgctggcgcaggcggtgcagagcggcaaggcgctgtacgtggggatttcttcctattccaccgaccgtaccgtcaaaatggcggcgctgctgcgggaatggaaaataccgctgctgatccatcagccctcgtacagcattctgaaccgctgggtcgaaagcagcggcctgctggatgcgctggaacagcaggggacgggctgcatcgcctttacgccgctggcacaggggctgctgaccaataagtatctgcacggcattccggaggattcgcgcatgaagcgcgagcagggcggttcgctgaaagagagcatgctgtccgcgcagaacctgcaaagcattcagctgctgaaccagctggcgcagcagcgcgggcaaacgctggcgcagatggcgctgagctggctgttaaaggacaatcgagttacctcggtgctgattggcgccagccggccggagcagctggaggaaaactgccaggcgctgaacaacctcacattcagcgcggcggagctgcagcagattgatgagcacgtggccgacgggcagcttaatctctggcaggcatcgtccgatcgctaa

SEQ ID NO: 442976 - DNA, 1188 bp, Serratia marcescens
atggctgatagtaatgaacatttaaataataattgcccctcatgcggtagcatgcttgattcagatgaagtatgtgcttgtggctatgactcaagcttggatgtgcaggaggaaagttatgtccctcagtttgcattgacagcaactctggataaagtgtcaggggactccggccctatatttaaagagtctttaggtgaagtttggacattagatacagaagacgttcagctttttattaaacaaatcgagaaaaaatttaaacttaaaaggaaacttcatggtgtaatcgatgaaaataaaatgccattaagtgcacctatttctttcagtaaatatctaaatcaaaatatagattttaaatcctttgttcagtcaatgatggatagaatgagaggtgaagcgaataatgacaaatcaaggctttctggtggggctataatatttattcattacaatgtagataatgataaagaaagtagtggtcgtctttttattatcatggtggatagaaagggagtctttaatttcgataaaaatcttattccagagaaattaccatctatagatatagattccttgcgacaagctgtccttgttgatttgactttattcaaagcaagctacccagaaaataatggcgacccttatctgcactttatatctggtcgatctagtagcgaattctttaagcgagcattgggttgtaacccaaaaattgataataatagaagtattgatgaagcaaatagagctgttgatgattttgttaaggtaatgaagttaaagcatatcgatagagttaaagtaaagaaagcagtcgaagctttgatgaaatcaaaagcaaaagatcccaatgatagaaagttaacgattgaagatatagggaattgtatagagaaaacccttcctgaaaataaagaattaaaagggaagtttgtacagttcgcggatgttaatgaatatgttattgatgattttttcgaaccaagtagattttctggaagtagctttggggaaataaagatttctgatgcggaacaggaatatgaatgtaaaatatctgttgatgcaattagcgaggatgatacatcaaatgcaaaagttatatatgatagagctaatggtcaattaataatacgattgtcgcataatgcagtaactgaaatcgagaaaatagttggctaa

SEQ ID NO: 442977 - DNA, 1164 bp, Serratia marcescens
atgagcgacatgaatggttttgaaacattagtaaatgctatcttatcggcaaaaattgaagtcgatagtggctatatgttgctcgaatttgaaggccaatcaattgatattaatataatatctaagttaatcaaagattatggtttagccgtagaacctgaagttgaaagtaaagaaattattttcccgttgtcttctggggcatttcgagatgattcaaatatatatagtacgctagattcctttttgagaacatgtatttctctaggttatgttcctaatgattatattattctcactgagaagatttcttcactattaattgatgataaaattggtagtattgatatttacttaaaatggacttcagtattatccagtgttgctaatcatcaaattggagggaagtttatactctatataccaagtgataatggtggtaaggagttagttattaattcctacgaaagattggactatattataaaagctccctatagcaaggtcgctgtagactcagttgataaaataataaaggtacttgatgtcgaggatgctcagtctcccgaaagaaaatctattattcgtactgctatatatgatttgattaataacattgagagtaaagatgtttcagcgctaatcacaataagcgagagggtttttaaccggtataacgatcttttggagttatatacaaatagattctccgttaacaaactattgtctgaattggaacaaaaaaaccttgagtatacaaccaaaataaatgattttgtttcatctagccagacaaaagcttttgcaattcctggggccttgattgcgatcggtggattagctaaagccagcggcttctgggattctttattgatttttataggtctctttctcgtatattacataacttctatgtctaaccaagttttatatgagtcctatataactttaaaaaatagtcttaatgactctttttcaaggtattctaaatttgatgaaggggtggaagttagggatgcagccaaaaaaatctcattagagctttatcataaaatagataatgcaaaagaacggttggaaaaagttaatagcattgcaaaatggatgctttggataggtggggggtatctggtcttaaaaatgatatttattgatggtgaataa

SEQ ID NO: 442978 - DNA, 306 bp, Serratia marcescens
atgtccctggatgagatcaccatgcgcaaagccggattaaccgaacaccagatcatcgctgttatgaagtccgtcgaagccgaacgtaccgttaaggatgtctgccgcgatgccgggatctctgaggccttgtactataactggaaagcgaagctcggcgatatggaagtctctgatatcaaaaagatgaaagaacttgaggatgaaaaccgccgactgaaacagatgattgcgaacctgagtctcgaatgccgcggactgaaagacgttattgaaaaaagctttaaaaccagcgataaagcgtga

SEQ ID NO: 442979 - DNA, 1086 bp, Serratia marcescens
atgaatagtatttttgcaagagaaggagatgaaatccgggttctttcactgttttctggctgtggagggatggactttggtattgaatctgccggaggaaagattgtttttgctaacgatatcgttgaaaacgcgtgtaaaacattagccaagtattttcctgatactgatgttaagcatggcgatatctctcaaattcaaacttttccatctgtggatgttgtcgttggtggctacccgtgccagtcattttcgatggctggtaacagaaagcccagcgacgatgcgcggaccaatctttataagcaatttcttcgggtattgaatatcgttcgacctaagtattttgtggctgaaaacgtttcaggattacagcagttgggcgcaggtagctttttagaacaacaagttaatgcctatcgggatgcaggatatcaagttagtcaccatcttgttaatgcaaaatcttacggtgttccacagtcacgcaagcgcctgtttattattggtgtcagaaacgatctggggcaatattttgaatttccggcagcaacgcatggtaaagcgaccttaaagaacccgcacttaaaaccttatgtttcccatggtgaggctatccgcgatttgccattatggccagagggtgagttttacgaacgacctcacgatcccgaggggcacttctcatggtactttatgtccagaaatcgtaaggccaaatgggatagtcctgcttataccgtcgtagcgaactggcgacatgtgacgttgcatccagccagcccaatgatgaagttaacatggtcaaatcttgaggacggatggaagcagcgctgggatttttctgaagaatatgaacatgttgctattgattcaacccggcctaagctggaacaggctaggcgtttgtcatggcgggaatgtgccagaatacagacgtttcgtcatgattttgagcctattggtgatattgcatctcgatttactcagataggcaatgcagttcctccgttactggccgaaatcatttttcaacatctattttctggtgatgggttgaaaatgaatttgaggaagggcgaataa

SEQ ID NO: 442980 - DNA, 468 bp, Serratia marcescens
ttgcagggatgcttacacgtcgactggcaggacagcgccaatcaactgaccatcagcagcgcggccggcatgctgatggcgcatttgctgcagcattatacgcagctgcagtggcggctgccgtcggtacgcggcgggctggcgccggcggtgctgcgccgggtgtgcgattttatcaatgaacatctggagcagccgctgctgctgggtgaactggcggcgcaggccggactcagcgaatttcactttgcccgcatgtttaaacacgataccggtctggcgccgcaccaatacgtgatgcgggcgcggctgcagcgggcggcgcacctgctgcgtcacggcgtattgccggtgacccagattgcgctggcctgcggtttcagctccgccagccacttcagcaaccgcttcaaggcgtattacggcatgacgccgcagcaaatgcgccagggtacaacatcggcctga

SEQ ID NO: 442981 - DNA, 1215 bp, Serratia marcescens
atgagtgagttttatcaggatggcatcatcaccaacttccataatctgacccgtcggccaattgccgagctggagtatgagctacaagtgttcgccggccgcacgccgctggggctgattttaccttcgctctatgcggagcttgaagggccggcgctggaccatatcgtcgaaacgctggcgcaggtgccctatctgcaggagatcgtcattggcctggatcgcgccgaccggcagcagtttgagcatgccaaacgcttcttctcccgcctgccgcagcggcatcgtatcttgtggaacgacggcccgcgcctcagcgccatcgccagccggctcagtgacaaagggctggcgccgagtgaacccggcaaaggccgcaacgtctggttttgcagcggctatacgctggcgtcacgccgcagcagctgcgtagcactgcacgattgtgacattgtcacttacgatcgtcatcttctggcccgcctgctctatccgctggccaatccgcactttcattatgatttttgcaaaggctattacgcccgcgtggcggacggaaaactaaatggccgggtcggccggctgctggttttcccgctgctgaaatcgctgcaaaaagtgtatggcaactcagactttctggagtatctgcgcagctaccgctatccgctgtccggtgaattcgccatgcgcacccatattctcaacaacctgcgcatccccagcgactgggggctggaaatcggcgtactatcggaagtgcagcgcaccaccgccaccaaccgcatctgtcaggtggatattgccgataattacgatcataaacatcagccgatgtcggaacatgaccccgccggcggcctgcagcgcatggccattgatattaccaaggcgctgtatcgcaaactggcgatccagggcgtcagcatcaccagcgactcttttcgcgtgctgcgcgccacctactaccgcaccgcgctggatatgattgacgccttcgaccacgatgccagaatcaacggcctgacgtttgaccgccacagcgaggagtcggcggtggagctgttcgcccaggtgattacgcaggccggccagcagtttatggacgcgccggcggagagcaaaccgtttgtacccagctggaatcgcgtgcagtcggccttccccgatattctgcagcagctgtatcaggcggtggaagaggataatcagtag

SEQ ID NO: 442982 - DNA, 840 bp, Serratia marcescens
atgaccgatggggataagatgctgacgctgaaagacaatttgctgatttttaccgatctggacggctctttgctggatcatgacagttacagctggcaggcggcgcagccctggctggaccgcctcagcaccgcgcggatacctctgattatcgccagcagtaaaacggcggcagaaattgccatactgcagcagcgacttggcctgagcgcctttccttttattgccgaaaacggcgcacagatcgttttcccgcccggctggcgtcagcctgcgcgtatctttggcgcggactatgccgccattgtcaacgcattacaccgcctgcacgccagtttcgcttttcgcggctttgccgacgccgacgatgcggcggtggcgcagtggtgcggatttaccccgcaggaagcccggctggcgcgacagcgcgcaggctccgaaccgctgtgctggctggacgatcagcagcagctggcgcactttcgccatgcgctggcgcaacagcggctgacgctgacccgtggcggccgcttttaccatgtgatgggacgcggcgtcagcaaggggcgcgccgcccgctggttgatccggtactatcagcgacgccatcaacgccctttcaccacgctggcgctgggcgacgggccgaacgacctgccgctgctgcagagcgcggactatgccgtgctgatccgctccctgcgctctgaaccccttccattgccagcgacacggcgcggccggctgtaccgcagccgacaaaccggcccggccggctggagcgagggactgaaccactttctgttacccggtaaagcgcggaggattgcccatgagtga

SEQ ID NO: 442983 - DNA, 285 bp, Serratia marcescens
atgagtcataccaggaaattattggaagctcagaccaatggcgtgcagaagtttggcaaaagttttagccggctgggctgggtttgcttaattatctccgcaatcattcttttggttccgttgctcttcgggctgggcttcctggggatatatgtggccggcccgttcctgctgatggccggcatgtttatttatatcggcaagaaaacgagcaagcatatggatttgtataagggggcagcggccgaaacggcggatattatggagaaacagctgaaggattga

SEQ ID NO: 442984 - DNA, 834 bp, Serratia marcescens
atggctaacgaggaaggtttaaacattgtgctttcgccggttcaactggcagcggcaatgtcagacaggagcgttaccgagggtgaaaccttaagcaaccgtctgtttggcggcctggggcttgctgccggcgttattgagcttatcggcgctggtgcgatgtgttatgcacctgaccccacgctgttaaccaaagtcggctgcgttattgtgggcacccacagcatggatagcatcaaagctgcttccaatcagatgattaccgggcagccgacaacgacggatacttaccagtcggctgttgcattggctaaaacgctgggtgctgatgacgatacggcctatagcgtggggcttacggtcgatattgcggtgccgttggtgtttgcggcggcgataggtgcggcgcgcgttgcctctgttcgtgctggacgtgtgcgattgattgagcatgagtccatgactggcgcaaagccaggcggacatgtgctggaaagacatataggtaagactccggaagaattgtttgcgagattagagcgccgtcctacattaacggcgaccagtagtttcaggaatcaatacgaagcagaaagaattatatctaaggtgctcagtaataaccggaatcagattcaggcttgggtaaaacatgttccgccaaagatgaatgcaaaaatggagttggaaggcgcattttccagtcagaccggcattcttgtgtctaggggatcgaagcagattacaaggtgctacaaggtccgggttgtcttacggtttgaacgctggaatggtaatccttactatgtcctcaccgcattcccgaaggtgtga

SEQ ID NO: 442985 - DNA, 306 bp, Serratia marcescens
atgagaaaatttaacctcaatgagttgggctgttttattactatttattttggtcaggactacgatcttattgatgatagtaatgagattgaaccaaagatagatgcatttctgaatgagtcagaccgagctaattggtacggcctgttggcggatatagatctgctggtagaggaaagtgacgatttggatggtgagtttatgagacggtttgggtttgagtttgaccctgcattgtgggggacgaatccatcgcactttctgcaactggtcaagagcaagataaaccaagctctgagcgaatga

SEQ ID NO: 442986 - DNA, 408 bp, Serratia marcescens
atgaaagtagctctgttgggcgccgcgctgctgatggcgacatcgcaaacggtctgggcggcacaggcgtgcggagataaaaacagccagaccgaaatgaacatctgcgccgcagacgagtacaaacaggcggatgcgcagcttaatacgctgtataaacagctacagaaccggttaaaaggcgatgcggcggccgctaagcggctggttgccgcgcagcgcgcctggattggctttcgcgatgcggactgccagttcagcgccggcgccagcgaaggcggttcgctgcacggatttgtcctgagtaactgcctgacggataaaacgcaggcgcgcgccgcagagttcaaacagttgctggcgtgtccggaaggtgataccagctgcccgctgccgccggcgtcataa

SEQ ID NO: 442987 - DNA, 282 bp, Serratia marcescens
atgagtaccatagccacgggctttatcatgatgcgctgggaattgctgagcgccgtcatgatgtttatcgccagtcagttaaacgttgtttgccgcaaagccagccgtaacggcatggcgtttatcttcagcagcctcgggctgtttaccaccatctggttcgtcatggggttaatgggcatcaccctgacccaggaaggcgtgtcgcacttctgggcggtgagcaaagatgtgtttattgatgtgatgagcaatatgccgaccgactggccgatcccctga

SEQ ID NO: 442988 - DNA, 1926 bp, Serratia marcescens
atggccctattaaaagagaaaattcgcgaccattccgccgaggaaatgctgtttgtccgccgcgccggcgtggcgttattggtcgttgtggcctgcttcggcgcgctgatttacaacctgtaccgcctgcaggtgaaacaacacgatttctatcagacgcgttccaaccagaacgatatcaaaatggtgccgattgcccccagccgcgggctgatctatgaccgtaacggcgtgccgctggtacgcaatctcaccctgtaccaactgcaggtcattcccagcaaaatcgccaatatgtcggcgctgctgcaggcgttgacgccgatcgtcgatttaacgccggacgatatcagcagtttccgcgatcagatggcgcacaccagccgctataagccggtaacgttaaaaagcgaactgagcgaaacggaggtggcgcgctttgccgtcaaccaataccgcttcaacggcgtcacggtcgacagctatcagcagcggcagtatccctacggcgcgcagctggcgcacgtggtgggctatgtgtcgaaaatcaacgatcgcgacatcaaacggctgactgaaaacggggagatggagaactatgcggccgaccacaatatcggtaagcagggcatcgaaggctattacgaaaaggcgctgcacggcgtcaccggctatcgggaagttgaagtggataaccatggccgcatcgtgcggctgctgaaagaacagccgccgcaggccggtaaaaacatctacctgacgctggatgtgcgcctgcaacagtacatcgaatcggtgctgaaaaaccagcgtgcggcggtggtggtggaagacccgcgcgacggcggcattctggcgatggtctccagcccgagctacgatcccaacccgtttgtgaagggcatcagctacaaatcatataaatcgctgctgtccaaccccgatctgccgttgattaaccgcgccacccaggggttgtatccgccggcgtcaacggtgaagccctatatggcgctgtccgccttattctccggcgtgatcacgccgagcaccacctatttcggcgcgccgacctggacgctgcccggcaccaaacgccgctaccgcgactggctgaaaagcggccacggcatgctgaacgtcaccaaagcgattgaggaatccgctgataccttcttctatcaggtagccttcgatctggggatcgaccgcattcacagctggctgagccagtttggctacggcaagccgaccggcatcgacctgaacgaagagtacaacggcgtgctgccgagccgcgaatggaaacagcgggtgcataaaaagacctggtatcagggcgacaccatttcggtgggcatcggccagggctactggatcgccacgccgattcagatggtcaaagcgctgaccatcctgctcaataacggcaaggtgaaaaatccgcacctgctttactcgatgaagcgcggcgcgcaggtcaatcgttatcagcagccggcgcccagcgcgcaggtcggcgatcccaactcgccgtactggggcatcgtgcgcaacggcatgtacggcatggctaacttgcccaacggcaccggctataaactgttccacagcgcgccttaccacatcgcggctaaatcaggcacttcgcaggtgttcgggctgaaggagaaccagacctataacgccaaaatgatcccggtgcggctgcgcgaccatatcttctacaccctgtttgcgccgtaccaacatccgaaggtggcgatggcgctgattctggaaaacggcgggggagacggcgtggtggccgggccgaccgcgcgggcgatcctcgaccatattttcgacccggccaacgcgccgccggccggcgagccggaaaaagtgaaagcgccgatgagcgacagtgctgatgtgcaacagtaa

SEQ ID NO: 442989 - DNA, 1719 bp, Serratia marcescens
gtggcaccatcttcaaaaaaaaacgttaaaaattactcttcgctgcgctttggctggatctgcgccgggatactgctctgctttatcctgctgatgctgcgcgtcggctatctgcagttgctggagcaccggcaactgaccagtcaggcggatcagcgctcggtgcgtacccaggtggtgccgaccaaccgcggcatgatcagcgatcgccacaacgaagcgctggcggtcagcgtatcttcgcgcgatatcgtgctcgacccgaaacatattatcgacagccagaccaacaccggcgacgaacgctggcaaagtatggcgaatatcctgaaaatgccgctgagcgatattcaggcgctgatccagcgtaacgcccgcaaacgcttcgtctacctggcgcgtaaagtggaggatgacaatgcggaatatatcaagaagctgcacctgaccggggtcagcagcgagcaggacttcagccgcttttatccgatggggcaagacgccgccgggctgattggcatcgtcggtcagaataaccaggggctggagggcatcgaacgcggctttaaccacctgctgcagggcaaaaacggcctgcgggtgtaccagaaagacggcaacggtgcggtgattaacgtgctgaaaaacgtcgacccggtgccgccgccgaacatcacgctgagcattgataaatttattcagtatgtgctgtttgcccagatccgcgacggggtgatcgccaaccaggcggattccggctgcgcggtgctggtgaaggtcaacaccggcgaagtgctcggcatggcgagctacccgacctttaacccgaataactacgccaacgcgccgtcgcagaatatccgcaacgtgtgcagcagcgacagctttgaacctggttcgaccgtgaaaccgctggtggtgatggtcggcctgaaccgccacctgatccagcccgataccgtgctggacaccacgccgtaccgggtcaacggccatctgatccgcgatgtgggccattggtcgaagctgagcatcaccggcgtgctgcaaaaatccagcgatattgcggtgtcgcatattgcgctggcgatgcctgccaccattctgccggcggtgtatcagaacttcggtctggggaaaccgaccgaactgggcatcggcaatgagagcagcggctacctgccgctgcaccgcacgcgctgggcggatatcgaacgcgccaccttctcatttggctacggcctgcgggtcacgccgttgcagatggcgcgtgagtacgcggcgatcggtgcgttcggcgtttatcggccgctgtcgatcaccaaggtgacgccgccggtggtgggccagcgcgttatgccggcctcggtggtgaagtcggtggtgcatatgatggaaagtgacgccttgccgggcggcagcggcgtcagcgctgcggtgccgggctaccgtctggcgataaaaaccggtactgcggagaaaatgggtaccaacggcaaatacgacggcggctatatcaactacaccgccggcgttgcgccggccagcgatccgcaggtggcgctggtggtgatggtcaataacccgaaagccggcaagcacttcggtggttcggtggccggcccggtgttcggcaaaatcatgggccaggtgctggaacatatgaatatcctgccggacgcccagccgctgaacgtggtgtcacacattaaaggctaa

SEQ ID NO: 442990 - DNA, 933 bp, Serratia marcescens
atgcgtggggacagctttgtcagcgaggtggatgaacgccagctgcgttatctgtatgaagtggccaactacggcggcgtgcgggccgccgccgataaactgggcgttaacgcctccgccgtcagccgccagttggcccaactggaacacaaactcgatatggtgttgctggagcgccaggggcgcggcgtcacgctgacggaaatcggcctgcatctggtggatttctaccgcgagcggctgcagcgccagcaggaactgaccatgcagctgcaggagtttcgccagttaaaacgcggccatatcgcgatcggcgtcggcgaagggtttatcgaccggctgctcggtcgcgcgctgcgcgatttcagcgagcactacccggatatcgtggtcgatgtgcgctgcggctctaccgccgagattatcgccatggtgcgcgaaggccaggtagatatggggctgtgcaccggtgtcgatgactttgacccgctgctgaaagtgcgttcattccgcggcgcgcccttttccgccgtggtcagcgtcagccatcctttggccaaacagcgcagcgtaacggtgcgtgaactgcagagccaacggctgatttttatgcccgatcactttggcgtgcagcgctatttacacgcgctggcgcaggccgagcagatccacttcgccccgtcctaccgctgcaatatgtttaccgccgcacaggcgattgccgcagccgggctgggcgtggcctttatgtccagcgacgccacccgccatccggtcgacgagcggcgcgtcacggcgatcccgatcgatcatccgatcgcccgcgcctttcccagccagctgatctgccgcgtcggacgacgtatgacgccggcggtcagctacctgtggaaacagctggagcacgggatgatgcggacgggcgtgaagtaa

SEQ ID NO: 442991 - DNA, 1182 bp, Serratia marcescens
atgaaaagtaacggtaattatacggggctggcggatgtcgcgccgctggaggaggagctgaccgcgctgaggcgtcatctgcaccagcatcctgaactgtccaattttgagcagcacaccgccgcgctggtggcagacaaactgcggcagtggggctatcaggtcgccaccggcatcggcggctatggcgtggtgggtacgctgcaggtcggcgacggcggcaagcgcctggcgctgcgcgccgatatggacgcgctgccgatcgaagaaagtggtgaccacgactaccgcagccggcaggcgggcgtgatgcatgcctgcggccatgacggccataccgccatgctgctgggggccgcgcgctacctggcgcagagccgcagcttctccggcaccctgcacctggtgtttcagccggcggaagagatcggcagcaacagcggggcgcagcgcatgatcgccgacggcctgttcgagcgtttcccgtgcgacgccatttttggcatgcataaccatcccggctatcccgccggcaccatgatgttccgcagcggtccctttatggcggcctgcgacaccatcaccatcacgctgcacggcaagggcggccatgcggcgcggccgcatctggcggtcgatccgctggtcgccgccagcagcctggtgatggcgctgcagacggtggtggcgcgcaatattgacccgaccgaggcggcggtggtcaccatcggctcgctgcatgccggccacgccgccaacgttatcccgcaaagcgccacgatggaactgagcgtgcgctcgtttaatccacaggtgcgcgaacagttaaaacagcgcatcagccggctggcgcagcagcatgccgccggttacggcgcgcgcgccgaggtcgatatcctgccgggctacccggtgctgatcaatcacgaacaggaaactgagttcgcccgtcaggtagccacagagctgctgggcgaacaacaggtggtcgcgccgtttcccgcgatcgccggcagtgaggatttcgcctactacctgcagcagcgcccgggctgctttatgcgtctcggcaatggcgacagcgccatgctgcacaacgccgcctacgactttaacgatgccaacctgacggtcggcgccgcttattgggcacggctgacggaacgtttcctcacggcataa

SEQ ID NO: 442992 - DNA, 1257 bp, Serratia marcescens
atgcacacggttgaaacctcgcagcgaaagattattgtcgctgccgtgttcggtaatcttctcgaattttatgattttaccgtctacagctatttcgccttggcgatcagtaagcagtttttccccagtcacgatccggtgatctccaccatgctggcgttttccgcctttgccatcggcttcgtcgcccggccgctcggcggcgtggtgctgggctattatgccgataagaaaggacgccgtgcggcgctgacgctgaccattatgctgatggcgctgggggcggcgatgattggcctggcgcccaactacgccgctatcggcgtggccgcgccggcgttgatcgtactggcgcggctgattcagggcttcgcccagggcggtgagttcggcgccgccaccgccacgctgctggaaaccggttccgacgagcgccgcggttttcgcgccagctggcagctcgccagccagggagccgcagcgctgctgggagcggccgtcgcggcgattctcaccttcacgctgtcggcggaggcgttggcggagtggggctggcgtattccgttcctgctcggcacgctgattgtgccggtgggcatttacctgcgccggcatatcgttgacgagccgccggcggccaaaccggcagagcggcgggtgttcgaggcgcgccacgtgcgcaactggctgctgacggtgttttcgatcatgggtatgtcggtttccagctacatcatgatttactatctgccgacctacagcatccagcaactggggctgccggagcggctgtcgattatggtggcgctggcgaccagcgtgatttcatttgtcatgtgcccgatctacggcgcctggtcggataaactgcgcaaacgcaagccgctggcgatgttcggccgcctgatgctgctattgttgctgtacccggcattctgggccatgacgcactttcccaccttgccggcggtgatgtcggtgatgatcgtgctgatgctgttctacaccatgggttccgcgccggcctatgcgctgatgccggaaagcttcccgcgtcatatccgcgccagctatatggccagcgcctacgcggtggcggtgtcgctgttcggcggtacggcgcagttggtggccgcctggctgttggacgttaccggcaataaaatggcgccggcctggtatatgatgatttgcgtattaatctcgctgctggcggtggcccgttttgaggaaaccggtgataaagcgctggaataa

SEQ ID NO: 442993 - DNA, 474 bp, Serratia marcescens
gtgtctacctcaacccgttttgccgttgctattcacatacttaccaatattacgctgtttcgcggccaggcggtgcgttcagaggatattgcccgcagtgtgaataccaatcctacggtggtgcgccgcattctcggcgcgctggcggaggccgggctgacgcattcgcagatggggcaagggggcggcgccttgctggccaggcccgctgacgacattacgctgcgcgatatttaccatgcggtggaagagcagccctatttcccgctgcaccgctccaagcctaacgatgcctgctacatcggccacgccattgtgcccgtactggaaggggagtttgaacgtatcagccgccagatggaccatgcgttggagaaaaccacgctggctgatatcgtcggccgggtagaagcctgtgccggctatcctttcaccccctgtgaacccgcatcgacaacaaacctgcctaattaa

SEQ ID NO: 442994 - DNA, 216 bp, Serratia marcescens
atgattgagatgttagaaagcctggctacggtggttattctggtgccggtcatggttgcggttctgctgggggtgatttatggcctgggcgaactgtttaacctgatttccaacgccggcaagaagcaagaaaaacccgcgccagccgccgctgcacaggcgaaaccggctacggaagcgcgcgtcaaacccgcggccgccaacgccgaagcgtaa

SEQ ID NO: 442995 - DNA, 1128 bp, Serratia marcescens
atgcgagtaagaagtgttgtgctgctcagcctgtcgctgctgttaagcgcctgcgatcgaccgtcggacacgccggcggcggggccgctggacgtgggcgtgcggacgctgcaggcccggccggtgacgctgagcagcgagctttccgggcgggtgaccgccgcgatgagttctgaggtgcgtccgcaggttgacggtattatcaaacagcggctgtttaccgaaggggcggaggtgaaagccggtcagttgctgtatcagatcgatccggccagctatcaggccagctacgatcaggcgctggcgcagctgcaaaatgcccgggcgacggtgaaatccagccgcctcaaggcccggcgctatgcggcgctggtaaaagaaaacggcgtatctcagcaggacgccgatgatgcgcaagcgacctatcaacaggcgctggcgtcggttgcgcagtaccgcgcggcggtcgccagcgccaaaatcaacctggactatacccaagtgcgggcgcctattgccggccgcatcggcatttccgccgtaacgcccggcgcgctggtcaccgccggtcagagcgacgcgctggccaccatccgtgcgctgaacccgatttatatcgacctgacgcagtccagcagccagctgctgacgctgcgcaaacgtctgacggccgcccaaacggcgcagacggtgccggtaaaggttcagctggaagacggcagcgcctatgcccagccgggaaaactggcgttaaccgaagtggcggtggacgagtcaaccggctcggttaccctgcgtgcggtggtgcccaatccgcagcaccagctgctgccgggcatgtatgtacgggcgacggtggaaaacggcgtcgatccgcaggccattctggcgccgcagcaggggatcggccgcgatgccgacggcaacgccacggcctgggtggtgaacccgaagaatcaggttgaacagcgcagcgtggttaccgaccgggtggtcggcagcaactggctggtgacctccggcctgcgggcgggcgaccggctgattatcgaaggtaccgataaggtgaaggcggggagccgggtcaacgctgtcgaagtgacggccgccaaggataaggtgcagtaa

SEQ ID NO: 442996 - DNA, 3141 bp, Serratia marcescens
atgtttgcgaaattctttatccgccgcccggtctttgcctgggtgatcgccattatcattatgctgtgcggcctgatgtcgatccgctcgctgccgatttcacaatacccggacgtagcgccgccgtcggtggccatttccgccacctatccgggcgcctcggcggaaacgctggaaaacagcgtgacgcaggtgattgagcagcagctgaccggcctcgacggtctgctctatttttcttcttccagcagttccgacggctcggtctccatcaatgtcactttcgatcagggcaccgacccggatatcgcccaggtgcaggtgcaaaacaaggtgcagcaggcggaaagccgcctgccgagcgaagtgacggcgcagggcattacggtgaccaaaaagcagagcgactttctgctgataatgtcgctgtacgatgacaccgaccgccgcagcgccaacgatatctccgactatctggtcagtaatatgcaggacacgctggcgcgggtgcagggcgtgggcgacgtgcgggtgttcggcgcgcagcatgccatgcgcatctggctcaatccgaccaaactggcgtcctactcgctgatgccgtcagacgtgaccagcgctatcgaagcgcagaatacccaggtgtcgtcgggcaaactcggcgcgctgccgtcgggcggcgatcagcaactgaccgccacggtaatgtcgcgttcgcggctgcagactgcggagcagttccgccagattatcgtcaaaagtgccggcagcggcgcgctggtgcgcctgggcgatgtggcgcgggtggagatgggggcggaagattacagcgctcattcacaggtcaacggccacccgggggcggggatcgcggtgatgctggcgccgggcgccaatgcgctgtcaacggcgcaggcggtgaaagccgccatcgccgacttccagcgcggcatgccgcagggctataaggtggcctatccgctggacagcaccgactttattcatatctcgatcgaagaggtggtgaaaaccctgctggaagcgatggtgctggtcgtggcggtgatgtttgtgttcctgcagaacctgcgcaccacgctgatcccggcgatcgccgtgccggtggtgctgcttggcaccttcggcgtgctggcggcatgcggctactcgatcaatacgctgacgctgttcggcatggtgctgtctatcggcctgttggtggacgacgccatcgtggtggtggaaaacgtggagcgcgtgatgcgcgaacagcggctgccgccgcgccaggcgacggaaaagtcgatgggggagattaccggcgcgttggtcggcattgcgctggtgctgtcggcggtattcctgccgatggcgttcttcggcggttcgaccggagtgatctaccgccagttctcgatcaccatcgtctcttccatggtgctgtcggtggtggtggcgctgacgctgaccccggcgctgtgcgccacgttgctgaagccattagatgaacaacacggcacccgcgggctgtttggccgcttcaaccgcggttaccagcggctgcagacgcgttatcagcggcgtatcggccgggtgattcacggtccggcgcgctatttgctgttgtatacgctggtgctggcgggctgcgcgttgatgtttttccgcctgccgaccggttttttaccgacggaagatcaggggtatgtgatggtgcagttcaccctgccggccggcgcgacggacgcgcgaacggcggtcatcagcaataaaatcaaggactacttcctgaccaaagagaaagacaacgtcaacgtagtgttcaccgtatccggcttcagcctgagcggcagcgggcagaatgccggcatgggcttcgtctcgctgaagaactggagcgagcggccgggcagcgagaacagcgccgatgcgattgccaaacgggcgatggcttatttctcccgcgagcgcgacgcgcagatcttctcgctgacgccgccgtcggtgcctggtttgggccagtcgaacggctttacctttgagctgcaggcgcgcgccggcaccacgcgggcgcaactgctggcgatgcgtaaccaactgttgcagcaggccggtgagaatacggcgctgtcggcggtgcgcgccaacacgctgccggatatgccgcagctgcaggtggacgtcgacgatgccaaagccggcgcgctggggctgagcaccagcgatatcaacagcacgctcagcagcgcgctgggcggcagttacgtcaatgattttatcgacggcggccgggtgaaaaaggtctatctgcagggcgatgcgccattccgcagcaagccggaggatattgataaatggtttgtgcgcggcagcgacgacagcatgacgccgttttcagcctttgcccgcagccgctggatcaacgggccggagaacctgtcgcgttacaacggtctggcggcgtatgagatccagggtcagggcgcatccggcgtcagttccggcacggcgatggcggaaatggccaaactggcgcagcaactgcctgccggcaccacctatgcctggagcggcctgtcctatcaggagcaactgaccagcggacaggcctcggcgctgtatgccatttcgattctggtggtgttcctgtgtctggctgcgctgtatgaaagctggtcggtaccgttttcggtgatgatggtgctgccgctgggcgttattggctcgctgctggcgatcggcctgcgcggtctggagaacgatgtttacttccaggtagcgttgttgacggtaatcggtctgtcggcgaagaacgccattctgatcgtcgagttcgccgaagacgcttaccggcgcggggccacgctgacggcggcggcggtggaggccgcggcgctgcggctgcggccgatcctgatgacctcactggcctttggcgccggcatcctgccgctggcgttgtccagcggcgccggcgccaacagccggatcgccatcggcaccggtatcctcggcggtacgctgaccgcgaccgtactggccattttctttgttcctctgttcttcgttctggtgcgccgcgtgttttccggcaaaccgcagggactgaccgataagggcgcttcacatgatgcagaataa

SEQ ID NO: 442997 - DNA, 1422 bp, Serratia marcescens
atgatgcagaataaacggtggcaacgcctggccgtgttttccctgccttggctactggccggctgcctttcccttgatcctgactatcagcggccggcgctgccggtcacgctcggcgacagcaccgcggctgaccacacggacggctatccacagctggcgtggcgcgactatatcaccgacgcccggctgcggcaggtggtggcgctgagcctggatgccaaccgcgatctgcgcgaagcgatcgccaatatcgccgccgcccgcgcgctgtatgccgaaagccgcgcctcgctgctgccgaccctcgacgccggccttgacggcagccgctcgcgggcgctgaccggcagcggcaatgccaccaccatcagtcagagctatcaggcggaggccagcaccagcgcctttgaactggatctgttcggcaagaaccgcagccagacgcgcgcccagtatgagagttacctgagcagcgccgaagcggcgcgcagcacgcgcttaacggtgattgccaccgtggtggaggcctggatcgcgctggcggccgaccgcagtaatctggcggcggcgcaggatactgcggccagcgcgcagcgctcgttgacggtaacgcgcaacaaccagcggcacggcattgtctctctggtagacgtcgcctcggcggaaacggtttatcaggcggcgcgcgccgacgtggccgaatacgccaccctggtggaacaggacaacaatgcgctggtgctggcggtcggccagccggtggcggccaacctgttgccggacggcatcgacgcgctggccggcagcatgaaggaattgtcggcgggcgtctcttcgcaggtattgctgaaccggccggacgtgctggcggcggaacatacgctgaaggcggccaatgcggatatcggcgcggcgcgggcggcgtttttccccaccatttcgctgaccgccagcggcggcgtcggcagcgcgtcgctgtcatcgctgttcagccggggggccggcatctggtcgttcgcgccgagcatcagcctgccgattttcagcggcggctacaactcggcggcgctggactacgccaacgcccagcagcgggccgatgtcgccagctatgaaaaaacggtgcagaccgcctttcaggaggtgtcggacgcgctggcgcgccgcgcgacgctccatcagcaactgagcgcgcagcgcggcaacgtcgcggcggcacagcagtatgcgcatctggcggagctgcgttaccgccacggcgttgacagctatctgaacctgctgacggcgcagcgtacgctgtacagcgcgcgtcagtcgctgatcgccgtgcagcagacccattaccaaaatctgatcacgctgtataaggtgatgggcggcggtagcgcacggccggcgacggataaaactgattaa

SEQ ID NO: 442998 - DNA, 354 bp, Serratia marcescens
atgacatatgtagacggttttgtggtggcggtgcccgccgccaatcaggaggcgtatcgtgcgctcgcggcgaaagccgcgccgctgtttaaggagtttggcgccacgcgcgtggtggagtgctggggggacgacgtgcccgacggcaaactcaccgattttcgcggcgcggtaaaggccacggctgatgaggtggtggtgttcagctggattgagtacccgtccaaacaggtgcgcgacgaggcaaacggcaggatgcgcagcgatccgcggatgcaggagtttggtaatgagatgccttttgacggcgcgcggatgatttttggcggtttctccacgctgctcgacgagtaa

SEQ ID NO: 442999 - DNA, 477 bp, Serratia marcescens
atggccatcatcaggcagcaactgtggtttgcgcaagagatggaagaagcgctgacctgttatatcgcgctgtttcccggttcgaggctggaatggcatacaacgctgcccgcagagtcgccgtccggcccggcgggcagcgtcaaaatggccggttttatccttggcgatcagcgttatctggcctttgaggcgcagccgatcgatccctttacccaccgctttgcgattgccgccgaatgtgacgatcaggcggaaattgatcggctgtggacggcgctcagcgaaggcggcaagaccgaaccctgcggctggctgcaggaccgctggggcatcagctggcaggtggtgccgaaacggctgggcgagctgatccggggtgacgatcgcgccagggcgcagcgcgtggccgaagcgatgctgaaaatgggtaaaattgatatcgccgcgctggaggcggcggccaataaagcgtaa

SEQ ID NO: 443000 - DNA, 1329 bp, Serratia marcescens
atgcatcaacaacaactgaatgccctgataaacgattatccgctggtcgccagactgcaggcccttgagccgctcacctggtttaatccgcgcgccaccacgctggaacaggggctgccgttcgtcggtctggggcgggaggaggtggcgcaggcggagcagcgactgacgcgttttgcatcttatctgagcgccgcctttccggaaacccgcgcggcgggcggcatcatcgaatcggaactggtggcgatcgacgcgatgcgccaggcgctgaacggccgctatgagcgtgcgctgacgggacggctatggctgaaaaaagacagtcatttacccatctccggctcgatcaaagcgcgcggcggcatttatgaagtgctgacccatgcggagaaactggcgacggacgccgggctgctgcagccggaggatgattatacgcgcctgttctccgacgattttcgcgcgttcttcagccggtaccgcatcgccgtggggtcgaccggtaatctgggactgtcgatcggtattatcagcgccaaactgggttttaacgtcagcgtgcatatgtccgccgacgcccgcgactggaaaaagcagaaactgcgggaaaacggggtgaacgtcatcgaatatgcggaagattatggcgtagcggtggcgcaggggcgtcagcaggcggcggcggatccgcactgtttctttattgacgatgaaaactcaaaaacgctgtttctcggctacgcggtggccggtggccggctgaaacagcagtgtgaacggcagggaattgtcgtggatgaacagcacccgctgtttgtctacctgccgtgcggcgtgggcggcggccccggcggcgttgcgttcggcctgaagctggcctttggcgaccacgtccactgcctgtttgccgagccgacccattccccctgtatgttattgggcgtgcataccggcctgcacgacgcgattgcggtgcaggatatcggcatcgataacctgacggcggcggacggcctggcggtggggcggccatccggctttgtcggccgggcgatggagcgcctgctggacggcttttatacgctgagcgatgaagagatgtatcagctgctggcgctgctggatcgccatgagcaaatccggctggagccttcggcgctggccggcatgccggggccgtggagagtggttgctaacccgcagtggctgatgcagcaaggcctgagcgaacggcagatggcaaatgccagccacgtggtgtgggccaccggcggcggcatggtaccggaggacgaaatggccgcctacctgcggcagggaatatga

SEQ ID NO: 443001 - DNA, 606 bp, Serratia marcescens
atgaatacgcttgacgcgattacacaacgacgggctaccaaacagttcgacagccagcatgtcatgacgctggatgagaaaaaagcgctgctggatatcgcgctgcagaatgcgccgagcgcatttaacctgcaacactggcgtccgctgctgatagaagatgccgcccagcgtgcggcgatccgcgaagcggcctgggatcaggcgcaggtgaccgatgcttccatgctggtgctgctgtgcggcgacctgtccagctgggaatcacaggtgaaaaacatctggcacgaggcggcagaaccggtgcagcagtttatctatccggcgattgaccagtattaccgcgataaaccgcaggtgcagcgcgatgaaatcatgcgcagcagcggtattttcgcccagacgctgatgctggccgccaaagcgcagggctatgactcctgtccgatggatggcttcgactttgacgcggtcggcaagatcgtcaacaaaccggaccattaccagatcgccctgatagtggcgatcggcaaaggcgtcagccagccttatccgcgcatcggcaaactgcctctcgagcagattgtcagcgtcgatcgttactga

SEQ ID NO: 443002 - DNA, 609 bp, Serratia marcescens
atggattactctgatatagcagaacggatagctaaggtggtagtgtcaccggaaaccattaccgggttattggcgctgagtgttttcgataccggtaatcgttggcgtatgcagacagaacgaatccgtctcatcacagccatacgttcaggcatgcttaaccatcaccaaataatgcgagcaatcggtatcattattgatgtttttgtgagttatattcctaaagatatgcaagatcgcgtttaccgagggatggcttcaccggttgcaggaagagtgcttacaacgggtatcattgccgctactatcgccaatcgagtgatcgcagcaggtagtgctgcgtttttatctaaaaccgtagcgggttcagtgggcttcatattgacgaccggcgggcttattgagcactgcatatataaatctttcgagttagaacgcaagaatgtgcaggtgtactacaaattaaggcaggctggtaacctggacttcctttacttcttactgaaaccgtatctggaacctttcattaatgcactgagtgttcgtagccgatacggcgaaggggagtttatgaagatacttcagattctggaacataaagcgcaatga

SEQ ID NO: 443003 - DNA, 216 bp, Serratia marcescens
atgaaaaacgctggaattttcaaacgaggcattggttttttccgggatgtgctgtttcaactgatgcttttcttcatgttggcgctatgcgtctattttttctttcactttgaaacggtgactgcgcgtctgacatccatcaccgcgacggtggtggcgttttaccttatccataaggggatagattttatctccagaaagatgaaaggatgttga

SEQ ID NO: 443004 - DNA, 2154 bp, Serratia marcescens
atgagtgatatttctttaccggcgcaacgcctgcacgacgttgcgcaacgggcgctcgactggctgcaggacgctcgccatgattcagcgcggctggcggcggaagcggagagtctggcgctgcgcctgcgccgctgtcggcgcgacgcacggcggctgaccattgccgctgacgagagtttcagcctgggtatttacggcaatgcgcggcaggcaaaggccgcactgctacgccagttgggcgttaccccgcaccccgtcgggcagccggcgctgacggtgcgctatcaccagacgcctcagccggccacaccacgcctgacgctgctggaggaaagcgacctcgttgggctgctgtttttcgccgccggcgcgcagccgccggatcgccggcagctggcgacaggtttatccgccctgcgccgtcagccccacgcgataccggcagagggcgttgacgaagatcggctgctgacgctgtgggagacgctgagccactaccatccgcagctcgccgacgatccgttctggccggcggcgctagcgctggcgcccggcctgaatatcgatcagcgcgcagcgctgtttgctccgctgtggggagagcggccagcgttcaccgccctgtatcgtcagctggcgcaccggctgcgggagctcggcagccgccagttcacgctgacggaagatatcgacacgctgagcgcggtgatcgacggttcagcagcggcctggctcaacggcgaaggcgaccgccataccgtgctgctgccgctgactgaggcgcagacgccgcagcgctgttcacaggcggaactggcgctgctgacggccgaactgacgctcaccacgccgtcaggcgacggcatctttggtcatcccgtcgttctgcaggatatccccggcgtttcgacaggatgtgagcaggcgctaacatcctctctgctgtctgccaaacgccgctggctgttgcaccactgcagcgagcgcagccaacccacgctgctgctggtcagcggcgcggcgaccgatcgacagacagtattgccggccgccaaagcgctcagccattggcaacaaggcggactgccggccccggatgaggcaggcaaaccggacctgatctggttgctgaccccgcgcagcgctgcggcgcaggattatgaagccgccgtgcagcgccatatcggcgaaccgggcgtacactgggggacgttgctggcgcaggatgaacacgatcaccggcgcctgctggcctatctgacgacggcggtcgataaccgcatccgtcagcggcggctgaccaaacggctgctgacgctgcacaccgttctgacggaagcggtgctgggcgactggctgccggcggcggatggtgatgaacggccgcaacagcagcaggtcgcccggcgtctgctgcagacgctgcaggcccgcaccggggtacacggcgagttgctgcaacagctgctaccgccgcaggaagcgctgctgcatctctatcaacagccggcgccgcttaccggcggtgagccgttgggtatcggcatcgagctggatctgctggcgccggttgcggacggcagcgatatttccccgccgacatcgcgttttgccgacgctgcattccgcctgtggctggaacatctgcgccgtctggcggataaccgcgcgctgaagcagcaactggatatcgacggccgctgtcttagcctgctggccgatacgctgattaacgccgcctggcggctgggcattgaccgtcagctgcgcgacgcgctgatgaccgacagcggcaatgcccaacgtcaaacctcactggcgctcggcgtactcggcgattttgtcgcctggctgggcttccagcactgcttgccgcaacgacggccaaccagccgcatccagcaggggcagccgatctttacctctccgcacgcgccgtccggcgatctgacgccgccgcgtctgacccggctggcggccgcaccggtcaatgacgccgccttctatatttatgactggctggtgggattaaatacgctggcggcagacaacgtcggccatcgcgcagcggccggcctgtcggcacggcagcagcggcgtttggcgcagatcgtggcggcgctggatgatggcaaattggcgggggaataa

SEQ ID NO: 443005 - DNA, 2907 bp, Serratia marcescens
atgatgctggcgacccttccccattaccccgcacagatcacgctggtgcaaaacagcggcgtacagtttctggactttggtctgccgccggagaacgctgcaccaacgctgcccggcgcctatgtgcgtaaaaccgccaacggcccgctgctgcggctgcgcttcgatacgacgtcaggcaagcacttgctgaaccacgacgacagcacaccgccggaaacggtccgaccggagctgcgtctgccgtttgaacgctcgctggcactgctggcagaacagtggctgccgttgcctttcttccgtttcagcccggcgggcggttttctcaacggcccggcaaactgggcgcggatgcgctttacgccgttgacgcagcccgacgaggatggctgcctgtggcgcattaccctgacgtttgatacccagttgcgggaggcggataccccgtcgctggcgccggatgcgaatgacgtcaacgccggtctggcgtttgcgctggcgcatcacagccgcgatctcgacgagtttctcgatcagacctgggtcgacggctggctgcgggacgtgttccgtcagcaggccgccgagcgcgagcagcgcagcgaaaacgcgctgcgtggcgcgctgaaagcgttcgaatatcaggcgcattatctgaacctgctgacgctgctggcagagcggctgcagctgccggcgatccgtctgatcgccgccggcggacaaacggcgccgattccggtcgatttgatcctcgacgtcggcaattcccatacctgcggcattttagtcgagcagcatgcgcaagagcgtgacggtctgaagcagacctatgcgctgcagctgcgggatttcagccagccgcaccaactgcatcaggcgccgttctccagccgggtggagtttgttcagacacagtttgggccggagaactactcttttcagagcggtcgcgagcgggcattctgctggccgtcgctggtgcgggtcggcgatgaggccagccggctggcggcgcagcgtcagggcgccgagggcgccaccggcctctccagcccgcgccgctatttgtgggacgacgccccctatgaccacggctggcgctttaatcaggcgcaggagccaatggccgccgccgcaccgctgtcgttattactgaacgacgaaggccagccgttatctggcctcgcaccgtcacagcggctgccggtattcagcgcccagtacagccgcagcgcgctgatgacgctgatgctgagcgagctgctggcgcaagcgctgatgcagatcaacagcgtggcccagcgtctgacccagccgcacggcaacacgccgcgacggctgcggcagattatccttaccctgcccgccgcgatgccaaagccggagcgcgagctgtttcgccgccgcatggccgaagccatcggtctggtctggacggcgctcggctggcagacgcacgacgcgccgccgcagcctgagatccagatggagtgggatgaagccacctgcggccagatggtgtacctgtataacgaaacgcaggtcaattttgccggcgacagtaaggcgttttttgccgccatggcgcgcccggatcgccctgccgcacagcgcggtacggcgctgcgcatcgcctcgatcgatatcggcggcggcaccagcgatctgtcggtcacccagttctcgctggacgacggtctggggcataacgtaaaaatcatcccgcagctgctgttccgcgaaggttttaaactggcgggagacgatatcctgctcgatgtgatccaacgctatctgctgcctgcgctgcggcagacgctggagcaggccggcgtggcgcaccccgccgcgctgatggacacactgttcggcaatcagggacggctcgacggcctgtcaacgcggcggcagcaaacggcgctgcagctatttattccgctcggccaggcgattttacaggcctacgaaacgtacgatccgctggacgccggcgccgaactggcggccaccttcggcgaattgctgccgcagcggccgaccgacggcgtactgcactttatcaacgcagaggtgcagcgccagcttggcgccgatgcgccggccttcgacattctgcacaccccgctgctgctgccgctgcgcgatctgcacgcggcgtttctatccggacagatccgcatcaaagcgtgcctgcaggcactcagcgaagtggtggcccattacgcctgcgatgtgctgctgctgaccggccgcccctgccgcctgccgggcatgcaggcgctgctgcgccatttgcagcccctgccggcgggccgcatgctgtcgctggacggctatcacgccagtcagtggtatccgttcgcccgccacggacgtatcgacacgccgaaatccaccgcggcggtcggcgctatgctgtgcttactggcgctggacctgcgccttggcagtttttatttcaaggccggcgatttccggccttactccaccatccgctatctcggcatgctggatgcccggcagagcctgagcgacgataacgtctactatcgcgatatcgatctggatcgccgcgacttcatgctggataaccgcgcctttaccctgcgcggcccgctgcgcctgggtttccgtcagttggacaatgcgcgctggcccgcctcgccgctgtacagcctgcatattgtcgatacgcaactggcgcgccggctggccggcagcgcggtgctgcagatacggctgcgggttgccgacggtgaacgcttcgaactggccgacgccacgctggacgatggcgaagcggtgccgctgacgcacctgcagctgaaattaaataccctggcggccggcgacggcgcggcaagccattactggatcgacagcgggagcgtgtttccatcatga

SEQ ID NO: 443006 - DNA, 1191 bp, Serratia marcescens
gtgacgaaaccttttttacgcagcggcagtctggataagctggtcgctctgggggaaaatggccaacccatttacgcccaggcgcagtcaatccgcgaggcgctgcgcctcaagaatcaaccggcaatcgcagactgtctggctatcccgcaattaaacctccgacaagatcgcatcgattggtatgcgccgttcagcggtgagatccgcccgtggacggcggccgacgataatgaacgacgtgcggcgctggctcagttggacgcctgccttaccgaggttgaggcgctcagccgccaggccgttgccgcgccgcaggcggcgcagcagcgcttcggtactctgttgcgttatctgctgcgcttccctgatgcgcagcaggtttatctggtcgacggcaaaccggtgctgacgttctgggggtttgaccatgccgaacaaggcggcggcagtgacccgtttgcctgcctgcggccggaggaaacctcgccggtcgccgcgccggttatcgctgccgaaacggcgatcggcgcgccctccgcgccgcaatatgacgtccggccgccgcgcgccggccgtccaggctggctgctgccggctatcgtcatggtcatgacgctggccgcgctgggctggcaatggcggcagtctcacgacgctgcgccgcaggccgccgcacccgcgccggttcttccgatgccgccggccgcaccgcctgcgatcacgcccatgccgccgttgccactgtcaaaggcgacgttgcagccggcgccccctacgccggagcctgccgcgccgccgagcgataaccacgccctgatcatgcccgccgcagcggtgaaagccggttccacccgttttcttaacggcgaatggcgcgccgtgccggatgtcaaaacgccgctgaccggtcggctgcccagcctgcggtaccggttgcataacggtaaaggcagcctcagcatccgccaggcggataacgtgcgctgccgggttgacgtcgaaaccggactgatgccgtccggcaacctggtgattaacagccgcactaaggcgcactgcagcgacggctcccgctatcagataccggaaatcgtctgccagccgcaggaggaccgccccgccgcgtgcagcggccgctacggcgccgacacgctttaccccatgaccatcacgcgcgagaaaaaatga

SEQ ID NO: 443007 - DNA, 933 bp, Serratia marcescens
gtgaacatcagagaaaatgattttaatcgtatcgatctgaatttactgacggtattgctggtgctgtaccgtgaacgcagcgtgacgcgcgcggcgcagaaactgtttcttggccagccggcggtcagcggcgcgctggctcgcctgcgcgagatgtttaacgatccgctgtttatccgttcggccaaaggcatggagccgacgccccgcgccgtatcgctggtgacggaactgacgccgctgatggaaaatatgcagcaggtgctgtttcaacagccggagttttcccctgcccgcgcccggcaaacctttcgtctgggcgtgaccgactgggtggaaagctggctgatcccgccgctgtatcagtttttgcgccacaacgcccccggcgtccgcctgcaggtgacggcaaccgacccgtttcaggacgccgcgctgctggtgcgggacgagatcgatctggcgatttccgtcgccaatgacgccccgcacgcggtggtgcgccaggtgctgaccaccatggactaccaaactttctggcacccgcagcaacagcagccgccgacgccgctgacgctggatgcctatacccgcgccgaccacctgctggtttcctaccgcggtgctgacagcagcctgatcgatcgccagttggccgagctgggaaagcgtcgccgggtggtttacaccacgccccattttgcctcgctgcctctgctgctgcagcgcagcgcggccttcgccaccgtgcctgcagggctggcggcgggctggcggcagcattacgggctgtgcgtcagcccgccgccgctggatatcgccccgtttgaggtagcgatgctgtggcaccgccgtcgcgatcgcgagccggcgctgcagtggctgcgtcaagcggtgatctcacagctggcagagacagaatgcgccgtctga

SEQ ID NO: 443008 - DNA, 945 bp, Serratia marcescens
atgaaacgacatttagtgctggccgccggcctgctgatgaccaccgccgcggttcaggccgccgatacgcagcggcaggcgccgggatattaccggatgacgctgggcaaactgaccgtcaccgcggtgtctgatggcacggtgaccatcccgctcgatcagctgttggtgccgattgacaaggaaacgctgcagcgccggatggcggaggacgcgatgacgccgcaggcggaaacctcgctcaatacctttgtgattgacgacggcaaacagcgggtactggtggataccggcgctggccagctgttcggcaacaatggcggccatctgctggaaaacctgcgtgcggcgggctacccggccgacagcatcaacgcggtactgctgacgcacgtgcatggcgaccactccggcggtgtgtcgcagcagggcaaaccgacgttccccaatgcggatgtctatgttgataaacgcgatccggatttctggctgaacgatgccaaccaaagcaaggtggaagagggacagcgccacacctttaaagaatccgccgatgcgctcaatccgctgatcgccgcgggcaaactgaaaaccttcagcgcgccggcgcggctgccgctgggcattcaggcgcaggcggcctacgggcatacgccgggcagcgttacctaccgcatagaaagcgaggggcagacgctggtgctgtggggcgatattatccacgccaaagcggtgcagatgccggagccacaggtggcgattcactttgacgtcgaccggcggcaggcgatcgccacgcgcgaacgcatcctggcgcaggcggcgaaagagggcttctgggtggccgctgcgcatatctccttcccgggcttgggtcatgtgcagcgtcagggcaacggttatcgctgggtgccggccaactattccactcaactggcgaaataa

SEQ ID NO: 443009 - DNA, 369 bp, Serratia marcescens
gtgaatcttggtgtcgatattatagaaatagatcgcgtcgcaatggcaataaaacgcagcggagataaattattgctccgccttttaaccgatgatgagcggcgagaactgggcgacattacgcataactgcgagcgcgtcgccggcttctgggcggccaaggaggctgcagtgaaagcgttgggaaccggctttcgcctcggtatcgcctttcacgacattgaagtgcgccacgataaattaggccggcctttttattttttctcgggtgaatttgcacgcctgatgaaagaacgtggtctggcgaaatctacgctgagtatttcacattgccggacgcatgctattgcggcggcggcattcagttga

SEQ ID NO: 443010 - DNA, 756 bp, Serratia marcescens
atgtcgatatatcctgatttaaatgggaaaaatgtgctgattaccggcgcaagcggagatattggtctggctatatgcaagaaatatcttgaccaaggcgcgacggtttatgctgtttatcacaatgatgccagcgggctggaaaaattaaaaaataaacatccgcaggggcaggcgctaaatattcatcagtgcaatgtttcggacgttcagtccgtcgatgaactggtgaatacgctcgatgctgaggccggctctattcatgtactaattaacaatgctgggatttataaagataatttattcagcgcgctgagctttgaggagttcgaccaggtgatcaaggtcaacctgtacggcaccttcaatatgaccaagcagtttatgcgcttattgcgcctcgcgcgtcaggcggcgatcgtcaatatttcgtcggtatccggcgttacgtccagcttcggtcagaccaactacagcgcggccaaggccggcatcgtcggctttacccgcacgctggccgccgagatggccgccaaaggggtgcgcgtgaatgcggtggcgccggggatgatcgaatcacgcatggtaaaaaaagtcccgcgccagattgtgcgcaacgtgatgtccgccattccactcaagcgtcttggtcatgtcgacgagatcgccaacgtggtggcgtttttgagttcggacgcatccagctacatcgtcggtcagaccctgatcgtcgatggcggcctgattatgcgttaa

SEQ ID NO: 443011 - DNA, 591 bp, Serratia marcescens
atgcctaactataacaaaagtctggttaccccttcggtgctgctacggatgggcgcctggcgagcacctatttttatggtcgaccgcatcgtggattttacccccggcgagaaaggctcgatcaccgtgatcaagcacgtcaccttcaatgaaccgtatattccggggcatttcccggataacccggtgatgccgggcgtgctgatcgccgagattttcggccaggccagcgagtatttcagcctgctgtgcgattactgccagcgccatgagcgggaaaccgcaacgccgctgaaaaagttcgatgacgtggcgcgttcgctggcgaatgccgaaggggtcgagcgggtgatggccgagcgccaccgcattatcggttttctggcgtcgcaggacgtcaagtaccgccacgtggtgaatccgggcgacaccattgaggtgcacagcaagctggcgttcgccgatcccaacggcttccaccattacgaagtggaggcccgcgtcgggcgtcatatcgcctgcgccggccgtatcgtcaatttccgcatcgaccgcagcattgcggaagccaagggcatacagattaactaa

SEQ ID NO: 443012 - DNA, 327 bp, Serratia marcescens
atgagtaacaccgggctaaacgccgtgattgaacaacgacaacaggtactggaaaaaatcaaggcgggtctgatcgagcgtctcaacctgtaccagaacgtacagcagattgatgacgatacgccgctgttcggcagcgggctgaagctggattcggtagacgccaccgaggtgatcgtactgctcgatgaaaccttcaatatccgggtgaaggagggcgatgacccttcctatatgcgcagtgtgaacaccctggcgtcgtttgtgatcggcaagcagggagaaatggcggcagccaaggcagcagaagaggcggaaaaggcatga

SEQ ID NO: 443013 - DNA, 1254 bp, Serratia marcescens
atgaaactgagcgatattcatcagcaaaatggcgccatcatgggcgaacgcaacggcgtcgccgtcccactgcgctacttcgacgccgccgccgagcaccaggcgctgcgtaagaacattctactggtcgactactcgcatttcggcattgccagcgtcagcggcgacagcgcctgggcgctgctgaaccaggtggtgtccggcgatgtctcctccatccgtgacgaacaggcgatgtacagcctgatcctcgatcgcgacggcatgatcgtcagcgatctgtatatcgcctgcgatgatgaacgcttcctgctgatttccgaatggatgaccggcgaggctctgtgccagctgctgcgcgatcggctggcgggcaatgaggaagagtttgacgagattgaaaccatcgagtcgctgacgccggactggggcacgctgcaccttgaagggccgtacgcctgggaactgctggcggagctgtacggtatggacgtgatcggcctgccgttccaggagcatatgcacgttgacgaactgatcctgctgcgcagcggcaagcacggcgaattctcctacaagctgatggggccgcgtgacgaactggccgacgtatggcggcagctgcaggaagccggcgagaagttcgatctgcgcaccggcggtctggattatcagcgtctggcccgcctggagaacccttgctgggagccggggctgttcaatgactacagccgctgcccgatcgaactgcagatgcagtggacggtgcgttatgacaaagaccaattcaccggtcaggaggccatcggcgagcgcgtagagcagggcgtcgcccagcgcgccgtcggcatgaccatcgccggccgcagtgaaccgatgccgcagcgcggcgataaagtgctgctgaacggcgagtgcatcggcgaagtgatcgtctgcgactactccacggatctggaggccagccttggccgtctgatgctgcgcaacgcctgggcctgggcggatatcgactgctatcaggtgcagtgcggcgacgcgctggtgacggtgaacaccgctgcggtgccgttcgcccgcaactacagcttcctgattaacccgtcggagcacagctacgtcgacagcacgcgtccgcgcgatctgctgcagcagtttgaatggcagcgcatcaaggaagaacaggaagcggcggaaaaagccgcgcaggagcaggcagagcaggcatcggccgacaagccgccgcaggcctga

SEQ ID NO: 443014 - DNA, 2559 bp, Serratia marcescens
atgactgttactcgcaaacgcgtggtgataaccgggatggggcacctctcctccatcgccaccaatgtgcctgagtttaagcaggcgctgctcaataaaacctgcggtattaaaccgagtgaaaagtacctggaatggtttgaagacgccaacgcttcggaagtgctgcagccgctgagctggccgggactgtccgacgagatggttgcttcgctggataacgccgcgctgtgggcctataaggtgggccatgaagcgctggagcagggggaactgccgccgggcgcgctgcgtgacagaacggcgttaattatcggcgtctcctcggccggcaccgaagcctttattccgctgatcgagcagcgtatggaggcgttttcactgcagaaagccatcatttccggcagtttcgcctcgtgcagcgccattgtctcttcgctgctggggctgaagggcggctttgaactggtcgccaccgcctgtaccgccagcaccaacgccatgggtatcggctatgacctgatccagaacggcaagaacagcaccgcgttggtggtgggcaccgaacctatctatctgccgaccttcgccggcttctatgcgctgcatgccatgaaacgcacgccgtccagcccgttctccggctcgccgggcatgtcgatcggcgaaggcgccggcgcgctgctgctggaagagtatgagcacgcgctggcgcgcggcgcgaccatctacggtgaaatggtgtcgtacgccacctcctgcgacgcctaccatgaaaccgcgccggatccgcgcggcgagggcgcggtacaggtgatgcgccacgcgctgcagaatgcggcgctgacgccggaagatatcggctatatcaacgcgcacggcaccggcaccgaggccaacgaccgctgtgaaacgctggcgatgaagaaagtgtttcccaacatcatggacattccggtcagctccaccaaggcctatgtcggccacaatatcggctccgccggtatcattgagctgatcgcctgcttcctgacgctgccggaaaacaaaatcctgccgacgcttaatttcaccaccccgcgtcccaactgcgatctcaactacgtgcctaacgagttccaggacggcgacgtcaggctgtttatgaaaaacaactacgccttcggcggcaataactgctgcgtcatcgccagcgtaaagccggagcagagtcctcccagcgtctacgcgccgaagcgcgtggcaatcaccgggatgggcgcggtcagcgccgccggccacacgctgcaggcgatgctgcagcgtatgtggcagcagcagacgccggacagtctgcaaccgctgctgctggatgaggagacgcgtgaagagttccggcagatgctgggtgcggtcaaccagaacagtgaatcccgcgccttcctgaaccagcgcttcgccggtatggacatcgacgccgaactggacaaggcgaccggcttgcaccaaatcaccggtctggatccgcgcaagacgctgcgccgcttcgatccgcgcaaggccaacctgatcagcacctttgcgctgctggcgctgacgcaggcgatgaacgatgccgggcgcaaaatcaaacgcgacggccagacgctgggcatgatactcggcatgtccaaaggcccgcaggcgacggtggatcgctatctgcagagcctgttcccggatccgaccaaagtgcggacgtcggaattccccggctcgctgatgaacgccatctccaccttctgttccatctccgaaggcatcaaggggtataacacctcgctggcgaccggcatcaacgccggattaggggcgctgacctatggttacgagctggtgcgtcaggcgctgcagccgcaggtaatcgtcggcggcgcagatgaaaacatgagcaccttcgcggtgtatctgcaggcgctcagcggcgatctgcagctgacctgcgatgcggcggcttttcaggtgtacagcaatcatgcacaaggctacatccccggtgaaggcgcggcgatgctgctcctggaagatctgcagcatgctcaggcgcgtggggcgcatattcacgccgaaatcatcggctacggcaaagacaacgacggcagcttctttgatccccatgatgttgtggcccggtcggcctcgctgtcgcgcgccatcggacaggcgctgcaggaagcggcgctcgaaccgcatgagttagatctggtgtgcggcaccagcgacggcacgccgctgcgcaatgcggtggaagtcgacgcgctgcgccgtagtctgggtgaggcgcgtcgcaaggtgccgctggtcaactataacggctggttcggtctggtcgaatcgagcattggcctgctcaatatcgccgtggtcagtgaaatcatgcggcgcggtgaaatcctgccgattccgtatacgcaggaattctgcgccgaagatttccacttcgttaacgcgccactgcagcagacggtgaatacggcgctggtgatcggcgccacagaaggcggtaaccactacgccgtggtgctgaggaaggcagcgtga

SEQ ID NO: 443015 - DNA, 1227 bp, Serratia marcescens
gtgaaaccgcgggtgatagccagcggctgggggcagtgcagcccgctggcggcggattttccggcgctgattgaggcgatttccgccggacgctgtgcgacgggcaccccctggttcgacaacgacgatgactggcagaacctgcggctgggcagtaatccgcatacggtgcacgcaccgcgcgctgacgccgagccgtggcagcagctgcagccggtgattgacgaggcgctggcgatggccggcctgcaggcgtccgctttgcaggggccgcgcgtgcgggcattcctggccggcaacggcgtgcggccgaatatcgccgactttgccggctatcaggatcgtaatgatgtggaagatctgctgtttttcccggcgatcaaacggctgcatgccgacagttacgcgcaggacgcgctggcgcgccgctttgtcgacacttatcgtctcgactggccaccgacttcggtgtacagcgccagcaactcctcgctgacggcgctgcatctggcacaggccggcattgccgccggccggctcgatgtggcgctggtggccggctggctgaagatcgtgctgcaggatgtggtgtttatgggcgggcaaggcatgctcggcaatggacaatcgcagccgttcagcaatcaggacaacagcgtattgctggccgacggcgcggtggcgttggtgattgaaagtgaagatcacgccagacggcgcggcgtcacgccggcggtcgccatccgcagttcggtgtgccgccagagcagcggcgggcgcggcggcgcctttaccgccgattttcgcaccattgcgcaaaccatcgacagcgcgctgctggcggccgggctgacgccgcaggatatcgcctgcgcactgccgcacgccaacggcaccgtcgccggcgacaaggccgaagcgatggcgctgcagaaagtgtggggcaaaggcggcattccggtcgtcagttacaaagggcaggcgggctatgtcgccacctgcagcggcgtgctggactttatgctggcggcggatgccctgctgcagcggcgcctgctggccgccgccggccgtcatccggtcgacgccgctttaccgatccatgtgcatatggacgcgccgccgctgcctctgcataccccgcacctgctcaagtccggcatcgggctggatggctcggtgatcgccatggtgctctcagactgccgggagagcccccatgagtaa

SEQ ID NO: 443016 - DNA, 1053 bp, Serratia marcescens
atgagtaaaccgtctgaacgtcagataccggcggacgccgtccgcctggccggtttttccctgctggagccgaacacgctgctgcagcgttttcagcctacctggttcaacgtctgggaggcgtcgctgtataaaaaagccaacgccagatccggcagccgccagtggctgctgcgccgcttcggaattgatgatgcgatgctgcccgccgaggcactgcgcaaaaccaattaccgcgactggctgaacggcctgggcgacgcctgccatcaggcggtggcgcagttgggcgccaaaggcgaatttcagctgcgccatgagcgtaatgcgttgctgtacgtcgacgcctggggagaaaccactacctttgaagaggtcaacagctggcgcgatgcgctgagcgtcgacatcctgccgaaaaatatcgtgcgcgactatggcatcaacggcttcagcggcaagctgcgcggcgagcgcaacgggttaatgagcgcgctgctgatcgcgcaggacatgctgaacagcgatctcagcgacaacgtgattatctgcggccacttccgcagcatcccggtgctgaccttctcggaaatgcagcgttatgcccgcgcgcgcggcggtacgcagagcaacagccaggccagcgtagaacggatcggctgcctgatcctgaaaaaaaccgcccccggcggcccctggctgcaccttagccgctatctgcggctgccggactcgtcgcgccaggccgcgcagtatctggcggacagctggctgcagcactgcggcgccaatacccgtcaggtactgggcgttacgccgccggccggcgcgctgcgtcagctgcagcagcaggcgttcgatcgtctgcccgttacgctggcacatcgggcgctgaacgaactgtacggcgacagcggctgcatgaaccccgcgctgttttggcgctatctgcagcagttcccgatgccgccgggccatgcgctgctgaacgtgctggatggccaggacggcgcctggttgctggagatctggctgacggaggcgatgccgtga

SEQ ID NO: 443017 - DNA, 735 bp, Serratia marcescens
gtgaagaaatacggcttgttgatgctgatcgccgccgcgccgctttcggccgcgccacggcccgattaccaggcggtgtaccacatcctgccgctgcgcggcgacgtgccgatcggggaataccgcgtcagtcagcgctggcagccggacagcaatagctatctgcagcaggccagcattcagtttcgttggcgggtgctgctgcgctcgcaccagtaccgctaccgcgatgaagtgcgctacggcgccgacggcgggttcagctaccggattgaagaagataacgacggcaagacgcgtcaggtcagcggccgctggcgtcccaatgaaagagcgttgacgctggcgacacggtacgagcggcgtcagaaggcgaagacggtagcgaaagagacgtttgatttcccgctgttcgccctgcgctttcccaacccctgctcgccgcagcaggcggggacgcagcgcagccaccggatgctgatgccgattgacggtgaagtggtgcaggtcgagagccgttatgtcgacgtcggcgattttacgctgcccggcgacagcgccgtgaccaaagggctgtgccagatcgtcagcagcggcccgcgacgggacgcgaatcaccgctcctgggtctaccgggacggctatctggtgtacgaaatctctgccgattaccgcctgcggctggtgccggaggcatcccatttaccgcccaacgttcaggaaaaaggattatga

SEQ ID NO: 443018 - DNA, 711 bp, Serratia marcescens
atgacgatacacgctgcacaacccttgcccgtggtgtccctgcaacaggccagcaaacgcttcggcaaaggccccggcgcaatcaccgcgctggcggcgatcagtaccgagatccatgatggcgagtttatcgcgctgtgcgggccgtccggcagcggcaaaagtacgctgctgaacctgatggccggcatcgactatccaaccggcggccacgtctatctgctgggcaacgatctggcgacgctgaacgataaacagaccgcgcgtctgcgtgccgacgccatcggctttgtcttccagttcttcaatctgctgccggtactgagcgtgttcgataacgtctactatccgctgatgctcaacggcttcagtcgccgcgtagcgcaggatcaggtgatggacatgatcgagaaagtggggctggtcgaccactaccgccgccagcccggcgagctgtccggcggccagcagcagcgggtggccattgcccgcgcgctggtcaagcgcccgcggctgatcgtcgccgacgaaccgaccggtaacctggatacccgcaccgggcaggagattgtcgatttgctgctgacgatgaatcaggagctgaaaaccacctttgtgatttcgacccactcgctgaaattgcgcgatcaggccagacgcgtgctggaaatcaaggacggagagctgaaaaatgactttcacaatgcttaa

SEQ ID NO: 443019 - DNA, 669 bp, Serratia marcescens
atgactttcacaatgcttaagcgttacggtgtcacaatgttattggccgtcggcgtcaatgcttctgccgccgaccaacgcgccgcgccggagagcgggcggctacagaccattctgacgataaacgcgcaggcgccgatcgccgatctgaaccgtgccaccgccagcctgaaggcgcagtttgagcaacatgcggattacagcgtcggcaagatgttctatggctacgggcagctgtttatcgccacggattttttaaagaaaaagaactacctgcgcgccgccgaatcctccaagctgggatttttctacattgatgaggcggcggaaaccgatgacggcgactggcgcttgcgctttttacgggcgcggatggacgctttcgtaccggccagcaacggccgctgcgtggtggcggtaaaagataccgactatctgcagcagagcgcatcgctgcctgcgccgctgcgaccgatggtcacgctgatgtcggcgcgcgcgctggagacctgcagggagcaggaaaaggccgccgccgcctggacggcgctgggcaggcagggtgaagaggggcaacggctgttggcgctgcgcaatcagccagcaccggcgtgggcgcctgcggagctgagcctggtgatccggccgctgacggagggcgcgttatga

SEQ ID NO: 443020 - DNA, 1326 bp, Serratia marcescens
atgatgaatatcctgttctggatctccaatatcatcatcgtgtatgcgctgttggtggtggtcgtcaccgcgctgcgcaagccgaccgatatccgttacaccttccttaacctgttccgccagcgccgtcgatccggcgtaacgctgctggccatcaccctgggcggcgtggcggtgtttattttcggcggttttgtcgactattcgttctgggcgctgcgggagcaaaccatccgcaccaacctcgggcatattcagctgtatgagaagggctacctcaccggcggcgccaataattcgctgcagtacaccatcaaaaactatgacgaggtgaaacggctgctgctggcggatgcgcagatcgcgccgcagatcgccaccgtcaccgggcagctggcgttttccggcattatttcccagtacgataccggtacctcaaccttctttaccggcgtgggcattgagccggagacgtcgctggtgctgggttcgctggatcgcattgtttccggcagcgatctgtcgcgcgtggagcagcaggacatcaccgtcggctccggcatcgccaatgcgctgtcggccggctacagcgactgggtggatatgctggtggtgaacccgcagggagggcagaacgccatgtcgtctcaggtgcgcggcgtgttccagtccggcattaaagagtatgacgacacggcgatcaaactgccgctgaaaaccgcgcagcgactgctgcaaaccagtgacgtcagcaagatcatcatcatgctgcaggataccgagcggacgccggcggtgctggcgcagatcaaccggctgattgaacagcaccagttgccgctggaggcgcgctcctgggacgatctggcggtgttctaccaccaggtggtgaacctgttcgaaggcatcttcctgtttatcaaatccatcgtcagcgtgattgtggtgtttatgatcggcaataccctgatgatgaacgtggtggagcgcacgcgcgaaatcgccacgctgcgggcgctggggttaagccaatcttatatcggccgcttattcgtactggaaggcatcattatcggcattatcggttcggtgctgagcgtcagcttcggcattctgatcgcctccatcatcaatatcaacggcattccgatgccgccgtcgccgggctatacccagggctatctggcctttgtcatgtgggatcaggacatcaacctgttctggttctcctgcgccttgccgctggtgaccgcattgattgcctccattattccggcgcgtcgcgcctcaaaactggtgatcgcagaagcgttccgtttcgtttaa

SEQ ID NO: 443021 - DNA, 753 bp, Serratia marcescens
atgactaaaggacaaaccgtactgattaccggcgcagggcgcggcatcggcatggccgtggcggaaacgctggcggcggaaggctatgacctgatcctcaactatcgcaaggatcagggcaaaagcgccgccaacctgcagcgctttcaggcggcggaaacccgcgtcaaggtacggttggcaaaggccgacatcggtgaaacgcgtgatattcaggagatgatgaaaaagctgcgggcagacggcgtggaacgcatcaatcacctggtgctgaacgccgccgccgcaccgttcaaaggttttatggagatgacgcgcagcgactggaagctgctgttcaacaccaacctgatcggcaacaccgcctgcgtgcaggaagtggcgccgctgatgaaagacggcggcacgatttgcgccatttccagcatgggcagccagcgggtgttgccgaaatatccgctcggcatcgccaaatcggcgctggagaatctggtgcgctacctcgaagtggaactgcatccgcgcaatatccgcgttaacggcgtgtgcgctggcatggtcaacaccgatatgtcgcagtttctgaaagatctgtggccctcgctgcacgaccgatacgaacactcgccgcgccgctggctgctggagccgcaggaagtggcggatatcgtctcgttcctgatttccgatcgctcaagcgcaatacgcggcaccacgctgatcgctgatttgggcatgtcgctggaagcttaa

SEQ ID NO: 443022 - DNA, 831 bp, Serratia marcescens
atgagaatttcgattatcgccggctggctgctatgcggcatgtcgctcagcgtatgggccgatgagtcattgccgaaatcactggatcgcaccgaactggagaaactgacgcaggaagaccagcgtgcgcgcgacattatccgcaacgcggaccgggtcagggcgccggagcaaccgttccgctataccctgacgctgaccgagcaccgcggcgggcgcgatctcaccgagaatcagcaggtgctggatatttcgatgcgtttttataaaccgtcggagcgctatgagaaaggcgacgcgcgcgcgctggtgcgctttgtgtcgccggcgcgcgatcgcggcaaagcgctgctctccgatctggacaagatgtggtattacgcccccgacctgcggcggccgatcccgatatcgcgtcagcagcggctgatggggcaagtctctaacggcgacgtggtggcggcggactttgattattcctacatctccacgctggtcggtgaagaggcctgcggcgacaaaacctgctacaagctgacgctgaagcgccgctggccttatgtgacttacccggcgatcgactactgggtggaaaaggacaccggcaaccccagccgggcggactttctgtcggcggacggcgtgctgatcaagcgctcttattaccgcgattaccagcaggcgctgggccgcctgcggccgggcaccatcgtggtggaagacgcgctgcgcaaggacaattacaccaccatgcaatacagcaatctggagctggagtcgctgccggagagtaatttccagaaagagtacctgatgagactgaacggatga

SEQ ID NO: 443023 - DNA, 1401 bp, Serratia marcescens
atgaaccgcgtcaaccggctgccgctggcggggctgatgctgctggcctgtggcggtaacgcctgggcggcggcggagtgccggctgcagcgcggtttcgccggcgtggagggcgtggcggcgctgacgtccggttcgttatggaagttcgacgacccggcgtttcgcaacaacgccatcgccaacctgtatctgacgtcggtggcgcgctgcaccctcggcgaaacgctgagcatcaaggggcaggccagcggcgcctatacgcagcaggcgcgccggcccggtgagctggaggataaacggcagcagggcgtggcaatcctcaacgaactggtggccagcctggcggtgcgcgataacttctatctcgatctcggcaaactgcgtcataccagcggctatctgttctcacgcgcgccgctcgatctgctgcgcaacgtcagcggcggattgcgcaccgcgcgggtgtacgccaccggcgacagttggcgcggattatacgatgaaggcagctacggcgccggcggtacgctgtaccgcaaagagggcacctacacgctggcggtgctgccgcggctgaagcgttttccgcagcggcgcgaggccgcgtcggaatgggatgcgctgctgcgcaccaacggcagcgagcgctactacgccagctatacctctaccgggctgaacacattcaacccgacggtatcgctgctggcgggccagcaaaaaacgctggcgctgggagccagcggcaacctgaccgataacctgattctgagcattgagggcgccgtgtcccacggggaaacctggcgacatctggacagccgctacgcgcgtgacatgcgtgaggatctggcgtatcgcgaagaagcctaccggataaacggcaagggcattgaaggggagatcggcgtcggcttgcgttataccacggccgaacaaacggaattcggcgtggaatactatggccaaagccaggggtacagccgcagcgaatggcgtaataacaccgataccatcaggtttatcaacggaggctatgccgaccggctggatccgttctggctgccggtggtgcgcgacagttttcagcaatattcacgcctgatggcggcggaaaccaccaacgtcagccgcggcggcaacctgttcggcaaacactatctgacattttatacccgtaccaacaaggaacgggtcggggagatcgattggtccgtgtcgagcatggccaatctggtcgattacagcacggtactgaatgtgcatctccgcgcgccgatgaaaaacaatattgaattgtacgctggcgccgtcgccagtattggccgcagggacagcgaatttggcatctttggcgaaaaagggaatctgtatgcaggtatgcgaatcagttggtaa

SEQ ID NO: 443024 - DNA, 984 bp, Serratia marcescens
atgcaggtatgcgaatcagttggtaatcgttttatggcgcccacgctggccgagggctggatggtgatttttccggggcagggatcaccgacgatcggcatgggcggcgatgtatgcgatgtttcaccgggcacccgtgcggtgtgggattgcgccagcgatatctccggtatcgacatgcggaaactttgtcagaaagggccgatgacgcggctgaccaaaacgctgtatcagcagttggcggtcaccacggttaatacggcgatgctgacgctgctgcgcgaacgccatacgctgccggaaagcggctatgccggccacagcgccggcgaatacagtgcgctgtacgcggccggcgtcatgaatctggaaaccctgttccacgccgtcagccggcgggccgccatcatgcagcaactggcggaacagcgcaaaggggcgatgtatgtggtgaaaccgtacgagtatgcggcactgcggcggctgatcgacgagatgcagttgggcgatcggctgaatgtctgctgcgacaacggccgccagcagcaggtggtcggcggcgaggtggcggcgctgaaaacgctgatcaatcagctggcgcggcagggcgtgaccaccatcaagctggcggttaacggcgcctggcatacgccgctgatggcggaaggcgtggcgcagatgcgtgaagagctggcagtgctgccgttctcctcgccgagctgcccggtgattatgaaccgcagcggccgggcggaatacgccatcgcgcagattaaggagaacctggcgcatcacctgaccgataccgtccgctggcgcgacagtatggatctgtggtcaagcatgggctaccgccgttttctggagatcggcaataaaaaaatgctgggccatctgttgcatgagcactatgccgcagaaagcgggcatgacattcagcattactatcagctacagcgcgacacgcagcggcaggcagggtaa

SEQ ID NO: 443025 - DNA, 1053 bp, Serratia marcescens
atgatcccgaactttgacaccttcagctcgcgctacctgcgggcggcgcgcattcctgtcgtactggtttctgcgttgctgacctcatcgctgctgcgcaacgtgatcgatatcagcctgtgggagatgctggccgggctggggacgatttgcctgtcgatcgtctggagcatgatgcgcgacgggcgcggctactgggtttacacggtctatacgatgcgggtgtacgaaacgccggaggagatcgctcgacgtatcgaacacctgtcgctgggcggcgcgtccaggctgttttatcagccgcttggtgcctcgctgctcacgctgggcgtggtgatgctgctgagcctggcggtatggctgtgcgggccgcagtaccgctatccgttgattggcctgttgggcgtggtgctgctgccggcagtgatgttatggcagttggatcgttctgttccctttttaatccgtcaggcgatgatgatccataaagataaaaccggctatacgccgcggccgcggcgtttacccggctgtctggtggaggatctgctgctcggactgctgatcaacttcgccctggtactgcctatcggtcgtaaggccgagttcagcctggcggccggttacggcaatccggcgtttatcgtcgcgtttatgattctgttgacgatagtgatgctgtttatgttcttcttcgccatccgcccacgccgttatgtgctcctgggcgatatgctgatcggcaatattgctgcggacttcgccccctgcgcgccctggtcgctgaccgccaggctgacgcgcccgtggcggctggttatctggctggtggtggtagcgctgtggagcgtggcgatctgcctgcttttccaggcgatggaactgccgcaaagttttgtgccgttttatctctgtagcctgctgcccatcgtgctgatttactgtgccgagcgttatcaggcgctgtatgacaactaccttgaggcgcaggagatgcggcagcgctatgaaaccgtcgcggctgccgtcaacgccaagctgaataaagcgtaa

SEQ ID NO: 443026 - DNA, 444 bp, Serratia marcescens
atgattcataacgcatttataaaaattaatggcattgatggcgagtccaaggatttattacatcacggagaaattgatgttattcgctggaggtggaatgttggggcagctttaagtaaaaataataatatattaagtggtaacaatacggtcaatggttttgtttttgagcattatatcgataagtccagccaggggattcttcattatttcaccagcggaagggatatttcagaggttgtattaaccattaaaaaatcagacggtgcaaaattagaatgtctccaaatcatgttgcaagaagtcgtgataaccaacatccagcctatctgttacaataccatgcgcactccaagagaaaaagtggagttgttgtattcacggtttacgatggattatgtctcgcaggacaagcaaggtttcacagtggagtcactattatag

SEQ ID NO: 443027 - DNA, 609 bp, Serratia marcescens
atgttatatatagatgaagatgggtttgtcgatgcagagcgcattgttgtcaaaatattcagcacgatagagcgaggaacgttgggagcagtgaatggaattatcgttcatcaaacggctagtgcgacggccagtagtacatttaatagttaccagcacaaaggggctaatggggcccattttttaatcgatagggatggggcaatctatcagacagcttcattattcagagtgacttggcatgtaggattaattcagtcgcggtgctttttaaagaaaaaatgtaagccagcagaattccagaaagtctccgaactggaaaaatcatggaaaaactatagaaaaatatctggcctggaacagaaaaaatcttttcctgaccgtttcccgaacaacagtgatagcatagggatagagattgtcggaaaggctgaggatactggtaaaagggaactggtttttgaaagtgttaacgagaaacagaatgactctcttaaatggttgataagcgaattatcagatacgctgaatgtccccatgactgaagtatatcgccaccctgaaatcggaagaaaaaacatgacggaagcgagtacggcaaaatggtaa

SEQ ID NO: 443028 - DNA, 1674 bp, Serratia marcescens
atgcagactcgtctgttcaaaatcctgacgctcagcgccgccatcatggcgaccagcaccccgctgctggcggcggatctcaccgccggcgccgtcgccgcaccggatgaatacggcgccaaagtggcggcgcagatcctgaaggccggcggcaacgcggtggatgccgcagtagcgacagcatttacgctggcggtgacctatccggaggccggcaatattggcggcggcggttttatgacgctgtacgtcgacggcaaaccctacttcctggattaccgtgaaatcgcgccaaaggccgccagcaaaggcatgtacctgaatgaaaaaggcgaagtgattgagaacctcagcctgatcggcagtaaggccgccggcgtgccgggcacggtgctcgggctgtgggaggcgcacaagaaattcggcaagctgccgtgggcggagctgctgacgccggccatcggctatgcgcaacagggctttaaggtcgccggccagcagtatcaataccgtgaagacgctaataagctgtttgccggcaaaaccaactttggcgactactttggcaaaatgcagccgggcgtagtgtttaaacagccggagctggcgaaaacgttgaccagaattgccgataaaggcgcggcggatttctatcagggggaaacggccgccctgctgctcaggcagatgcagcaggacggcgggctgatcagcgcacaggatctgaaagactaccgggtgaagtggcgcgaaccgatgcaaatcagctggcgcggcaacaccctgtataccgccccgctgcccagctccggcggtatcgcgctggcgcagctgctgggcattaaagaagaccgcgcggcagactttatcggtgttaagctgaactcggcgcgctatatccacctgctggcagaaattgagaagcgggtgtttgccgatcgcgccgactatctgggcgacccggatttcagcgacgtgccggtagcaaaactgatcgccgctgactatctgcagcagcgtgcggcagaggttaacccgcaggcgatctccgccaccgagaaggtgcggccgggtctggagagccaccaaaccacccacttctccatcgtggatgccgaaggcaacgcggtcagcaacacctataccctgaactgggactttggcagcggcgtggtggtcaaaggcgccggcttcctgctgaatgacgaaatggacgatttcagcgccaagcccggcgtcgccaatgcgtttggcgtggtcggcagcgatgccaacgccatcgaaccgggcaaacgcatgctctcctcgatgagcccgaccattgtcacccgcgacggtaacgtgacgctggtgatcggcacgccgggcggatcgcggatcttcacctcgattttccaggtgctgaacaatatttatgactatcacctgccgctgcagcaggcggtggcggcacagcgggtgcatcatcagctgttgccgaaagacaccatttacttcgacagcttcgcgccgttaaccggcgaggtggcggcacagctgaagacgatgggctatacgctggaagatcagggctggaatatgggcgatattcaggtgattcgaatcaataacgacacgccggaaaccgcctcggatccgcgcggtcgcggcaccggtctggtggtcgccaagtaa

SEQ ID NO: 443029 - DNA, 399 bp, Serratia marcescens
atgaaggtcgggtttcgtgatatggcgcaaatggaagaatggcacggcacgccgcagcatccgcatgagctgattcatcaccgctgcatcggctggcgcaaagagcctggtgcctctccctaccgctgggagtttgccgagcaggggcgtgattttgatgtggccgtcaatcctcagctcaccacgaacgatatgggcgtgatggtgtgcaccgcctgcgcaggcggcggtatcagctttggcatggaggagacctttctgccatacctcgcacgcggtgagctggtgacgctgctggatgaatggctaccgactttcccccgctcctatctttatttccccagcagaaaatatttggcgccgaagctccgggcgtttattgatcatgtgaagatgtaa

SEQ ID NO: 443030 - DNA, 1257 bp, Serratia marcescens
atgactacgcttaaccttcccgtcgttgtcagcgcacgcaccaaatggattcagttatttcttgggctggtctgtatggcgtcaatatccagcccgcaatatgtctggacattattaacccgtccgctggcggagaaaatgggcgtgggcctggcggagctgcaggtgactttctcgctgctgattatcctgcaaacctttttctccccgtttcagggcaaactgatcgaccgcttcggcccgcgccggttgatcgctatcggtacgctgctgtcggggctgagctgggtgctggcctcgcaggtcaccaacctgaccgggctgtatctggcctatggctgccttggcgggctgggcaccggtatcgtgtatgtcggcgtggtcgggctgatggtgcgctggttcccgcagcagcgcgggttcgccgccggtgcggttgccgccggctacggcatgggcgccattctgaccacctttccggtagcgaacagtctggctgcgtacggtcttgaacacacgctgtggctgttcggcgctattttttcgctggtcgggctgctggccagccaggggctgaaagcgccgctggacgaggtgacagagccggccagccgttttgtggcgcagtcgtcgcgccagtaccgctccggcgagatgctgcgccagccgctgttttggctgatgtttgccatgatggccatgatgtcgacctccggcctgatggtgacctcgcaaatggcgatatttgcccgtgacttcggcatcgctgacgtggtggtgttcggcatggcggcgctgccgctggcgttaacgctcgaccgctttaccaacggcctgacgcggccgctgttcggctttatctccgaccgctacggccgggaaaaaaccatgtttatcgcgtttgccctggaaggatgcgcgatgacgctgtggctgatgtcgcgcgataacgccgtactgtttgtgctgctgtccggcgtggtgttttttggctggggcgagatcttttcgctgttcccgtcaacgctgacggataccttcggcagtcggcatgccaccgccaattacggctggttatacatgtcgcagggcattggctccatcctcggcgggccgctggcggcgctgatgtatcaatataccggcggctggcatctggtattcggctgcgccattgcgctggattttatcaccgccggcctggcgctgtgggtgctgcagccgtggcgccgtcgttttatgcagcggcaggcgtga

SEQ ID NO: 443031 - DNA, 684 bp, Serratia marcescens
atgaaaattctaatggtgctcacatcgcatgaccaactgggcgataccggcaaaaaaaccggcttctggctggaagagtttgccgcgccctattatatcttcaaggatgccggcgtgcagctggtgctggcttcgccggccggcggacagccgccgctggacccgaagagtaatgaagaggaatcgcaaaccgccgatacccgccgttttgtcaacgacgcgccggcggtagcggcgctctcttccacccggaaactggcgcagatcgtaccgcaggaatttgatgcggtattctatccgggaggtcacgggccattgtgggatttggccgaagaccaccactccatcgcgctgatccaggagacgctggcgcacggcaagccggtggccaccgtgtgccatgcgccgggcgtgctgcgccatgtcaaggattcccgcggtcagccgtgggtgaaaggcaagtccgtcaccggcttcagcaacagcgaagaggatgcggtcggtctgactgacgtcgttccgttcctggttgaagaggtgttgaaacaaaatggcggcctctatagcaaaggcgaggactgggcatcgtacgtgatcaccgacgacctgctggtgaccggccagaaccccgcttcctcggcggccaccgccaaagcgctgctggcgctgttgaatcagaagtaa

SEQ ID NO: 443032 - DNA, 828 bp, Serratia marcescens
atgcaaggcgtacccgacagattccccgataaaaaagatcatgcccattttcgccatctgtcgcagcatgccggggtagagctttatcatgcctatatcgatcgctacgccttcgcgccccatacgcatgatgccttcggcattggcaccgtggtgcagggtgcggagcgttttcgctatcagggtgcgcagcatctggcggcgcccggctcgctggtgctgatgaatcccgatgaactgcataccggcgaatccgccagcgacggcggctggcattaccgcatgatctatctggaaccggccacgctggcgcaaatcagcggcgaggcggacatgtggttcagcgatgcggtacgtcacgatccgcaggcttctcagcgcattgccgtgacgctgagtgcgctgtggcgaacggacgatccgctggcgcaggacggcctgctgctggatatcgtcgatacgttccgcccccacgcgcggcttgcgcggccgacgcgttctgaaaccgcccaccgtttcgcggtggtgagggagtatctgtgggacaactacgcccaaccgatgacgctggcgcagctggccgcgctggtgatgctcagcccgttccactttcaacgtaaattcaaggcggaattccacgtaacgccgcaccagatgctgatggcgatccgcctgtatcgcgccaaacagctgctgacgcaggggttgccggctgcacaggtcgcggcggcggtggggctgagcgatcaggcgcacctgacgcgcgccttcgccgctcgttacggtgtcactcccgccggttatcaaaaacaggtattctctgcctga

SEQ ID NO: 443033 - DNA, 966 bp, Serratia marcescens
atgtttttagggattatgtttgcgctgtctgccgggctgatgtgggggctgattttcgtcgggccgctgatcgtgccggattaccctgcagcgctgcagtccaccggtcgctatctggcgtttggcctgatcgcgctgccgctggcctggctcgatcgccagcggctgaaaaagctgcggcgtcaggactggctggaagcgctgaagtttaccgccatcggtaacctgttgtattacgtgtgtctggccagtgccatccaacgcaccggcgcgccgatttccaccatgattatcggcaccttgccggtggtgatgtcggtcaccgccaacctgtgttacggccgtcatgaagggcggctctcctggcgacggttgacgccggcgttgctgcttatcgccttggggctggtgctggtcaacgtcgcggaactgcgcagcagcacggtgcctgtggatctctggcgctacgtcagcggtctggcgctggcgctgctggcggtagcctgctggacctggtatccgctgcgcaatgcgcgctggctgcgcgaacatccgcagctgcggccgaccacttgggcgacggcaatgggggtagcgacgttgccactgtcgctggtcggttatctgctggtctgtggtcagctggcgctgacacagcctgagtttgccttgccgttcggccccagaccgtgggtgtttgtcgctttgatggtcgtgctcgggattttttgctcgtggatcggcacgctgtgctggaacgaagccagccagcgtttaccgacggtgctggtcgggccgctgatcgtgttcgagattctggcggggttggcctacacgtttattctgcgccagagctggccgccgctgctgaccagtgccggcatcgcctgtctgatgatcggggtgatttacgccatgcgcatccggccggagccggtagtggtctcgctggacagcaaggcgtaa

SEQ ID NO: 443034 - DNA, 519 bp, Serratia marcescens
atggcactatacggaaagtttatagttaatgatgcggattattcaccgttgataatttatggcatcggtacgtttatggcgttctcgggaaacgggaattaccggaacgcaccggggtgcgaagcaatccccgacaacggcccaatcccggcggggaaatactggattgtggatcgcccctctgggggcgtcagggagccaataaagacgtggtttagtgacgtggtaaaccgtcacttatataacgtgccaacgagtaaaaatgactggttcggactattcagggacgatggttcgatagacgattacacatggataaacggggttaggcgaggaaactttagactacatccgggcactctgtcccttggctgcattacgttaaaacaccactcggattttgctgcaattcgtaccgcgttgcttagaactaagacagtccccgtcagaaatacgagatttcgtgcttatggtatgattgatgtgattagccacggagaatgcaaggtaaacggatga

SEQ ID NO: 443035 - DNA, 204 bp, Serratia marcescens
atgattatttcaatttttgttttgttgtatgccatcctgatgatctccgtcggcatcaatgagatctacttttcctccaccggtgaatccgaattctttatcagcctgctgctgactttctccggcactctggtgctgctgggcgtaatatggcgctttgtcggccggcgcggtgaacgaaaacgccataaatcgcagcgctga

SEQ ID NO: 443036 - DNA, 2436 bp, Serratia marcescens
atgattaggccgttacagatcgttctgttgctactggtgctgttcgggctgccgctgtcgccgcacagcggctatgccgccgaagaggcgcagcctgccgagcgggccgaactgagtcagcaggatattgccgcagcgctgaaaaactatcaaaaagagctggacgatattaagcaacaggtttccaaagccaccaccgataaccaactgagcaaactgcaggagcgtacgcagcagttggcgggcaataccgaacagtttctgaccgatctgcagccgatgcaggagaagctgaaagggcagctggatgtgctcggcccgccgccggcgccgggtgcgcaggcggaaaccgccgcggtggcgcaacagcgtaacagcctgaacaacagtaaaaagctgctggatgattcggtaaaacgttcgcaggccattcgcggcagcgcccatgagctgacgcagcagatcggcgatttacgccgcgtggcgttcaagtctcaactggcgctgaattccggcagcgtgctcagcctgtcgttctggacgccggtgattgcgccgcagccgcaggacaaacagcgcctgacggagttcgccgctgaactgcgcgccgtctgggatgccagctggcaggcgccgtggcgttacggcaccgccggcctgctgctgttggccggggtgatctggtcgctgggacgctatttctccgaacaggcgctcgcctggttcagcatccgctatctgccggacggccgcctgcgccgcagctttaccgcactcggcaccgcgctgattacgctgtgcactaccgcgctggcgcttaatctgttgtatcaggcgttcacccgcgcgaccgaactgtcatcgatgctgcaggactttgccgacggcttcacccgtctgggcatcttctgcgcgctgatcgccggtctgggaagggcatttttgtccaaccgtcgtccctcctggcgtctgcctgccattgacgacaccatcgccgccggcctgcgtaacttctcgccgctgctggcggcgctggtgctggcgttcggcacggtcgaactgattaacaacgtgattggcgccagccttggttccaccattttcagcaacggcctgctggctgcgctgatggcgctggtgctgttggcgataacgctgcgcgcccatcgtctgcgccagcgcagcgaacgccagggcgaacagctggaaaaacgctcgatgatcggcggactggcgcagctcgccacgctgctggtgtcgttagtggtgctgctggcgctgctcatcggttatatctcgtttgcccgtttcctgatttatcaggcgatctggacgacgctggtgctgatggcgttctatttcctgattcagttctccaccgacgtctggagcgccattttctcgtcgcataccgccagcggccgttcgctgatgcgttcgctcggccttggcgagcgccatctggaacagctgaccatcgtctttaccgccgcctttaagtgcgggctgttgctgctgatgatcgtggcgctgctcaacggcaccttcggcaccaccacgccgaactcgctgctggaaaaaatcgtcgccattctcagcggcgaagggctgaaaaagctgcatatcgtgcccggcaatctgattaacgcgctgatttgcctgctgataggcggctatattctgcgcgccagcagccgctggctgaataacgaactgctgccgaaaaccatcaacgacgtcggcatccgcgcctcgctggtgacgttgttcaccaacgtcggctatgtgctgctgattctgatcacgctggccgcgctgggcatccagtggaataacctggcctggatcgtcagtgcgctgtcggtgggtatcggtttcggcctgcaggagattgtgaagaacttcatttccggcctgattctgctgaccgaacggccggtgaaagtgggggatatgatcggcatcggcggcgtggaaggggacgtgcggcgcatcaacgtgcgcgctaccgagatccagctcagcgaccgttccaccatgatcgtgccgaactcgcagctgatttcgcagaacgtgcgtaacgccaccatgggcaatgcgcagggggtggtgaccatcgcgctgaccttcccgaccgagatcgaccccgagcaggtgcgcaacctgctgctgaccgcctaccaggaatatgaggcgattcaggagtcgccggcgccttatgtgcgcttcagccagctcggcccggagggcataatcctcagcgttaccggctatgtcgccagcccgcgcatggtcggcgccaccaaaagcgagctgctgttcaatatcctcaagctgctgcgtcaggagcaggtgcatctctccagtccgcaggaggtggtggtcatgaggcagcgccagcagcagctgacggaggatgaggaggcttcggcgtaa

SEQ ID NO: 443037 - DNA, 273 bp, Serratia marcescens
atgacgttagtgaatttggccgacgtactgctggcggccttcggcggtgcgcagaatgtggatcgcctgcgctactgcgccagccgtatccgcgtttcgcttaaagaagatggcaggctgaaccgggacggcatcgccgggctggagggcatcaaggccctgctggaagtgccggacacacagggcggcgttgagtaccaactggtagtcggccccggcaatgccaggccgttgtatcaggcgctgagcgaatccgccggccgcgactactga

SEQ ID NO: 443038 - DNA, 933 bp, Serratia marcescens
atgatcgtggacaaaattctgcgccagtttatcgaagtcgccatgtttaaaaatgtgagtcatgcagcaaacaaactctgcctcagccagccgacgctgacgcataacatgaagaaactggaagaaaatctgggcgtgcagctgctggagcgcacctccagcggcgtgaccaccacccagtatggcgagctgctgctggagcaggcgcagatgatgcagcgtatctatgataatacgctgctgaagatggcggcgatcaaagcgcgtcaggcgcagagcctgcgtatgggcagcggccacgcctggtggtatatgttcgtgcgcgactgctttaaccgttaccgcgagcagcacgcaacggtcaatatccatattgacctgggcaaccacctgcggctgatggatctgctgttaggcggtgatatcgacctgtttatcggccatgaaattcaggggctgaacccgaaggccggtattacctttctgccgctgttcgccaccgccgacacgctgttcgcccgtcaggatcatccgctacaggggcgcgccgtgcggccggacgatctgctggattacccctgtgtagagctgacgccggatgaaacccgctatcagcatatggtggcggatatgcagcagaagaagctgacgcgcaaccgccagcatctggcggagcgggtgatctggtccaccaattcgatgatgtcagcgattgatatggtaaatgattctgacgcggtgatgctgacctatccccgctgtatggccggctactttgcccgctacggcattgcaccgctgaatatggaatcccacaatgtgtgcaccgtgggcatgtatctgatacgggaaaaggcggacgcgccgcaggttcagcagatgctggcgctgatgcgccagcatatcgaacggctggggccgcagcttcagtag

SEQ ID NO: 443039 - DNA, 1266 bp, Serratia marcescens
atgagaaaactgttgttaaacctgaccgcctgctcattggcgttgctgccggcgctggcgcaggccgatacgctgaggatggagtgctcgcccagcaaagaaggacgtgagttttgccattacgtcaaacagcggtttgaagcccagaccgggcacaccctgacctttatcgatttaccccgcgcctctgacgagaagctgtcgctgtttcagcagttgtttgccgccagagacgccaatgccatcgatctgttccaggccgacacggtgtggatcggcgtgctcaataaacatctgctcgatctgacgccatacgtcagcgatatgcagcaggacttttttcccgccgcctggcgcaacgacatggtgaacggccgcgttaaggcgattcccgcctatatggacaccggcgcgctctactaccgcaaagacctgctggagaagtacggcgaacagccgccgaaaacctgggccgagctgacgcgtatcgccgcgcgcattcagcaggcggagcgtgagaacgggcataaaggcctctgggggctggtgtttcagggcaaatcttatgaagggctgacctgcaacgcgctggagtgggtggcgtcgcagggcggcggcacctttatcgacgccgacggcaacatcaccattaacaatccgcgcgcggcgcgggcgctggagatggccgccggctgggtcggcaccatcgcgccgcccggcgtgctgggctatatggaggaagaggggcgcgcgctgtttcagaacggtgatgcggtgtttatgcgcaactggctgtacgcctatgtgctgacgcaggataaaagcagcgcgatacgcggcaaagtgggcgtgatgccggtgccgggcggcgtcgacggccagtcggtcagcaccctgggcggctggcagtgggcgatcagcagctacaccaaaaatccgcaggcggcggtggcgctactgaaaatcgtcagcgatgccgaatcgcagaaaaaagcgcaggcgctgctgggctgggcgccgtcacgccaggcgctgtatcaggatccgcaggtgctggcgcaggcgccgtatctggcaaccttcagcggcattctggccaaggccacgccgcggccggcaacccagacgcaacgcaaatacgcccaggtctccaaggcgatttacaacacctcattcaacgtattgcgtcgcgacagcgatggcgccgatgccgtgcagacgctgcaggcgcgtctggaacgcattcgcgcccggggatggcgctaa

SEQ ID NO: 443040 - DNA, 990 bp, Serratia marcescens
atgaaacgcgatacgcaacctttgtctctgacggtggcccatcctccgctggaaaagcgcgcgcaaacgcgccgtaaactgaattatcagcaaaaacgcagccgcatcgcctggctgctggtcgcgcccgccttgctgttactgttggcggtcgccggctggccgctgctgcgcacgctgttttacagctttaccgacgccatgctggatatgccgggcgaatggcgctttgtcggtttcgccaactatctcgatctggctgacgaacgcagctacggcgtgctggcggacccgctgtggtggcaggcggtgggcaatacgctgcgcttcagtctgttgtcggtgtcgctggagctgctgttcggcatgctgctggcgctgttgatgaatcagaaattccgtgggcagggattggtgcgcaccgccattctggtgccgtgggccattccgaccatcgtttccgccaaaatgtggggctggatgttccacgaccagtacggcgtggtgaacgacctgctgctgaaaatcggcctgatcgatacgccgctggcctgggtggccgagccggggctgtcgatgtgggcggtggtgatcgccgacgtgtggaaaaccacgccgtttatggcgctgatgctgctggcggcgctgcagctgattcccggcgatctgtatgaggcggcgcgggtggacggcgccaacgcctggcagcgcttccgccgcattacgctgccgctgattatgccggcgatgatcgtggcgctgatcttccgggtaatggatgcgctgcgggtatttgacctgatctacgtgctgacctccaacagcgaggccacggtatcggtctccggctatgcccgcgaccagatggtcagctaccaggagatgggcgccggttcggccgcttcggtgctggtctttatgatggtggccggcatcgccgcctgcttcctgacactgtcccgcctgaacgataaggagaaacgcgcatga

SEQ ID NO: 443041 - DNA, 846 bp, Serratia marcescens
atgaaactgacgcggcaacaacagcagttcggccatcgcgcgatgatctacgccggtgcggcgctggccagcgtgatctgcctgtttcctttctactatgcgctgattacctcgctgcgcggcgggcaggatctgttccgcgtcgcctatctgccggacgcctggcactggggcaactatgtcaccgcgctgatggagaacggcatcgcccgcagcctgttgaattcgatactggtggccggtgtcacggtggggctgtgcctgctggtgtcgatcaccgcggcgttcgcgctggcacgtatctcgttccgcgggcgcaaatatctgctgttcaccattttatgtgtgtcgatgtttccacaggtggcggtgctgtccggcatgtttgagctggtgcgttttctcggactgtatgactcgctgggggcgctggtactgtcctacgccaccttttcgctgccgttcaccgtctgggtgctgaccacttttatgaaatccatcccgctggagctggaggaggcggcgatcgtcgacggcgctggcacctggaccattatcagccgcattttcgcgccgattatggggccgtcgctggtgaccaccgggctgctggcgtttatcggcgcctggaatgaatttatgttcgcgctgacgtttgtcatctccagcggcaaacgcaccgtgccggtggctatcggcatgctgcagggcgcctcgcagtttgaactgccgtggggggcgattatggccgcctcggtgattgtcacgctgccgatcgtggtgctggtgctgatcttccagcgtcgcatcgtcagcggcttaacgaacggtgccgtaaaaggctga

SEQ ID NO: 443042 - DNA, 1362 bp, Serratia marcescens
atggcgacaaaaatcgtattggtaggtgccggcagcgcacagttcggcttcggtacgctgggggatatcttccagagcaagacgctgtacggcagtgagattgtgctgcacgacatcaaccccgcctcgctggcggtaacggaaaagaccgcacgcgacttcctggcggcgcaggatctgccgttcagcgtcagcgccaccaccgaccgcaaaagcgcgctgcagggcgccgagttcgtgattatctccatcgaagtcggcgaccgcttcgccctgtgggatcaggactggcagatcccgcagcagtacggcatccagcaggtttacggtgaaaacggcgggccgggcgggctgttccattcgctgcgcattatcccgccgatcctcgatatctgcgccgacgttgccgacatctgcccggatgcctgggtgtttaactactccaaccccatgagccgcatctgcaccacggtgcagcgtaagttccccgagctgaattttgtcggcatgtgccacgaaatcgcctcgctggagcgctatctgccggaaatgctcggcacgccgttcagcaacctgcagctgcgcgccgccggcctgaaccacttcagcgtactgctggaggccagctacaaagacagcggccgcgacgcctatccggacgtgcgcgccaaggcgccaggctattttgagcgcctgccgggctacagcgatattctggcctacacccgccagcacggcaaactggtggagacggaaggcagcaccgaacgcgacgcgctcggcggcaaagacagcctctatccgtgggcggaccgcacgctgttcaaagaggtgctggagaagttccaccacctgccgatcaccggcgacagccacttcggcgagtatatccgctgggcctacgaggtgagcgatcaccgtggcattctcgatttctacactttctaccgcaactatctcggccacgtcgaaccgcgcattgaactgaagctgaaagagcgcgtggtgccgattatggaaggcatgctgaccgacgccggttatgaagaggcggcggtaaatattcccaaccgcggctttatcaaacagctgccggcgtttatcgcggtggaggtgccggcgatcgtcgacaagaagggcattcacggcattaaggtggagatgccggccggtatcggcgggctgctcagcaaccagattgcggtgcacgacctgaccgccgaggcggtaatcaacggttcgcgcgatctggtgatccaggcgctgctggtggattcggtgaacgataagtgtcgcgccattccggagctggtggatctgatgatcgcccgccagagcccgtggctggactatctgaaataa

SEQ ID NO: 443043 - DNA, 1116 bp, Serratia marcescens
atggcgcaacttacgctggaaaaactgcaaaaacgctacggcagccacgccgaggtgattaaatcgctggatctgcagatcaacagcggcgaattcgtggtgatcgtcggcccgtccggctgcggcaaatcgaccctgctgcggatgatcgccgggctggaggcgatcagcggcggcggtatgtatatcgacggcaactacgtcaacgacgactcgccggccgaacgcggcatcggcatggttttccagtcttacgcgctctatccgcatatgacggtgtaccagaatatggcctttgcgctggagctggcgaaggtcggcaaaagcgaaatcgaccgccgggtgcgcgacagcgcgcgcgtgctgcagctggagcagttgctcgaccgcaagccgaaagacctgtccggcggccagcgccagcgggtggcgatcggtcgcgccatcgtgcgcgaacccaaactgtttctgtttgacgagccgctgtccaacctggacgcctcgctgcgcgtacagatgcggatggaggtggccgcgctgcataagcgcctcggtgccaccattatttacgtcacccacgatcaggtggaggcgatgacgctggccgaccgcatcgtggtgctgaacaaagggcatatcgaacaggtcggcacgccgctggagctgtatgaccatcccgccaacgagtttgtcgcccagtttatcggctcgccgaaaatgaacctgatcccggcggtgctcaagcgcgccggcgaacggcagagcgtggtggagctggataacggcaagcagctggtgctgccggtggcgacgccgcacgcggcggaagggcaaagcgtcaacctcggcatccgcccggagcatattcagggcggccggctggaggagtgcgaatatcagggggaggtgatgtttgtcgaacatatgggcaacgagacctacctctacctggacaacggcaacgccggcgaaccctgggtgctgcgtaatccgcagcgttcgccgattacggcgggcgagaccgtcggcgtgcggctgccggtggagtgctgctatctgtttgatcattacggccgggcgttcccgcgccagcttccctccgagcaggcgcactaa

SEQ ID NO: 443044 - DNA, 426 bp, Serratia marcescens
atgcgccagagagtcatcgtgtgcccggtgatacaaaacaacggcgagtatctgctggctaaaatggccgccgatcgcggggttttcccgggacaatgggctttgcccggcggcggaatggaacccggcgaaaccatggaaaccgcgctaaggcgcgaaatcatggaagaattaggcgaaaaactctgcatcactgatgttaaaccatgggcgtttcgtgatgatatccggaccaaaacctatccggatggaaccaccgaagaaatttacatgatttatctgatatttgactgtgtgagcaccaacaggaagattacgtttaacgaggagtttcaggacgttatctgggtgccggccgaagcgctgaaaagcatggatttgaatgaagcgacccggttcacgtttgcccagaaggggctcatttag

SEQ ID NO: 443045 - DNA, 156 bp, Serratia marcescens
atgggtttcccctcattcattttgaacaatgacggcaagcgctttttcagggtgtcgatcggcataacggttatgggtatggttttatttttcgcctggccgtatataaaaatggagtttgccagcagcgcatatatacccagaaagagcggctga

SEQ ID NO: 443046 - DNA, 429 bp, Serratia marcescens
atgaagacgtttagaatactgacaatcgtgctcgttgccatcggcgctatgttcgccttcgcctggccctatataaaaatggaatttgccggtagcgcatactatacccagcaagatagtcgggaatatgcgttctacacgcctgaactgctgaaaaacatgccgcgtatcgcggagcactatagctttgagtttggtaacgtcagcgggccggaggcgcaggtctttaccgttagattcgacaacgcaacggatacaagcaaaattcgcagttacctagcgtctgcgggctatcaaccacagtctcgatgcgacgttgaagcagagtgctggcgcactccgcagtccaaagatgttgtgaccttaattaaatatacttcgccaaatagcgttgtggttcaaatctaccgcagtccgcataccgagtaa

SEQ ID NO: 443047 - DNA, 705 bp, Serratia marcescens
atgagcaaacgttcagatatactcgacggaaaatacgctgcgactgaaaaatatggtctggtttatacagaagtactcggttggattgatctaggccatgcgcaaggaactgatattcatgctttgctgaataagctagcccgtggagaattatccggacataaatactatgatgtgacttattctcaaggcatgagagacccatttaacttaatccgctcgggtaaaatgataacgtggcgtatcagacgtggccgccctttttgggagcaaaaaagcatcgcgttggcgatgatgatgacactggcgcgaaagtttgaggctttccagggcacattccctatcaactttgtgactgacagcggatacagcggtgaagatctggtttctgatttgctcggtttttatcgcgccgtgtcgattcagaacccttttcctatgctgcgcccggtcagcaaggtggaagcgctaagacgctgggatcattacggaaaaattggcgcatggaaaaacgaagaatttaaaccgctattgtttcccgacccgaaaaaatttccttatgccagaccacgtaaaggcatgctaccgccgtttatgcaaacgatcgtaccctataaggattttttatcggggaatgtgattttaccacgccgtgataaaacgtttttcgttataggtacaggtaacggcaggatgaaactatga

SEQ ID NO: 443048 - DNA, 552 bp, Serratia marcescens
atgaacataaccattagtttagaaaccccgcaggatatcccccaggtgcagcaggtgattgctgatgctttcggctcccacgaagaagcggcattggtgaatcagctgcgccaggacccgggctggcttccagcgctgtcgctggttgccaaagaccgccatggtgcggttatcggccacgttgtctgcacccgcgccagcgtcggtgcccatcctgcggtaacgttggcgccgctgtcggtgcatccggcacatcagggttccggcgtcggcagcgcactcatgctggcctgcattgaggcggcgcgcgccgccggcgagaaaatcatcaccgttcttgggcatccgcagtattacccgcgttttggctttataccggcggccggctgtggggtgacctgccgcctcaataacggccctgacgacgccaaaatggtgatgtcactggatggcgcgccgattccgcccggcgaaatgggattttgccgcccgatgaccgaggcgattcaggcctatcagccggcggcggataacccgtcggcagcgcgttaa

SEQ ID NO: 443049 - DNA, 258 bp, Serratia marcescens
atgaatatctcccgtcaggaacagcggacgctccacgtcctcgccaaaggcggacgcatcgtccacacccgggccgcctccggccgcgtaatcgcagtggaatgttacagtcgtgaaggactgctgttgagcgactgcacgcttacggtattcaaaaaactgcggacgaagagactgattaagtcagtcaatggccagccgtaccgcatcaataccaccggcttggcgcacgtccgcgcacagctcgacaaccgttaa

SEQ ID NO: 443050 - DNA, 645 bp, Serratia marcescens
atgacgctgaccctggatggcgaaaagattgaccgcaaccgctttatcggtgcaaaagttgaaaatgcgacctttcacaactgtgatttttcgggggcggacctgaccggcagcgagtttatcggctgcacgttctacgaccgcgacagccggttagggtgccgcttcagccgggcgcagctgaaggacgccagcttcaaaagctgtgatttatccatgacggatttcagaaacgtcagtgcattgggcattgaaatccgtgaatgccgagcgcagggcgcggactttcgcggtgccagctttatgaacatgatcacctcgcgcagctggttttgcagcgcctacatcaccaagagcaacctgagttacgccaacttttcaaaagtggtgctggagaagtgcgaactgtgggaaaaccgctggaacggcgctcagattctgggggcaaatttcagcggctccgacctttccggcggcgagtttgcttcgttcgactggcgcgccgccgattttacccactgcgacctgaccaattcggaactgggcgagctggacgtgcgcaacgttgatctgcaaggggtcaaactggacagctatcaggcgtcgcagctgatggagcgcttaggtatcctggttatcggctag

SEQ ID NO: 443051 - DNA, 969 bp, Serratia marcescens
atgcagaacctggatgatatgtattactttgcccgcgtggtcgaacacggtggcttcagcgccgccgggcgcgcgttgggcattcccaaatcacggttaagcagacgtatcaatgcgctggaagagcggctggagatcaaactgattaaccgctccacccggcagttttccgtcaccgaactggggcacgcctactaccgccactgtatggagttgactgcggcggcggaggctgcgcaggccatcgtgcaccagagccagaccgaaccgaaaggcggcatccgcatcgcctgcccgacggcgttgctgaacttcctggtgaccggcatgctggcgcgctatatgaaacgctatccgaacgtcgagatttatctggagagcaccaatcgccaggtggatattctgcgggagggttttgacctggcgctgcgtatcgacgtgccgccgctgcctgacagcgggttggcgagcaaacggctgtcgccctgcacctatcagctggtcgccagcccgcagctgctggaaacatacggtacgatcggcgatccggcggcgctcgaccgctatcccagcctgtcggtctccaccgcctatcagtcgcacgaatggcaactgcacggccccgacggcgcggaacgtcgtatccgccacagccctaatctggtgaccgacgatatgatcaccctgcgccgggcggcgctggaaggccgcggcgtggtgcaactgccgacctttgtggtgtacaaggatctcaaacgcggcaaactgagcacggtgctgccggcctggcagccgaagccagcggaggtaaacgccctgtttccgtcgcggcgcggtctgatgcccgccatccgtagcctgctggatgcgctgacggaagagttcgcccatattgacgtggccgcgctgtacgcccgttaccagcaaagcggcgacggcgacgcctgtattctgatggatgaatcctga

SEQ ID NO: 443052 - DNA, 1023 bp, Serratia marcescens
atgtcagttgaagcgaacggcacgacgctgccgaccagtatgaagcaaatcattatccgcgaacccggcggccccgaggtgttacaggtagtcagcgccgagctgccgcgccccggcgccggtgaagtgttgatccgcgtccgggcggcggggattaatcgccctgatattatgcagcggcagggaatatacccgatgcctgccggcgtcacgccggttcccgggctggagattgccggcgagatcgtggcatgcggggaaggggcgacgcgtttcgcccttggcgaacgcgtctgcgcgctgaccgacggcggcggctatgccgaatactgcgtggtgccggaaacccaactgctgccgataccgcaggggttcagcatggagcaggcggcggcgctgccggaaaccttctttaccgtctgggccaacctgctggccgaccagcgggtgaagccgggcgacagcgtactgattcacggcggcactagcggcatcggcacctccgcgctgatgctgtgccgggcgctgggcattaccgcctacgccaccgccggcagcgatgagaaatgcgccgccatcgccgaactgggcggcatcggcatcaactaccgccgcgatgactttgttgcggcgattgagaagcacaccgatggcgcaggcgttgatgcggtgctggatattatgggcggcagttactttaaccagaatattgaggtgctgaaaaaggacggccagctgattattatcggcttcctcggcggcaacgaggcggaaaaggctaacctgatgaagctggtgctgaagcgtgcgcgggtgacaggctccaccatgcgcgcacgcagcaaagaggaaaaagcgcagattgcccgcgagctgcagcagcacgtctggccgctgctggaaagcggccagtgccgcccgccgctgatctaccagacctgggcgctggacgaggtaacgcgcgcacatcaggaaatggacagcggtaagcatatcggcaaaattgtgctgaccgttggttaa

SEQ ID NO: 443053 - DNA, 846 bp, Serratia marcescens
atgccaatggcaaagctcccacagaccatctataccacgcagcgcaaatttaatgattatggtactgacgacatgcggtatggcgacattgcagcagcccggttaaaaaacgaattcagactgatttctgtatcgaatgtcgttgatccctatacattaacaagattgacagcctttaataatcctcagtcaagatttgcaggtgtctatggcaatcagcgtcgcggaggcgttgtcagtgttcaagagtgcgctcaattactattcgacgagatgcaggtaacctcattgccttatgccttcgttggttcttataaatatctgattaataaaatgctcaggcacttccaacaatccactggagctccatttacagacatgcagcttaatgctgcatataaatcgcgcatctttagcgagaataaattcgatagtacgcgatcaaccatttaccagatgataaacaactacgttgattacgacaggcgagggtatccacaaagacgtatcccagaaataacagagctaatcaatgccagagtattgccaaaatttaactctttaatcatggataaaataaatggaatgggtattactattcatgatgtccacgcaacccgtattgaaatattgcgtttagatgtgaagcaaaaccgttggcgagctgaggttaaattttctgctcaggatcattttggcctggatgttgatgacatccgtaaactgagattttatcaatttcaattctttaggatttggttcattctacaacgttatgacaggtttggtttccagccgttcttcaccaacctggaggcaacgattgacatggaaggggggcggtga

SEQ ID NO: 443054 - DNA, 450 bp, Serratia marcescens
atgagaaaatggttgttcgcaggtgccgctatcggagctattgctatcggcagttatacctatctgaaccagcgagctattaaggtgtttgccgcacatcatggtacttacaccgccgagatactggttgatcatttgccgctatcggctgcagccagtattgattggtggctaaaaaatcaacatgagattctgtcgaaataccatatccgttcaagcgatgacggcgggcctgtttatattactgtttttgcattcggcgatggttataaagaagaggaaaagaaagatcgacgctgtttttcagatgtcgagcctccaaaaaattgcatcgataaagacattctgatgaccattaaccgaacacgcagtggtgaaacacgtttcaattttgagtactcatcctacctaaaaactcacgatggcaagatcgtcaaaacggatgactaa

SEQ ID NO: 443055 - DNA, 2433 bp, Serratia marcescens
atgtctgatacaaatgcccgaccgggcatgaaaatatggtgcgcgctattggggatcgtcctcgccgctaccgggctgtttttcgccattgccggcggcaaactggtctcgctgggcggcagttggtactttctgatcgccggcgtggtgacgctgctggcggccatccagctgttccgccgccgctcgtcggcggtggtgctgttcctgctggtgtttatcggcaccctgatctggtcggtgattgacgccggcttcgacttctggccgctggtgtcgcgcctgatggtgccgaccggcctgatgctgctggcgtttctcacctggccggcattgcgcaaggcggaaggtaaagcgccgctgggcaaactctcctacctgctgtcggcgctgctggccgtcggcatggtcgtgacctttgtgcagatgttccagccgcacccgaccgttgccttcagcggcgagccgctgccattggtgccggtggataaagccaaacagcaaaaagactgggacaactacggcaacacgccgggcggcgaccgttttgtggcgctggaccagatcacccgcgataacgttaaagatctgaaagtggcctggaccttccacaccggcgataccccgctgagcccggacggcaacggcgcggaagatcagcagacgccgctgcaggttggcaaccgcattttcctctgtaccccgcacaacaacgtgattgcggttgacgcagacagcggtaaagagatttggaagcgtgaaatcaacgccaaatctcaggtctggaaccgctgccgcggtctggcctatttcgacgttaacaagccgatcccgcagccaagcgttcccggctccacccctgccgcgccggttgcactggcggccggcgatacctgccagcgtcgtattctgatgaacaccatcgatgcgcgtctggtggcgattaacgccgataacggcgagttctgccacaacttcggccagaacggcatcgtcgatctgaaagccggcctcggcgacgccgccgatccgaaatatcagctgacctccgcgccaacgctggccggcaccaccgtggtggtgggcggccgcgtggcggataacgttcagaccgatatgccgggcggcgtgctgcgtggctttaacgtgatcaccggcgagatgcgctgggcgttcgacccgggcaacgacgatccgaacgcggcgttgaaaccgggccagaactatgtgcgcagcaccccgaactcctgggcgccgatgtcctatgacccggcgatgaacaccgtgttcctgccgatgggcagctcgtcggtggacctgtggggcgccaaccgcaccaagctggaccacaaatacggcgcgtccatcctggcgctggacgccaccaccggtaaagagaaatgggtctaccagaccgtgcataacgatctgtgggacttcgatatcccgatgcagccaagcctgatcgacttcccgatgaaggacggcagcaccaaaccggcgctggtgtttggcgcgaaaaccggtcagatcttcgtgctggatcgccataccggcaagccgctgaccgaagtgaaagaactgccggttaaaacccgcaacattccgaacgagcagtattccgccacccagccgttctcggtcggtatgccgcagattggcgcacagaagctcagcgaatcggatatgtggggcgccacgccgttcgaccagctgatgtgccgcatcagctttaaatcgatgcgttatgacggcctgttcaccgcaccggataccgacatatccctcagcttccctggctcgctcggcggcatgaactggggcggcctgtcggttgacccgaacaaccactatatcttcgccaacgatatgcgtctgggcctgtgggtgcagatgattccgcagaaacaggaagacgccaatgcgcctgccagcaccggcggcgagtcggtgaatgccgggatgggcgcggtgccgctgaaaggcacgccatatgcggtgaacaaaaaccgctttatgtcgccgctgggcattccgtgccagaagccgccgttcggtaccctgtccgccatcgatctgaagacccagaaagtggtctggcaggtaccggccggcaccgtgcaggacaccggcccgttcggcatcaagatgcgtgcgcagatgccggtcggcatgccgacgctgggcggtacgctggcgacccagggcggcctggtgtttatcgccggtacgcaggactactacctgcgcgcctttgactcgtcaaccggcaaagaggtgtggaaagcgcgtctgccggtcggcagcggcggcaccccgatgagctatatttcaccggaaaccggcaagcagtacatcctgatctccgccggcggcgcacgtcagtcaccggaccgcggcgactacgtgattgcctacgcgctggataaataa

SEQ ID NO: 443056 - DNA, 2325 bp, Serratia marcescens
atgccccagcccccggttacgctgcggctcgcgagcggcctgcagctgaaactgctggccgatgcggctgccccgcgcgcggcggcgttgatgcagattgacgccggcagtcaccacgaaccgtcggcctggccggggctggcgcatctgctggaacatatgctgtttcgcggcagtcgcgcctttgacgacgatcaacgcctgatgaactgggtgcccgcccacggcggccgcctcaacgccaccacccgcgaaacgcaaacccacttcttttttgaaatcgacggcgaacgcttcgccgacggtttggcgcggctgatcgacatgctggccgccccgctgctggccctgccagcgctggcgcaggaggttgaggtgatcgaggccgaataccgtctgttgtgcaaagacgcagatacgctgtgcgaggccgcgcagcagcaggcgtttgacggcatcgccgccatgcgacgcttcaccatcggcaaccgtcaggcgtttggcgaggatatgccggcgttacgcgccgccctgtgcgatttccatcgccgccattaccacgctgccaacatgacgctgtggctgcaggcgccgctgccgctcgacactttgcgacagctggccgagcggctgacggcgacgctccccggcggcgatgtggtcctacaggcggagccgccgcggctgatcccgcaagccgatcgccggctgtgtctgccgggactgccgcagctacgcttaacctttgcgcttaaccagccggacgccgccgcccgtgacggactgcgcctgctggatgcgctgctgcaggacgaagcgcccggcagcctgatggcgctgctgcgccgtgaagcctgctgcgacggcgtccggctgcagcatacgccctgcgccgaaggacgcgcgctgctgacgtttatctttagcgtcaaccggggcagcgcggcggaagccgcaaggattgaaagcgccctgctgaactggctgcggcagctgccgtcgctcagcgcagcacagcgcgagcactacatgcggcgtggcaatcaggactttatgcgcttgccgccgctggatcagctgcgggcgcgggcgttcggcctgccgccggcgactgaagatgcactgtggacggcctgcctggccgcactgacggcgggcaatctgcgtcgtctgctggtgaccccggagggaacggcaacgccgcgcatactgcaagggttaccgctggcgctggccccctttgtcgccacccacagcgcgcgcattgcgccgcgctatcgcttttatccgcacagcgacgccccgccgccgccgttgatgctgcccgctgaacgggcaccgctgacatggcattctgacggcgatcatccgccggtattgctgctgcgccccgcgccggcaacgccgctggcgtcggcgcaggccagtttactgacctcggcgctacgcacgctggcggcagaaacggcgcatcagggcggctatctcggcgtgacgcagagccacggcgtctggacgctgcagctgtccggcgacgccccgctgctgggccgggcgctcagccagatcaatcagcgtctgacttcccttgacgatgctcttaaacaggaggcggcgcgcagctggcagcgtacgcagctgcgcgctcagggcgatatcgccgtgcgccgtctggcagcgcaattaccggaggttctgacgtcgccgggcgacgcggtgtgctggcaggcgacgctgtttgccggcgatgcggcgctgcatcagcagctcagtcagctgttgtccgctttcccggcaccgattatcgccgtgcaggatgccgcaatgatcaccgacgcacggccggtgatactcagcgacgaagatgacgatcggaccctgctgctgttttgcccgctgtcggatagctcgccggcggcgcgactggcgctgcggctgctggcgcagctgtatgcgccccgcttcttccagcggctgcgggtcgagctgaatatcggctatgtggcgcactgcgcctatcaccgctgcgccgatcgcgacggcatgctgtttgccctgcagtcgccgcactgcagccttgcgcagttgcagcgctatacccacgagtttttacagcagatgcggcaggaattagccgtgctgaacgatacggcgctgcagcaggcgaaacagacgctggcccagagcctgcaactctccgccggcgactatttgcagcacacgcgcgaaagtctgttggaacagcggccagacgccgccgcgctggcggcgctggatttgccggcgctgcttgacgggcagcgccggttgttcccttcgatctaa

SEQ ID NO: 443057 - DNA, 1146 bp, Serratia marcescens
gtgactgagaatgctgtaaaaccgtcggttaacccgccgctgtggctgctggcggagctgacctaccgctgcccgctgcaatgtccctactgctccaacccgctcgacttcgccgcgcaggagcaggagctgaccaccgaacagtggattgaggtgttccggcaggcacgggcgatgggcagcgtgcaactgggcttttccggcggcgagccgctggtgcgcaaagatttgccggagctgattgccgccgcgcgcgatctggggttctataccaacctgatcacctccggcatcgggctgacggagaaaaagctgcagactttcgccgacgccggtctggaccatatccagatcagcttccaggccagcgatgaaacgctgaacgcggcgctggccggtaacccgaaagccttccagcaaaagctggcgatggcaaaagcggtcaaggcgctgggctacccgatggtgctgaactttgtgctgcaccggcataacatcgaccagatcgaccgtattatcgagctggcgattcagctggaggccgacgacgtggagctggcgacctgtcagttttacggctgggcgcaattgaaccgcgaaggcctgctgccgacccgcgagcagattgccgatgcagaacaggtggtgcagcgctatcgtgaaaaaatggccgacagcggcaacctggccaacctgctgttcgtcacgccggactactacgaagaacggccgaaaggctgcatgggcggctggggcgcgattttcctcagcgtgacgccggaaggcatggcgttaccctgtcacagcgcccgtcagctgccggtgaaattcccgtcggtgctggagcacagcctggagcacatctggtacgaatcattcggctttaaccgctatcgcggctatgactggatgccggagccatgccgctcctgcccggaaaaagagcaggattacggcggctgccgctgccaggcgttcatgctgaccggcgacgccagcaatgctgacccggtgtgttcgaaatcagcgcaccacggcaccatcctggcggcacgcgaggcggcgaaccagacgcagatcggcatcgatcagctgcgcttccgcaaccgcgccaactcccagctgatcttcaaaggccaggcttaa

SEQ ID NO: 443058 - DNA, 279 bp, Serratia marcescens
atgaccctgaatccagaacaaactccgatgttccgccgtggctaccgcctgcagtgggaagaggtgcagcagagccatgtgattctgtaccctgagggcatggccaaactgaacgacagcgccgccgccattttgcaactggtggacggcaaatcgacgctgcaaggcatcatagaccagctgaacgcgcgctttcccggcgccgacgggctggcgcaggacgtgctggagtttttccagagcgcctacgagcaaaaatgggtaattttccgtgactga

SEQ ID NO: 443059 - DNA, 1050 bp, Serratia marcescens
atgacgactccagcgccccacgccgtatttgacggccataacgacctgctgctcaagctgtggcttgaccaccccgacgatccggccggcgccttttaccatcaggtggcgggcggccatctcgattttccgcgtatgcggcgcggcggtttcgccggcgggctgtttgcggtatttatcccgccggtggcgtatgtcgcccagcagcgcgggcagtctgaagcgcaggtgcaggactatttcgatccgctgaccatcgtcgagcagcagatcgctattatgtatcagctggagcaggcggcgccggaacggctgcgcatctgccgtacggccgacgatatccgccagtgccgggccgacggacggatcgccgcggtgctgcatattgagggcgccggcgcgctggacgccgatctgtcgcagctggatcatttctatcaactgggcgtacgcagcatcggcccgttctggaatgtgcccaacgcgtttggtgaagggatacgcggcgcgtttcccggctctccggacagcggccccggcctgaccaccgccggcaaagcgctgattgccgcctgcaaccggcgccgcatcatgatcgacgtctcgcatatgaacgaaaaggctttctgggacaccgccgcgctcagcaatgcgccgttggtggcgacccactccaacgcccatgcgctctgcccgcagccgcgtaacctcaccgacgcgcagttggaggccatcgcgcacagcggcggcatggtcggcgtcaacttcggcaccgcatttttgcgcgccgacggcaaacgagacagcgccaataccgatttgaccgaaattgttaaacatattgagtttctaatcgctaaacttggtgaagaccacgttggattcggttcggattttgacggtgtgaatgtgccgcagccgctgggagacgtcagcgggctgccgacgctgattcagacgctgtcgctggcgggttttgaccaaccgctgctggacaagctctgttggggcaactggataaaaacgcttgatgtcaactggcgcgcgtag

SEQ ID NO: 443060 - DNA, 645 bp, Serratia marcescens
atggatgttatggatgcagggaaagctattgcattaggtattgccagtattccacgtgatgcatatttagggttagaacgcacgttgcaggatctaaacctgagtgatggacgtagctactatcagcgccgtaatctggcagaggatgcccgttttgctcgcggtatgattaagatagccaagaaccgcaatcagatatacgacatagccagaatcatattagatgatgtaattgataaagttcctgaaccggttctgcgatggctgcatagtgctgtaacgcaaaaacagacggaagcggagagtagctgggttatgcaaaacttaattgtcacctaccttgcgcaacaactttgtgaaggggtaatgatgagtgcattcttcaagctcacgatccgtacaacccttaccgctggggtaggtttgatattaacgcaaggcttgctagccaatgcagctaatgcatcccgtgaactggcgttgactaaccccgccctgtatcgcaagctctacatcaaagactttgatatgctgtactttatgtttgaaaagccgatcggtaaaattaccaagctcatccaaacgtatcaaaacagcccggctcagttgcaggagtctgtacgaaacctagattttaaagggtga

SEQ ID NO: 443061 - DNA, 186 bp, Serratia marcescens
atgattttcctcatgcgtttacttttcggtctggtgggttccgtgatgggaggtgctgcacttcttagttttgcgtacttctacgaggaacccggcaacatgaagattatagccccgttagggattgttgttgttggcgtcctgttgcttatcgtgatcgacaagtttactcccaaaaaagactga

SEQ ID NO: 443062 - DNA, 225 bp, Serratia marcescens
atgaaacgcattctcttgagcctgatagcctttgtggtgctggctatcgtcctgatgtttattctgggggctattatgccggatagtctgatccgctcactggcgagcctgcttgatatccacgatgcggagggaataacaaacctgcttgcagatgtgactctcatagcgtctgcggcgctctctctgccgatcgtctggatgggtaaccgcaggttcagatag

SEQ ID NO: 443063 - DNA, 225 bp, Serratia marcescens
atgaaacgaacactcttgagccttgtagtctttgtggtgctggatatcatcttgatgtttatcctaacagccgtactaccgaagaaaatggtttatgcgctggctgaaagactcgatatctacggcgcggaagggattattgacctgtacgcctacatcactatcccgctctccctactgctcgctggacttatcgtctggataggtaaccgcaggttcagatag

SEQ ID NO: 443064 - DNA, 426 bp, Serratia marcescens
atgactatccaccataatacctcgggaaaatcgacgcttgccgtggcgctgtatgaactgctgaacccgattccgctcggattctttgttgccgcctgggtctttgacattatttacctgaaaacttttgtactgatgtggacccacgccgccagctggctgatcgccatcgggctggtgatcgccattattccacggctgattaatctggtgcaggtctggttcagcggcagcgcgcgtgagagcggggcgaaactgcacttctggctgaacctgctggccatcctgctggcaatcgtcaacgcctttattcacagccgcgacgcctacgcggtggtgccgttgggcgtcacgctctcgaccctggtggtgatcctgctgctgctgggcaatgtgcaatttgcgttacgtcaacgtgccgcttaa

SEQ ID NO: 443065 - DNA, 1302 bp, Serratia marcescens
atgaaaaaactcaataccgtcctgaccgccgccgtcctcagcgccctgctggcggggtgcgacaacggctcacagctggatccgcaaaagcagataggcccggacccggagctgccgcaggcgaaaaacttcctgatgccgccgatgcaggtgccggaaggcaccgcctggaaacagggcgagatgcccaaggtggccgaagggctgaaaattgaaaaaatcgccgagggtctgatgcacccgcgccaggtttacgtgctgccgaataacgatattctggtggccgaatccaacgggccggccaagcccaccacgcggccgaagcagctgattatgggcatcgtgcagaaatcttccggcaagggcggcgcgggcggcaaccgcattacgctgctgcgcaacgttgacggccagtggcagaaacacacctttatcgaaaatctacgctcgccgttcggcattcagctgatcggcaacacgctgtgggtggccaatgccgacagcctggtgaaattcccttaccaggaggggcaaaccgagatccgcgagccgggggttgaagtgaccgaactgccgggcggcccgctcaatcaccactggaccaaagcgctgctcgccagcccggacggcagcaagctgtatgtcggggtcggctccaacagcaatatcacggaaaacggcatcggcgcggagtatcgccgcgcggcggtgctggaagtggacgccgacagcggcgccagccgtatttatgccggcggtctgcgcaacccgaccgggctgcagtgggagccgcaaagcggcaagctgtgggcgatcgtcaacgaacgtgatgaaatcggttccgatctggtgccggactatatgacctcggtgcaggagaacggcttctacggctggccgtacagctatttcggccagcatgtggacagccgcgtacagccgccgcggccggatctggtggaaaaggcgatcaagcccgattatgcgctcagctcacacgtcgcgccgctggggctgctgttctacaccggcgacaatatgccgcagtaccgcggcggggcgtttatcagcgagcacggcagttggaaccgcacgccgctcaacggctaccgggtggtgtgggtgaagtttgaaaacggcaagccggtcggcaagccgcagccggtggtgaccggattcctgaccgacgaccagaagcaggtgcgcggcctgccggtcggcctggcgatggataagcagggcggcgtggtgattgccgatgacgccggcgacagcgtctggcgcatcagcgccgcgcaataa

SEQ ID NO: 443066 - DNA, 1443 bp, Serratia marcescens
atgaatagcaacacatcacctgcatcacaacatcatgctgacgccgtccccgatgtcaccatcatcgacaaatccctggtgaaacgcgccgtggcggcggcctcactgggcaatgccatggagtggttcgacttcggcatctacggctatctggccgtgaccctggggatggtcttctttccggagatcagccccggggcccaactgctctccacctatgccgcctttgccgtcgcctttctgatccgcccgctcggcggcatgtttttcggcccgctcggcgaccgtatcggccgcaaacgggtgctggcgctgaccatgatcatgatggcgctcggcaccttcgccatcggcctgatcccgagctacgccagcatcggcctgtgggcgccggcgctgctgatcgtggcgcgcggcgtacaggggttttccaccggcggcgaatacggcggcgccgccacctttattgccgaatatgcgccggacagaaagcgcggccggctgggcagctggctggaggtaggcacccttctggggctgatcttctccgccgcgctggtcaccgccatgaccctgctgctgggcaatgaagcgatgcgtgaatggggctggcgggtgccgtttcttataggcggcccgctggggctgatcggcgtctggctgcgtctgcggttggaagagaccccggccttcgccaaacacatggaaaacagcgcgccgccgccggggctgcgccagcagtggcgggagattgtcacccaccacctgcgcgccttcctgctgtgcatcggcatggtgtttatcctcaatcttgccgactatatgctgctgacctggatgcccggctatctgaacgtggtgctggggctgagtgagctggaggggctgaccatcgtggtggcggccatgctgtgtatgatggtggtgctgccgtttatgggcgcgctgtccgacaagatcggccgcaagccgctgtggaccctcggctgcgtcggttttctgctactgacgctgccctgcttttacgcgctgggcagcaaaaacctggcgctgacctttatcggcatgctggtgatggggctgctgctgacctgctttctcagcaccgtggcctctacgctgccggcgctgttccccaccgcggtgcgctatggcgggctggcgatcgcctataacctctccacgtcgctgttcggcggcaccgcgccgctgctcagcgcctggctggtcaacgtcaccgacaacccgctggcgcccgccggctatctgatgttcggcgcgttggtggggctgattgcggtgcggatgagtaaagagagcgcctgtcagccgctggaaggctcgccgccggcgattgagtcgcgggccgagattatggatcacctgtatcggcaccagcgccgcaagcgtctgcgcctcagcgccctgtccagcgacggctga

SEQ ID NO: 443067 - DNA, 486 bp, Serratia marcescens
atgaaactcgatcgctatgacctgaagatcctcgacattctgagtaaagacggccgcattaccaagtcgcggctggcggagtcgataaacctgtccgtcagcccctgctgggagcgggtaaaacgcctggagcaggccggactgatcgaaggatattacgccaggctcaacgcccgggtgctgatgaagcgcctgccgatttgggtatcgatcgagcttaaacaacataacgcagagagctttgcccgttttgaaaaacgcgtgctcaatacgccagaactgaccgaatgtgtggcagtgggcggcggcgtggattactgggccaaattcgaaacgctgtctatcgacgagtatcagcgtctgattgacagctggctggattccgacctgggcatcgaacgctattttacctatatcgtcaccaaaaacgtaaagtccgtcgcggcgctgcaaagcctgcgccgtgaaggcgacatagaggtataa

SEQ ID NO: 443068 - DNA, 1014 bp, Serratia marcescens
atgagtcatgaaaagcccagccccgtgtatgccggggtggatttcggccagcccggcgtgcagcacggcttcctgaagctgccctggtcccacgacaactccgcctggggcgcggtgatgatcccggtgacggtgatcaacggcgcgccggggccgacggcgctgctgaccgccggcaaccacggcgatgagtatgagggcattatcgccctgctgaaactggccaacacgctgcaggccgacgaggttcaagggcgggtaatcatcattccgatgatgaacgcgccggcggtacaggccggtaagcgcacctctcccatcgacggcggcaatctcaaccgcagctttcccggcgcgccggacggcagcgtcaccgcgcagattgccgactattttacccgggtgctggtgccgatgtgcgacgtggcgctggatctgcactccggcggccgcacgctggaaataatgcccttcgccgcgctgcacgcgctggatgacgagcgtcaacaggccgataacctggccgccgcgcaggccttcggcgcgccgctgaccgtgatgatgtatgagctggacgccagccagctgtacgacacggtggtggagagccagggtaagggatttgtcaccaccgagctgggcggcggcggtaccaccacgccgcagcgccagcagttggcggaacgcggcgtgcgcaactttctggcccatcacggcgtgctggcggagacgccgcagccctgggagggagaaacgcagctgcttgatatgccggatgcatcctgctatgtacaaagcgagcactgcggcattctggaatttctctgcccactgggccagcgcgtaaacacgggtgaactgctggcccgcgtttatgacccttcccgcagcggccagccgccggtggagtaccgggcgttgcgcgacggcattgtgctggcgcggcgctttccggcacaggttgcgatgggggacacgctggccgttattgcccgggagatcgtatcgccatag

SEQ ID NO: 443069 - DNA, 1200 bp, Serratia marcescens
atgttgacgaaaactttgcccttcacacgcgaagagtacgaccagcggatcgccaaaacccgcgccgccatggtgcagcaaggcatcgagctgttggtggtcagcgacccttccaatatggcctggctgaccggttacgacggttggtctttttacgtgcatcagtgcgtgctgctggggctggaagatgaaccggtgtggttcggccgccagcaggacagcaacggcgcgctgcgcacctgctggatggccgacgagcggattatcggttacccggagcggctggtgcagaatccggacgaacatccgatgcgcaccctggctcaggaagtgctgccgctgttcggctggaatcaggcgcgcatcggcgtggaaatggataactactacttctccgccctggcctttctgaacctgcagctgaactgcccgcagcaggaatttatcgacgccaccgccttggtgaactggtgccgggcggtcaagtcgccgcgcgagctggcgtatatgcgtatcgccgcgcgcatcgtcggcaggatgcatgagcgcatttaccagatggtggagccgggtctgccgaaaaacatgttggtggcggagatccagcgctgcgccatcgaaggctgggtggacgacgacggcgtgcgtttcggcggcgattatgccgcgatagtgccgctgttgccgggcggtgccgacgcggccgcgccgcatctcacctgggacgaccgaccgttccgccgcggggaaggcaccttctttgagatcgccggctgctaccgtcactaccacgcgccgctgtcgcgcaccattttcctcggcgacgtgccggatcacttccggcgcggtgaagaggcgctgctgtccggcattgagctggggctggccgccgcccgcccgggcaacacctgcggcgatgtcgcccgggcgctggaaagcgccatgcgccgcgccggtatcgatcgcggcggcgcacgctgcggctaccccatcggcatcagctacccgccggactggggcgaacgcaccatgagtctgcgcgccagcgacgaaacgccgctgcagccgggcatgactttccactttatgcccggtctgtggatggatgactgggggctggagatcaccgaaagcatcgttatcaccgcacagggcgccgacgtcctgtgcgactacccacgacgtctgttcgtcaaataa

SEQ ID NO: 443070 - DNA, 960 bp, Serratia marcescens
atgcagatctataaccgacagcagattagcgccgcggtgcggctggatgccgccgcgctggcggcggttgagacaggattccgcgccctcggctcgggcaacgtggtgcagccgccgatcctttcgatggcgctgccggaggtcaacggcgaagtggacgtcaaaaccgcctggatccgcggcagcgacagtttcgccatcaaaatcagccccggattttttgataatccccggcgcgggttgcccagccttaacgggctgatggtggtgctgagcgccgaaaccggcgtcccacgggcgctgctgctggatgagggctacctcaccgccgtgcgtaccgcgctggccgggctgctggcggcaaaatatcttgcccggccggagagccggcgcatcacgctgattggcgccggcgaacaggcgcggctgcagctggccgccctgcgtctgctgtttccggtcgaacaggtatcaatctgggcgcggcgcacggaggcggcgcagcggttggcccgggaactgtcggatgccgggctacaggcgacggcatacccggagagcggcgccgcctgcgccggggcggacattatcgtcaccaccacgccatcccgcgagccgctgctgtttgccgagcacctgcctcccggcgtacacgtcaccgccatgggatccgacagcccggacaagcgggagatggatatcagcgccctgctgcatgccgaccatgtcgtctgcgatctgcgcagccagagcgagcacaacggcgagctgaaagcgtttaacgggcagacgccgcccttcacggtatacgaactgggcgcattagttgccggcggcacgccgctgcgccttacgccgcaagacatcaccctgtgctgcctgagtggcaccggggtgcaggacagcgccatcgccgcctttgcgctggcgcagttggagcagttggagcagtcgcagtaa

SEQ ID NO: 443071 - DNA, 1014 bp, Serratia marcescens
atgaatcctgaacttcccggcggcgttacgctggctgatgtctggcaggcgcgccggcgcatccgcgctcaggcggataacacgccgctgcgctattcgccgtacctgtcgcagcgctatgacgccaaggtctggctcaagctggaaaatctgcagcctaccggcgcgtttaaactgcgcggcgccagcaacatgatcgccgccctgctggagcaatacgggccgcagcggctgcaggccggcgtgattaccgcctccaccggcaaccacggccgggcggtggcctgggccgcccgggaactgggcattccggctaccgtctgcctctcctcgctggtgccggccaataaggtagcggccattgaggcattgggcgccgaggtctgccgctgcggcgacagccaggatgaggcgtttgagacggtggatgaacgggtgacgagccgcggccaggtggcgattccgcccttcgaccacccgctgattatcgccggtcagggcacgctggcgctggagatcctcgaggcgcggccgcagctcgatatggtgttcgcgggcctgtccggcggcgggctgctgggcggcatcggtctggtgatgaagcagctgagtccgcgcaccgaggtggtcggcgtcagcctcagcgacggggccgccatgtggcacagcctgcaggcggggaaaccggtcagcgtgccggagacgccgagcctggccgactcgctgggcggcggtatcgggcttgataaccgccacaccctggcgctggtacgcgcgacgatggacagccactatcaggtgccggagacggccatcgcccgggcgatggtcaccctgctggagcaggagaagatgttgctggaaggggccgcggccgtcgggctggcggcgatagaacaccaccggatcccgatcgcaggcaaggaggtggcgttggtgctgagcggcaacaacgtcgcgctggaaaccttcgatcgggccagacaggagcaggcacaggatgcagatctataa

SEQ ID NO: 443072 - DNA, 1404 bp, Serratia marcescens
atggaacagcgcaacgacttgatttcccgcgaccgtcaggtgacgtttcacgcctccacccatctgcgcgactatgcgcacggcgaactgcctggccgggtgatgaccggcggcagcggtattatggtgcacgatgccgacggtaatcagtttatcgacggttttgccggcctgtactgcgtcaatatcggctacggccgtgaagagatggccgaagccatctatcgtcaggccaaagagctggcctactaccacacctatgtcggccataccaacgagcctctggtggcgctgtcggaaaagatcatcgccaaagccgggatgagcatgtccaaagtctattacggcatgtccggctccgacgccaacgaaacccagatcaaactggtgcgttactacaacaacattctcggccggccgcagaagaagaaaatcatctcacgcctgcgcggctaccacggttccagcatcgccgccggatccctgaccgggctggcgtcgttccacgaccatttcgacctgccgattgacggcatattgcacactgacgccccctactactaccaacgggcatcggagctggcgggcgttagcgaactggcgttctcgcagcactgcgccgagcggctggaggcaatgatcctggcggcggggccggacagcgtggcggcgttcatcggcgaaccggtactgggcaccggcggtatcgtgccgccgccggagggctactggccggcgattcaggcggtgctggataagtacgacgtcctgctgattgccgatgaagtggtctgcggcttcggccgtaccggcagtgagttcggctctcatacctacggtatgcgcccggatctgatcaccatcgccaaggggctgaccagcgcctatcagccgctgtccggcgtgatcgtcggcgacaaggtgtggcgcgtgctggagcaaggcaccggcgaatacggcccgatcggccacggctggacctactccggtcacccgctgggggcggcggcggcgctggcgaatctgcagattatcgagcgggaaaacctggtgcagaacgccgccgacaccggcgcgtacttccagcagcgcctgcacgacagttttgccgatcatccgctggtcggtgaggtgcgcggcgtcgggctgatggcggcaattgaattctccggcgacaaaacccgctgccggccgttcgatccggcgctgaaagtagggccgcgcgtgtcggcggcggcgctggacaacggactgatcgcccgcgccatgccgcagggggatatcctcggctttgcaccgccgctggtaatcaaccgcgccgaggtggatgaactggtcgaccgcgccctgcgggcggtgaaccgcgtggccgacgagcttggctccgccggccagctacgctga

SEQ ID NO: 443073 - DNA, 1488 bp, Serratia marcescens
atgaagttagaggatccccgtctgtttcgtcatttcgcctggattaacggcgagtggtgccacagtgagtccggcgctgaatggccggtgtataacccggccgataacagcctgctggggcatatcccgctgctggagccgccgcagatcgaacgggcagtggatgccgccgaacaggccttcagccgctggcgtcaggtgcgtaccgaccggcgcgcggcattgctgatggcctggtatcaacagttgctggcgcaccgcgacgatctggccaccctgctggtgaatgaacagggcaaaccgcgccgcgaggccgaaggcgaagtggactacgccgccagttttatccgctggtttgccgaagaggcggtgcggatcaacggtgaaacgcttgccgtacaaatcgacggcaccctgcccggcacgctgaaacagccggtgggcgtctgcgcattaattactccctggaactttccgctggcgatgatcacccgcaaagcggccgcggcgctggccgccggctgcagcgtgctggtaaaacccgccaatgaaacgcccttttccgcgctggcgctggccgagctggcggaacgcgccgggctgccgaacggcgtgtttaacgttattaccggcgatccgccggcggtctgcgcccagctgtgtgaagaaccgcgcgtgcgcgccctgtcgtttaccggctccacccgggtgggcaagctgctgctggcccagtgcgccggcagcgtgaagcgcgtatcgctggaactgggcggcaacgcgccgttcgtggtggcgccggacgtggatatcgatgaagcggcgacggcggccatcgccgcccgcttccagaccagcggtcaggactgcctggccgccaaccgcattatggtgcatcagcagatccacgacgcgtttattgaggcgtttaccgcacggctgcgcgaactgaaagtcggccccggcgacagcccggacagcgatatcggcccgctgatccaccgtgaggcagtcgagaaggcgcaggccctggtggatgacgccctgtcccgcggcgcgcgcctgatccacggcgatcagcgtcaggcgccgggcgacaactactttatgcccaccctgttggccggcgtgacgccggcgatgcgggtctggcaggaggagagctttgcccctatcgccaccgtcgccgcctggcagcaggatgatgaggcgatcgctcaggccaacgccaccgaatacgggctggcggcctacctctggacccgcgatcagcgccgggtctggcgctacatccgcgagctggagtacggcatggtggcggtgaacagcgtcaaaatgaccggccctaccgtgcccttcggcggcgtcaaacagtccggcctggggcgcgaaggcggccgcaccggcatcgatgaatatctcaccacccgctacttctgccttggcggtttgtcaggcgaacccactctgccctcagtaacaggagaatga

SEQ ID NO: 443074 - DNA, 183 bp, Serratia marcescens
atgatgacagagttcacagaaatgacggctaccgtgaacggctgcaagattaataacggcatgcgcagcaataataacggtggaatagtttttatgaggcggcgcttgaatgataaggaatcgctatggcgcatatttcatccgccggaaaagtattcaagccccccgggaaaggagggctga

SEQ ID NO: 443075 - DNA, 1056 bp, Serratia marcescens
atgaaaattaacgctatcgcggccagccatgccgaccgccctttggccccctcccagattacgctgcgtgatgtacagccggaagacgtcagcattgagatcctgtattgcggggtatgccattccgatctgcatatggcgcgcaacgaatggggtgtcagcaattatccgctggtgccgggccatgagattgtcggccgggtgcgggccaccggcgcggcggtaacgcgctttcagccgggcgatctggtgggcgtcggcgtgatggtggattcctgcggcgactgccatttctgccgccagcaggaggagcagtactgcgagacgggctttgtgccaacctataacggcaccgacagatataccggccggctgacgaccggcggctatgccgagcagatcgtggtagaccagcattttgtggtatcggtgccgcagaacctgccgctgcacgcggtagcgccgctgctgtgcgccggcgtgaccgtctggtcgccgctgcagcacctgaaactgcagccgggcgataaggtcggcgtgatcggcctgggcgggctgggccatatggcggtgaagctggccagcgcactgggggcggaggtgacgctgttcaccacctcgccggaaaaaggcgccgatgcgcgccgtctgggcgccagccaggtggtggtatccaaggatgcacagcagatggccgcccagcaacacagtctggacattattctcgactgcgtcgccgcgccgcatcagcttgatccttacctggcctgcctgaagaccaacggccatctggtgctggtcggcattccggacagcccgcacccgccgacggacgtgacgccgatggtgttccgtcgcctgagcattaccggcacctcgataggcagcattgcggaaacgcaggcgatgctcgacttctgcggccagcacaatatcaccgccgacgtagagctgattgatgccggcgaggtagaaaccgcgtttagccgtatgctgcggggcgacgtgaaatatcgttttgttatcgatatgcaacgcgcccgctgggatcaataa

SEQ ID NO: 443076 - DNA, 402 bp, Serratia marcescens
atgccggattggatcgatgggaaagtctatttttatgccgactcggcgccgcgccggctgatgtcgctgtttgccgtcaagtggagcaccatggtgctccatgcgctgtggcactggccgcagccgggcgcgcgcaccggtgaactgcagcgcagcctgcagggcatttccaagaagatgctgtttcagacattgcgtgaactggagctgcgcgggttgattgagcgtaaggtgtatcaggtagtgccaccgaaggtggaatattcgctgaccccgctggggcgcacgctggcgcagccgattgagcagatgtatcagtgggggctggataatcaggcggcgctggatgagatggagcaaaatctggcgcgcaacggccagaacgccggcgcagagccgtaa

SEQ ID NO: 443077 - DNA, 1467 bp, Serratia marcescens
atgtccaagtcaaacccgatcctggccggctcagcgcaaagcattgaagcctaccagcaggcgatcgcccagagcagcgaggcggtggcacagtggctgcagcagcctgagatgtatcagggtaaaaccgtggccgaactgcgcgaacgcattcagctggacttcaatccgcagggcctgggcaaccaggcggcgattgaacgtgcggttgaatacttcctgcaggacagcctggcggtacaccatccgcagtgcgtggcgcacctgcactgcccgagcctggtggtcagccaggccgccgaggtactgattaacgccaccaaccagagcatggactcctgggatcagagcccttccgccaccatcatcgagatgaagctggtcgaatggctgcgtgaacgcgtgggttaccagcctggcgacgccggcgtgttcaccagcggcggcacccagagcaacctgatggggctgatgctggcgcgcgacgccttcttcgcccgtcagggacactcggtgcagcaggacggcctgatcggcgatctgcgtaaaatcaaagtgttctgctctgccaatgcccacttctcggtgcagaagaacatggcgctgctgggcttcggctatcagtgcgtgacgcaggtgaaaaccgacgagcgcgcgcggatggatctgaacgatctggcggaaaaagtggctcaggcgcatgccaacggcgaacagattatggcgattgtcgccaccgccggcaccaccgacgccggcgcgatcgacccgctgcgtgatatcgcacagattgcggcgcagcaccagatctggctgcacgttgatgccgcctggggcggcgcgctgctgctgtccgagcagtaccgccactatctggacggtattgaactggtggactccatcaccctggacttccacaagcagttcttccagaccatcagctgcggcgcgttcctgctgaaagaggcgcgccactatgagctgatgcgctatcaggcggcttacctgaactccgagtttgacgaagcgcagggcgtgccgaacctggtgtccaaatcgctgcagaccacccgccgttttgacgcattgaaactgtggatggggctggaagcgctggggcagcaacagtacgccgagattatcgatcacggtattaccctgtcgcagcaggtggcggaatacgtcaacgcgcagccgacgctggaactggtgatgcagccgcagctggccagcgtactgttccgttcacgtccggcacagctggcggacgacgccgcggtagcgctgctgaatcagcgtatcggcgataacctgctggaatccggtcaggccaacgtcggtgtgaccgaatttaacggcgtcacctgcctgaagctgacgctgctgaacccgacggtaacgctggacgacgtcaagcgcctgctggatctggtagacagcgccgcacaggggctggcaaacgcctaa

SEQ ID NO: 443078 - DNA, 768 bp, Serratia marcescens
atgagtaaccgcaccaagaccttgtcattatgtgcactgctggcgtttacctgctcgttgtccgctcaggcagaggaggccagtaagagaagtgaagtccaacaaagtattggccccaagcatggcgccacgcagatccccaaggcgcgtcaggtgatttgcgagaacgacggcggctataactaccccgatgacggttccaacatacccaacgccgcctgccgcgccgcttttctgtttaaacaggacagcatcccggtctgggaacgccggcagatgtttgtcgaatggccggcctattcacaaaacctggagggcaccagctcgccggcggataaagtgcccgacggccatttgtgttccgccggggtggccaagtttgaaggtatcgaccagccgcataaggattggcaggtttccagcgtaacggtcaaagacggcaaagcaacgctgtactatgacgccaccaagatccacgaacccagtaagtggaatatctatatcgccaaaaaagagttcgatccaaccacgcaaacgctgagctggggcgtactggaaccgctgacggtgaccgaggtgattgttccgccgggtgacaatgccggggtctatcagatcgaggtggacattccgcaggatcgggtgaacggtcaacacactttgctctatgtgcagtgggaacgtatcgatccggcgcgggaaactttcttcagctgtagtgacgtcagttttaccgccacgcccaccaaggcaaaactgagcaagtaa

SEQ ID NO: 443079 - DNA, 1074 bp, Serratia marcescens
atggtcaaccaggcgatatgcagcagtcttccctggctggcgtccatcaatatcgccttcgccatgctggtggtattgcgtaatctgctgttccccggtttcgacgccacgctgcatatcggcgccgttatcccctttattatggatggcatgatggcgacagtagtgacgctgtcacttgttctgtggggtgtttcccgcatcggaaaaggtggcgacggtcgccgtgtccgcctgtgggccttactgctgctgccgttgctgggcgtgctctgggctatcagctgttttggcttcgtggcttattggcagttgccgttcgcctggccgttggtatgcatactgatgctgaccggtatgacctcactctatttttatcctccggggttcgcgctgtttcttactccgctgtggcttatcacgccgctggccagcattcagcttaatcatggcgtcaacggccattttgcggtgatatggctgatcttcaccgttattgtgatttacggtcgtcagaccttgctgcgctggtttgatgaagcctggtcacgctatcaggaaaaccaactgctgatctctcgcctggagacgctggcgttgcaggacccgctgacggggctggccaacagaagggcgctggaatcccatctcgccagcctgtgtgccgtacaggtaccgttcgctctgatcatggtcgacgtcgactacttcaagcactacaacgatcgctatggccatcaggcgggggatgcgtgcctggcggacgtcgccgcactgctggcaacggcggtcagaacgccggaagatctggttgcccgctacggcggggaagaattcaccctggtattggcgcacgctaatgcggagcaggccgcgcaggttgccgagcgggtccgtacccggatagaacaggcggcattaccccatgccgcatcagcagtcagtcggttggttaccgtcagcctggggattgccgcctcggccgggcggcagacgccgccgcagatgattgccgaggccgatgaggcgttgtaccgcgccaagcaggccgggcgcgatcgctggtcatactaa

SEQ ID NO: 443080 - DNA, 297 bp, Serratia marcescens
atgataaaaacatgggtgctatccgccgctctgctgctgcccgcctttggcgcaaccgccggagcctacgacagcctggcctttgcgctgaatcagcaaacgctgattaacgatctgcgtgcgcactgccagatcgccaaagaggtaccggacgagaagattaaatcggtatttatcaacagcaaggaaaaccacgacgcgctcagcgccaccgcccgcgcgttgaaaaaccaccagccggaacagtatcagcagcagctgaaacgcattcactgcccggacttcacccagcagtga

SEQ ID NO: 443081 - DNA, 1977 bp, Serratia marcescens
atgaaactgaaacctcttatcctgtgtatgatgttggccggttcattttcgctatctcccggcgtttatgcggccgatgacgccaggaaggatgccacttcggcgacgcagaaaaccaatgccgaactctacgaccagctgcccttctccgataaaaccgatttcagcgatgcgcataaagggtttatcgcccctttgcccagcgaagtgattaagggcgaaaccggtaatgttgtctgggacccgcagcagtacgcctttatcaaagaagatgaaaaatcaccggctaccgtcaaccccagcttatggcgtcaatcacagctgattaatatcagcgggctgtttgaagtaaccgatggcgtataccagatccgcaacctcgatctgtcaaatatgaccattatcgaaggcaaggaaggcatcactgtggtcgacccgctggtctctgcggaaacggcgaaagtgggcatggacctctattataagaaccgcggtaaaaaaccggtggtggcggtgatttatacccacagccacgttgaccactacggtggcgtacgcggcgtggtcgatgaggcggacgtcaaaggcggcaaggtcaagatctatgcgccggccggctttatggaagaagcggtatcggaaaacatcatggccggcaacgtaatgagccgccgggcgagctatatgtacggtaacctgctgaaagccgatcctaaaggccaggttggcgcaggtctcggcaccaccacctccgcaggcaccgtgacgctgattgcgccaacggattacatcaccaaaaccggtgaaaaacgcaccatcgacgggttgacctacgactttatgatggcgcccggctctgaagcaccggcagaaatgctgtggtatatcgaagagaagaaactgattgaaaccgcagaggatgtcacccacaccctgcacaacacctactcgctacgcggcgccaagatccgtcagccgctgccttggtctaaatatatcaacgaggcgctgaacctgtggggcgataaggctgagattatcctggcgcagcaccactggccaacctggggcaatgagaacgtgcagaagctgctgcgcagccagcgagacctgtatcgttatatcaacgaccagacgttacgtatggcgaaccaggggctgacgcgcgatgagatcgccgccaacttcaaactgccgcccagcctggcgcacacctgggcaaaccggggctactacggctccgtcagccatgatgtgaaggcgacctacgtgctctatctcggctggtttgacggcaacccggcgacgctggatgaactgccgccggaagaagcggcgaagaaattcgtcgaatatatgggcggcgccgacagtctcctacagaaagcaaaagcggactttgacaaaggcaactaccgctgggtggcgcaggtggtcagcaaagtggtgtttgccgatccgcaaaacaaagcggcacgcgagctggaggcggatgcgttagagcagctgggctatcaggcggaatccgggccgtggcgcaacttctacctcactggtgcacaggagctgcgtaacggcgtgatgaagctgccgacgccaaacaccgccagcccggatacggtgaaagcgatgacgccggaaatgttctttgattatctggcggtgcacattaacggtgagaaagcggccggcgccaaagcggtgctgaatgtcgatctcggcgacgacggcggcaagtataagctggagctggaaaacggcgtattgaaccataccgccaatgtccaggcgcaagacgccgatgccaccctcaccctgtcgcgcgacacgctgaataaaatcatcctgaaagaggaaaccctgcaacaggctgagaaaaacggcgggctgaaaatcaaaggcagcgctgataaggtcaatgaactcctgagctatatggataagttcgagttctggtttaatattgttactccgtaa

SEQ ID NO: 443082 - DNA, 312 bp, Serratia marcescens
atgaagacatatatcagcaaagagtttgtttcagatcgggcctggggcgcgctcgatatagccaactttgatggcaccacggtacgtctgcactggaccgatcggccttataaatggcatatcaatgacgggcaagaggtttttgccgtgatggacggcagcgtagagatgcattacaaacagcaaggcgagatcagacaagtgctgcttaatgccggcgatattttttatgccaatgtcgggtgcgagcacgtagcgcatccacaaggagaggcccggatcctggtaatcgaaaaagaagggtccgtttaa

SEQ ID NO: 443083 - DNA, 492 bp, Serratia marcescens
atgggcgcgccggtgggtttgcatactgccggcgtgccgttaatcttcagcgcactcttcgcgcttctcagctttgccataccgcagctatccatttgggatacgattttcggctggatggaatggcctcaacatgctgtctttatagggataattataactgggttggtctactgtctattggttttcccatcgctaacgcttgtttccagaggctgtttgccggcactgaaattttatcttgtgctgttgttgttcactgcggtgctggccgtgttgtatttgctctgcaccatcatcatgttgctgtccggcattgaaagccatatgggatttctgatcggcgcgatcatcggattcgtctttatccttgcaagtgtcaaatgcctcaatagcgccatgttggttaaaaccatggcattctatttacataaccgcgtatggcgccggcagctcaagatccatcaccgccagttgaccaaacggaaatga

SEQ ID NO: 443084 - DNA, 504 bp, Serratia marcescens
atgattaccagaattcacgtagcgcaatcgggaggaagtatgcgatcacggcctgcagccaggcttttagttatcaatccgtcagggtgcattttactgttcaagtttacgcacggtaacgatgcgctggcaggaagaacatattgggcaacgccgggtggcggcgttgaatgcggcgagtcatttgagcaagcggccatcagagaactgtgggaagaaaccggtattgtaagcgacaagataggtgcaagcgtcgcacagcgaaatttcgttatgacgttaccgagcggtgaaacagtaaaagctgaagaaaggtttttcgtcgtgcgggtggctaaccatcagatcaatggtgacaactggagccgtgatgaaaatcaggttatcagcgagcatcactggtggagtgaggaagaactcaaaacaacccacgaagttgtttatccgcagaatatggttgagctgttgatgtcgatccgggacaaaagtgaatctgccggatag

SEQ ID NO: 443085 - DNA, 354 bp, Serratia marcescens
atgaaaaaacagtttattgtgattaaaagtcatatctctgaatatcctgaccccattcatttttccgaaggtgatttgctggttgtaggcgaaaaatatgtcggtaatgaaggctgggataactggtacttttgctcatttaacggactaagcggctgggttccgaagcaacttattgaatttgttaatacaaatgaaggagctgccaaagaaaactacagtgcatcagaacttaatgtagaagtgcaggaacttgtcactggatttaaaaaaatcaatggctggatctggtgccaaaaattgagtacagaggagcaaggctggctccctgaactgaatctaaaagaaatttaa

SEQ ID NO: 443086 - DNA, 246 bp, Serratia marcescens
atggcaacgttcgatgaaaaagagatgttaaacgatgaaatgttttccagcgtagttagcgtcatgagaagaaagcggtctttagacgacgaacccggtgaagagtggcaaagcgactttaaactcttgcacgcattccggaacgagttgttgcataagacgccggagaacattgactacagcgccgccgttgctttttatcagtctatcatcgataaatacgttaagttgcctgacgcctggtaa

SEQ ID NO: 443087 - DNA, 897 bp, Serratia marcescens
atgctcaaaagtgataacgtaacgccacgcgcctacaaacaggttgatgtatttaccacctcgccactgcagggaaaccccctggcggtgatcctggaagcggaagggttggatgaagcgcagatgcttgcgttagcgcgctggaccaacctttcggaaaccaccttcgttttcaagccgacgcatccggccgcagattaccgggtgcgcatctttacccctgaaaaagagttgccctttgccgggcatccgacattgggcacggcccatgccttattggaagctggtttggtgaccaaacaaccgggggtgatgatgcaggaatgcggagtcggtctggtggcggtcaatctcttgccggaaggcacgttggcgtttgccgcgccggaggtcatgctgcgcacgctgacggttgaagaacggcagcagctggcggccgattttcagccggcggtaatggcaacagacattctgccggtggtggccgacatgggcatccgctggctgatggtgcgtatgccagacgcgcaatcctgtctggcgatgacgccaaaccaggccatgattaagaagatgcaaattgattatcaggttgacggcgtggtgatttatggcgcttatccatccggcgatcccgcagattacgagatacgggcgtttctggttgagtgggacaagctggtcgaggatccggtgaccggcagcgctaatgcgtgtctggcccgtttgctgcagaccaataatttccccgacggtggtgtaacggcacaaggatatcaggtccgacaaggcactcaactgcatcgcgagggccgggtcagcgtaagttttattcgcgatgagccgtggattggcggtcagagttgtacgctgattgaaggggtgctgaagatttag

SEQ ID NO: 443088 - DNA, 1350 bp, Serratia marcescens
atggataatatgacgtccgtctcggcagccacgctgcgtaaggtgacaaccgccgcagcgattggtaattttgtcgagtggtttgatttcgccgtctatggctttctggcgacgatcattgcgcaacaatttttttcggcagatctgccgcaggcggcattgttacagacattcgccgtattcgccgtggcttttgcactgcgcccgctgggcggggtgatattcggtatgctgggcgacaaactgggccgcaagcgtattttgtctttaaccgtgttactgatggcgggatcgaccacgatcattggtctgctgcccacctatgccagcattggcatgctggcgccgctgtttctgacgctaacccgctgtgttcaagggttttctgctggtggtgaatacgccggggcctgcgcctatgtgatggagcatgcccctaaccacaaacgcgcctggtacggcagctttatcacggtttctaccttttccgcctttgccgcagcggcgacgattacctatctgctggatgccagcctgagcgcggagcagatgagccgttggggttggcgtattccttttttggtggcggcaccgctcggcctggttggcgtttatctgcggctgcgtatggaagagacgccggcgtttcgcgcggcgcttgctgaatccgccactgcccacgcaccgttaagcgagacgttacgccagcaggcggggaatatcttgcggctgggggcgtttatctctttgacggcgctgtcgttttatatgttcaccacttatttttccaccttcctgcaactggaagggcattttagccgtgctgccgcgctgttggtttccaccgttgcgctgctgtttgccgccggaatgtgtccgccggtcggtgcactgtgcgatcggatagggcgcagaaaaaccgtcgccctgaccggagtctgggtgatactgagcgtctatcctgcctggcagttggccagctcaggccatctttgggcagcgattctcggcgatctgctgttggctaccggggcggtattgtccggcgtggtgacggcggcgctgctctcggaagttttccccacccgagcgcgctataccgcctccgcgattacttataatctggcctacacaatttttggcggaacggcgcctttagtcgcgacctggctgatcggctacaccggcagcagcgtgtcaccggcattttatctggcgttggtggcattactggcgctggctggtggcctggcgctgccggaaacctcgcgcatttcgttgcatggtgaacaagataaaccgtcggcgcaggcaggcttcaaggcattgaaagcagggggagagagttaa

SEQ ID NO: 443089 - DNA, 570 bp, Serratia marcescens
atgggacgcgtatctaaagaacagatggaacataaccggaaaaatatcattaaagcgtcctcagaactgtttcgtgagcgggggcttgacggtgtcagcgtaaacgacattatgtcggccgtcggcctgacccatggcggcttttatgggcactttagttccaaggatgagttagaggcgttggcctgccgccaggcatttgatgatacggatgctttcctggatcaaggcgacatgggcagctttgcacaactggttgaatactatctttcaacggaacaccgtgataatacccgtagcggatgtacggtctcggcgctggccagcgatgtgttgcgtaaagatcgtgaaaagccggttcgcgagacttacaaagctggcgtcaaaaaaatggcagagcgcttggccgcgattgaggaagataaaccggatacggcgcctgccgacaagcatctgacacagctagcgctgatggcgggggcgttgatgttggcaagggcaacggaaggggatgaaatttccgaacgtttcctttcggcagcaaaaacagcgctactcgggacaaagtga

SEQ ID NO: 443090 - DNA, 792 bp, Serratia marcescens
atgaaagacaccacctcggtattaatcaccggcgcttcaacgggaatcggcgctgtttatgcggatcgttttgcccgccgtggacacaaccttatcctggttgcccgcgataccacgcgtatggcggcgctggctgaacggctgcgcgcgcaatataacgtgagcatcgacatcctgccggctgacctcagccagccttcagaggtcgaaaacgtggcgcagcggctgcgggaggatgaggacatcaccgtgctggtgaataacgccgggatggggctgtcaggcagctttacgtcgcagaacgctgctgatatcgatcggatgatagccgtaaatctgtctgcggttgtccgcctggcgcacgccgtggcgccgcgtctggctgcggccggtaacggcgccatcatcaatatcggttccgtcgttgggctggctcctgaactcggcctgacggcttacggcgccaccaaagcgtttgtgcagttcctctcccagggattgagcctcgaacttgcgccgcagggggtatatgttcaggccgtgctgcccgccgtgacgcgtaccgaaatatggcagcgttcgggggcggacattacgacgatgagcggcgtgatggaagccggcgatctggtggatgcggcccttgccggttttgaccgccgcgaaccggtgaccattcccccactgcacgaagaacggctatggacggagtttgaccaggcgcgtcaggcgatgctgccaaacttccagcaggcgcagccggcgccacgttatacccgtgataccgagtaa

SEQ ID NO: 443091 - DNA, 1020 bp, Serratia marcescens
atgatgaaagcactacagctgaaaagttatggtaaatcagcccagttacagtttgaaaatatcccccgaccggcgatcaacgatgatgagttgctggtcagggtttatgccgcagggctgaatgcgatcgactgtatgatcccgacagggagttttaaacccattctcaagctgacgctgcccgcggttatgggcagcgatctggccggagtggttgaggaagtcggtaaaaacgtcacccgcttcaagccgggcgacgcggtattcgccagcctgtttgatatggaccaaggggcgctggcggaatatgccgcggtgcctgagcgtgccgccgccctgaagccggccagccttgattttatcgaggcggcgtccctcccgatggttgccctgacctgctggcaggccttttcgcgggcgaagttaagcgccggccagcgcgtctttatccctgccggttccggcggggttgggacattcgccattcagctggcaaaacatcttggcgccagcgtcggcaccacgaccagtgcggccaacatggaattggtcagcgctctgggggccgatgaggcgatcgattacaagaaagccgactttgataaaatcctgagcaattacgatctggcgctggcaaccgttcggggtgacggtcttgaaaagacgcttgagatcctgaaaccccatggcgaggttgtttctctcgtcggtccgccggatcttccgttcgcccgtcagcggggaatgaatagcgtgatgaaagcgctgttctggctgttaagccggaaaatcatcagccgcgccgcccgccgccagatccgctactctttcctgtttgtttcgccaaacggtgaccagctatcagagattgccgcactgattgatgccggaaaactgaagccggtaatcgataagactttttcatttgctgacagcatcaacgcgttgtcttatctcgccgctggccatgcaaaagggaaagttgtcgtgcaactgacagactcgccgtccgcatcctga

SEQ ID NO: 443092 - DNA, 1188 bp, Serratia marcescens
atgggacactcatcaaacagaggcgttgtataccaggggccgggaaacgttgaggtgatggatattgatgaaccaaagttcgtcagcccgtcaggcaagaaaatcgaccacgcggtaattctcaaagttctgtcgaccaacatttgcggttcggaccagcatatggtccgcggccgcaccacggcgccggccggcatggttctggggcatgaaatcaccggggaaatcattgagaaaggttccgatgttgaaatgcttaacgtcggcgatattgtctccgtccccttcaatgtggcgtgcggccgctgccgctgctgtcgcgagcttgataccggcgtgtgcctgaccgttaacccggcgcgcgcgggcggcgcctttggctatgtggatatgggcggctgggtcggcggacaggccaaatacgtcatggtgccgtatgccgatttcaacctgctgaaattccccgaccgcgatcaggcgctggcaaaaattctggatctgaccatgctgtcagatatcctgccgaccggctttcacggggcgatcaccgccggcgtgggcgtcggttctgtcacctatgtcgccggcgccggcccggtgggtctggctgctgcggcctccgcgcagatcctgggttcagcggtggtgatggtcggcgatttcaataaagaacgcctcgcgcacgccgaaagaatgggctttgtgccgatcgatttaggcaaacacgatcggcttggcgagatgatcgccgaagtggtcggcgtgccggaggtcgattcggccattgatgcggtgggctttgaagccaagggccactccggtaaagaacagccggctgtagtgttgaacagtatgatggacattacccgcgtggctggcaatatcggtattccggggctgtatgtaacggatgacccgggcgcccatgagcaggcggcgcgcgaaggatcgttaagcctgaagtttggtctcggctggtccaaggcgcaaaccttccataccgggcagacgccggttctacgctacaaccggcagctgatgaatgcgattctgcatgaccgcctgccgatcgccaagattgtgaatgccaaggtgatcccgctggaaagcgccgccgagggctatgccagctttgatgccggcgtggcggcgaaatacgttctggatccccacggcatcctcgcttaa

SEQ ID NO: 443093 - DNA, 1110 bp, Serratia marcescens
atgctcaggctcaaacctgtctctattgccatttgttcgttgtcctttgccctggcggcatgcggcgacacgtcggggagcgatgatccgcgcaatcagccccctctggtaagaacggcggcggtggccgctgccgtcgatgcttcccgcgcgttcaccggcgttgtcgttgcccggacgcaaagcgatcttggcttccgggtgtcaggaaaaatccttgagcgtcttgttgataccggccagaccgttgagcgcgggcaaccgttgatgcgtctcgatcccgccgatctgaacctacaggccaaggctcagcaacaggcggttgctgccgcacgggcgcgcgccagacagacggcgggtgatgaggcgcgctatcgcggtttggttgctaccggcgccgtatccgcctccgcctacgcccaaataaaagccgccgctgacacggcccgggcagagctcagtgccgcccaggcgcaggctgacgtagcgaaaaatgcgtcggcatataccgtattgctggccgatgccgacggcgtggtcatggatacgctggctgaaccggggcaggttgtcagtgccgggcagccggtggtcaggctcgccagagcagggcaacgtgaggccagcgtgcagttgcccgagacgctgcggccggctatcggcagcgaggcgcgggccgcactatacggaaaccatactcaggcagtggcggcgaaactgcgcctgctgtccaatgcggccgacccggtgacccgcaccttcgaggcgaggtatgtgctggaaggtgcgctggcgggtgcgccgctgggttcaaccgttacgctgcaaatagcgaaagataaaatagcccgcgatgttatgcaggtgcctttggccgctctctacgacccgggtaaaggtccgggggtctggagtatttcaggcaagcctgccagggtgacgtggcgggcggttcaggtgctgagtctgggggacgatgcggcaagcgtgagcggtaacctcaaacccggcgatcgggtggttgcactgggcgcgcatctgctgcatgacggcgagaccgtcagaatggctgaacagggcgatgcccgcgtagccgggagcaaaccatga

SEQ ID NO: 443094 - DNA, 615 bp, Serratia marcescens
atgactaaacatatcaatacaacccccgcacggggccccgcggaccacagcgtccgcgatcaggtcgtggacgccgccaccgagcatttcgggcactttggctacgaaaaaaccaccgtgtccgatctcgccaaagcgatcggtttctccaaggcgtatatctataagtttttcgattccaagcaggcgatcggcgaggtgatctgcagtaaccggctggcgatgatcatggagattgtccatgcggccatcgccgatgcgccgacggccgccgagaagctgagacgcctattcaaagccctgacggaagccggcagcgacctgttttttcacgatcgcaagctttatgacatcgctgcggtcgctgcccgtgacagctggccttcagccgcggcgcatgaggagcgtctgcggcaactgatcgagcaaatcatccttgagggccggcagaacggcgagttcgagcgaaaaacgccgttggatgaggcggcgcatgcgatatacctggtcatgcggccttacatcaacccggttcagctgcagtacaacctggaaacggcctcatcggctgccgtactgttgtcgtcattgatactgagaagcctgtcgccttga

SEQ ID NO: 443095 - DNA, 741 bp, Serratia marcescens
atgaatatcagcattattggcgcaggcagcatcggcgcgacactggcgagtaaactttctgcctgcggccatcacgtgaagctggcaaactccagggggccggcgacgatcgttgatatcgcccgccaggccaacgccgtggcggtgagccgggaagaggccgtcagtgacgccgaggtgattatcctggccatcccgtttgctaaccacaccgacgtcgcgacctggctgagtagcgcgccagccggcgtgacgattattgatacctcaaattattatccgttccgcgatggcgctatcgccgagattgagcagggcaagccggagggcatttgggccagcgagcagctcggacggcctctgatcaaagcgtggaatgcggtgcttgccgccacgctggcggataaaggcttgccggacggcgccgctgaacgcatcgcgattcccgtggccggagatgatgaaaacgccaaatccattgccatggcattggtcagtgacacgggattcgagcctgtcgatgcgggccaactggcagaatcctggcgtcagcaacccggcacgcctgcctattgtacggaattgtctcctgccgagctaaaggcggctctgcagcatgcggataaagcccgcgcagcgaaaaacagggatgtgctgctggatgagtttatgtctgcgggcgaaacgctgacccacgatcgcatcgtggcccgcaaccgggcggtaaccgctccacggtag

SEQ ID NO: 443096 - DNA, 441 bp, Serratia marcescens
atgacgatgaataaaaaagaaccgcgggggattggcacagagctttccttcgcgttgtacggcgcggcaaaccggatgcaccggatgcacaaaccttttctcgacccgctggggctgactttcccgcagtatctggtgatgctggaactgttcagcgggacgccgcgttctgtcggggaactgggtaacagtctggggatggataccgggacgataacgcctttactaaagcggctggaggcttcgggcagggtattgcgccggcgcgatccgagcgatgaacgccgggtgctgatcacgctgaccgccggtggcgaagcgctgcgtgaggaactctggtccgtcaccgacaaaatccgctcggcgtgccagctgacggaggaaggattggttcagctgcgcgatacgctcaacgactttgcgcatccggcagcggaataa

SEQ ID NO: 443097 - DNA, 324 bp, Serratia marcescens
atggtaagtgatgaggaggtgctggcgttctttcgggaggaactatcggttcttgcgacgttcacgtttaagactatcccgttagaactggatgacccgctgcaggaatacgccgaggacgatgaggtgaaatttgccatcggaaaatatgatgaagtgtttggtgtggatgtctcggcgctagagtgggacaaatactatccgtggcggcatgaatggttcttcaggaaatggttcaccaataaaccgttggtgcaaaacaaagcgccactgaccgtacgcatgtttgcagaatccgccagggcgggccgatggttgtactga

SEQ ID NO: 443098 - DNA, 450 bp, Serratia marcescens
atggataccgttgaagagctgggtgggacttacttctataagggcatcgtaaacgtatcagcgcatgagttgctgttctggatcatgattgataccgttgaagagcagttaggcgttcaagatgttttaggcgttgcggctttaattctgggtgataattcgatacccgtccccggtaaaccaagcaccgcgacaccgggcacgtcacacgcatcgttattcttccgtaagcacctaaacgtgcgcttcaaacgcgcaattttgccgacggtaacaaagggatccgtcctaaagttcaaggtcagaatggttaacaacctcggggtgtttgttggccgtgccgtgcctgttcttggctgggggattttggccaatgacatcgcccaaatcacagtaaaagctaccacgcgctacaacaaaattgcccgtggagaggataagttatggtaa

SEQ ID NO: 443099 - DNA, 345 bp, Serratia marcescens
atggggctgggaatcaaggcgttaatcggtgcgctggtggtcattctgatcggcgtattatccaaatcacgcaactactatattgccggtctggttcccctttttcctaccttcgccctgatcgcccactatattgtcggcaccgaacgctctctggaagatttacgcaccaccatcctgtttggcatgtgggcggtgttcccctacatggcctacctggtttcgctctatgtgctgctgggctatgtcaaactgccgacggcgctgactgccgcggtggtgtgctggctggtcgccgcctggctgctgattctggcctggaaccgctggcacggccagggataa

SEQ ID NO: 443100 - DNA, 942 bp, Serratia marcescens
atgacacacacatcccgacagatccgccgccagatggttacgctgctggatcgtctgacgccgcatgaaggttataacctcaccgcgttgcccgatgtccgttttttacgttccaaccggccgctgctgcgcacgccggtgctgtatgagccggggatcgtgattgtggtgcagggaagcaagcgcggttttctgggaaatgatgtctatttgtatgatgcgcagcattatctgatggtctcggtgccggtgccgttcaccatggaaacggacgccagcgcggcggaaccgatgctggcgatttacatccggctggattttaacttggccgccgacctgatgctggcgctggatggccgcggtgttgccgataccgacgccccgcgcagtatgatgtcgagccgcatggatgcgccgctgagccgttccgtactgcgttttctgcagattatggcgtcgccgctggatgcggaggtgctagggccgtcgatgctgcgggagctttactaccgggtgctgagcggcgaacaggggccggtgatgagaagtgcgctcacgatgcagggccagtttggcaaggtggcgaaagccttgcgcaagctgcacgccgagtacgcttcacatctggatgtgacggcgctggcgcaggaagccggcatgagcgtgccgaccttccacagccatttcaaaaccgtgaccaatacttcgccgatgcaatacctgaaatcgacgcggctgcatcaggctcgcctgctgatgcttcgcaataacttcacggtgtcggccgccggcgtccgggtgggttatgagagcgtttcgcagttcagccgtgagttcaagcgcctgttcgggctgacgccgctgcaagaggttgaacgaatgaaacgcaccttcgccatacccgcgtcgatgacaccttcagaatttgtctcttcgcattga

SEQ ID NO: 443101 - DNA, 834 bp, Serratia marcescens
atgacatcagcaaagttattgtttatcaccggcgtcagcagcgggtttggccgcgcgctggcggaacaggcgctgcaggccgggtaccgggtcgtcggcacgttaagaaatgaacaggctaaagaagcgttcgaagcgctgtcgcccggccggtgtttcggcaggatcctggacgttacggacttcagcgccattccgccgctggttgacgccgtagagcagaacattggcgccgtcgatgtgctggtcaataacgccggttacggccatgaaggcgtgatggaagagtcacccatggatgacatgatccagcagtttaacgtcaacgtctttggcgccgtcgcgctgattaaagcgtttctgccctatttccgcgcacgacgcgctggccatattcttaacatcacctcaatgggcggatttatcaccatgcccggcatcagttactactgcggcagcaagttcgctctgcagggtatttcagaaacgttaacgcaggagctgaagccatttaatattgccgtgacggccgttcaaccgggatctttccgcaccgattgggccgggcgttccatggtgcgtgcggcacgcagcatcagcgattacgaccgcagcttcgatcccatccgtgagacgcgcatgaagcgcagcggccatcagcccggcgatccggttaaggcggccagtgccattttgcagttacttgacagccccgcgcccccgacgtcgctgctgttggggagtgatgccgtaacgctggtcagggacaagctgcagcggatgatcaccgagatcgatgcctgggaagcggccagtcgctcaactgacggctga

SEQ ID NO: 443102 - DNA, 222 bp, Serratia marcescens
atgcgaacggtattgtttacggcggcagtagtacttttatccggatgcgggctcagtgacgaacttgatgcgatcacgctggaaaatcaccaaaaagtctgtgacggctatggttttacccggggaaccgaggcgtatgccaattgcctgatgcggcaggatgaactcgaagatgccgatgaacagcgcgccttggaccgggaggcgagaaagaaaaaatag

SEQ ID NO: 443103 - DNA, 393 bp, Serratia marcescens
atgagaacaacagcactggcgtttaccctcccgctcttcttatttaccgaccaggccagcgccgctgacggttgcgcaccgctgaaaaccacgattaatgcagacaacaggcatgtttatcaggaattggtccaaagcgcgttaaccgagaaagtaaagttggcaaccatcgacatcaccgaggtgctggccgaagataaatggctggccgtttttgcatccacggagatctccgatcccggcgtgtttttctttaacgacaataaatttattgatgtctggggcgggatggtggaagcaaaagaaaaacgcacggtaacccaatgggcacatggcctgcacgtaccggggacattaacgcaatgtttctttaagggcattgtgattaagtag

SEQ ID NO: 443104 - DNA, 456 bp, Serratia marcescens
atgataagggggagatacggcacaatggtaaagcgtttgtttctcatactccccatgattgttgctctgcatacagcgtttgccgctcatatcccgcccagaaaaatcaccgaggtgaaggtgaatgaaatggggaaaagtgaggatgagtcgaaaaatgtgacggaaggatgccgggcatttaaaatctcagccaatgaggtaaaggattttttctcaggctcatatccggtccctttaatgttcaatacgcatgagcgttattctccctgttatgctaaaggaacgattgcgtttagcgacaatacgcgtggaaaatggaaaatagcctccagtggcggagggacgctattatgggataccggtgatgtagttaccttattttataatgactataaatggtcagatccgtttgaaggcacgtatcattctgatgatggcaaagattatgaatga

SEQ ID NO: 443105 - DNA, 834 bp, Serratia marcescens
atgggatttgtcacaacgaaagacggcgtcgagattttctacaaagactggggcccgaaggatgcacaggttatctttttccaccacggctggccgttgagttcagatgactgggatgcgcagatgctgtttttcctggcgcacggctaccgcgtcgttgcccacgatcgccgtgggcatgggcgttccagccaggtttgggacggacacgatatggaccactatgccgatgacgtggcggcggtggttgatcacctcggtattcaaaaagcggtgcacgtcggccactcaaccggcggcggcgaggtggcgcactatattgcccgccacggtgacagccgcgtcgccaaggcggtgctgatcagcgcagtgccgccgctgatggtgaaaaccgacgccaaccccggcggcctgcccaaatcggtgttcgatgatatgcaggcgcagctggccgccaaccgggcgcaattttatcatgacgtgccggcggggccgttctacggctacaaccgtcccggcgcgcagccttccgaaggcatcatcagaaactggtggcgtcagggtatgatgggaagcgccaaggcgcactatgacggcattgtcgccttttcacagaccgacttcagcgacgatctgcgtagcatcaccattccggtgttggtgatgcacggcgacgacgatcagattgtgccttatgacaattccggtccgctgtcggccaagctgttgcccaaaggcacgctgaaaacctatcacggtttcccgcatggcatgccgaccaccgaggcagagacgatcaacgccgatctgctggcatttgtccagaacggttaa

SEQ ID NO: 443106 - DNA, 978 bp, Serratia marcescens
atgcatgattttctgattatcgtccccgacgggggcatgctgtttgaggcggcgggcgtcgccgatattctgacgcaggccaaccgcctgctgccgcaggatgcccccggcgccccctatcgggtaatggtggccaccacccagtcgcaccgggtggtgcacggcgtctcaggcctgaatctgctggccgatcggcggctgtgcgatcttgaccctacgcatccttacgacaccgtgatggtcgccaataagggccagtccgacgccgagaacctgagcgtggtgcactggctgcagcaggcggagcaccacgcccgccggatcgcctcaatctgcggcggtgcgctgctgctggcgcaggccggcttgctgaacggccgtcacgccacgacccactggcggctgctggaacgtctgcaggcggagtttccgcaggtaacggtcgacagagggccgatctatgtgcaggacggcaatatctggacctcggccggcgtcagttccggcttcgacctgaccctggcgctggttgaagaagatcacggtttcagcctggcgcgggatgtggcgcaggatttggtgatgttcctgcggcgtcccggcggacaggcgcagttcagccgttacctgctgcatcaggccggtgacggccctatctgtcagctgcagacctggctggcggagaacctcacgcaaccgctctccgtcacccagcttgcggaacgcgtcgccatgagcccacgcaatttcacccgggtgtttacccgcaccaccggcgtcacgccggccagatacgtggaagaagtacgcctgaacgccgccagacagcggctggagcaaacgacgcagggcattgagcagatcgccgtggacaccggtttcggcagcggcctcaatctgcgccgggtgttcgagagaaacctgcagctgacgccgacggagtaccggcagcgcttttgcgcacggaacctgtcctga

SEQ ID NO: 443107 - DNA, 1011 bp, Serratia marcescens
atggtcaacgtaggcatcaacggcttcggcaggattggacgtaacgtgttgcgcgccgcgcttggacggacagattttcaggtcgtggcggttaacgatctcaccgacagccgcaccctggcccatctgctgaaatatgattcactggccggcacattcgcggcggaggtcgaggccggtgaaggtcagctgaaggttgatggccggacgatccgcgtgttttcagaacgggatccggcggcgatcccctggcgcagcgccggggtggacgtggttatcgaagccaccggcttattcaccgagaaagccaaagcgatggcgcatatcacccacggcggcgccaaacgcgtgattatttccgccccgggcaaggatgacgacatcaccatcgtgatgggcgtcaatgacgcgcagtacgatccggcgcggcatcaggtggtcagcaacggcagttgcaccaccaatggtctggcgcctgccgcccaggtgctgcatcaggcattcggcattgaacatggcctgatgaacaccacccacgcctataccaacagccaggcgctgcacgaccagccggaaaaagatctgcgcggcgcacgggccgccgccgtttccatcgtgccgtactccagcggcgccgccaaggcgatcggcaaagtgatccccgaactggacggccggatgaccggctattcgctgcgtgttccggtaccggtagtgtccatcgtcgatttaacggtcaacctgcagcgcgaggcgacggctgaagaaattaatgccgcgttccgcagcgccgccgcatccggcccgctgcagggcattctgggctacagcgatgagccgctggtatcgagcgactaccgcggcgatccgcgatcttcaattattgacgggctgtcgacgctggtgattggcggcaagatggtgaaaatcctcgcctggtatgataacgaatggggcttctccaaccgcctgatcgatctggcgctgctgatggaaaaacgcggcttataa

SEQ ID NO: 443108 - DNA, 618 bp, Serratia marcescens
atgccagcgccatttcccctcacccccgccgaacgcgtcgccgtgatgaccttcgccgacggcgatcctgatgaaaacccctgggttgccggcaaaccacgggtggaggagatcgacgtcgtcgactatgacccgtcttggccgcagcgcttcgcacaggaaaaggtgcggcttgagcgcacgttggggtcatacgcgctgcatattgagcatgtgggatccaccgcggtgccggcgctggcggccaagccgattatcgatatcgatctgctggtggccgacccggcggatgaagcgggctacataccgccgctgaccgcattaggctatacccataccgtgcgcgagccgtcatggtatcagcaccggatgctgcggctggacgcgccgcagatcaatctgcacgtttttgccgccggcagccccgagcatttgcgtcaccggctgttccgcgactggctgatcgcgcatcctgaagatcggcagctgtacgccgccagtaaacggcgcgcaaagcaaggcgtaaacaccatgaccgattacaaccgcaacaagcaggagaccgtgcggcagatttacgcaaaaattttcgccgcactggctaacggcgcgaattaa

SEQ ID NO: 443109 - DNA, 366 bp, Serratia marcescens
atgcagttatcaatcggggagctggcgcaaaaaaccggcgtcagcgtacgggcgatccgtcattacgacgcgcaggggctggtaacttcaacgcgcgccgagaatggttaccgttatttttccgaacgggcggtcactcaggtacgccagattcggcggctgattggcatcgggttcagcattgcggagatccgtgcgtttccggactgcatgctgttggtagaaggcgccgcgttttgtccggaaacgcaggcggtacagtatcaacgcctggcggatatcgaacggcagattgacgaactggagcagcggcgggcacggctgatggcgacgctggccagcgcgctgccggggaataacgcttaa

SEQ ID NO: 443110 - DNA, 906 bp, Serratia marcescens
atgccgttatcccttcgtcaccttattctggcgctgatgctggcgctggtttccgccactctgcccgccgcagagaaacactacatcgtcagcgcgcccgacggcgtgcagatcgccgtgcaggaatcgggcaaccccgccggcccgccgattatctttatccacggcctgctggggagccatctgaactggacgcagcagcaacaggccccgcagctgcagcgctaccggctcatcacctttgatctgcgcggccacggtctgtccggcaagccgcagcaggaagcggcgtaccgcgacggcaaacgctgggcagacgatctggctgccgtcatcaacaacgcgcaggcccggcgaccgctgctggtcggctggtcgctgggcggcgcggtgatcaccaactacctggcggcctacggcgacagcaacatcagcggcgctgtctatgtcgacggcgtggtggaattaatccctgacctgatccccgcccatccgcaggtttatagcgcgatgaccgccgggcggctcggcacccacctggacggcgagcgcgcctttctgcgcctgtgcttttatcagcagccggatcgggtaacgttcgaacggctgctggccaatgcggcgcttgccgcctggccgatgcagcgtgcggtaccgacgatgacgatcccgcttgagcaggggctgaaaaacgtccgtgcgccgctgctgtttatctatggccggcatgatgcgctggtcaatccgcaggcatcactggccagagcgcgaagcgtcaacccgcgcattgagagccagatctatgacgactccggccacgcgccgtttattgaggaggcgccgcgcttcaaccgtcagctggcggcgtttgccgcccggtacgccgcgccgcaacgcgcgcaataa

SEQ ID NO: 443111 - DNA, 801 bp, Serratia marcescens
atgaaaaaactgctgttttcggcgttaatcgccacgtccgccgtgttgttatccgcctgttcaccggataacgatcataacgttaaagtggcgatcaataccggcccggatgaagccatctggaaagtcgtccagcaggtggcaaaagacaaatataatctggatgtcgacgttatctcctttaacgattacgtgctgcctaacgaagcgttaaacaataaagatgtcgacgccaacgccttccagacgctgccttacctggaggatcagtcgaaggagcgcggctataagtttgccatcgtcggcaaaacctttgtgttcccgatcgccgcctactcgcacaagataaaaaatatcagcgagttaaaagacggcgccaccatcaccatctccaacgaggtcaccacgctgggccgcagcctgctgctgctgcaggcgcaggggctgattacgctgaaagacggcgtgggttacctgccgagcaaaatggatatcaccgccaacccgaaaaacctgaagattgttgaggtggatacgccgcagctggcgcgcacgctggacgatccgaacgtggcgatctcgattatcaacaccaacttctccgcccaggccgggctgtctgcggtgcgcgacggcttgttcatggaagagaaagactcgccgtacgtcaacgcgattgtggcgcgcgaagataataaggacagcaagaagattcaggaactgaaagacgccttccagtcccaggccgtcgccgacaaggcgatggaagtgtataaaggcgacgcgattaaaggctggtaa

SEQ ID NO: 443112 - DNA, 411 bp, Serratia marcescens
atgtttgatagcaaaatcgcctttatcgtgcgtgacgatctggccgcctggcagcggctgaatgtggtggcttttctggcgacggggattgccgcagccgcaccggagatactgggcgagcgctacgtggacgcgcacggccgccattacggcgcgatttccggccagccgatgctgatttttgaggcggatattgccgggctgcagaccagccaccgaaaagggctggagcgtgaactcaccctgatcccctacgtgcacgccatgtttaccaccgggcacgatgaagccaaccgtcaggcgtttttggcggaggatgctgataatctgaatctggtcggtctggcgctgcacgggccgaagaaggcggtggataaggcgatcaaggggttggcgctgcacggcgcctga

SEQ ID NO: 443113 - DNA, 855 bp, Serratia marcescens
atggcgtcaacgcataatgcgccgcgcagcgaagactggcttaccctgcggcgtgatgacgacaccggtatcgaaagcgttcacgctcattttcgcgggcacgcttacgatccccacgatcatgacgagatgctggtcggcgttacccagcagggattacagcgcttcaactgtcaccgttcgctgcataccagccgccccgggcgcgcgatcctgatagaaccgggtgcggtgcacgatggccacgcgccgcaggatgagggctttacctacggcatgctgtatctgccgcagagctgggtatccggcgtgatgcggcggcgcgggctgggcgatgtgtcgacgttggaaggggcgttccgccacacgctgaccgacgatgcccggttgagtgcggcgatccagcaggcgttctgcgccgtgcaccacaacgaaggccggctggcgcgcgaccagagtctggaccggctgatcgatctgctggcccgccatatccaggtgaggccctcgtcgctgagcgatgagtcgcaggtgttgatccatcgcctcagggaatacctgcacgcacatatggccgacaatatcgggctggacgaactggcccggcagagcggcatcgatcgctttcgcctgactcgccagtttaaaaaagcttttggcctgtcgccccacgcctatctggtgcggctgcgtctgcgcaccgcgcgtatgcggctggcgcggggcgagccgccggcgcaggtggcgatgcaggtggggtttgccgaccagagccacctgggccgctggttccagcgcgcctaccggctgtcgccgcaggcctatcagcgccagtgcacaaacgttctatactga

SEQ ID NO: 443114 - DNA, 606 bp, Serratia marcescens
atgccacagatcaaaaacgtcttcagcagcaaccgggtcaatccgccgccgcaacaagaaaccgcccgtcccgtcaccgtggcggatttactgcaacgcggcgccaaccagaacgacagaagcgtggagccaaccggctttaactcgattcatgagctgcgggattttgcccgcaacaacccgctgcctaacacgctgtatcgcgcccattttggcgatcgcgacgagattgacgcctacggcctggaacgttccgacgcatcggataaaaagagcggcgacgactatctggcggatattatcaagcacacctcgcgcaccggcggcagcagcggcggcgtgctgtcgctgtccggctcgctgcagaccgcgcgccgttttgccaccggccgcaccgtggtgcaaatcgacgccagcgccttttccggtcgctttaaaaccaccgcgcagatcctgctggacgatgcggaccgcctgatggcggcgaagaaagtctcgccgagcacggtcagaaatgcgctggagcatttacaaagtgatggggagtccgaggcgttctacctggacggcgatatcccccgcagcgcggtgacccagatctactaa

SEQ ID NO: 443115 - DNA, 738 bp, Serratia marcescens
atgtcggtggagaacaaaagcgccattgtgaccggcgccagtaaaggcatagggcgcgatatcgcgctcacgctggcccgggacggttttgatatcgtgctgggttttggcagggatcgcgcagcggcgcaggcggtggcggatgagatcgccgcgctgggcagaaaagccgtcctggtggcgggagacgtcgccgagccggacgtggtagccagcctgttcagcgccgcgcaggccacctttggccggcttgatacggtggttatcaatgccggcattatgcgcatggcgccgattgccagcgccagtcttgcggactttgacgccatgatgaacgtcaacgcccgcagcgcttttctgatgatggcggcggccggcgagcagttgtcggcgggcggcagcattatcgcgctgtctaccagcgtgattgccaaatcgatgcccggctatggcccttatatcgcctcgaagcttgccgtggaagggctggtcagagtgatggcgaatgagctgcgcgggcgggatattaccgtcaatgcggtcgcgcccgggccgaccgccaccgaactgtttatgcacggtaagagtcagcagcaaattgacgcgctggcgcaggccgcgccgctggaaagactgggggtgccgcaggacatcagcgaggtggtggcgtttctggccggcggacaggggcgctggattaacgcgcaggtgatcagggtcaacggcggtttcgcctga

SEQ ID NO: 443116 - DNA, 441 bp, Serratia marcescens
atgaccgatactgacgatctgacccaacgtttacaaaccgagcgcgccgccgtcgagacgctgtaccgcgcgtttaatgataaagacccggagctggtgcacctggcggttacccgcgactggcaggatattccgctggcgccgggacaggggccggggcctgacggcttcaagccgctgctggccggatttatcgccgcgtttcccgatatccgcatcaccattcacgagatgctgcaggagccgggcaaagccgccgttcgcgccgaaattaccggcacccatctgggcgaatttatgggcattgcgccgagcgggcgcagcatcagcgtcaggctgcacgagtttcataccctgaacggcgagcgtgtgaccgccacctggcacatggaagactggctggcgctgtatcagcagctcggccacgcgccgtcgctataa

SEQ ID NO: 443117 - DNA, 915 bp, Serratia marcescens
atgaattttgaggggttcgatcttaatctccttgcggcgtttgacgcgctgatggcggaacgcaatgtcaccaaagcggcggcgatggcgggcgtcagccagccggcgatgagcgcggcgttggcgcgtctgcggcgcgcgttcgacgatccgctgtttatccgcagtgcggaaggcctgcaaccgaccgccaaggcgcaggccatcgccccgccggttgccgaagcgctggcgcgcatccgcagcattatgcaccccgccgaggcattcgatccggcggcgcaaacgctcagctttaccctgggactgacggagtatccgctgcatatcgcgctgccggcgctgagtaagaaatttgcggcgctggcgccgaacggcacgctgcacatccgcagttttaccgaccgcgatgaaacggtggcgctgctggacagcggtaaaattgacgcggccctgagcgtaacgcccaccaagacgcagcgccggatcgtatccgttccgttgctgagcgatgagtttgtcacgctgacggcaaaagacgacgagacggcgcgcgacgaaatgacgctgcaacgctttctggcgatgaagcacatcctggcgtcgccggaaggcaaccgctacggactgatggatgagatgctcagagaacgcgggctgacccgccaggtggcgctgacgctgcccagcatgttcgccatcccggcgctgctgcccggttcgcactatgtcagcacggtgctgcgccgggtggcggcaacctcggcctgccgcgaggcgcttaccatcaccgagccgccgctgccgatgccgcagattcagtttcacctgttatggcatcaacgcacgcaggatcatgcggcgcatcgctggctcagagagatgattggcgcggtgtgccgggagattgactga

SEQ ID NO: 443118 - DNA, 777 bp, Serratia marcescens
atgtcagactttacgctttccgtctgcgccgaaatggtgtttctcgatttgccgtttattgagcgggtgcggcgcattcatcagctgggattcggcgttgaaatctgggactggacgcagaaagacatcgaggcgctggtgcagaccggcgcgcgctttacctcgatgaccggctatatcagcggcaatctgcatgacgaggatgccattggccaactgctggacagcgcgcaggaatcgctgcaggtggcgcagcgtctgaattgcccggtgctgaacctgcacggcaccgggctggatcaccgcggactgccggtcaggccggtggcgacggccagcggtgcgatgtggctgcaagcctatcaaacgctgcagtcgttggccgcgctgggagagcgggcgggccgcgtgtttacgttggagaacctgaatacggcggtcgatcatcccggcacgccgttcgccagggcggaggagacgctggcgctggtcagcgcggtggacagcccctttgtgaagatgaatctcgatctctaccacgcgcagattggcgaagggaacctgtgcgagctgattcgccgcagcgccgcgcatattggtgaaatacaggtggccgacgtgccgggccgttgtgaacccggcagcggggagatcaactatccggcgatcgcccgcacgctgcgggagattaactatcagggcgtggtggcgctggaaggatgggcgtccggcgatccggagccggcgctgcaggcgttccgcgcggcatttgcctaa

SEQ ID NO: 443119 - DNA, 1008 bp, Serratia marcescens
atggcagttgcaaagatggtgcgcgttggtttgattggcgcaggacggatggggagtttccacggccagacgctggcgcagcgtattccgggggcgacgctggcggcggtggccgatccggtgccgggggcggcggagaagctggcggcgacgttgggggcggcacgcgcctataccgatccgcaggcgctgtttgacgatggcgatatcgacgcggtggtcatcgcttcgccggcccgtacccacgccgaattggtgacggcggcggcccgggccgggaaaagcatcttctgcgagaagccgatggcggtgacgctggaggaggcggatgcggcgatcgcggcggcgcagcaggcgggcgtggtgctgcaggtcggctttaaccgccgctttgccagcggttttgccgccgcctatcaggagattaaggcgggccatctcggcgtgccgcagctgatgcgctccgttacgcgcgatccggggctgggcgatccgacgccgatcccgcactggacgattttcctggaaaccctgatccacgacttcgacattctgctgcacctcaaccccggtgcgaaaccggttgaagtgtacgcgatggccgatgcgctggtgcgaccggactttaaagcgcgcggcctgctggataccgcggtggtcaacattcgtttcgacaacggcgccatcgctaccgccgaggccaacttccaggcggtgtacggctacgatgtgcgcggcgaggtgttcggcagccagggcatgctgcaggcgggcaatatcaatatcaacaactgcgtgcgctacaacgcgcagggaatatccatcgataccgcccgccgggatacggatctgctgcgcgatgcctatatcgcggagctaggcgattttgtgcgctgcgtggcgacgggggatacgccgcaggcgacggggcaggatgcgcgcaacgcgctggaaatcgcgctggcctgcattgcttccgtgcaacagtccaaaccgatcgtactgtaa

SEQ ID NO: 443120 - DNA, 1449 bp, Serratia marcescens
atgtcgcaacgcaaacacaacgtaccttacatcctgtttatctgcgcgatcgcctcactcagcggcgtgatcctgggctatgacgcctcggtgatttcgggggtgatcgacccgctgaccgagcatctgtcgctgtcgccggcggagagcggctgggcggtgtccaatgtgattctgggctgcgtcatcggcgcctggggcgtcggctacctgtctgaccgctgcgggcgcaaaagcaccctgatcgtcaccgccgtgctgtttattatctccgccgtcggctcggcgctggcgcacgacctgaccgactttgttatctaccgcatgatcggcgggctggcggttggcatggcctccgccgtgacgccgctctatatcgccgaggtctcgcccaaggatctgcgcgggcgaatgctgggcatgcagcagatgctgatggtcggcggccagctgaccgtctatgtggtgaatttcctgatcgccaaggggatgcctcatgaatggctggtcgccaccggctggcgctggatgctggcgtccggtctggtgccttgcgcgctgttcctgctgctggcgttctttatgccggagtcgccgcgctggtatgccatgcgcggcaagcaggacaaatcgttgaaggtgctgggttcgctgtcgaatccggaacacggccagcggctgcacggagagattatgcgttcgctggcgtccgagcaggcgcaggcaagaaaaaagccgggcatcctgcaggataaaaaagccagctacattctctggatcggctgcgcgattgccgtgctgcagcaggtttccggcatcaatattttgctctatttcgcgccgtcgctgttgcagaacgtgaccggcaacacccaggactcgctgtttcagagtattttcctcggcgccgcgctgctggcgggcgttgttattgcgctgttcgccgttgaccgcctcggccgtcttccgttgctgcgctggggctcgttaggctgcgcgctgtttctgttcttcaccgcctggacgtttatgcaggagatgaaaggctatctgccgatcgtcgggctggtcggctttgtgctggtgttcggcctctcctggagtctgggcgcctggctgctgatctctgaaattttccccaaccgcatgcgcgccgtggcgatgggcttcgcattttgctccatgtgggcggccaattttatcgtgacgcaaagctttccgatgatgaaccgcagtcctgcgctgatggcgcatttccacggtgcatttccgctgctgttgtgcggcggtttcagcctgatcgcgttttggtttgtcgggcgattcctgcctgaaaccaagggcgtctccctggagcatatcgaaccgctgatgctgtcgaaatcccggcgctttggcggtgaacaggcggagatctccgctacacagccggtttcccacactaaatag

SEQ ID NO: 443121 - DNA, 1980 bp, Serratia marcescens
atggattacacaccggaacggtactgggatgaggagtgggagttgattgccaggcttaataatgagcaggctttcagccgttatatcaaggcattgcaccaagcctggcgggtgttctggcgcggtgagacgccgtccggcgtgcgcgccgccgtgcacgcctcctgggcgcgcagccgcagcaacggcatcgatcccgaccattttcaataccggttttgcgaagagaaacggctgcagacgatactggcgcacaacgccccgctgatcgccatcgcgcgcggcgtgatgcgcaacctgctggcttataatcccaacgggcatattaatctcaccgacgccagcggcattacgctctacttttgcggccaggatctgacgccggtgggcagtatgctcagcgaggacgtttccggcaccaactgcaccggtcgctgcctgagcgaaaaccgcctggtgtatctgctgaacggcgagaattacaaacgcgccctgcgtcaacgtgataaacactgcgccgccgcgccggtcagggacgaaaacggcgtgacgatcggcgtgctgacgctgaccgccaactccggcaacttccactaccatacgctgggcaccgtgcaggcggcggcagaggcgatttcccagcagctgatgctgcgtcagctgctcgaggagcagcaatcggtgctggaatctatcaatgaaggggtgatcgtcctggggcaacggggcaatatccgccagctcaatagctacgcccgccaggtgctgggcatctctccacgcgcggacaatcaggatatcgacaacgttctgcagccggaagcctgctcgctgaagacgctgaacgcctgtaaagaccgcagcattactttctgcccggacggcggcagccgcatcacctgcctgatttccgtcgtctgtacgccggacggcggtaaagtcatttcactgcgggaaaaccgccgcatccgcgatatcacccacaaggtaatcggcagcagcgccagctaccacttcgacatgatcctcggccagtcggccgccatgcaggcgatacgcaaccgggcgcgcaccgccagccgcagcgacagcaccgtgctgctgggcggcgaaagcggcacggggaaagagctatttgcccagtcaatccacaacagcagcgcgcggcgtaacggcccttttctggcggtcaactgcggcgcaatcccgcgcgatctggtgcagagcgagctgttcggctacgaagacggcgcattcaccggctcacgccgcggcggcgcggcgggcaaatttgaactggccgacggcggcacgctgtttctggatgagatcggcgatatgccgctggatgcgcaggccagcctgctgcgcgtgctgcaggagaacgaggtgacgcgcatcggcggcaaccgcccgctgaaggtcaacgtacgcatcattgccgccagccaccgcgatctggaaaaagaggtcgccggcggcgctttccgccgtgacctttggttccgcctgaatgttatcgacctgcagatcccgccgctgcgtcagcgtaaagaagacatcagcgaactggcggacggattctgcgagcagatctgccggacgctgggacgagagaaggcgcgctttaccgccgccgccttgcgccagctggaagcctacggctggccgggcaacgtgcgtgaactggagaacatcgtcgagcgcaccctcaacctaacggacagccgggtgattgacgagcaggatctgccggatgttctgcaaaccgccggcgcggcgtgcggccacgcgataagcggcagccacagcctgcaggaaagtgaaagaaatctgattatcctgtgtctgacggaaaaggccggcaacctgcgccaggtggcgctggcgctgaacctgtcgcgtggtgcgttgtataacaagctcaagcgctatggtattgatgccgacgattaccggcgcggcaaagcggcgcgttaa

SEQ ID NO: 443122 - DNA, 813 bp, Serratia marcescens
atggcagaacgagacaatctaccgccggcggtgttatacgagaaaagggggcatgtcgcctatatcaccctgaaccgcccggccgtgcttaacgcgatgaatcttgacatgcacaggcagttgctgacggtatgggaagattttaaccatgacgacgaactgtgggtggcggtgctggccggcgcgggcggcaagtccttctccgtcggtcaggatttgaaggaactgaaaacgcgctacgccgacggcgaacctttttccagcctgggcagcgccggacgtccaggctggccgcgactgaccgaacgcactgatatttacaagccgattattgcggtggtggaggggtacgcctttggcggcggttttgaactggcgctggcctgcgatttgattgtcgccagtgaagcgtcagttttcgctctgcctgaagccaagcttggtttgattcagggggcggggggcattttccgcttgacccggcagatgccgatgaaactggccatggagatgctgctgacgggcaaacagatctcggcgcgtcaggcgcaggcgttcggcattgtcaatcaggtggtcgacggggcgaaactggcggatacggttgaacaactggtgaatgatattctgcgctgctcgccggcggcgacgcgcgcgattaaaaatattgcctacgacagcgccgataaaagcctgccggaggcttttcaggcgcagtatgccgcagaacagcggcgcttgcacagccaggacctgcttgagggggtggacgcctttctggaaaaaaggccgccggtttggtcgggcacgtga

SEQ ID NO: 443123 - DNA, 1260 bp, Serratia marcescens
atgatgagtgaacataccgatgagttctcccatgcgctgcgccagcaggccgcggcgttaaagaccgcgctgcaggcgcattacggcaatagcgccctcagagacgatatgatcattgccgaatgcgctgccgacccggacgttacgcagtttttctcgcgctacgggctggcgttgtaccggttatggacggggcactattgccgctctcagcgtattgaggcgctttatcagtctgctgcggaactgctgtttggcgagatcgcgcaaggcacgccgcagcaggcggctgccgactactgtttttcgcttttgctggcgcaggtgctgcaggacgaggacgccggtacgcatctgctaaacgccatgctgcaaccgaaagacgcgtcgctgccgttggtcgaggcctttaaccgcagcggttacgtcagactgacggcgctggagatccgtcaggaaggcgaggcggcggtggtcactttccttgatggtgatacgctgcatgccgaagacggcgactttgtccgcgatttggaaacggcggcggatattgtccatttatcggacaaggttaaagccggtgtgctgcgcggcggcgtggtcagccatccgaaatatgccggccgccgggtgttctgctcgggcatcaatctgaaaaaactgcacgatgccggcatctcttatccggagtttttgattggcagagagatggggtgcatcaacaagctgatccacggcgtcgtttgcccgtcagagggggcggcggtcagcatcacgaaaccctggatcgccctggtggagaccttcgccatcggcggcggtatgcagatggtgctggcctgcgattatgtgatcggcgagcaggggtgctatgtctcgttgccggcagccaaagagggcattattcccggcgtttccaatctgcggctcaccagcgcgaccagcgagcgctttgccaagcaggtgattttgcatgggcgtaaagtcagggctgacgatgctgatgccggatttatcttcgatcgggtcgtggctgcagaggcgctggaacgaaccctgcaggaagcgattacgctgatggcggcaccggccgtaccggtgaataaacgtatgctggtgcttgccaaagagccattggcggcgttccgcgactatatgcaggcattctgtcgcgaacaggtcatcagaatgtatgccgtcgatgtaaaagaaaagaccggtaaattcgccagaaaaatccccgaggtgccggtggagtaa

SEQ ID NO: 443124 - DNA, 642 bp, Serratia marcescens
atggaacgtctaacaatcaattttaccggctcagcggcaattaccagcgacatgattgaacaacttaatcaactttgcgctcaggttgaaaatactccggcgatcgatcaggtgctgttcgcttttgcgggcggcgctgcgccggcgcagggaacagagagtatggatgtcggtctgttgcacaagtgggaaaaggcgctgcgccgggtggaaaacctgaatgcgctgctgatcgccaccaccgacggcgaatgcgggctggtggccttatccattatcgccattgccgatctgcgtctgggcacgcctgacagcacctttgccctgcgcgggaaagatatcacgctgccggggatgctgattcaccgcttaaccaatcagctggcggccaactgggtgcgtttgctgctggtgctggggaatacgctgtgcgccgaggaggcgttggcgagcggtctgctggaccgcaccagcacgcagcccgccgcgctggcggaggatctggcgatgggcatgaacccgcacgcctttaccgatatccgcgtgcgccgcaagctgatgctggaagcctgtcatacctcgtacgaggacacgatcggcctgtcgctgtccgccagcgaccgtacgttgcgtcaggggtaa

SEQ ID NO: 443125 - DNA, 1131 bp, Serratia marcescens
atggaattcgatcgggtatttatagatgacggtgggtatttgcagatgaaagagagaacgaataacggaatgaacgcctatattctggcctgtgcgcatgatgtaccggaaaccgcctattcacagagcgaggtctgtgacaaccttaatattacggatagccgcattcgctccatatttattaacagcggaatcagcaaaagacatttgtcgatagacaatatggcgggaagcgccgccgagggtgaaacgcatgcgcaaatgctggcgcgtcatgaaaaaaatgcgctcaaactgggggagaatgcaatccgcaagtgtctggataaaatcggcatgcggattgaagatattgactgtatttgctgcgtgacgtcgacgggttttttagtgccggcattaagcgcccgtttttgtgaatcgctgggggtgtcggacttttgcaaccggattgatattgtcggcatgggctgttccgccgggctgaacggtttggacgcggtaaaaaactggtcgcttgccaatccgggcaagctggcggtggtggtctgtacggaaatctgttctgcggcctacattgaggacggcacgctccctaccgcggtggttaacagtctgtttggcgacggcgccagcgccgcggcggtcgtcagctcgtcggaagacgatgcgccacctgccggcgcgatcaaactgcgggcgaagctcagcctgaccgaaccttcggcgatcggcatgatgaagtttgattggaatgatgagcagcataaaaaccgcttttacctctcaaaagacgtgccgtatgtggtgggatcgaaagttgaaaaagtggtgcataaactgctgggcgaacatcagctcaacgtcagcgatattgatcactgggtcgtgcattccggcggcaaaaaagtgctcgattcaatttgtatcaatttgggattaacgaaaagcgatctgcgccacacgcgcagcgtattaaatgatttcggcaatctttccagcggttcattcctgttttctttagaacgtctgcaaaatgaaaaaataacgtcagccggagatatcggggtctttatgacgatgggccccggcgcggcgattgaaactgccctggtgcaatgggaaaaataa

SEQ ID NO: 443126 - DNA, 1254 bp, Serratia marcescens
atgccaactcaggagagtgttttatccatcgtgggcgcgcttaaccagcgctatccacatgcctgttcactgtcattagggcgtcccaaccctgatatttacgccagactggatcttgaacgttatgcgcaggcctatcaggcgttcttacggacagaaaagcactatgacaacgcgaaaatcagagagaatctttacacttacgggcccagccaggggatgattactgcccatctcgccaaatggttggcgaatgatgaggggatccacgctggcgagaaggagattctggtgaccaatggttgccaggaagcctacaacctggtgctactgcacgaattacgccagcccgaggattgcgtgctgattattgagcccagctacttcggatttaccgattgcgtcgcggtcctggggaagtcatccgttaaaatcgctatcgacgatcttgccgatcctgccggcggcgttgattttacgctgctgccggcggttatcgagcagtatcgccggcagggtaagcagataaaacttatctatatcaatcctgattttaataatccgatgacctaccaactgagcgaggcggagaaaagcgcgctgcttgcggtctgcgctcagcagggggtgaagattattgaggatggcacctattcggcgttctattacgatggcatacagccccgcgcaataaaaacccgggataacgcaggccaggtctattatatcggctcgttttccaaaacgttatgtccgtcgctgcgtctgggctatctggtaataagccggcacggcgacgcaacctttaaccatttgctgcatattaaagatcacaccagcctgagcagcagtgcgctgaatcagcaaattgtcgccggttttttaatcgagcatcaatactcactggaaaactggatccgtccgatccgcgatgaataccgtgcccggcgtgacgcgatgctgcaggtgctcgagcaggaattggacgccggtctgctgcagtggcacgcgcctgccggcggctttttcgtgtatatccgcttgccgcaggagatcaacaccgcgcacctgctcgactgtgcggaggggtatcaggtgacatttctgccggtcagttatgcggtgcgggacggccggcagcgcgctcacggtatccggctcgccttcagttattacccgccggccgcgattgcggcgggaacccgcaagttttgtcagttcctcaatgaaaaactcttgccacaacagatctga

SEQ ID NO: 443127 - DNA, 1242 bp, Serratia marcescens
gtgaaaaatacgattgttattattgatgcgctatcaacgggaaatgaactggcggcggcatttatgtcgcgcggctgcgacgtggtgcatatctggcaagatttttcgcgccaaacgcgtactcagggatttgtcgaaaccattaattatgccggatcgctggatgaccttatccagcagctgagaccgtatgatattcgctatgtgattgccggtgcggacagcggcattgcattgtcggatatgctggcgtcagccatggggataccggcggcgaatgacccagaaactaccgactggcgacggaataagtatatttcgcagcaaaagctggcggaaaaaggtattcgctcaatcaggcagtgcaaggcctcttcagccgcggaactggtgtcctgggccgagctgaacggttatcccgtgattgtaaaaccgctgaacagcggcgccagcgacggcgtaacgctgtgtgagagcggggaggacgtgcagcgtgcggcagaacaactgctgggcaaagagaatctgctgggttatgtgaatgatgaattgttgatccaggaactgattgacggcacccagtatttcgtcaacacgctgagctggcatggacagcattatgtgacggacatctgggagcaggtgcgcagccgggtgagcggcggcgcttacaattttgaagggatgcacctgatcgatgcgcaggaaacgtatgccagagcgctggcgacgtatacccttgaggtattatccgccttgggcgtcgattatggcgcggcgcacaatgaggtgatcctgacggcggaagggccggtgctgattgaaaccaatgcccgcctgatgggcgcctccatcaatgacgtgacattcagcgcctgcctcggctacacccaggttagcctgtgtgcggccatgtatctggcgccgcaggatttcatcgaccgctacgtgggcacgcattaccgcatgcatgcctatgtgtctgaaatatcctttttgttcaagcgcgacggcgtgctggaggcgatgccggggaaacgcgcgatagagcggcttccttccttttccaatttctttgcgctgccgcgtccgggacagcgcgtcacccgcacggcggacaccaagggattgcccggattcgcttatttactgcatcaggatcaatcccagttaacgcgtgattttaatcagatcctggcatggcagcagcgggatgatatttatcgcatcgtcgatgaataa

SEQ ID NO: 443128 - DNA, 1185 bp, Serratia marcescens
atggagttggagcgtgatacggtaagccagggacagggcgtcaatattgtttttatggcagtagccttaatattgggaatggcgggcgcgttacaaatgccggttgtcagcctgtttctgacgcgggaaatcggcgccagtccgtttatggtggggatgttttataccgttaacgcgttggccggcgtaggcgtcagccaactgatggcgcgaaagtcggatgcgggcggtaatcgccgccgtctgatcctgctgtgttgttcggttgccatagccaatgccttgctgttcgcgtttagccgggattatcgcattctggtgtcggcaggcgtaatactgtcggcgctggcgacaacggcgatgccgcaactgtttgctctggcgcgtcagtattcggtcggcgccgattttgacgttatcaaattcaccacccggatgcgtgcccagatttcgatctcctgggtgatcgcgccgcccgtcgctttctttatcatcgcgcatttcggttttaccgccttgtatctgctggtggctctgctgtttgtattgggcggacttttcgtcctgtcctcgctgcctgcgggggacgtgcagccacgttcagcgacgccggcgacgtccgctaccccgacggccacgggtcggtcgcaagaagcctggctgctgtttgccgctttggcgctgctgtggggcggcgatacgatgtacctgatcgatatgccgatatatatcagcagcctgccgggtatgggcagtagttttgccggctggctgttgggaggcgcggcagggctggaaattctgatcatgctgttctgctcgccggtgatcaagcgcgttggcacgcgtcctatgatgctgctggccgccggttgttccgcgctgttttacctgggcatgacacaggcggtttctccatgggcgctggcggcgattcaggtgctgaatgctgtttttatcggtattgtcggcgcactgggtatgctctatctgcaagaattgatgccggagagcccgggaacggccagtacgctgtacagcaacagtattgccaccggggcgatttttgccggtttgcttcagggcgccatcagtcagcattggaatcatcaggccgtttattatgcggcgctgtcactgtcgctgctggcattattgttgttgttaaaggttaaagacgcctag

SEQ ID NO: 443129 - DNA, 909 bp, Serratia marcescens
ttggagatacaaaaggcggcgatcccctcaatcaaggcgctgcaggtgtttgagcaggtggcgcatttcggcaatgtggcgcgcgcggcggaagagctgaatatcacgccctcggcggccagccaccagttggccaagctggagaaactggtgggcaactcgctgtttaaccgctcggccaaaggggtgagcctgacgctggcgggggaaacctacctgcgtgaaatcagtcagctgctgctgaacctggcccaggccacggcgcagatccgcgaccagaaagagaacaatgccttgcgcatccattgcgcccccagtttcggcctgctgtggctgctgccgcggctgaagcagctgcatgaggcctgtccggagcttaacgtgacactgtcatgttcttatgaaaacctgtcgttcagccgcgataacatcgacgtggcgatccgccacggcttcccggactggtcgccgtttgatatcaaaacgatacgtgatgaatgcattaccgccatggcatcgccggactatctgcagcgccatccggcgccttcgccggcagcgctggcggagcaccagctgattctgtcggaaacgccgctgatccagtggccgcagtggttcgccgcccatcatctgccccagccggagcgcccctgggtgttcagctttgaccgttcctacatgagcctgcaggccgcgcgactgggacacggcgtggtgctggagagcgaactgctggcgcgggactacctgcgcgacggctcgctggtgcggctgtttccggcggcgctgagcctgccggtcagcgcccatcatctggtttatccgcgcggtttcggccagctggcgcgggtgaagcgctttttgcactggatgcagcaggcgctggacagcgacaggatgtactga

SEQ ID NO: 443130 - DNA, 750 bp, Serratia marcescens
atgttactgaacaataaaatcgccgttatcaccggcgccgcctccgagcgcggcatcggccgcgccaccgccgcctgctttgccgcccacggcgcacgcgtggcaatcctggatctggatcgccacgcggcggcccatgccgcgcagcagcttggcgacggccatctgggactggcggttgacgtcgctgacccgcaggcggtcaatcaggccgtggcgcaaatcctcgagcactacggccgcatcgacgtactggtcaacaacgccggcattacccagccggtaaaaacgctggagatcggcatgcaggactacgaccgcgtgctggacgtcagcctgcgcggtacgctgctgatgtcgcaggcggtgatcccggcgatgcgcgccaacggcggcggcagcatcgtctgcctgtcgtcggtatccgcccagcgcggcggcggcatcttcggcggcccgcactacagcgccgccaaggccggcgtgctcgggctggcgaaggcgatggcgcgcgagttcgccccggagcagatccgcatcaacagcatcacccccggcctgatccagaccgatatcaccggcggcctgatgcaggacgagcgccggcacgccattatcgacggcattccgctcggccggctgggcaacgcgcaggacgtcgccaacgccgcgctgttcctggccagcgacctctccagctacctgaccggcatcacgctggacgtgaacggcggcatgctgattcactga

SEQ ID NO: 443131 - DNA, 1299 bp, Serratia marcescens
atgacaacgcttaacctgaccgccgccgccggcgtgcgcgacacggcttaccgcaagatcgcctggcggctgatgccgattttgatgctgtgctacctgtgcgcctaccttgatcgggtaaacgtcggcttcgccaagctgcagatgatggacgatctggctctcagcgaaaccgtctacggtctcggcgccggcattttctttatcgggtattttttcttcgaagtaccgagcaacctgatcctgcaccgggtgggcgccagacgttggatcgcccgcatcatgatcacctggggactgatttccggcctgttcgccctggtggaaaccgcctggcagttttacctgctgcgctttctgcttggcgtggcggaagccggcctggcgcccggcctgctgctgtatctcacctactggttcccggcggcgcggcgcgcgcgcatgacggtgctgtggtttatcgccattccgctgtccggcatgatcggcggcccgatctccggctggattatggagcgctttgccggtgtgcacggctgggccggctggcagtggatgtttgcgctggaggcggtgcctacgctgctgatggggctggtggtactgatggcgctgaaggatcgggtcgaggacgcgccctggctggatgaacaccaaaaacgcctggtgcgcgccgatctcgacgccgacgatcagcataaacaccagcacggcaccatcgccgcgtttatcggcgacaggcggctgtggctgctggcgctgatctatttctgcgtggtgatgggccagtatgcgctcaccttctggctgccgacgctggtcagaaacgccggcatccgcgaaccgctgcagatcggtctactcagcagtctgccgtatctgtgcgccatcgtggcgatgattctggccgggcgcagcggcgaccgtcatcgtgaacggcgctggcatctggctatcccgatgctggcgggcgctgcggcgctgctgctggccacccagttcggccattatgtcgcgctgtcggtcgcctttctctgcctggcggcggcgggcatcctctccgcctcctcattgttctggatgctgcctaccaatctgctgggcggcgtttccgccgccgccggcatcgccgcggtgaactgcttcgccaacctggcgggcttcttctccccttacctgatcggcggcatcagcagcatcaccggctcgcccgcctggggcatgtatctgatcacactggtattgctggccggttcgctgttggtgttccgcatcccggccgcgcaggttaaccgataa

SEQ ID NO: 443132 - DNA, 852 bp, Serratia marcescens
atgaccacaatcgatgtaccgcagaccgccgcgctctcactgcagcagcgggcgtacaacattcgccggcacgcgctgattatgggccaggtgcaggggcaaggctatatcggccaggcgctcggcgctgcagacctgctggcggtcagctattttcacgccctgcgctaccgcgcggacgatcccgaatgggaacagcgcgaccgtttctatctgtcgatcggccactatgctatcgcgctctacgccgcgctgctggaggccggcattctgccgctcgatgagcgcgaaacctacggcgccgacgacagccgtctgccgatgtccggcatggccgcctacacccccggtatggagatcaccggcggttccttggggcacggactgggcatcgcggtgggcgcctgcctggggctgaagcgcaaaaacaacccggcgtttatttacaacctgctgtccgacggcgaactcaatgaaggctccacctgggaggcggtgatgtccgccgcacactggcggctggataacctgattgccctggtggacgtcaacaatcagcaggcggacggccactcgtcggaaatcctctccttcgaaccgctggccgaccgctggcaggcgttcggctggcatgtgcagcgggtagacggcaacgacctcgacgcactggtggccgccttcgacgtcgcgcgccgccacgataaaccccagccgcgggtgatcctgtgcgacactcgcatgggcaaaggcgtcccttttctggaggcgcgggagaaaacgcacttcatccgcgtggatgaacatgaatgggatcaggcgctgaccgccctggaaatcggagaacaaccatga

SEQ ID NO: 443133 - DNA, 1011 bp, Serratia marcescens
atgagccagaccaccaccacgcccgccggcggcaaaaagcgtttaaccacctcggcgatgatcgcctccatcgccgccgaaggccagccgacacagtccgcgccgtttggtgaagcgctggttgcgctggcccggcagcgcgacgacatcgtcggcatgaccgccgatctcagcaaatacaccgatctgcacctgttcgccaaggcgtttcccgagcgtttctatcagatgggcatggcggagcagctgttgatgagcgccgccgccggcatggcgcgcgaaggctttacgccgttcgtcaccacctatgcggtgttcgccgcccggcgcgcctatgactttatctgtatggcgatcgccgaggagaacctgaacgttaaaatcgcctgcgccctgccggggctgaccaccggttacggcccgagccatcaggccaccgaagatctggcgatcttccgcggcatgccgaacctgacggtgatcgatccctgcgatgcgctggagctgagccagatggtgccggcggtggcggcgcatcaggggccggtgtatatgcgcctgctgcgcggcaaagtaccgctggtgctcgaccgttacgattatcagtaccgtcacggtaaggcccagcggctgcgtgacggtaaagatgtggtgattatcgccagcggcctgatgaccatgcgtgcgctggaggcggcggaacagctggagcagagcggcgtcagcgtggcggtggtgcattcgccggtgatcaaaccgctggatgaggagaccattctgcgcgaggccggcgtctccggccggctggtgatcgttgcggagaaccattcacagattggcggtctgggggaagccgtggcgtcaaccctgctgcgcaacggcgtgacgccggcgttccggcagatcgctctgccggacgccttcctgctggccggcgcgctgccgaccctgcatgaccgttacggcatctccaccaccgaaatcatccggcagatcaagggctggctgtag

SEQ ID NO: 443134 - DNA, 1098 bp, Serratia marcescens
atgaatcattccgcgctgttccagacgcagcaaatcaaccaactgttgttgcccaaccggctggcggtggcgccgatgacgcgggtttccgcctccgccgacggcgtggcgggcgagagaatgcgccagtattatcagcgcttcgcgcagggcgagtttggcctgatcgtcagtgaaggcatctatatcgacagcgccagctcgcagagctatgacttccagtccgggctggtgaaccaggcgcagcaacgcggctggcagcaagtgacgcaggcggtgcatcagcacggcggcaaaatcttcgcccagctccagcatgccggcgcgttgtcgcaggcaaaccgccatcgtatgcataccgtcgccccttcagcgctgcggccgaaaggcgagcagatggccttttaccgcggtgaagggcaatatccgctgccgcgagcgctggacgacgaggagattcaacagattatcgcggatttcgctaccgcggcggaacgtgcgctgcacgccggttttgacggtatcgagattcacggcgccaatggctacctgctggaccaatttttcaccgactacagcaatcagcgcgatgaccgctggggcggcgatattatcggccggctgtcgctcagcctggcggtgatcgacgcggtgcgtcagcggattggtcgtgcggcgccgctgggaattcgcctgtcgcagggcaaggtgaatgattttgaccataaatggtccgaaggcgaggccggggccaaagcggtgttccaacgactggcggcctcgggcatcgattttctgcacattaccgaacatgaggcgtggcagccggcattcgacgccgacggggcgtcgctggcggcactggcgcatcgccatgcgccgtcgctgacgctgattgccaacggagggctgcatcaaccgcagcgggcgctgcagctgacggaacagggggccgatgtgattgcgttggggcgcggcgcgctggctaaccctgactggccgcggcgggtgcgtcaggggttggcgctgcaggaattcgaccgcgcgctgctcgggcctatcgccgatatcaaagagagcgagctgcggctggcgtaa

SEQ ID NO: 443135 - DNA, 873 bp, Serratia marcescens
atgaacctgaaagagattgaaattttcctgcaggtggcccagaccggcagcctgacgcaggcggcgcaccgtctggacatgtcgccgatgtcggtctcgcggcggctggcggcgctggaagcctcgctcggcgtgcgcctgttgcaccgcaccacccgcgcggtgtcgctcaccccagaaggcgtggagtttatgccttacgcccgcaccatgctggaagcggagcaaagcgcacgcgtcctgttttccagcgggcggcaaggcgctggcggtcagctgcgcgtcaccgccccctccgggcttgggcagcgtattctggtgccgctcattccgacgctgctggcggaaaatcctgatatgaaagtggatctgcaactgagcgacgaggtcgttgatatcgtcgcccagggctttgacgtggcgatccgtgtcgccccgctgcgtgattccaacctgatcgcccgcaagattgccgataatccgcgcgtactgtgcgcggcgccggcctatctgcaacggcacggccggccgcagcggctggcggatcttgccagctttgcctgcttgcggctgagtaacgtgctgcagtggacattttccgacgacggtcagaccaccggaataagtatcgacgggcgctttagctgcagcagcgttgagggcgtgcgttcactgtgcaaggcggggctggggctggcgcagctcacccactgggatattcgggaggaactgcgccgcggtgagctggtcgccattgaactgcaggatgttcagccgcaggcattggccgtctgggcgctgtttcccagtcatcgttacctgccgctgcgggtcggcgtgtttcttgacgcgctggcgaaagcgatgggctag

SEQ ID NO: 443136 - DNA, 243 bp, Serratia marcescens
atggaaaccattgagcaacgcgtgctcggcgcactggccaaactacaggggattaataaatccaacatgtcgattgatgcagatttctttttcgatctggaaatggactcgctggatcgggtggaggcgctgacgctgatggaacaggaattcggcatgacgatcccgctggcggatgcggctaaattcagccgggtgcgcgatgtggtcgactacctgacgccgcacctgagcggcgtctga

SEQ ID NO: 443137 - DNA, 495 bp, Serratia marcescens
ttgaaaaaatgccgcatttttgccaaaaaaatccccattcgtcacgttttattcctcggatgccgttttgccacctgtatcacgtcgccggaaaaaaccagacaaaaagagattgaatatccgacgcatcgttctatattcaaccatatggttaaattaccgcactctcagctggacgccgtttttcatgcgctggccgatccgacaagacgcgcgatcctgacgcggctgtcgcagggcgagcgcagtatcggcgagctggccgcgccgcttaacatgagtttcgccggcgcctccaagcacatcaaagccctggaacaggcaggactggtgcagcgcaccgtgcagggaagaaaccatatttgccgactcgaaccagagccgatggcgcaggccatgcaatggctgcaatcctatgaacatttctggacggaacgactcgacgcgctggaacaggcgctgcggcagtcggagccgtccactcccaaggagtga

SEQ ID NO: 443138 - DNA, 534 bp, Serratia marcescens
atgaatgattacggtatggtaattgaaaccggcacgttgaggatccagcgtctgctgcccggcccgattgagcgcgtatgggcctatctgaccgagtcagacaaacgcgccacctggctggcggcgggcgaaatgaagctggaacgcggcgcgccgttcgagctggtgttcaataacggcgaactggcgggcaaagatgaacccacgccggcggagtacaaggcttacagcggcccggtcaccaatcccgggcatattatctgcctgtttccgccacaggttctgagcttcacctgggaagaaaaaggcgaagaacgcccgtcagaagtcacctttgagctgaccgagcaaggcgacaacgtgctgctgaccgtcacccaccgccgcctggccgaccgcagccagatgctgagcgtcgccggcggctggcacacccatctggatattttggtcgatcgcctgaacaatcagccgccgcggccgttctgggctacgctgacgcaggccgaagaggcataccgcgccaagctgtag

SEQ ID NO: 443139 - DNA, 435 bp, Serratia marcescens
atgaataagacgcagaaggtagttgctgttattagcgttatcgccattgctgctctggccgctgtattggtgtatttgtggccgacgatgaaaacagagtttgctggcagcgcgcaatataccgagcaagattctcgcctgtatcaattctacacgccagagttgttcaaaaatatgccgcgtatttccgaccactatgatttcaattacgcaagcatctcaggtccagaagcgcaggcctttgcggtgacattttatggcacgagtaacatcagtagcgtaaacgcttatttggcaaacatgggttaccaaccgcaggctacttgtacggttgaggctgaatgttggcgcactgcagggtcgaaagatgtggtgatggtcgcgcagttgccgaaaccggaaagggtatttatccagatttatcgccggccttaa

SEQ ID NO: 443140 - DNA, 699 bp, Serratia marcescens
atgagtaagcgcagcgatattattgacagcagtcaggcgcacaccgcgtcttatgggctggtttatacggaagtgcttggctgggtggatctgggtcatgctcaggggagtgacatccaagaactaatggataagattaacgctggagagtcatcgggtcaggagcgttatgatgtgacttattcacaatcgatggtttctccgtatcgcattctccgtatggggaaatttattaaatggcgtatcagacgggggcgatcgtattatgagcggcaaagcatcgcgctggcgatgatgatgacgctagcgcgcaagtttgaggcattccaatcatcatttcctgtcaacctggttaccgacagcggttttagcggtgaagatctggtttccgatttactcgggttttaccgcgtgatgtctattgaaaatccgtttccttttctgcgtcccgttagtaaagttgaagccttaaggcgttgggaccattatggcccgatcggttcgttcaagaacgagagttttttaccaatactatttcccgatccggccaggtttccccatgctaaaccgcgcagaggagagctaccgccctttatgaaaaccatcagaccctacagtgattttaactctgggaatgttgctgtcgccactcggaatggctcttttacgcagggcgggaaaggtgctcctcttatatga

SEQ ID NO: 443141 - DNA, 882 bp, Serratia marcescens
atgacgccatcccgccgtaaactccccccgcttaatgctctgcgggccttcgaggtttcaggccgccggctgagctttcgggccgccgccgaggaattgggcgtcacccagggcgccgtcgcacagcaggtgcgcgcgctggaagagcacctgagccagagcctgttccagcgtctgccgcgcggtcttgctctgacgccacagggcgcggcctacctgacggaggtgacccgcgccttcgatacgctcggggacgccaccgggcggctacttgagcggccagacacggtcacgatcagcgttacgccgaccttcgccgcaaagctgctgatccctcgtctggccgagttgaacgccgcgttacccggcgtggaattgcgcacggtcgccaccgaggcgctctgcgattttgagcgtgaccaggtggacatcgcaatgcggctaacccgtcccccgttcccatccgagctggaggccaggctgctgttccatcaggaactggtggcggtcgccagccctcatctggtcaaagatttaccgctcccgctatctagagaacggcttagggaacttccgctcctgcatgatgcgctcgaccattggccgctgtttctgcgtgccgacggcaaactgcccggtgcggtatttaaccagacgacgctggcgctggatgcggccctggccggccagggcatcgccttggcatgccgcgcgtttgtggcgagggatctcaaggccgggcgtctcatgcaggtcacggatgagaccatgatgatagagcccagctatttccttgtccgcaagcgctcatccttgccgcttgccccgcaggatgcggtatgggactggtgcgtggcccggctttcgcttgctgccgattag

SEQ ID NO: 443142 - DNA, 705 bp, Serratia marcescens
atggctgaagaaaaagttgcactcatcatgggcggcggatccggtatgggggccgctgccgcacgcagactggctcagagtggctatcgtatcgctattctctcctcgtcgggcaagggcgaggcgctggcccaggaactgggcggcgtcggcgttaccggctcgaaccagtccatcgacgacgtgaagcaaatcgtagatctgacaatggcaacatggggacggatcgacgcactggtcaattccgcaggccatggtccgcgcgcaccgctactcgacatcactgacgaggagtggcaccagggcatggatgtctattttctgagcgccgtgcgcccgattcgtctggtcgcgccgatcatggccgcgcaaggtggtggcgccatcgtcaacatttcgacgacctgggctttcgagccgtccagcctattcccgacgtcggtggtattccgggcgggtcttgccagcttcaccaagctctttgcggacgcctatgcggcgcagaatgtccgcatgaacaacgtgctgcccggctggatcgacagccttcccgaagtcgctgaacgccgcgacagcgtgccgatgggccgctatggaaccgttgaggaaatcgcagacaccgtggcctttttgctgtcggaaggcgcgggttacgtcaccggccagaatatccgcgtcgacggcggcgtaagccgctccatctga

SEQ ID NO: 443143 - DNA, 2202 bp, Serratia marcescens
atgcgtttatccactttagtgttagcgatgagcatggcattgggcacgcaggcgcaggccgaggagagcaaaaccccctccgaacatgcggcgctgcccagcggccaggcgaaggaggcgacggtgaccggcgaagccaatcagcacgagaaccaaaaaagcgacaacccgttcttctaccaaagccgtctgccgtatcaggcgccgccgttcgatcagattaaagagagcgactacgcgccggcgattgatgagggcatcaaacagaaactggcggaagtggacaagatcgccaacaacccggccaaggcggattttgacaataccctggtggcgctggaaaaaaccggcgcgctgctgacccgggtgatgagcgtattcggcgccatgacctccgccaataccagcgacgccctgcagaaactggatgaagaggtgtcaccgaagctggcggcgatggacgacgccattatgctcaacagcaagctgtttgcgcggattaaagcggtgtatgcgcagcgtgactcgctgaagctggatgcggaatcccgccgtctgctggaagtggcttaccaaagctttgagctggccggcgccaacctgtcggacgccgacaaaaccaagctgaaggcgctgaaccaggaagcggcgacgctcagcacccagttcaccaataagctgctggcggcggcgaagaacggcgcgctggccatcagcgacaagagcaaactggacggcctgtccgccggcgaactggcggcagcggcccaggcggccagcgaacgcaagctggataaacagtggctgctggtgcttcagaacaccacccagcagccggatctgcagaccctgaaggatcgcgacacgcgcaaggcgctgtttgacgcctcatggacgcgcgccgagaagggcgacggcaacgacacccgccagaccatcgcccggctggcgaagatccgcgccgagcaggccaaactgttaggcttcccggattacgcctcgtggaaactgcaaaatcagatggcgaaaacgccgaaggcggcgctgagctttatgcgcgatatcgtgccggcggcgaccgcgcgtgcgcagcgcgaggcgaaggatattcaggcggtgatcgaccagcaaaaaggcggctttaaactggcggcctgggactggcaatactacgccgagcaggtgcgcaaggcgaagtacgacctggatgaatcacagataaaaccttactttgagctgaataacgtgctgaataacggcgtgttctacgcggctaacctgctgtacggcatcacctttaaacagcgtaaggatatcccggtgtaccagccggacgtgcgggtgtatgaggtgtttgataaggacggcaaatcgctggcgctgttctataccgactactttaagcgcgataacaagggcggcggcgcttggatgagcaacttcgtcgagcagtcgaagcttaacggcaccaaaccggtgatttacaacgtcgccaacttcaccaaaccggcgcccggccagccggcgctgctgtcgtatgacgatgtgatcaccatgttccatgagtttggtcatgcgctgcacggcatctttgccgatcaggagtacccgagcctgtccggcaccaataccgcgcgcgacttcgtcgagttcccgtcgcagtttaacgagcactgggcgcgcgatccgaaagtttttgcccacttcgccaagcattatcagagcggcgaggcgatgccgcaggaactggtcgacaagatcaacaaggccgacaagttcaacaaaggctacgacatgaccgaactgctgtcggcggcgctgctggatatgcactggcatatgctgagcgccgatcggccgcagcaggacgtcgacaagttcgaggcgcagtcgctgcagaaagataacatcgatctcagctatgtgccgccgcgctaccgttccagctacttccagcatatctggggcaacggctatgccgccggctactacgcctatctgtggaccgaaatgctggcggacgacgccttccagtggttcagcgagcacggtggcctgacggcggaaaacggccagcgcttccgtgatatggtgctgtcgcgcggcaacagcgaagatctggaaaaactgtatgaaacctggcgcggtaaagcgccgagcattgaaccgatgctgatcaaccgtgggttgaaagagcagtga

SEQ ID NO: 443144 - DNA, 783 bp, Serratia marcescens
atggcgcactggattgatgccttggccgccctgcggcagcgcggcgaaccctgcgtgctggtcaccgtgattgatgagcacggctccacgccgcgcaaccgcggcgcgaagatgctggtgaccgccgggcaggcgctggacaccatcggcggcgggcacctggagtttcaggcgctggaaattgcccgcgccatgctgcagcatggcgagacggcgctgcggctggagagctttccgctggcggcgcggctggggcaatgctgcggcggccacgtccgcgtgctgtttgagccgcagaacgcggcgcggccgcaggtagcgctgttcggcgccggccatgtgggacgcgcgctggcgcagatcctggcgacgctgccgctgcaggtgcgctggttcgacagccgggtagaacagtttccgccgcaggtggccgccaatattttgccgcagctgtgtgaggatctgccggaagcggtcgatgacttgccgccgggttgcctctatattgtgatgacccacgatcatggtctcgatctggcgctggcggagcgtattcttaaacgtaacgacgccgcctatttcgggctgatcggttcattgaccaagcggaagcgtttcgagtatcagcttggtttgcgcggtgtagcaccgacggcgttggcgcggatgcgctgcccgctggggctggcggacgtgaagggcaaactgccggcggaaatcgccgtcgccgttgccggtgaagtgatcgcccattacgccggcgggcaagaagcgcggcgctaa

SEQ ID NO: 443145 - DNA, 2403 bp, Serratia marcescens
atgagtaagcgaccccaaccagaacgcagccaggccgagctggccgcacagttcggccagccgctgcgcggcggcgtcggacgtagccagaagcacgagagcgccgataagcacgtcagcggcgaggcgcaatacattgatgaccagctggagtatccgcggcagctgcatctggctgcacggctgagcgagcgtgcacatgcgaagattgtggcgctggactgcgccgcctgcgcgcagtttcccggcgtggtgcgggtgataacctggcaggacgtaccgggagagctggatatcgccgcgctgaccgcaggcgatccgctgatggccaaagatcgggtcgagtatgtcggtcaggtggtggcggtggtggcggcggaagatgaggaaaccgcctggcgagcggcgcagtcgatcgtcatcgactatcaggatctgccggcgcgcctggacgttgaacagtcataccgcaacggctggctggtcgaggagagccatcgccaccgtcgcggcgacgcggaggcggcgttggcgcgtgcgccacaccggctgcagggcgagctgcgcatcggcggccaggagcatttctatctggaaacccagatttctgcggtggtgcccggcgaggacggcagtatgcgggtctcttcctctacccagaacccgagtgaggtgcagaaactggtggcctcggtgctggcgctgccgctgcataaagtaacggtcgacacccggcggatgggcggcggcttcggcggtaaagagacgcaggccgccgggccggcgtgcctgtgcgcactggcggcgcacctgaccggccggccggcgaagatgcgccttaaccgccgtgacgacatgatgatcaccggcaaacgtcacccgttctacattcactacgacgtggggtttgacgacagtggcctgttgagcggtatcaacatcgacctggcgggcaactgcggctattcgctcgatctgtccggttcgatcgtcgatcgggcgatgttccacgccgataacgcctatttcctgcaggatgtggtgataaccggccaccgctgccagacccataccgcgtcgaataccgcctatcgcggcttcggcggcccgcagggcatgatggcgatcgagaacattatggacgttattgcccgccacctggcgctggatccgctggcggtgcggaaaaccaactactaccggcagaaaacgcgcaatgtgacccattatcagcagccggtcggccagaacctgctggcggagattacccggcggctggaacacagcgccgactaccgggcgcgccgcgcggcggtgcgggcgttcaatgcgcgcagcccgctgctgaaaaaggggctggcgctgacgccggtgaaattcggcatttcatttaccgccagcttcctcaatcaggccggggcgttgctgctgatctataccgacggcagcatgcagcttaatcacggcggcacggagatgggtcagggtctgaacaccaaggtggcgcaggttgtggccgaagtgttccaggtggatattgcgcggattcagatcaccgccaccgataccggcaaagtgccgaacacctcgccgacggcggcgtcgtccggcaccgatctgaacggcaaagcggcggaaaacgccgcgctgaccattaaacagcggctgatcgacatgctggtcaaacagcaccaggtgccggcgcggcaggtggtgttcagcaacggccaggtgcgggtcggcgagcgctacttcagttttgaacaggtcgtccagcaggcctatctgaaccagatttcgctgtccagcaccggctattaccgcacgccgaagattttctacgatcgcgaggccggcgccgggaatcccttctattacttcgcctacggcgcggcctgttctgaagtattgatcgacaccctgaccggcgagtatcagctgctgcgcgctgatatcctgcatgacgtcggcgactcgctcaatccggccattgatatcgggcaaatcgaagggggatttgtgcagggcatgggctggctgacctgcgaggagctggtatgggatgaacagggccggctgctgaccaacgggccggccagctacaagatcccggcaataggtgatgtgccggccgatctgcgggtatcgctgctggaaaaccgccgcaacccgcagcagacggtattccgctccaaagcggtgggcgagccgccgtttatgctggcgatttcggtctggtgcgcgattaaggacgcggtcgccagcctgagcgattaccggcgtcagccggatattgacgcgccggctacgccggagcgggtgctgtggggcgtacagcagatgctttcaggtgacagtgtcaccaaaagtctacgggagggtgaagatggcgcactggattga

SEQ ID NO: 443146 - DNA, 1425 bp, Serratia marcescens
atgatccagtttctgctgaacgatacgctgaaaagtgaacggctcgatcccaataccacggtattgcagtatctgcgtcgccatctgcgccgctgcggcagcaaagagggctgcgcctccggcgactgcggcgcctgcaccgtggtgctggcagaggccgacggcgagcggctgcgttaccgcagcgtcaatgcctgcctgacgtttgtcagcgcgctgcatggcaaacagctgctgaccgttgaggatctgcgccatcaggggcggctgcatgcggtgcagcaggcgatggtggactgccacggctctcagtgcggcttttgcacgccggggtttgtgatgtcgctattttgcctgcaaaagaacagcgacggctatcagcgcgagcaggctttgcaggcgctggcgggcaacctgtgccgctgtaccggctatcggccgatcgtcgcggcggcgcagcaggcgtgtacggcaaaaacgccggatcagttcgatgcccgacaggcggagacactgactcgtctgcgccagatccccgccgcagacgagtcggctggcgacggcaaacgctgcctgatgccgcaaacgctggatcagttggcgcaatggtatgtgcagcatccgcaggcgaaattactggccggcggcaccgatctggcgctggaagtgacgcaacgccaccaggatctgccgctgaccatcgccatcggccagcttgccgaactgcggcagattgagcggggcgcgcagttacgcattggtgccggcgtgacgctgagcgaactttaccgcgcgctggggcatgagcatccggcgctgggggcgctgctgcagcgttttgcatcgcagcaaatccgcaatcagggaacgctggggggcaatatcgccaatgcctccccgatcggcgacggcgcgccgctgttgctggcgctggatgcggtactgacgctgcgctgcggcgcccagcggcgtgaactgccgctggacgccttctttctcgcctaccggcagacggcgctgcagccgggggaatttatcgaaagcatccagctgccggcgtcgatcccggcggatttccgcatctggaaagtctccaaacggttggaggatgatatttccgcagtgtgcggcgcgtttaacctgcagattgaagacggcagggtgcgctctgcgcgcatcgccttcggcggcatggccgccacgccgaaacgggcggtcgcctgcgagcaggcgctgcttggcgcgcgttgggagcacgccagcgtggagcgggcggcacaggcgctgacgcaggatttcaccccgctcagcgactttcgcgccagcggcgcctaccgcatgttggtggcgcaaaatttgctgcgccgctatttcatcgcgctgagcgcgccggccaccgttattgaggtaaccagccatgagtaa

SEQ ID NO: 443147 - DNA, 1332 bp, Serratia marcescens
atgagcatgtcatttacccacgccattcgtggcaattttttcgatattgccgcctgcgtggaacagccggaacaactcggcgcccaactgcggcatctgccggacggtctgctgctgctgaatcaggggcgcatcgtctggttcggcgagtggcaacagggcgcagcgctgctgccggccggcacggcggtgacggactaccgcgataaactggtggtgccgggctttgtcgactgccacattcactatccgcaaactgaaatgatcggcgcctatggcgatcaactgctgggctggctgcagcgctacacctttccggtcgaagggcgctttggcgacgcggagcatgctgagaatatctccgcgtttttcctgcagcagctgttgagcaacggcaccaccaccgcgctggtgttcgccaccgtgcatccgcagtcggtcgacgcgctgttcacacaggcggcggcgctcaatatgcggctgattgccggcaaagtgatgatggaccgccacgcgccggaggcgctgctggagacgccggcgcaaagttatcagcaaacgcgggcgctgatccgccgctggcacggtaaacagcggctgggctatgccctgacgccgcgctttgcgcccaccagctccccgcagctgctggcgcaggtgcagcgcctgcggcaagagtttcccgacgtctggctgcatacccacctgagcgaaaatcgcgatgaagtggcctgggtgaaagaactgtttccgcagcagcgcaactatctggacgtttaccatcaatacgggctgaccggtgagaaaagcgtcttcgcccactgtctgcatctggaagacgccgaatggcagtgcttgtgtgatacccgctcatcgatcgccttttgcccgacctccaacctgtttctcggcagcgggctgtttaagctgcagcaggcctggcggcggaaggtccggctgggcatcggcagcgacgtcggggccggcaccacctttaatatgctgcagacgctgggggaagcctacaaagtggcgcagttacaggattacaaactggcggccggcgaagccttctatcacgccacgctgggcggcgcgcgcgcgttggcgctggacagccatatcggcaactttgacatcggtaaagaggcggattttgtggtgctcgatccggcggtctcgccgctgcaacagctgcgctacgccaacagccgcacgctggatgaagtgctgtttatgttgatgacgctcggcgatgaccgcaacgtgtatcgcacctatgtggacggcaaagtagtgtttcaggcgccgcagcggcaggaggcggcatga

SEQ ID NO: 443148 - DNA, 1434 bp, Serratia marcescens
atgagcgttttttcacgcgtcggcgcgctgccgctgctggtggcaggcgcattttttatggagaacctcgacggtacggtgattgtcaccgcgctgccgcagatggcggccgcgttcggcgtgcagccggtggatatgaatatcggcgttgttgcctacatcctgacgctgacggtatttatccccgccagcggctggatcgccaaccgctttggcgcacgccgcgtgttctcggcggcgattgtcatcttcacgctggcctcggtgctgtgcgcgctgagcgcggatctggtcacctttaccgccgcccgtattctgcagggcttcggcggtgcgctgatggtgccggtgggtcggctggcggtgctgcgcaacaccgataaaagcggtttgattaaagccatcgccaccattacctggcccgggctggtggcgccgatcctcgggccgccggtcggcggcttcatcaccacctatgcctcatggcactggatttttattctcaacctgccgctggggctgctggcgctgccgctggcctggcggctgatcccggatgaggcgcagcaggagcgcgcaccgtttgacggcatcggctttgtgctgaccggcgttgcctgcttcggcctgatgttcggtctggatctgatcaaccatccgcagctctcctggctggtgccgctgttgtgcatcgccgccagcctggcggtcggcgcgctggcggtgcgccacgccaaacggcatgccgctccgctgatcaacctgtgggcgatgcgggtcaaaagttacgcggtcactatctggggcggcacgctgttccggctggccatcggcgcggtgccctttctgctgccgctgctgttccagatcggtttcggcctgagcgcctttgaagccgggctgctggtgctggcggtgtttgccggcaacctggcgatgaagccctttacctccgccattctgtaccgcttcaatttccgcaccacgctgatggtcaacggcctgctcaacgccgccgctatcttcggctgcgcgctgctgacgccggagacgccaatctggttgattatcgccctgctgttcgtcagcggcctgacgcgctccatgcagttcaccgcgctcaatacgttggcattttccgaagtgccgcaaagtaaaatgaacgacgccaatacgctgttcaacgtggcgcagcagatgggcggcgggctgggtatcgcggtgggcgcgctggttctgcggctggcggagatctggttcccgccggcgggcgatgcaatcccgctggccaacttccagctggcgtttgtggtgatcggcggtattgcgctgctgtcggtggttgacagcttcggcctgcctgccgaagccggcaatgaaatccgccggcaaacgccgcctatctcagcgccggagagcggaaaacgcggttaa

SEQ ID NO: 443149 - DNA, 525 bp, Serratia marcescens
atgattcacagtgacctttctcagtgccgcgtaaacagcgaacggctgttgctgaccccttttagcgcagccgacgccgatgaggtttaccaggcgattacaccgaccctgacccgctttatgagttttgagccggaaccctccgccgaggcgtttgccgaggtatggcagggctggctgccgctgatgcgtgaaggggaagagatcttttttgtcgtccgccgacgcgaagacaaacagtttgtcggtatgggcggcgtgcacaatctgcgctcgccgacgccggagctggggctgtgggtaaaagaggaccagcagcatcagggctacggccgcgaactgctgcaggcgattgccggctgggccggcgaacgctatcggccgcactactttatctatccggttgcggagcagaaccttcccagccgccggctggccgagtcgctggacggtgaattcaacggccgtcgggataacatcaaattcgactgcctggtctaccatatcccgccgttcagcgaataa

SEQ ID NO: 443150 - DNA, 750 bp, Serratia marcescens
atgattatttttgttaccggcgccaccgccggttttggcgaggctattgcacgtaaatttgtccagcaaggccatcaggtgattgccaccggtcgtcgcatcgaccgtctggatagcctgaaggatgagctgggcgacgccctgcataccgtgcaactcgatgtgcgcaaccgcgccgccattcatcaggccatcgccgccctgccggcgcagtggcgtcaggtggacgtgctggtgaataacgccgggctggcgctgggactggagccggcgcacaaggctaacgccgatgactgggaaaccatgatcgacaccaacgccaaagggctggtcaatatgacccgtgaactgctgccggccatggtggaacgcaacgtcggccatgtgatcaatatcggctctgtcgccgccaactggccgtatgccggcggcaacgtttacggcgccaccaaggcgttcgtcaagcagttcagcctcggcctgcgcgccgacctgcagggcacccgcctgcgcgtgaccgatattgagccaggcctggtgggcggcaccgagttttccaacgtgcgctttaaaggcgacgacgacaaggtggaccgcacctatcagggcgccaacgccctgacgccgcaggatatcgccgaatcggtgtattgggtggcgacgttgccgtcgcacgtgaatatcaatacgctggaaatcatgccggtcagccagtccttcgccggactgagcgtccaccgcgacgcctga

SEQ ID NO: 443151 - DNA, 369 bp, Serratia marcescens
atgaaatcacttttctcccaacgactgctgcgcaggatgctgccggtcgcggcattggcgctgtctggcgcctggcaactgccggcgctggccgccagctgcacccagggcagtacctgcgttaccgttgacggcaacggcggcaccgccatgtccaatgaaaacgcgcgccagagcaaagagcagtggaacgacacccgtaacctgcgccacaaggtcaatacccgcgtggagaaagacttcgataagctggacagagcggcggatgatgaagatcgctgtaacgacagcctgaacgtcaacgcctattgggagccgtcaacgctgaaatgtcttgaccgcaccaccggccgtcggattaatccttaa

SEQ ID NO: 443152 - DNA, 300 bp, Serratia marcescens
atgaaaaaagcgctgatactgagtgcactgttattggccacggcgccgctggcggcctttgcctcatgcgaaagcgtgaaggcggaaatttcgcaaaaaattatcgccaacggcgtaccggaatccggcttcaaactggatatcgtgccgaacgatcaggccgaacaggccggcggccaggttgtcggccattgcgaaaacgacacacagaaaattgtctacacccgtctcgccaacggcgatgacggcagcgatgcagcggccaccggcaccagccaggatgccaacgcaccgcaataa

SEQ ID NO: 443153 - DNA, 1488 bp, Serratia marcescens
atgactaatgacctttttgccaccagggtggcgcaccggccgctgattctgatcgcctgtatgctggcgatgtttatgtcggccattgaagccaccattgtggcgaccgccatgccgaccatcatcgccgatttgggcggcttttcgctgcttggctgggtgtttgcggtctatttgctcacccaggcgattaccattccgatttatggccggctggcggatctctatggtcgcaagcgggtctttttcttcggcgctgcgctgtttctgctggggtctatcctgtgcggcttttcgccgaatatgtactggctgattggtttccgtctgctgcaagggctgggcgccggggcggtgatgccgatcgccaccaccattatcggtgacgtctacggaccggacgaacggccgaaagtgatgggctatctgtccagcgtgtgggggttttccgccattatcggcccgctgctgggggcgtttatcgtcgaacatctgccgtgggcgctggtgttctgggtcaatctgccgatcggcctgctggcgatggcgctgctggggcgctacctgccgtccggcgagcgggtgcgcaaccacgcgctggactgggcgggcaccgcctggatgacgctgttcgtcgccagtctgctgctggcgctgctgcaggcggatacgctggggatagggatcgtgccgatgctgctgctggcggcgctgtcgctgtggctgctgattcgtcaggagcgccgcgcgccggagccgctgttcccgctggcgctgtggcgcagccgggtgatcgtcgccggcaacgtcggcggcctggcgatcggcgcggcgatgatgggcatcagcgcatttctgcccacctttattcagggcgcgatgggcggtacgccgctgcaggccggcaccacgctggccctgatgtcgataggctggccgctggccagcaccttcagcggccggttgatgctgctgacctcttaccgcaccacggcgctgctgggggccgggctgctggtcgccggcggggcgattttactgctgttacagccggacggcggtctgctgtgggggcgggtggcggcctttatggtcggcgccggcatggggctgtgcaacaccacttttctggtgtcggtgcaaaacgccgcgcatcacagcatccgcggcatcgccaccgcctgtacggtgtttacccgcatgatgggctcggcgatcggcaccgcgattctcggcgcgacgctgaatatcaacctgcagctgcgtttgccgcagaccgccgatccggtacagcagctgatggatccggcgcggcgtgcggcgctggatgcggaaacgctgggggcgttgagccatcaggttgcgctgtcattgcactgggtatttctggtttcggcgctggtgtcgctgtgcgcgttgggcgccgcgctgctggtgccggcgcatcagcggccgcagagcgaagagggcgaggcggagcgggtctga

SEQ ID NO: 443154 - DNA, 717 bp, Serratia marcescens
atgactacctcagcgcaccaacggcgctttgttctcggcggcctgctgctgctggccgtgatcgctctgctgatctacggcatcggctgggagacgataaaagcgcggcaggtcgacctgatttatctcggcgagcagcatatgttcctggtgttctgctccatgctgctggcgctgctggtcggcattcccagcggtatcctgctcagccgccccttcgcccgtcgctgggccgaatacgtcatgcaaatcttcaacgtcggcaacactctgccgccgctggcggtgctggcactggcgatggtgatcgtcggtatcggtgacaagccggcggtggtggcgctgtttctggcgtcgctgctgcccatcgtacgcaacacctattccgggctgatttccgtaccggcgccgctgctggaagcggccaacggcatcggcatgaccgccgcccagcgcctgcgccaggtcgaactgcccaacgcgctgccggtgattatggccggcgtgcgcattgcgatggcgattaacgtcggcaccgcgccgctggccttcctgatcggcgccagcagctacggcgaactgatcttcccgggcatctatctcaacgatttcccgaccctgattctgggcgccgccgccaccgcgctgattgcgctgctgctcgatctggcgctggccggactgggccgctggctcagcccgcacaccgcatcctga

SEQ ID NO: 443155 - DNA, 909 bp, Serratia marcescens
atgaccccttggctgaaacaaggtaaagcggcgctgctcagcgcgctgctgctgtttaccagcgtcagttgggccgctccgctgacgctggccagcaagaattttaccgaacagcgtattttgtcggaaatcacggtgcagtatctgcgcacgcagggattccaggtggagccgaaaaccaacctggccacggtgatcacccgcaatgcgatgatcaataagcagatcgatatgacctgggaatacaccggcacctcgctgattatctttaaccatattaagcagcgcatgacgccgcagcaaacctacgacacggtgaaaaaactcgacgccaaactcggcctggtgtggctgcagccggcggatatgaacaacacctacgccttcgccatgcagcgcaaacgcgccgaaaaggaaaatatccgcaccatgtcgcaactggtggccaaaatcgagcaggtgcgccgggacgaccccgataataactggctgctcggactggacctggagtttgccgggcgttccgacggcctgaagccgctgcagaagctgtacaacatgccgctcgatcgcccgcagattcgtcagatggatccggggctggtgtataacgccatccgcgacggctttgtcgacgccggcctgatctacaccaccgacggccgggtgcagggcttcgacctgcaggtgctggacgatgataaaggctacttccccagctatgcggtcacgccggtggtgcgcgccgacgtgctgaaaaacacgccggggctggaaaaggcgctcaataccctgtcgaagcagctgaccaacccggtgatcacccgcctgaacgccaaagtcgatatcgattatcagacgccgcagcaggtcgcccgcgacttcctgaagcaacagggcctgatttaa

SEQ ID NO: 443156 - DNA, 1371 bp, Serratia marcescens
atgaaaaaaattattttggggtgtgcgatcctggcgatcgcggggtatctgggcatcgtcggttatatctatcattacgatcagcagcgccagcccgcgactgccgataatgacatcaacgctattttcaccaagcatggctgtgattactgccatacccaatccgccgaactgcccttctacgccagcctgccggtggccaagcagctgatgcagtacgatatcaaaaccggttcgcaacatttcgacctgaacccgaccctgaaggcactgagccaggacggcgcggtgccggaagtggatctggcgaaaatggaagcggtgctgcaaagcggtgaaatgccaccgatgcgctataaagcggtgcactggtccggcgaactgggtgacgccgaccggcagaccctgctgaactggatccgcacccagcgtgaacgcttctatacccgtccgggtacgccggaagcgctgcgcggtcaagcgctgcagccgctgcctgactcgctgccgaccgacgcacaaaaagtggcgctgggcttccgcctgttccacgatccgcgtctgtccgccgataacagcatctcctgcgcccattgccaccaactgggcgccggcggcgtggacggccgcgtcacttcactgggggtcaacgaccagcacgggccgatcaacgcgccgacggtgtttaacgccgcgctgaacttttcacagttctgggacggccgcgccgcggatctgcagcagcaggccggcggaccgccgctcaacccggttgaaatggcctccacctcctgggatcagattatcggcaagctggaccaggacgcgcgactgaaggcggatttccaacgcgtttacgccgacggtttctccggcgataacattaccgacgccatcgccgagtttgaaaaaaccctgctgacgccggacagcccgttcgaccgctatctgaaaggtgacgaaagcgcgctgaccgcccagcaaaagcgcggctatcagctgttccgcgacaacaaatgcggcacctgccataccggtgaaaacctcggcggccagtcgtatgaagtgatggggctgaaagccgactacttcgccgaccgcggcaatctgaccgaggccgacaacgggcgttacaatgtcaccaaaaatgaagccgaccgtcaccgcttcaagacgccgaccctgcgcaacgtcgcgctgaccgccccgtatttccacgacggcagcgtcaccagcctgcaccaggcggtgaaggatatgctgaagtatcaggtcggcgtcacgctgcctgacagcgacgtcgacgacctggtcgcgctgctggatggcatgaccggcaaataccaaccctcctccccgccggcgaactaa

SEQ ID NO: 443157 - DNA, 1281 bp, Serratia marcescens
atgaaaagacggattcatctgcgccactatcgcgccctgctgcgccgcctgttcattgcggtcttcctcggtattgccgccgcgctggtggtctggctgtttcaccgcgccatgctggggctggagtggctgctgctcgaccatgaagacggcagcctggtggccgccgctgcctcgctgcccgcctggcgacgcgtgctgacgccggcgctgggcggactggcggccggctttctgctgtggatctatcagcgctatcagcatcagcagcccaacgcgccgaccgactatatggaagcgattgaaaccggcgacggccggctggacgtcaaggccagtctggtgaagtgtctggcgtcgttgctggtggtctccagcggcagcgccattggccgcgaaggcgcgatgatcctgctggcggcgctgattgcctcggtgtttgcccagcgttttacccgtgaaagcgaatggaaactgtgggtggcctgcggcgccgccgccgggatggcctgcgcctatcacgccccgctggcgggcagcctgtttattgcggaaattctgtttggcacgctgatgctggcgtcgctggggccggtggtgatcgccgccgtcagcgccctgctggtgaccaatctgctgagcggcggccaggcgccgctgtataacgttgagccgctgccggctccgttgccgctgcaatatctgctgatggcgctgctcggcgtgctggccggcatctgcgggccgctgtttctgtcggcgatgtccgccaccggacacgctttccgctcattacgcctgccgccgccattgcagctggcgctgggcgggctgatcgtcgggctgctgtcgctgctgtttcctgaggtgtgggggaacggttatagcgtggtgcaggcgctgcttagcgcaccgccgggcgtgctgttggtcggcgcgattctgatctgcaaattactggcggtgctggccagcagcggttccggcgcgcccggcggcgtatttacgccaacgctgttcgtcggtgcggcgctcggttcgctggtcggccagctgtgcgccctgtggccggagctgggcagcgcaatcccgctgctgatggcgctgaccggcatggcaaccctgctggcggccaccacccacgcgccgattatggcggcgctgatggtgttcgagatgaccggcgaatacaccctgctgcccggcatcctgctctcctgcgtgatcgccactaccatctcccgcgggctacgcccggtgtcggtctaccacaacgcttag

SEQ ID NO: 443158 - DNA, 633 bp, Serratia marcescens
gtgggtaaaacggtgatttcccgcgctttactgcaggctttcgccgcacaggggcgtagcgccgtaggctataagcctattgcggcgggctgtcaggaaaccagcgaaggtattcgcaataaagacgctttggtgctgcaggcctcttcctgcgtgccgctgagctatgaggagatcaatccgatcacctgtctggatgaagtttttcatgcccacgccagcgatggcgtcaactacgagctgatgagccgcggcctgaaacagatagcggaaaaggccgaggtggtggtggttgagggcagcggcggttggcaggtgctgatgagcgatctgcgcccgtatgccgattgggtggcgcaggaacagctgccggtggtgttggtggtggggattaaagaaggctgcgtcagccatgcgctgttgaccgcgcaggcgatcgcccatgccggcctgccgctgctgggctgggttgccaaccgtatcaacccggggctggcgcactatgcggaaaccatcgatgccctacagcagcggattgcggcaccgctgctgggggaaattccttacctgccacgcgcggagcagcgcgaactggcccattatctggacatcagcgcgctgctggcttgctaa

SEQ ID NO: 443159 - DNA, 1218 bp, Serratia marcescens
gtgattgcggacgctcagcctgggcatattgatcagatcaaacaaacaaatgcaggggcggtgtaccgactgatcgatcagcacgggccgatttcgcgaattgaactgtcaaagcgcgcccagctggcgccggccagcatcaccaaaatcgtgcgcgaactgctggaagcccatctggtcagagagaccgaatatcaggaagtgggcagccgcggccgcccggccgtcgggctggtgctggataccgaggcctggcactacctgtccgcccgcatcagccgcggcagcatcacgctggcgctgcgtgatctcagcagcaaaatggtggtggaagagcaactgccgctggcggcggagcatgacgagccgctgctgacgcgtattctgacggaagtcgatcaattcttcagtcgccatcagcgtctcctggagcgcctgacggcgatcgccatcaccctgccggggatgatcgatgccgccaatggtattgtgcaccgtatgccgttttatacggtggaagatatgccgctggggccggcgctgtcggcccgcaccggtttgccggtgttcctgcagcatgacatcggcgcctggaccatggccgaggcgctgtacggcgcctcacgcggctgtcagaacgtgattcaggtggtgattgaccataacgtcggcgcgggagtgattaccggcgggcgggtgctgcacaccggcagccagcgggtggtggagattggccatacccaggtcgattcgtacggcaagcgctgttattgcggcaaccacggctgcctggaaacggtggccagcattgagaatatgctggagatagcccagcagcggttgcaggtatccgctggttctacgctgcgcgatcagccgctgacggtggaatccttgtgcgatgcggcgctgaccggcgatcgactggctaaagatattattttaagcgtcgggcacagcgtcggacgcattttggcgataatggtcaatctgtttaatccggaaaagatcctgatcggctcgccgcttaaccgtgcggcggagattctgcatcccgcgatcatgtcctgtattctccagcagtccttaccaatttatagccaggcgctgcaggttgagtccacgcaatttttcaatcagggcaccatgcccggcgcagcgttggtgaaagaggcgctgtacaacggttcgctgttggtgaaactgttgcagggctag

SEQ ID NO: 443160 - DNA, 909 bp, Serratia marcescens
atgaatatcgaactgcgccacctgcgttactttatcgccgttgcggaagagctgcactttggccgcgccgcccagcgcctacggatttcgcagccgccgctcagccagcagatacaggcgttggaagagatggtcggcgcgcgtctgctggcgcgcaacaaccgcaacgtcagcctgacgcaggccggcgaaatgttcctgaaagaggcctggcaggtgatcgaccaggtgaatcgtgcggcggaaaaggcggcacgtctggagcgcggcgaatcgggagaactgaccatcggtttcacctcgtcggcgccgtttatcggcgcggtgtcgcgtaatctgcgcgcattccggcagcagcatcccgacgtgcatattaaaatgcgtgaaatcaataccaagcaacagttggaaccgttattgaacggcgagctggatctgggcgtgatgcgcaataccaagctgccggatgccttgcggcacacgctgctgctgcgcgaaccgatgctggccgtggtgccggaagggcacccgctggcgcagctggcgccggatgctctgcgttttagccatctggcgcaggagccgtttgtgtttttctcgcgtgaggtcggcaccgcgctgtacgatgaaacgctgctgctgttggagaacgccggcatcacgccgtatatcacgcaggaagtgggcgaggcgatgaccattatcggcctggtgtccgccgggttggggatttccatcctgccggcttcgttcggccgggtgaagcttgacggcgtaaaatacctgccgctggccgaaccgcaggcgcaaaccgaagtctggctggtgcaccatcgccagcggccgttaaccgctgccgcccgtgcgctgatgcaaatgatgctgacgcgcgccgaagcgccggtttaa

SEQ ID NO: 443161 - DNA, 1299 bp, Serratia marcescens
gtgaattccccaatgcgttctgcggccaagacgccgtcgacgcgggccgccaatgatgaaacggcggccgctgcgccaaaaacccaacgctcttcgttgaacaaactcccctatattgaacgcggtacgccgcagtttatgcgcgtgacgctggcgctgttttccgccggtctggccaccttcgcactgctgtactgcgtacagccgatcctgccggtgctgtcgcaggacttcggcatctctccggccgaaagcagcctgtcgctctccttctccaccggactgctggcaatcggcctgatgtttaccggcccgctgtccgacgccatcggccgtaaatcggtgatggtggtggcgttgctgctggcggcggtgtgtacgctgatctgcgcggtgatgaccagctggcacggcattttgctgatgcgcgcgctgatcgggctgtccttgagcgggctggcggcggtgggcatgacctacctgagcgaagagattcaccccagctttgtggcgttctccatggggctgtatatcagcggtaactccatcggcggcatgagcggccgtctggtgaccggcgtactgaccgatttcttctcctggcgcgtgtcgctggcggtaatcggcctgttcgcgctgatcgcagcttttgtgttctggcgcattctgccggcctctaaacattttcgcgccagttcgctgcgcccgcgcacgctgatgatcaacttcaagctgcactggcacgataaagggctgccgctgctgtttgccgaaggttttctgctgatgggcagctttgtcaccctgttcaactacatcggctatcggctgctggcaaacccttaccacctgagccaggcgattgtcggcctgctgtcggtggtgtatctcaccggttcttacagttcgccgaaagccggcgcgatgacggcgcgttttggccgcggcccggtgctgctgggatcgatcctgattatgctgagcggcattcttctcaccgcgctggcgccggtggcggtgatctttgtcggcatgatgctgtttaccgccggcttcttcgccgcccactcggtggccagcagttggattggccgccgcgcgcgccgcgccaaaggccaggcctcctcgctgtatctgttcagctattacgccggatccagcgtcgccggcacgctcggcggcgtgttctggcacagcttcggctggagcggcgtggtggcctttatcggcgtgatgctgctgctgtcgctgttcgtggtgcactacctgcgcaaactgcctgaagcagcacgcgtgtag

SEQ ID NO: 443162 - DNA, 939 bp, Serratia marcescens
atgagcaactacgacctgattgcccggatgaaccagtgctttaatcaattggaggcggcgctggcggaactccaccagcagatcgtgccgctgcggctgctggccgcgcgggtgttcagcctgccggagattgagaaaggtaaagaacaccaggccatcgaacagatcgccgttgagcagcacctcggccaggcggcgcgcgacctggcgcttgagcactaccagcggctgtttatccatcacaataagcagcacgtcagcagcaaggcggcggttcgcctgccgggcgtgctctgtctggcggtggagccgctgcagtacgcctccctgcagcaacaagtctcacagatcaaccgtctgaaggcagaactggaacatatcatcaccgtcgaatccgggctggcgccggaacagcgcttcgactttgtccatacccatcttcacgggctgatcaccctcagcgcctaccgcaccattaccctcctcaccaacccggactcggtgcgtttcggctgggccaataagcatattatcaagaaggtaaagcgcgacgacgtgctgcagcagttggaaaaaagcctgaaggccggacgcgcggtgccgccgtataaccgccagcagtgggcggagctggtcagccgggaaattgacgacgtcagccgcctgccgcagcaggcgacgctgaagatcaagcgcccggtcaaggtgcagcctatcgcccgggtgtggtatcagcagcaacaaaagcaggtgcagcacccctgcccgctgccgctgctggcgctgtgtcagttggagcgcggcgcggcggtgccaaagattggcgagctgctcaactacgacgccaacgcggtaaaacataagcataagccgcaggccaaaccgctgcggttggtggtaaagcgtctgcacctgtataccgatgcgcctacgcgctga

SEQ ID NO: 443163 - DNA, 378 bp, Serratia marcescens
atggacactgaaacgatttattttatttccagcccctcaccgacgctcggccgctccccactccacggcatgggcggagggctttttggtcactataaagaagaggaataccttgcctgtttacgacaaggattaaaagaaaagcacaccacatggaccgtagccagtgataataccgaatccgatatagagaagattatcgcacagcgggtcaaactcctggtttgcgcccccgggctgcgctttcagttctatagccaaggatttgagccaaaaaacatcatccatctcagcacgatggattacgttaataataatattcagccggtaattaaccgtataacggcactatgccatgaggaaagtttgaaccgataa

SEQ ID NO: 443164 - DNA, 1398 bp, Serratia marcescens
atggcagtcatgcgtagcgaaaaagattcgatgggggcgattgacgttccggccgatcgtctgtggggcgctcagacgcagcgctctctggaacactttcatatatctacggaaaagatgccgaccgcgctgattcacgcgctggcgctgaccaagcgcgccgccgccgaagttaaccggcagcttggcctgttgccggacgagcgcgccggggcgattatccaggcggcggacgaagtgctggcggggcagcatccggatgagttcccgctctctatctggcaaaccggctccggtacccagaccaatatgaatatgaatgaggtgctggctaatcgcgccagcgagctgctgggcggcgaacggggagaggggcgccgggtgcatcccaatgacgacgtcaataaaagccagagctctaacgatgtatttcctaccgcgatgcacgtcgccgccgtgattgcgctgcgtcagcagctgatcccggcgctgcagacgctgcagcgtacgctgagcgctaaggccgaggcgtttcacgacatcgttaaaatcggccgcacccacctgcaggacgccacgccgctgacgctggggcaggaaatttccggctgggcggcgatgctggcgcacagcctgcggcatatcgatgccagcgtgccgcatatcgccgaactggcgttgggcggcaccgccgtcggcaccgggcttaacacccatccggaatatgcggtgcgggttgccaaggcgctggcggagctgaccggcgaaccgttcgtcaccgcgccgaacaagtttgaggcgctggccacctgcgacgccctggtgcaggggcacggcgcgctgaaggggctggcggcctcgctgatgaaaatcgccaatgacgtccgctggctggcttccggtccgcgctgcggcatcggcgaaatcgccatcccggagaacgagccgggcagctcgattatgccggggaaggtcaaccccacccagtgtgaggcgatgaccatgctgtgcgcgcaggtgctgggcaatgacgtcgcgctgaatatcggcggcgcatcgggtaactttgagctgaacgtcttccgcccgatggtgatccataactatctgcagtcgatccgcctgctggccgacgggatgaacggtttcaacacctactgcgcctccggcatcgaaccgaaccgcgaacgcatcggccagttgctgaatgaatcgctgatgctggtgacggcgctgaatacccacattggttatgacaaggcggcagaaatcgccaaaacggcccataaggaagggctgacgctgcaggccgcggcgctgaagctggggtatgtgacggagcagcagttcggccagtgggtgcggccggaaaatatggtcggcagtatgaagccgtag

SEQ ID NO: 443165 - DNA, 1179 bp, Serratia marcescens
atgcaaaaaatgaccaatacggtgcaaaactacgcctggggcagccacgacgcgctcaccaaactgtacggcattgccaacccgcagggaaaaccgatggcggaactgtggatgggcgcacaccccaaaagcagttctcaggtgacggacgccacgggcgcgcagcgcgcattacgtgatgttattaatgaaaaccaaccgcagcagttggggcgccaggtcgccgagcgctttggcgagctgccgttcctgtttaaagtgctgtgtgccgatcagccactgtcgatccaggtgcaccccagcaaatccgccgcagaaatcggttttgccaaagagaacgccgccggtattcctctggacgccgccgagcgcaactacaaggatccgaaccataagccggagctggtattcgccctgacgccgtttttggcgatgaacggtttccgccagttggacgatattgccgccctgctgcagcccatcgccagcgcccatcatgatatcgccgctttcctgcaacagccggacacggaacgcctggcgaagctgttcgccggcctgctcagtatgcagggcgaacaaaaagcccgggcgctgggcgtgctgaaagcggcgctcaacaatcagcagggcgaaccctggaacaccatccgctttatcgccggtttttacccggatgataacggcctgttctcgccgctgctgctgaacgtcgtgcagttggcgccgggcgaagcgatgtttctgtacgcagaaacgccgcacgcctatctgcaaggcgtggcgctggaggtgatggccaactcggacaatgtgctgcgcgccggcctgacgcctaaatttattgatatcccggagctgctggccaacctgcagttccgcccgcagtccgccgacgcgctgctgacccggccggagccgcgcggcgacgagctgttcttcccgattccggtggacgatttcgccttttcgctgcatacgctgtccgccgcgccccagccgttggcgcaacagagcgcggccatcgtattctgcgtggatggcgaagccatattggaacgacaggatcagcagctgcggctgcagccgggcgaatcctgctttatccccgcctgcgagtcgccggtgagcgtcagcggcagcggccgcatcgcgcgggtttatactcttttgtcgtaa

SEQ ID NO: 443166 - DNA, 1548 bp, Serratia marcescens
atgaaaaagtcagtcgtcgccgtcggcgttattgcgattcttggcgcagcatggaccggggcttcatggtacaccggcaaactcattgagcagcggatgggcgaagtggtgagcagcaccaacagccagctggaaagctacctgccgcaggccggcatcaaactgagctatgaggattaccagcgcggcctgttcagcagccacctgcgctttgtcatccgtccggacggcaccgccagcggcgagcaggcggcgctgcagccgggtgaggaagtggtgctgcaggaggtgatcgaccacggccccttcccgttcgcccagctcaagcgctttaacctgatccccagcatggcatcggtacgcaccgaactggccaataccccggcggtgaaaacgctgttcgatatcgcgaaaggcaaagcgccgtttaccgccgattcacgcattgcctataacggcgatacctccacggcgctcaaagtgctgccgctggattaccagaaggacggcaacacgctgacattcgccggcgcggatctgaccattgacgtcgcccgcgatctgaaagcggtgcaggtggacggcagcagcgacagcgccacgctgtccggccgtaccgaatttggccagaccgagcagatcaccctgcagggcattacgctgaaaaccgacacccgcaccggccagttcgatctgagcctcggcgatcaggcgctgaacatcaagcagctgaaagtcgcggtcgataacaaagaggcgctgacgctggacggcttcaatctggcgagcaaatttggcgagcaggacggcaacctgaacggccagatcgattacaccatggatgcgctgaagctgcagggcgccgacttcggctccggcaagctgacgctgaaaatcgacaagctggacggcaaatcgctgaaagagttcgccgaccgctacaatcagcagatgaccgccctgctgcagcaaagccagtcgctgccgcctgaagcctatcaggagcaggccagcgccatcgtgatgcagaacctgccgctgctgctgaaaggcaacccgaccattaacgttgcgccgctgagctggaagaacggtaaaggcgaaggcaccttcacgctgaacctggatctggtcgatccgacccagggcgtttccccgcaggcgccggacgatctgctgctggcgcgcgcggtgaagaagctcgacgccagcctgaatcttcctgtgccgatggcgacggaagccaccgcgcaaaccgccaaactgcagggctacaacgccgaagaggcgcagaagctggcgcaacagcaggtgcagggtctggcggccatggggcagatgtttaagctgaccacgctgaaggacgatgtgatcggctcccgtttccactatgccgataatcaggtggagctgaacggcaacaagatgtcgctgcaggaattcctcggcatgttcggcatgctggccggcccggaacagggcgtaccgccggcgccaatgccagtcccggctccggctccggctccggctccggctccggcacaataa

SEQ ID NO: 443167 - DNA, 1200 bp, Serratia marcescens
atgggttacgctgcggaaaatgtctcgaacaaaagcaacgccgcggccaccgcgcctgcagtaaaaagcaaatcggcgtttccgcatctgcattggcaaagtgctgacaataaaaacaatctggatattggcggcgcgctgcgcgctaattatcgctacgaagattggggtagcagcaattatcgcaatccgccacatttacgttttgatgcctttcgtatcgacgccagcggaaattatcaggatgcttttttcgatgccgggttctggttgcaggatcggcgaaaatacgccattgaccgcgcctatatcggctatcacctcaaccaacatgccgatattcaactgggtgcaccgttcaagccttttggtctgatgccctatccgcaatttggctggtcctacggtatccctttctatctgggatttggcgttaatgccgggctgggagctaaataccagtatcacagcagcgattggacctttgatgcagcctactatccccgtatgatgccggccggagtgcgctatgcgcccgacgtgggcagctacaatgatttaaagaataccaacgccggcgcgcagcggttgcagcagaacgaaaagcgcgatcaggtcaatctgcgcctggcgcgcgaatttcagcaaggcaactggcgcaatgagctgggcgcctcactggcggcctctcgcctgtacaatcaggcaaccggcgataacggcagtttctgggccgcaggtctgcacacgctggtgaatcacgatccctggcatttatccggccagattatccgctactcctattccgccaaagggccaagcggtgcggacaactcaacgatcctgatgggcggcaatggcctgacgccctcttatctgatcccggcacaggccacaacggcatcacttaacctggctcgcgatgtggcgctggactgggggccggtacaaaagctacggttttacaatgactacagcgtgctgtggaaagatgcaaacggcggttcagactcgaaaatgaacacccttggagtacaagttttcgccctgccggtgatgctgtgggtcgatctgacctgggcgcaaaacgtcaacccgtggggcggtgcagaaaatgccaccggctggaccagcacacaatctgccggcagcaacaaatggtattttcgcaccaacgtcaatatcggttattacttctga

SEQ ID NO: 443168 - DNA, 984 bp, Serratia marcescens
gtgtccgtcagtacggtttcgctggtgctgagcggcaaagggcgcatttcttcggctaccgtggcgcgggtgcatcaggctatcgaacagctgggctatgtgcgcaaccgacaggcggcgacgctgcgcggcgcggcgtccggcgtgattggtctgatcctgcgtgatatcggcgatcctttttatgcggagatgaccgccggcctgagcgaagcgctggaagcgcagggcaaggtgctgttcttgatgcagagcggacgcgacggcgccgggctgatgcgctgctttgacaccttgttgacgcacggcgtcgacggactggtgctggcggggggcgcacgcgctgtcgacggcctgcaggcgcaggcggctgaacagggcgtaccgctggtgtgcgccgcgcgctccggcggcgtggcggaagtggacgtggtgcggccggacaatatgcaggcggcgcagattgccaccgaattcctgattaaacgcggccaccggcagattgcctatctgggcgggcgcagcgactcgctgacccgtgccgagcggctgggaggcttttgcgccacgctggtgcagtacggtttaccttttcgcagcgagtggattatcgagtgtgagagccaacaacaggcggcggcgctggccgccgaacagctgctgcgtcagcaccccaacatcagcgccatggtgtgcgataaagcctcggtggcgctgggcgcctattttggcattatccgcagcgggcgcggcatcggctcggacggcatcgacagtttcctcagccagcaggtggcgctgatcggctttggcgacgcgccggatgcggcgttgagtgaaccgccgctgacgctggtttccacgtcggcgcgcgacgtcgggcgcagcgccgccgcccgtttgctgcagcggattgagtcccccgaactgccgccgcaggacgtgattctggcgccgaaactgattgagcgggcgtcggcatag

SEQ ID NO: 443169 - DNA, 1623 bp, Serratia marcescens
atgccagcaagtcaaaaacccaaagttaccctctgggagtttttccagagcctgggcaaaacctttatgctacccgttgcgctgctctcgttctgcggcattatgctcggtatcggcagttcgctcagcagccgcgatgtcatcagcctgctgccgttcctcggccaccctgcctgccagctgctgtttacctggatgagcaaggtggggtctttcgccttcagcttcctgccggtgatgttcgccatcgccatcccgctcggcatggcgcgggacaataaaggcgtcgccgccttttccggcttcgtcggcttcgcggtgctcaatctggcgaccaatttctatctgaccgccagcggcgtactgcccagcagcgatccgctggtgctcaaggcgcataatatccagaacgtgctcggcattcagtcgatcgataccggcatcctcggcgcggtgctggtcggcattatcgtctatctgttgcatgagcgttttaataccatccgcctgccggatgcgctggcgttcttcggcggcacgcgttttgtcccgattatcaccaccctgacgcttggcgtgtgcgggctggtagtgccgctgatctggccgtggtttgccgccggcattaacggcctgggctgggtgattaacggcgccggcgcttttggtccgatgatcttcggcagcggtgaacgcctgctgctgcccttcggcctgcaccatattctggtggctctgatccgctttaccgacgccggcggcacgctggacgtctgcggccacagcgtcagcggcgcgctgaccattttccaggcccaactctcctgcccgaccacccacggctttgcggagagcgccacccgcttcctgtcgcagggtaaaatgccggccttcctcggcgggctgccgggcgctgcgctggcgatgtatcactgcgccaagccagagaacaggcataagatcaaagggctgctgatttccggcgtggtcgcctgcgtggtgggcggcaccaccgaaccgatcgagttcctgttcctgttcgtcgcgccgttcctgtatctgatccacgcgatcctcaccggcctcggttttaccgtgatggcgctgcttggcgtcaccatcggtaataccgatggcaacatcatcgattttgtggtgttcggcattctgcacggcaccgccaccaaatggtatctggtgccgctggtggcggccatctggttcgccgcctactacgccattttccgtttcgccattttgcgctttaacattaagacgccgggccgcgacagtgacaacgccggcagcgcggcgcacgccccgtcaggtacggtgggccagtcgggctataatgttccggcgatcctcaccgcgctgggcggcgccagcaatatcgtttcgctggataactgcattacccgcctgcggctgtcggtggcggatatcagtaaggtcgacgatgcggcgctgaaggagaaccgcgccatcggcgtggtgcgcctgaacgcgcacagcctgcaggtggtgatcggcccgcaggtacagtcggtcaaagatgaattagactcattgatagcggcaagccggcctgcagcagaactgtctggagcaacccatgtttga

SEQ ID NO: 443170 - DNA, 1182 bp, Serratia marcescens
atgtttgatttttccaccccgatcgaccgtcacggcacctggtgcacccagtgggactatatcgccgaccgcttcggcagcgccgatctgctgccgttcaccatttcggatatggacttcgctactgcgccctgcattctggatgcgttgcagcagcggctgcagcacggcgtgctgggctacagccgctggcagcatgaagatttcctcggcgcactgcgccactggtatcagttgcgcttccagaccgcgatcgataccgccgacgctgtgtatgggccatcggtgatttatatggtttcccaactgatccgccagtggtcagcgccgggggaatacgtggtcacccatacccccgcctacgacgcgttttacaaggcgattctcggcaaccagcgtcagctgttggcctgcccgctacagaaggccggtaaccaatggcattgcgatatggcccacctggaggcgctgctggcccggccgcaaagcaaaattctgctgctgtgcagcccgcataacccgaccggtaaagtgtggagcgccgaagagctgcagcagatggcaacgctgtgcgagcgccatcaggttcgggtcatcagcgacgagatccatatggatatgacctggggcgaacatcggcatctgccgtggagccaggtcggtgcctcgccgtgggcgctgctgacctccggctcaaaaagcttcaatatcccggcgctgaccggcgcctacggctttatcagcgatgaggcatcgcgcgacgcctatctgcaccagcttaaaggccgcgacggcctctcctccccggcggtgctggcaattgtggcgcatattgccgcctaccgccacggcgccccctggttggacgcgctgcgcgactatctgcagggcaacctgcgctacgtcgccgaacggcttaatcaggcctttccgcagctggcgtggcagccgccgcaggctacctacctggcgtggatcgacctgcgtccgttgaatattgacgaccatgcgctgcaacaggcgttgatcgagcgggaaaaggtggcgatcatgcccggttttacctacggcgaagaggggcgcggctttgttcgtctcaacgtcggctgcccgcgcagcaagctggaggatggcatggaccggctgatcgccggcctgcggtttgtggcaacgccagtctga

SEQ ID NO: 443171 - DNA, 366 bp, Serratia marcescens
atgaaagcgcaacaaattctgattgctggcccttatcgcagcggcaccaacggtgatgcggcgcgtattgccgccaatctgcatcgtctggagcaggcggcgctggcggtctatcagcgcgggcatgtgccggtgattggcgaatggctggcgctgccgctggccggcgccgccggctcacagcaggtgggggatgagatcagcgaggcctacctgtatccggttgcgcatcggctgattgcccagtgccaggggatttaccgtattgagggcgcttcgcaaggggcggataaggacgtggaagtggctgaggcgctgggactgacggtctatcgtcaactggcggatatccctgctgtgcagtaa

SEQ ID NO: 443172 - DNA, 597 bp, Serratia marcescens
atgatcccaacaaaagatcgcgtacgcatagtgtcaacgcaggtgttatccgatgactggtatgtgctgaaaaagaacacctttgattttctgcgtcgcgacggcagctggcagcggcaaagccgtgaaacctatgacagaggcgacggcgccgtgattttactgatcaaccgccaggcgcaaacggtgatcctgacgcggcagtttcgttttccggtgttcgtcaacggtcacgacggcatgctgattgaagcggcggccggcctgctggataacgcgtcgccggaacagcgtattcgtgcagaagccgaagaagaaaccggctatttcgtgcagaacgtgcggaaagtctttgaggcttatatgagccccggctcggtgaccgaaaaactgcatttctttatcggtgaatatgacgcctcggcgcgtatgcatcagggcggtggccttgaggatgagggtgaagatgtcgaggtgctggagatgacgctgaaagaggcgctgcaggccatcagacagggaacgatcgtcgatgccaaaaccatcatgttattacaatttattgccctgaatcctgactgggagaatgccctatga

SEQ ID NO: 443173 - DNA, 756 bp, Serratia marcescens
atgctgaccagccagcgcaagaagctaatcctggagaaacttgccagcgagggccaggtattggccaaacagttaagtgagatgttcgggctgtcggaagacaccatccggcgtgatttacgcgagctggacagcgaaggcttactccagcgcgtgcacggcggcgcgctgccggtatcccccgccatcgctccatttgccgaacgcaacaagcaggagtccggtgccaaacgcgccattgcccgcgccgccgccgccatgattttgccgggccaggtggcgatcgtggacggcggcaccacttctgccgagctggtgaaacagctgccgctgtctttacaggcgaccattgtcacccacagccccagcgtggcggtcgggctggtggaccacccgcagatcgaggtgatcctgattggcggccggctgtttaaacattcgatcgtcaccgtcggcgcggccgcggtagaggcgatgtcgcatattcgcgccgatctctactttatgggcgtgaccggcgttcaccctaccgccggtctcagcaccggcgatttggaggaggcctatatcaaacgcgcgctggcggcgcgcgcggcagaaaccgtggtgctggcttccgccgccaaacttaacgcggcctcacagtatgccatcggcgatattacgctggcgcagtccattattgtggagcacgccaccgacgaggccttgatatccccgctgcaacaggcgggcgtcagcgtcattaaagcctga

SEQ ID NO: 443174 - DNA, 981 bp, Serratia marcescens
atgaaaatcggtatagtgattagcggcggcgatgtcagcggtattaataattttatttttcaaatagccaatctgacgcaggccgaaatagttttatttgacggcggcattccggggttattggcaaaccggcaccgccctatgacacaacgcgatctgatcgattatgccatttccgctattccgcttcttagctccggcagaaccagccggaaactctacgcatcggaatatgaaggcatcagtaaacaactcaaggcactgcggattgacgtcattattatggccggcggcgacggctccctgcagtttttaaataccctgagcgaatttggcgtcaactgttttggcatcggcatgaccattgataatgacgtattcggcagcagctataccgtcggtttttctaccgcctgcgaacaaatactcaaagaggtcgccaaattacgtaataccggcagggcactgcccggccgcgtatttatgttggaattgcttggcggatattgcggcgaactgactctgcagtccgccattaaatccaatgccgattttgcgctcattccggagtgtcaatataacctgccggagctggccgagagaataaaacacaagctgacatcgcaaaacagcgtaattattttgtgttccgagggctacaccaaagagtattcaccgggcttccagggggcgatcgacaccatgatcaagcagctggagccgcatatcggcgtccgtattcgcaagaccatcgttgggtatggcctgcgcaacggcgaccccaccggcgaagagatttatcaaggcacgctgatggccaatgaggtcgcgcgctgcattcaatccggcatgaaaaataaagccatcgtgattaatgccggcaatcaggcaattcccattgatttaatcagtatgaaaaatcgtctggtagataccgaagggcaccattacaaactggccaaacagttaaatattatttga

SEQ ID NO: 443175 - DNA, 312 bp, Serratia marcescens
atgttaaaaatactctgcgtatgcggctgtggtttaggttcaagctttgctattgaaatgagcgccaaggcagtactcaaaaaactagagatcgacgcggatatcgaccacaccactatttcagaagccggagcctttaagtccgacattattctcactcaaaaaacgtttgcggatattctcaatgccgatgccagcgaggaagaaaagaaacgggtcattattcttaataagctgacggataaagcggagattgagcagaagatcgtcgcgtttcttaaagaacggaatatgcaagggctgccatcatga

SEQ ID NO: 443176 - DNA, 1368 bp, Serratia marcescens
atgaacagcatgataaatttcatcgtaaaggacctgctgggtcaggcatcggtgcttattgcgttgattgccatgttaggactgctgctacagaaaaagtccgcgggtaaagtggccgaaggcacctttaaaacgctgttgggttttttaatcatgatggccggcattaatattatcgtcggcaccctgacctatctgaacgatatattcactcacggtttcggcatgcacggctatattaccgacgtcgccgcaatagccggggtggctaatcgcgaactgggttctgaagtggcgctgacgctgttggtcatctttgtggtcaatatcatcatcgcccggctgacaccgttcaaatatatctttctgaccggtcaggcgctgttgtggatggccaccatcggcgcagtggtcagctataaggccgggctgagcgggctgccgctgattctgaccggcgggatctttggcggcgtgatggcggtgctgatgcccgcgctggcgcagccggtggtgcgccgtattaccgacgccgacgatgtggcgctgggacacttctgcacgctgggctatctggtgcaggcggcggtggccaaagtggtcggcagaggctcccgctccacagaagatctgcagttgccggacaactttaaattcctgcaggacacctatgtgtcgatggcggtggtgatggtcccgatgtacctgatcccggcgctggccgccggcccgcagtatatcgcccaatacgccgacggcatgaactacctgatgtactcctttatgcagtccattcagtttgtcgccggggtgttcatcctctacagcggcgtacgcctgttgctcaacgaactggtgccggctttccgcggcatagcgctgcgcatcgtgcccgacgcgaaaccggcgctcgattgcccggtgctgtttccctacgcccccaacgcggtgatcgtcggttttctcgccaccacgctcggctcggtcatcggcatgatcgtcttcccgatgtttggcctggcgatgattctgcccggcctgctgaccaacttcttcgccggcggcaccgccgggatcttcggcaatgcgctgggcggacggcgcggcgccatgatcggcggcgtcgtgcacggcctgtttatcaccctgctgccggcgctgttagtacccatgctcgaaagctacggcttcgtcgggctgaccttcagcgactccgacgtcatcagcagcgggctggtgctgggcaatgctctgcagcacaactggctgttcgccggcctgtttattgcttttgtcgcgcttctcgcgtggttcgttaacggtaaatcaaccaagcaccatgaggaaaaagtccatgaaactttataa

SEQ ID NO: 443177 - DNA, 843 bp, Serratia marcescens
atgaaactttataactttcccgcgttgttacagctggccaaagcccgcaactacaaagcgctcggctctttcaatcttcactgtctggaaatgctgcccgcctatttccgcgcggcgcagcgcgccgacagcccgctgatgattcagatatccaccggcaccgccgaatatctgggttatcagctgctggtcgacgccgtctcttctctggccgccagcgagcagataccaacctgcctgcatctggaccattgctccgacccgcgcgcgatccgtacggccatcgacgccgggttcagctcggtcatgtatgacggttcccacctgaacatcgatgagaatatcgccaatacgcgcctggtgattgagatggcccggccgcgcggcgtttcggtggaggcggaactgggggccatcggcggcgccgaggatgggaagatggtcgccgccgaagacatcagtttcaccacggtggccgatgccaagcgttttgtcgatgaaaccggcgtcgatatgctcgccgtatcggtcggcacggtgcacgggttgtataccggcaaggcgcaaatccagcatcagcgcctgatggaaattaccgccgccaccgctacgccgctggtgctgcacggcggtaccggcgtcagcgatgatgatatgcgccgggcggtaagcggcggcattgataaggttaacgtcggcacggaaatgaatgtgcaatgggtcgggcgctgcaaagaaacgtttgagaaaggcaaagtcagcgacagcgtacgtaaatttctgatcccggcgaatgaagcggtgactaatgtattaactgaaaaaatgaatttatttcgctga

SEQ ID NO: 443178 - DNA, 267 bp, Serratia marcescens
atgtttaaatttatgaagcggcataaaacggtgattgccgatgacgatcaatatcaccgggaggcggcgcaaatcgcggaaagtatcgcccgccaggaacgccagttagacagccatccgcaggacggcgaaatacagaaacaattaatgttggaatataaccgggcgctaaaaatatacgctaaaagtaaagcgtatcgcgatcgggttgatgaactctttgtgaagattgatgagttacgcaatgtcataagaaaaagtatctga

SEQ ID NO: 443179 - DNA, 438 bp, Serratia marcescens
atgtcgataaaacaattgttgatcgaagccaacgccatccagctcggcgttaaggagcaggactggcaacgggtgattaccctggcggcgcagccgctggtgacacaaggttatattgaagcatcctactgccaggcggttatcaacaatacgctggcgcatggcgcatattacgtttttgatgaaggcatcgccattcctcacgcacggcccgagtgcggcgtgattaagaactgctttagtctggtggtgcttgaccagtccatcgcttttcagggcagtgaaaaagccgatatcgtgatcctgttcggcgccaccagcagtgatgaccacattgaagccggcctgcgtgcgattgttgaatggctggacaacccgcagacgatggcaaaactgcgggccgcaacccaacggcagcaagttgtggagatcttatga

SEQ ID NO: 443180 - DNA, 615 bp, Serratia marcescens
atgagtgcagcattctctaccaacggcaataaatgcgtcattttggtcaacggcgttcccgcctcggggaaaagcaccgtggctcgccacattgccgaacgctttggtttcccctatctgaccattgacggcatcaaagagccttttatggagctgttcgccccggtcgatcgccagctgaaccgtgacatcggccgggcggcgtatcagacgatctggtcgattgtcgcgcatgcgccggcgaactgcgtctatgtgattgatgcctggttcggtttccagcccagaagtgaattgcagcgctatctgcagcaggccgggatcgcgcacgtcgtggaaatctggaaccagatatcaggcgatctggcggctgaacgctatgccagccgcttgcaccagcgtgccgacggccaccccggcgcggagtatgtaccggaattgcgccagttggccgagcgcgcgacgccgatggcgctggggccggtgctgacgctcgatcagtcccagccactctgcctgccgcatattgaacgctggctgcagacgcaccgcctgcagcccgtccacgcgcactcagaacggcggtccgttgcggcgcttggggtgcgcgactga

SEQ ID NO: 443181 - DNA, 705 bp, Serratia marcescens
atgatgaagaacacgcagagcggcagtattttaatcgtcggcgcatcacgcggcctgggccacgccattgcgcaggagtttctccggcatggctggcaggttaccggcacggtgcgcggcgacaatacgccgctgcatcagctggcgcagaattatggcagccgtctgcagctggaacagttggatatttgcgaagaggcgcagcttgacgccttacagcagcgcctggcgagccgccgcttcgatatgctgtttgttaatgcgggcatcaccaaccgcgatcctactcagacgattggcgaggtgagcgcgcaggaatttatgcaggtgatgctgactaatgcgctggcgccgatgcgcgtcatcgagcgtttggcagaacgggtggcggacgacggcctgattggcgtgatgtcctccggccagggcagcgtggccaacaaccatacggggcagcgcgaactgtatcgcggcagcaaggcggcgctgaatatgtttatgcgcagctttgccgcccgccagcacggcggcgcccgcgcgctggtcgccatggcgccgggatggatcaatacggaattgggcggtgcagacgcgcctttgacgattgagcagacgattccgcagctggtcagggtgttgctggccaaacgggagcggccggagctggaatatctggactatctcggccggacggtgccgtggtga

SEQ ID NO: 443182 - DNA, 966 bp, Serratia marcescens
atgagtaaccccgactttaatttactggccgccctcgatgcgctgctggcagaaggcagcgtggccggtgcggcccgccgcctggggctcagcgcctcggcgatgagcagaaccctcagccgcctgcgccaggtgaccggcgacctgttgctggtcagggccggacgcagcatggtgttgaccccgcatgccgaacagatccgcgaccgtacccggcagacgctgaccgaggcgcgctccctgctgctgcctgcggcctcggggctggatctgcggacgctgcggcaaacgttccgtctgcggactaacgaaggctttgtcgagacgtttggcgccgcgctggtgacggcggcggcgcaggcggcgccggaggtatgtctgcgctttgtgccgaagccggagaaaaccccgcgctcgctgcgagaggacgacattgatatagaggtcggggtattacacggcatggggccggaaatccacctccagacgctgttcagggatcggtttatcgcggccgtcaggctggggcattcgctggtcacgccaatgcccgtcacgcccgagcgttacgccgcctgccggcacgtcatcacctcacggcagggcaaactcgcggggccggtggataaggcgctggccgcacacgggctgacgcgccgcatcgccgccgtcacgccggatttttccgccgcgctggccatcgccgcgcagtcggatctggtggcgctggtgccggcatcgttttttatgcagaaaacgctgggcggcggcacccggcagacgctgcaggctttcagtctgcccgtcgccacgccggaaatcaccgtttcccagatgtggcatccgcgcagaaaagccgatcccgcccatcagtggctccggcagctgctgctgacggtttgccgccgacaggcggacgagttacaccgctgcgctcagcgcgaatggccgacctggttccgttaa

SEQ ID NO: 443183 - DNA, 1041 bp, Serratia marcescens
atggctgaaactcttcgcgttgggctggtgggctacggctacgccagcaagacctttcatgcgccgctgattgccggcacgccgggcctggaactggcggcggtggtcagcagcgacgccggcaaggtgcacgccgactggccggcgctgccggtagtcagcgaacctcaggcgctgttcaacgacccctcactggatctgatcgtcattcccaccccgaacgatacccactatccgctggcgcagcaggcgctggcggcgggcaagcacgtggtggtggataaaccgtttaccgtgacgttgtcacaggcacgtgcgctgcagcagcaggcgcagcagcgtggcctgctgctgtcggtattccataaccgccgctgggacagcgattttctgaccttgaaaacgctgctgcaggaaggttcgctgggggacgtggtctactttgaatcgcactttgaccgcttccggccgcaggtgcgccagcgctggcgcgaacagggcggcgcgggcagcggcatctggtacgatctggggccgcacctgatcgatcaggcgctgcagctatttggcaaaccgcagacgctgtttgtcgatctgggccagctgcggcccggctcgcagtcggtggactatttccacgcgctgctgcagtacggcaaacggcgcgtggtgctgcatgcttccatgctggcggcggcggaaggcccgcgttatatcgtgcacggcacccagggcagctatatcaaatatggcctggacccgcaggaagaccggctgaaggccggcgaacggctgccgcaggccgactggggctatgatatgcgcgacggcgttgtgacgctgtcacgtgatgatgtgctggcggaacagccgctgctgacgctgcccggcaactatccggcctactacgccgccatccgcgacgcgattaacggcgacggcgccaatccggtgcctgccgccgaagcgatcgccgtgatggaaatgatcgaactggggattgagtcggacaaacagcaggccgctttgccggtcagctaa

SEQ ID NO: 443184 - DNA, 930 bp, Serratia marcescens
atgtaccatcgtatggcgcaggaatcccagtcagacccgctgatgccgggctacagttttaacgcctacctggtggccggcctgacgccgattatggcggaagggccgttggatttctttatcgaccggccgggcggcatgaagggctacatcctcaatctgaccatcaagggtcagggcaaggtgtttgacggcgaggagacgctgtactgcaaccccggcgatctgctgctgtttccgccgaaggcggcgcactattacggccgctcgccggagagcgactgctggcaccaccgctgggtctatttccgcccgcgggcctactgggccgactggctggaatggcacagcaagaatcatcaggtcggacggctgacgctgcccaacggccagctgctgcaggagttcgaccgcctgttcgccaatatcgagcagacgcagcgttccggcaggcggctggcggaagagatgagcatgaacctgctggagcgtctgctgctgcgcgcgatggaagaagacccgctcagcccgcagaaaattatggacccgcgggtgattgaagcctgtcagtttattaccggcaatctggcgggggagctgcgtattgaggaggtggcgcgccacgtctgcctgtcgccgtcgcggctggcgcacctgttccgcgagcaggtgggcatcaatattctgcgctggcgcgaagaccagcgggtgatccgcgccaaactgctgctgcagaccactcaggagtcgatcgccgccattggccgtgtggtgggctatgacgaccagctttacttctcgcgggtgtttcgcaagcgcgtcggggtcagccccagcgactttcgtcgccgcagcgtggagattaattatccggcgcaacgaggccgcgaacgggcctggaacaacccgggcgttgcggctgcagattaa

SEQ ID NO: 443185 - DNA, 984 bp, Serratia marcescens
atgtcgaccctaacgaccaattcggtaaaaaaccgtggcagcctggggctgtcgcgcatctgggacagctacggcatgctggtggtcttcgcggtgctgttcctggcctgcgtactgctggtgcctaacttcggctcatttatcaatatgaaagggctggggctggcgatctccatgtccggcatggtggcctgcggcatgctgttctgcctggcctccggcgattttgacctgtcggtggcgtcggtgatcgcctgcgccggggtgaccacggcggtggtgatcaatatgagcgaaagcctgtggatcggcgtcggcgccgggctgctgctgggcgtagcctccggcctgattaacggctttgtgattgcgcggctgaaaatcaacgcgctgatcaccacgctggcgaccatgcaaatcttccgcggcctggcgtatatcatttccgacggcaaggcggtggggattgaggatgaacgcttcttcgccctcggctacgccaactggctgggggtgccggcgccaatctggatcaccatcggctgcctgatcctgttcggtttcctgctgaataaaaccactttcggccgcaacacgctggcgatcggcggcaatgaagaggcggcgcgcctggccggggtgccggtggtgcgcaccaaaatcatcatcttcgtgctgtccgggctggtgtccgccgcggcgggcattattctggcgtcgcgcatgaccagcggccagccgatgacctcgatcggctatgagctgattgtgatctccgcctgcgtgctgggcggcgtttcgctgaagggcggcatcggcaagatttcgtacgtgattgccgggatactgattctcggcacggtggaaaacgccatgaacctgctgaatatctcaccgttctcgcagtacgtggtgcgcggagcgatcctgctggcggcggtgattttcgaccgctacaaacagcagagcaaacgtaccgtttaa

SEQ ID NO: 443186 - DNA, 1536 bp, Serratia marcescens
atgaccgccagcacgccttatctggccttccgcggcatcggcaaaaccttccccggcgtcaaggcgctggacgatatcagttttagctgtcaggccgggcaaattcacgcgctgatgggtgagaacggcgccggcaaatccacgctgctgaagatcctcagcggcaactacgcccccagccagggggagatcttactgcagggacagccggtgcgttttaacgccaccaccgaggcgctggacgccggcgtggcgattatctatcaggagctgcatctggtgccggaaatgacggtggccgagaatatctacctggggcagttgcccagcaggcgcggcctggtggatcgtaaactgctgcgctatgaggcgcggctgcagctggagcatctcgggctggatattgacccggatacgccgctgaaatacctctccatcggccagtggcagatggtggagatcgccaaggcgctggcgcgcaacgccaagattatcgcctttgatgagccgaccagctcactgtcggcgcgcgagattgaacacctgttccgggtgatccgcgaactgcgcgccgaagggcgggtcattctgtacgtgtcccaccgtatggaggagatcttcgccctcagcgacgccatcacggtattcaaagacgggcgctacgtgcgtacctttgacgatatgagtcaggtagatcacgagcggctggtgcaggcgatggtcggccgcgatctgggggatatttacggctatcagccgcgtgaacacggcccggtgcggctgcagctggataatctgcaggcggccggagtgaaaacgccgatcagcctcagcgtgcgcgccggcgagatcgtcggcctgttcgggctggtgggcgccgggcgcagcgaactgatgaaaggcattttcggcgccacgcgcgtcggcggcggccggttgacgctggacggcgcgccgctgaccatccgctcgccgatcgacgccatccgcgccggcatcatgctgtgcccggaagaccgcaaagccgacggcatcatcccggtgcactcggtgcgcgacaatatcaatatcagcgcgcggcgcaaaagcctgcgggcgggctgcctgatcgacaatgcctgggaaaaccgcaacgcggagcagcatatccgttcgctcaatatcaaaacccccagcgccgaacagctgattatgaacctctccggcggcaaccagcagaaggcgatccttggccgctggctgtcggaggagatgaaagtgatgatgctcgacgagccgacgcgcggcattgacgttggcgccaagcatgaaatctataacgtgatttaccagctggcgcagcagggcatcgcggtgctgtttgcctccagcgatctgcccgaagtgctggggctggcggaccgcatcgtggtgatgcgcgaaggcgcgatttccggcgaactggcgcacgatgaggccagcgaggaacaggcgctcagcctggcgatgctgcgcacccccgatattacccctgatgccgcggcggcggtggcctga

SEQ ID NO: 443187 - DNA, 984 bp, Serratia marcescens
atgcataaattcactaaggcgctggcggcgataggactggcggcggttatgtcacaatcagctattgccgaaaccatgaaactgggctttctggtgaaacagccggaagagccgtggttccagaccgaatggaaatttgccgataaagccggtaaggacctcggctttgaagtgataaaaatcgcggtgccggacggcgaaaaaaccctgaacgccatcgacagtctggcggccagcggcgccaaagggtttgtaatctgtacgccggatccgaaactgggttcggcgatcgtcgccaaagcgcgcagctatgacctgaaagtcattgccgttgacgatcagttcgtcactgccaaaggtaaaccgatggacagcgtaccgctggtgatgatggcggccagcaaaatcggcgagcggcaggggcaggagctgtggaaggagatgaacaagcgcggctggaacgcggcagaaaccggcgtgatggcgattaccgccaacgagctggataccgcgcgccgccgcaccaccggctcaatggacgctctgaaggccgccggcttcccggaaaaacagatctatcaggtgccgaccaaatccaacgatatccccggtgcctttgacgcagccaactccatgctggtacagcatccgaaggtgaaacactggctgattatcggcatgaacgacaacaccgtgctgggcggcgtgcgcgccaccgagggccagggcttcaaggcggcggacgtgatcggcatcggcattaacggcgttgacgccgtcagcgaactctccaaggggcaggccaccggcttctacggctcgctgctgccaagcccggatatccacggctataagagtatccagatgctgcatgactgggttgcgaaagacgttgaaccgcagaagtttaccgaagtgaccgacgtggtgctgatcacccgcgacaactttaaaaccgaactgcagaaaaaaggcctgatgtaa

SEQ ID NO: 443188 - DNA, 1695 bp, Serratia marcescens
atgacggcagacgcaatcgccctgggactggacttcggcagcgactcggtgcgcgtattggcggtagattgccgcagcggcgaggagctggataccgaagtggcctattacccgcgctggcagcgcggcgactactgcgacgcggcgcagaatcagttccgccatcacccgcgcgactatatcgacgccatggaacaggcgattgtcgcgctggtgcagcgtatgacgccgccgcagcgtcagagcgtgatcggcatcggcgttgattccaccggctctacgccggcgccaatcgacgaacatggccaggtgctggcgctgcggccggagttcgccgataacccgaacgccatgtttgtcctgtggaaagatcatacggcgatcgatgaggcggaggcgatcaaccgcctgtgccgcagcggcgagtttgcggattacacccgctatatcggcggcgtttactcatcggaatggttctgggccaagatcctgcacgtctcacgtcaggatgcggcggtgcgccgggcggcggcctcctgggtagagctgtgcgactgggtgccggcgctgttgtccggcactacggcgccgcagcaccttatccgcggacgctgcagcgtcggccacaaaacgctgtggcacccggactggggcggcctgccgccgcgggcgttcttcgccgcgctggatccgctgctggttgactgtctgccctatccgctgtttgaagaaacccggaccgccgaacagccggtcggcacgctgagcgccgagtgggcgcagcggctcggcctgtcgccgcaggtggtgttgtccggcggcgcgttcgactgccatatgggcgcggtgggtgccggcgcccgtccccatacgctggtcaaagtgattggcacctcgacctgcgatattttgctggccgagcctcagcgcgtcggcgaccgggcgatcgccggcatctgcggccaggtcgacggcagcgtggtgcctgggctgatcggcatggaggcgggccaatcggcattcggcgacatgtacgcctggttcggccgcctgctgagctggccgctgcgcgaagccgcccgcagccggccggagctgcagccgcagctggcgcagattgaacagcagctgctgacgacgttgaccgacgcctgggccgccaatccttctttggaacatctgccagtggtgctggactggttcaacggccgccgcacgccgtatgccaaccagcgcctgcagggagtgatcggcgatcttaatctcggtaccgacgcgccgacgctgttcggcggcctgatcgccgccaccgcctttggcgcacgcgccattatggagtgctttgagcagcaggatattccggtggaaaacgtgctggcgctgggcggtatcgcccgtaaatcgccgaccatcatgcaagcctgcgccgatgtgatgaaccgcccgctgcagattgtcgcctccgatcagtgctgcgcgctgggggcggcgattttctccgccgtcgccgccggacggcatgccgatatcccgacggcacagcgccatatggcctgcggcctggagcgcaccctgcagcccgacccgcagcgcgtagcgcgctaccaacagctttatcaacgctatcaacagtggtgtcaggccgccgaaccgcgctatgccgcgccggcatcatgccctgaccatgcccaataa

SEQ ID NO: 443189 - DNA, 1503 bp, Serratia marcescens
atggacgtatttacacaacgcgaagtctggtttgtcatcggcagccagcacctgtatggcccgcaaaccctgcagcaggtgaaacaacacgccgaacaggtggttaacagccttaatcaggacgccggcctgccggtgaaactggtgttaaaacccctgctcaccacgccggatgaaatcagcgccgtctgccgcgacgccaactatcagcaggcctgcatcggtattatcacctggctgcacaccttctcgccggccaagatgtggatcgccggtctgtcaatcctcagcaagccgctgctgcagttccatacccagttcaacgccgaggtgccgtgggacagtatggatatggactttatgaacctgaaccagaccgcgcacggcggccgcgagttcggctttatcggcgcacgcatgcgccagcagcacagtgtgatcaccggccactggcaggataagcagtctcatcagcgcattgcgcagtggatgcgcgtcgccgccgcgcgtcaggagagccagcagctgaaggtagcgcgctttggcgacaatatgcgtcaggtggccgtgaccgaaggggataaggtcggcgcgcagattcagttcggctatgaggtcaacgcgcacggcatcggcgacctggtcagcgtgattaacgaggtcggcaacggcgaggtggacgcgctgatcgacgactatgaagccagctacacgctgagcgaggcggtcaccctgcacggcgccaagcggcagaatctgctggacgccgcgcgtatcgaactggggatgcagcgtttcctgcaacagggcggttaccacgccttcaccaccaactttgaagatctgcacggcatgcggcagttgccggggctggcggtgcagcgcctgatgcagcagggctacggcttcggcggcgaaggcgactggaaaaccgccgcgctgctgcgcattctgaaagtgatggccgacggactgcaaggcggcacctcctttatggaggactatacctatcacttccagccaggcaatgatttggtgatcggttctcatatgctggaggtctgcccgtcgattgccgagcagaaaccgctgctggacgtgcagccgctcggcatcggtggtaaagacgatccggcgcggctgatcttctccaccccggccgggccggcggtcaacgccagcctgatcgacatgggcgaccgcttccgtctgctggtgaatcaggtcgataccatagagcagccgcacccgctgccgaagctgccggtggcgcgcgccatctggcgggcgcagccgtcgctcgccaccgccgccgaagcctggatcctcggcggcggcgctcaccatacggtgttctcacaggcgctgaacgccgactacctgcgtttatatgcagagatgcacaacattgagtttctgctgattgataatgagacgacgctgccggcattcaagaatgaactgcgctggaatgaagtgtattaccaactgaaccgccggtga

SEQ ID NO: 443190 - DNA, 984 bp, Serratia marcescens
atgcagataaaacgtgcgatagacaagatcccgggcggcatgatgttggtgccgttgttcatcggtgcggcttgccacacctttgcgccgggggcaggcaaatatttcggttcgtttaccaacgggttgatgtccggcacggtgccgatcctggcggtatggttcttctgtatgggggcggcgatcaaactgagcgccaccggcaccgtattgcgcaaatccggtacgctggtggtgaccaagatcgccgtcgcctgggtggtggcggcggtggcctcgcgcctgctgccggaacatggggtggaagtcggcttctttgccgggctgtcgacgctggcgctggtggcggcgatggatatgaccaacggcggcctgtacgcgtcgattatgcagcagtacggcacgaaagaagaggccggggcgtttgtgctgatgtcgttggaatccgggccgctgatgacgatgattattctcggtaccgccggtatcgcctcgtttgaaccccatgtgtttatcggcgcggtgctgccgttcctggtgggatttgtgctgggcaatcttgacccggaactgcgcgagttgtttggcaaagcggtgcagacgctgattccgttttttgccttcgcgctcggcaacaccatcgatctgagcgttatcgcccagaccggcctgctggggatcctgctgggcgtcgcggtgattatcgtcaccggcattccgctgatcgtcgccgataaactgattggcggcggcgacggcaccgccggcgtggcggcttccagttcggccggcgctgccgtggcgacgccggtgctgattgccgaaatggtgccgcagtttaagccggtggcgccagcggcgaccgcgctggtggccacctcggtgattgtgacgtcgattctggtgccgatcgtgaccgcgatctggtcgcggcgggtaaaggcgaaagcggcgatgcgtgaacacatcgcgatggtgaaatga

SEQ ID NO: 443191 - DNA, 666 bp, Serratia marcescens
atggagatttacctcgatagcgcggatgtcacggcggtaaagcgtctggcgcgggtgttgccgttacagggggtgaccaccaacccgagcattgtcgctaaagaaggcaagccgctttgggaggtgttgccggcgctgcgtgatgcattgggcggcaccggcaaactgtttgcacaggtgatggcgaacgatgcggagcggatggtggcggacgcggtgctgctgaatcagcgcgtaccggggctgattgtgaagatcccggcgacgggcgaagggttggcggcgatgaaaaagctgcagtcgatgtcgattccgacgctgggcacggcggtgtacggcgccacgcaggggctgctggcggcgctgtccggcgccgagtatgtcgcgccgtacgtaaaccgcgtcgatgcgcagggcggcgatgcgcttgaaatggtgcgggagctgcagcaactgctgacgctgcatgcgccgcacgccaaagtattggccgccagctttaaaacgccgcgtcaggtgctggcgtgcatgctggcgggctgccgcgcggtaacgctgccgatcgaggtggccgagcagctgatcgccacgccggcggtggacgccgcgctggcgacgtttgagcaggactggcaggcggcgtttggcagtacggtattgagctga

SEQ ID NO: 443192 - DNA, 747 bp, Serratia marcescens
atgaacgcaagacaacagaacattttgcaatgggtcaacgagcggcggcgcatcagcgtcgacgaactggcgcgcgcgtctggcgtttcggaagtgaccatccggcaggatctgaatctgctggaaaagcgcagctatctaaagcgcatccacggcgccgccgtggcgctggaaagcgatgacgtcgatgcccgcatgatgtccaacttcgtgcttaaacagcagctggcgcgctatgccgcgtcgctggtcaacgacggcgaaaccatcttcatcgagagcggcagcgccaacgccctgctggcccgctacctggcggaacgccggcatatcacgctgatcaccgtcagccattacatcgcccatctgctgaaagagagcgactgtgaggtgattgtcctcggcgggatgtatcagaagcagagcgaaaccgtggtcggcccgctgacgcgcctgtgcattcagcaggtgcatttcagcaaggcgtttatcggtatcgacggttatcacgccgataccggctttaccggccgcgatatgatgcgcgccgacgtggtcaacgccgtactggcgaaaggcgtggagaatatcgtgctgaccgacgcctccaaattcggccagatacagcccaacccgctggcgacgccgcagcaaatcagccgggtgatcaccgacacgcggctggcgccggcctatcagcaattactgcagcatcagggcgtgcagctcgatatggtgggcgaataa

SEQ ID NO: 443193 - DNA, 696 bp, Serratia marcescens
atgcttaacgcgctaaaacaacaggttctggcggcgaatttggcgctgccgcgccaccgactggtcacctttacctggggcaacgtcagcggcgtggatcgccaggcggggctgatggtgatcaaaccgtccggcgtcgaatatgaggcgctgtcgctggaagatatggtggtagtggagctggagagcggcaaggtggtggaaggcaacaaaaaaccgtcatccgataccgaaacgcaccgcgcgctgtacctgaattttgacgacgtcggcggcgtggtgcacacccattcccgccatgccaccatctgggcgcaggccggtctggatcttcccgcctggggcaccacccatgccgattatttttacggcgacattccctgcacccgcaaaatgcacgatgccgagatcgaaggccgctatgagtgggaaaccggtcaggtgattgtggaaaccttccgccagcgtcagctggacgccgccgcggtgccggcggtgctggtgcattcacacggtccttttgtctggggcgcggacgccgctaatgcgctgcataacgccgtggtgctggaggagatcgcctatatggggatcttttcacgccagctgtcgcccgatctgccacagatgcagccgaccctgctggataagcactacctgcgtaaacacggcaagcatgcctactacggccagtaa

SEQ ID NO: 443194 - DNA, 327 bp, Serratia marcescens
atgaaagacagcaatagccggctggtttactccaccgacggcgggcgggtgaaagaagaagaggccaaaccgcagcgtccgcgcggcgacggtatcgtacgcattcagcggcaaaccagcggccgtaaaggcaagggcgtttgcctgataagcggtctcgatctggatgacggcgcactggacaaactggcggcggagctgaagaagaagtgcggctgcggcggttcggtgaaagacggcgtcatcgaaattcagggcgacaagcgcgatctgctcaaacagctgctggaagcaaaaggcatgaaggtcaagctggcgggcggttaa

SEQ ID NO: 443195 - DNA, 282 bp, Serratia marcescens
atgagcgagatatctaccctaacgataaaaatccctcttgagctgaaagagaaagtcagagccgcagcgctggccggcgaatgctcgctgagcgcggaagtttgccagcgcctggcggacagtttcaccacgccggccgccggtcagaaaaaggcgcagcgacaggcggagattgacagccaggaaaccacagaagtggttgaagccccattgagccagaaggagttgagaaaactgcggcagttgctgaagataaacgtcaaaagcggcaagaagaaatag

SEQ ID NO: 443196 - DNA, 765 bp, Serratia marcescens
atgtttgatatcgcaaaacgcaccgccggcggaaccctgttgctgttgttaataccgctggccgtttggctgaccggctggcaatggcagcccggcggcgataatgcgctgctgaaagtgatgttctggatgacggaaacggtcaccgcgccgtggggcatactgaccagcgtgctgttgtcggcctggtttttgtggtgcctgcgctttcgtcttaaaccggcgatcgggctgatggtgctgctgctggcctcgatcctggtgggccaggggataaaatcgctgataaaagagcaggtgcaggcgccgcgaccgttcgtgatgtggctggagcagcagcacaatatcagtgaggaacacttttattcgctgaagcgtaagcagcgcgcggcgctggtgaaagatcagctgcaggggcagccgctggtgccggagtggctgcgcaagcactggcagtttgaaaccggttttgctttcccttccggccataccacgtttgccgccacctgggcactgctgggcgttggtctgctgtggccgcgccggcactataaaaccgtggcggtgctgatggtctgggccgccggcgtgatgatcagccgtctgctgctggggatgcactggccgcgcgatctggcggtggcgaccttaatcagcgcattactggtggcgatcgtctgctggctggcgcagcgctggttcgggccgttgacgccgccgccggaagaacagcaggagatcgcgcatcgcggccacaggcgttag

SEQ ID NO: 443197 - DNA, 2673 bp, Serratia marcescens
atgtcgtccaatcttagtgaaacgagtatggataagctggttgcactgaatagcgaatatcactattacagcctgccacaggcggccaaacagctcggagatatcgaccggctgccgaagtccatgaaagtgctgttggagaacctgctacgtcatatcgacggcgatacggtgcaggttgaggatttacaagcgattgtcgactggcagcgcagcggacatgccgaccgtgaaattgcctaccgcccggcgcgtgtgctgatgcaggattttaccggcgtgccggcggtagtcgatctggcggcgatgcgcgaagcggtgcagcggctgggcggcaatgtcgaccaggtcaacccgctgtcgccggtagatctggtgattgaccactcggtaaccgtcgatgagttcggcgaccagcaggcatttaccgataacgtgcgtatcgaaatgcagcgcaaccacgaacgttacaccttcctgcgctgggggcagcaagcctttaaccgcttccgtgtggtgccgccgggcaccgggatctgccaccaggtcaaccttgagtatctgggccagaccatctggcatgaggagcaggacggcaaacgcatcgcctacccggatacgctggtgggcaccgattcccacaccaccatgattaacggcctgggcatcctcggctggggcgtcggcggtatcgaagcggaagcggcgatgctggggcagccggtatcgatgttgatcccggatgtggtgggctttaaactgacgggtaaactcagcgagggcatcaccgccaccgatttggtgttaaccgtcacgcagatgctgcgtaagcacggcgtggtcggcaagttcgtggaattttacggcgacggccttgcgcaattaccgctggcggaccgcgccaccatcgccaatatggcgccggaatatggcgctacctgtggcttcttcccggtggatgaggtcacgctcggctacctgaaactgagcggacgcagcgacgagcagatcgcgctggtggaaagttacgccaaagcgcagggcatgtggcgtcatcccggcgatgagccggtcttcaccagttcgctggcgctggatatgtcgacggtggaaaccagtctggccgggccgaagcggccgcaggatcgggtggcgctgtcggcagtgccgcaggccttccaggccgcgaccgagctggacatcggcggccagaaaaaccgggcggactccgttcctttcacgctggacggcgcaacacatccgctcagcaacggcgcggtggtgattgccgccatcacgtcgtgcaccaacacctctaaccccagcgtgatgatggccgccggcctgttggcgaaaaatgcggtggataaaggcctgcaggtgaagccatgggtgaaaacctcgctggcgccgggttccaaagtcgtgaccgactacttcgccagcgccgggctgatgccttatctggaggcgctgggctttaatctggtgggttacggctgcaccacctgtattggtaactccggcccgctgccggagccgatcgagcaggcgattaaaaccggcgatctgaccgtcggtgcagtgctgtccggcaaccgtaactttgaaggacgtatccatccgctggtaaaaaccaactggctggcgtcgccgccgctggtggtcgcctatgcgctggccggtaatatgcagctggatctggccaaggatgcattgggagaagggcgcgacggtaaaccggtgtatctgaaagacatttggccaagcaataccgatatcgccaaggcggtagaggaagtccgcaccgagatgttccgtaaggaatacagcgaagtgtttaacggcgacgaggagtggcgggcaatcgaggtggctgcgtcggcaacctataactggcaggaggactccacctatatccgccatccgccgttcttcagcaccatgcaggaaaaacccgagccggtgcaggatatcaacaacgcacgcctgctggcgatcctggcggattctgtcaccaccgaccacatatccccggcgggcaatatcaagcacgacagcccggcgggacgttacctcagcgagcacggggtggcggacagtgacttcaactcctacggctcacgtcgcggcaaccatgaggtgatgatgcgcggcaccttcgccaatatccgcatccgcaacgagatggtgccgggtgtggaaggcggctatacgcgccatatcccgtcacaggaagagatggcgatttatgacgccgcgatgcgttatcagcaagagcaggtgccgctggcggtggtcgccggtaaagagtacggctccggctccagccgcgactgggctgccaaagggccgcgcctgctcggggtgcgcgtggtgatcgccgagtctttcgaacgtattcaccgctcaaacctgatcggcatggggattctaccgctggaatttccgcagggcgtgacgcgcaaaacgctggcgctgagcggggatgagagcatcagcgtcggcggcctgcagagtctgcagccggggcagacggtgccgctgcatatcacctatgccgacggccgtgaagaggtggtggatacccgctgccgcatcgacacgcaaaccgagctgacctactaccagaacgatggcatcctgcattacgtcatcaggaaaatgttgtaa

SEQ ID NO: 443198 - DNA, 426 bp, Serratia marcescens
gtgagaacgttgttgaagtggggcagtttgacgctgatgggcgtgcttcttcttagtggtgtgtttatctatgtcgttgcatcaggcgttaatgaggtgactgaatacacggaaaacgacttttttacctatcgcatcctgacggataaagagatcgcgcaagcgccgcgtatttcagcggattacgtttttgtctcgcaacccggcgacgggcatgcaccatcaaacgctattatttttcaacgtgcctctgacattgagccgctcaggatttatctgcggggcttgggttacgctctggataagcggcgacttggcgctaatgaggtttggtcgcagcaggaacgacatggcggcgcggttttttatctctcttttaatcgcggcaccggtgaagcggtattgaccaaagtgcagaacgattaa

SEQ ID NO: 443199 - DNA, 351 bp, Serratia marcescens
atgaactattgcgcgcaaacggtaccatatacccgtatcactgagcataaatatttctccccatgggaacagcatgaaggttcggtatgctataaagaatacagccgggcatgtgaagaaaatgatattccctattatcctatccgtttactcggtgagatgagtgtgttggataaatatattgatttggctgaaaaagaaaataacatcacctttatcggccggttaggtacctaccgttatctggatatggatgtgacgatcgcggaggcattaaagacggctgagacatatctggctagcctgcaacaaggtaattcaatgcctgtatttacggttgacatcagatga

SEQ ID NO: 443200 - DNA, 897 bp, Serratia marcescens
atgaaaaccacggcgttaattgttacattcaatcgcctggaaaagttaaagcaagcttgggcggcaagcgctgcgttgccgtttgagcatattgttattgttgataacgcgtcgacagatgatacgcaaacctggctgagtcaacttgatgatgtacggctacaggtcattcgcgccgctcaaaatcgcggtggtgcgggtgggtttaaattaggtgcggagttcattacaacacaaatagacaccgattgggtgttcatgtttgatgatgatgcttatccggatgcggagttgttgacgcatttttctgagctggaagattctggttatagtgcatactgttgtcgtgttttagatacgcaaggcgcgttatgcaaaatgaacgtgccatttagtcaaatgccgacttcattgattcagacgctggattacatggccaggccggagcgttacgttcctgtagagcataaggcgtcggatgttgtcacattttcttttgttggcgccataattcgcaaagacgttttagctgacaatctccaggctatttggtctgaactttttatttactacgatgatctttatttttcttacaggttgagtcaacagggatatcggtttcgctattcccctgaactgttgtttctacatgatgtgcctgcccctagtagaggtggcacaccgccatggaaagtctattatttaaccagaaacttattgctttcaaaagtcttttttgaaaaaggcgaaagaccttactctttcggcgctatcgcattgcgcattgctaaatatttaatggcaaccattacccaaggcaataagtggaaatatattaaatatgtgactaaaggtattgtagatggcatcttgtgtaaaaatggtaagcaacattag

SEQ ID NO: 443201 - DNA, 1143 bp, Serratia marcescens
atgaaaaagatatgttactttatcaattcagattggtattttgaactacattgggtagaaagagccttggcagctaaagccgcgggttatgagatccatgtggttagtcattttattggtgacgacatcaggaaaaaattaacagagaaaggttttctttgtcataattcttttgtttctgagcagtctattaatccactcagttttcttggttcttgggtgcaggtttggcgtttgcttaagaaaatagaaccggatgttttacattgcattacgattaaaccctgcctgatgggaggcgtttttgcccgtatctataacaaaccgattattttgggtttcgtagggttggggcgcgttttcatggataatggttttttgatgagcgctattcgtttcttcacgctgcgcgcttataactatatattcaaaaataaaaggtgtctgctggcatttgagcatgagagcgatcgtgagagattacttgctctgagtcatgcaaaaaaacagcaaacggtcgtgattgatggtgcgggaattaatccgaatatctatcattattcactggaagtgaatcgagaaaaaccaattgtattattcgccagccgtttgctatggagtaaaggccttggcgacctggtggaggtgaaaaggcgtttagccgcgaaaggtgttgattttgaacttaacgtggcaggcattttaagcgcgggagatactgatgctattccgttgtcacagattgaatcatggcatcagcagggggtaataaactggctcggacgttgtaacgacgtttatagtttaattaaagctgcaaatgttgttgcattaccttcgacgtactcagaaggtgttcccaggattctgttagaagctgcatctgtaggacgagcctgcatcgcttatgatgttggtgggtgtcaaagtctaattattgatgagtatacaggtagcctggttgaaaagcgtaatattgaattacttgccaaaaaactggaagaacttctggtcagccctgccaagcgtatggaaatgggggttcgcagtcgtgaacgtattgaaagaaaattcgcgtcatcattgattattaatgatacgctgaaactctatcagagagcgatcacggcagtaaattattaa

SEQ ID NO: 443202 - DNA, 1212 bp, Serratia marcescens
atggcggaggtgaacattttgagttttttcactcagctatggaaaagaaagagtcgtaaaaatattcttacaaacctgacagagcataaaacattttatttgatttctgctgctggcatgcctaattttggcgatgatatgctgacgcgttattgggttgaggaactacagcgacgcttccccggctgtactatttatcttgatgctgttgatgctgtggttgcagctgagctattccctgatgctaaatgtgtcgattatttatggcggctggcacaggcattaggcgatgaaggttctgtggcgcataaatttgacgatcgttatgctatgcctttacgtgagcgtttaatgtctgcgctatttaattccgtggaaagcattcacttgcttggcggcggttatatcaatgaactttggggcgccaatagcagattagttgagttggtagcatacttcgcggaaaagaatcagcttgattgttatgccaccgggctgggtctgcagccgctttctccagaaaatgctgccaagatggcgcctttcatccggcagtttacgcagttcgatgttcgtgatcgggcaagttatgatgtactggcctcttttgagttgcctacgctgagtttctctggggatgattattttgctttccccctacgcccattaggccatattgttcagcgcgaatcagtgaccttgcatctttgcatccatacggagttatctgaaaatgaaatgctgacttcggatttactggcgctattacaacaggttacggagcgtttttctcaacagtatgctaactcggcaatacgtttttatgaattccggcctggctcagatggtgtatttttccagcaggtccgagaacgattacctgcggtagaattcgtgtcatttgaacagatttggcaagatggcctggtgtttgccagtcatgatttttgcattagctcacgctttcattttcaagtaattgctgccagccttggggtggcgggggttgcgctctcttggtcggattattatgacaataagttttccagcctgcaggcaatgtcagattggccaatattgaggccgggtgttgctccggatgtgctgacttcgcagttgtttgcgtcttctccatcggtaaatcggcggcagggtaaggaattgatacaacaggctaaggcacggttgttggcgcagttgtacaatttttaa

SEQ ID NO: 443203 - DNA, 591 bp, Serratia marcescens
atgaacgtggtcattctggataccggctgcgccaacctctcttcggtcaactatgcggtcaggcggctgggttaccagcctgaagtcagccgcgacccggagatcgtgctgcgcgccgacaagctgtttctgcccggcgtcggcaccgccaaagccgcgatggagcagctggcgcagcgcgaactgattgaacttatcaaagcctgtacccagccggtgctgggcatctgcctcggcatgcagctgctggcggacagcagcgaagaaaacggcggcgtcaacacgctgggagtgatcgacacgcaggtgaaacagatgcacgccggcggcctgccgttgccgcatatgggctggaaccaggtttccgcccgggccggcagccacctgttccgcggcatcgatgacgacgcctatttttacttcgtccacagctatgcgatgccaatatgcccaaacacaattgctcaggcgaactacggcgcacccttcaccgccgccgtgcaaaaagacaacttcttcggcgtgcagtttcacccagaacgttctggagccgccggcgcgcagttaatgaaaaactttctggagatgtag

SEQ ID NO: 443204 - DNA, 1068 bp, Serratia marcescens
gtgagccagaaatatctgtttattgaccgcgacggcacgctgatcgccgaaccccctgaagatttccaggtcgatcgcctggataagctggcgctggagccggcggtgatcccttccctgctggcgctgcaggcggcaggttataccctggtgatgatcaccaatcaggacgggctcggcaccgccagcttcccgcaggaaacgttcgatccgccgcacaacctgatgatgcagctcctgagctcgcaagggattcgctttgaagaggtgctgatctgcccgcatctgccggcggacaactgcgagtgccgcaagccaaagaccgcgctggtggaacgttacctgcagccgggcgtggtcgatagcgaacacagctatgtgatcggcgaccgccagaccgatatccagctggcggaaaatatgggcattcaggggcttttgtaccagcgcggcgctctggactggccggcgattacccgccaactgacccagcgcgatcgccatgcgcacgttaaccgcgccaccaaggaaacgcagatcgaagtggatgtctggctggatcgcgaaggcgacagcaagatcaagaccggcgtcggtttcttcgatcatatgctggatcagatcgccacccacggcggcttccgcatgaacattcaggtcaacggcgacctgtatatcgacgatcaccacacggtggaagataccgcactggcgctgggtgaagcgctgcacaaggcgctgggtgacaagcgcggcatcgctcgtttcggctttatgctgccgatggacgagtgcctggcgcgctgcgccatggatatctccggccggccgcacctggaatataaggccgagttcaactatcagcgcgtcggcgatttaagcaccgagatgatcgaacactttttccgttcgctctcctacaccatgggctgcacgctgcacctgaaaaccaaaggcaaaaacgatcaccaccgggctgaaagcctgtttaaagcctttggccgcaccctgcgccaggcgattcgcgtggacggcaatacgctgcccagctcgaaaggagtgctgtga

SEQ ID NO: 443205 - DNA, 1089 bp, Serratia marcescens
atgaacattgaaaatctggcgcgccagaacgtgcgcgctctgacgccctaccagtcggcgcgccgtctcggcggcagcggcgacgtgtggctcaacgccaatgagtatccgctggcgcccgactttcagccggcagccgcaaacctgaaccgctacccggagtgtcagccggcgcaggtgatcgcccgctatgccgagtatgccgacgtcagcccggatcaggtgctggtcagccgcggcgcggatgagagtatcgaactgctgattcgcgccttctgcgaaccggggaaagacgccgttttatattgcccgccgacctacggcatgtacggcgtcagcgccgaaacctttggcgtcgagcgccgcaccgtgcaaactacggcagcgtggcagctcgatctgccggcgattgccgccaacctcgacggcgtcaaactgatttatgtctgcagcccgaacaacccgaccggcaacctgctggacccggattcgctgcgtgcgctgctggagatggccaaaggcaaagccattgtggcggttgacgaagcctatatcgagttttgcccgcaggccagcgtagccggctggctcagtgattatccgcacctggcgatcctgcgcaccctgtccaaagcctttgcgctggccggactgcgctgcggctttacgctggcgaacccggatctgatcgctctgctgctgaaggtgatcgccccctacccgctctccagcccggtagcggatatcgccgcccaggcgctcagcgccgaaggcctgcgcctgatgcgtcagcgcgtcggcgagattgccggcaaccgtctgtggctacagcaagcgctggaagcgtgcgactgcgtcgaacaggtcttcaccagcgacagcaattatttgctggtacgcttcaccgccgccagcaatgtgtttaaaaccttgtgggatcagggcattatcttacgagaccaaaacaaacagcctgggctgtccggctgcctgcgcatcaccataggcacccaagatgaatgccagcgcgtgattgacgcgctgcgcccgctgcccggaaccaccacgactcgccaggagccactgtga

SEQ ID NO: 443206 - DNA, 825 bp, Serratia marcescens
atgaaaaaagtcgccattgttggccttggctggctgggcatgccgttggcactgtcattgataagccgcgggtttgaggtggtgggcagtaaaaccaccccggacggcgtggaagccgcgcgtatgagcggtattgagtgctatccgctggcgctgacgccggaattggaatgcgagccggacgacctggatgcgctgctgcaggtcgatgcgctggtaatcacgctgccggcgcgccgcaccgttgaaggcagtgaaaactacttcaacgcggtgcgcatgctggtggacagtgcgatggcctacggcgtgtcgcggattattttcaccagctcaacctcggtgtacggcgacgccgccggcatgctgagtgaggattcgcccgtcaatccgataagcccttctggccgcgtgctggcggagctggagcgctggctgcatgagttgcccaatacttcggtggacattctgcgcctggccgggctggtgggcgcagagcgccatccgggccgttttctggccggtaaggtggaagtgaaaggcggttcgcagggggtcaacctggtgcatcaggatgatgtgattgccgctattcagctgctgctgacgttgtcgcagggcgggcatatttataacctgtgcgcgccgcgtcacccgcagaaacgcgagttttatcctcagttggcggcgcaattgcagcttacgccgccgcagttcgcggcagaagcggatcagccggcgcggctggtggacggcagccggatttgccgggaactggggtttgtttatcagcacccggatccggcgcggatgccggtcagctaa

SEQ ID NO: 443207 - DNA, 900 bp, Serratia marcescens
atgctgaccaatcttagcgatatcgatctcaaactgttgcgggtatttgtcgcggtggcgcaggcgcagggcgtcagcgccgcgcaggaaccgttgcagatgaatcagtcgaccatcagcacccacctctccacgctggaaacccgccttggctttcgcctgtgccagcgcgggcgttcggggtttatgctcactcccaagggagaacgtattctgatcgcctgccggacgctgttcagcgccgcccgtgatttcacccgcgtcagccagtcgctgaacggcctgctgaccggcgatctgcagatcgggctggtcgataacctggcgtcgctgcccggcagccccttcagccaggcgctcaaacagtttttgcagcgccggcaggacgtgcagctgcactgccgcatctgctcgccgggcgaaattgaacagggattattgaaccgccagctggatctgggcatcggctatttcggccagcagttggcggcgttgagctaccgcccctggctggcggaaacgcaggcggtttactgcagcagcgatcatccgttatttacccagcccaaccccggccgggaacaaatcgagaatgcacgctggatacagcgcggctatctgctggcgcagcagctgtgcccgctggcgcccgccgatctcggcgccgtcgccttccatatggagagcgtggtgcatctgatcctcagcggcgaatatgtcggctacctgcccacgcactacgccgcacgctgggtggaacggggcgagctgcgccagcttggcggcccgccgctgagctatcaggcgacgctcagcctggcgacccgcccgcagccgacggaggatgccctgacggcgctgctggaggatctgcagcgccaaggcggcacgcttagctga

SEQ ID NO: 443208 - DNA, 933 bp, Serratia marcescens
atgttcaaccaaccccagggcggcaatgagatgccgcgctttgccggcaccccgaccatgatgcgcctgccggccgccgagagcgcgcagggactggatgcggcgtttgtcggcgtgccgctggatatcggcacctcgaaccgcagcggcacgcgttacgggccgcggcagattcgccaggagtcggtgatgatgcgcccgtacaacatgggcaccggcgcggcgccgttcgagcggctgcaggtggccgacctgggcgatgtggccaccaatccgtataacctggcggacagcgtgcggcgcatcgaacaggcctacgacgccatcatacagcatggctgcattccgttgacgctgggcggcgaccatacgctgacgctgccgatcctgcgcgcgatggcgcgccggcacgggccggtggggctgattcatgtggatgcgcatgccgataccaacgacagcatgttcggcgaacagctggcgcacggcacgacgtttcgccgcgcccatgaagaggggctgctggacgcgcgccgggtggtgcagattggcctgcgcggcagcggttacgcggccgatgacttcgactggtcgagccgtcaggggttccgcgtggtgcaggcgcagcagtgctggcaccgctcgctggaggggctgatggcggaagtgcgtgagcaaatgggcgacggtgcggtgtatctcagctttgatatcgacggcctggatccggcatttgcgccgggcaccggcacgccggaagtgggcgggctgtcggtctggcaagggctggaaattgtgcgtggctgccgcgggctttcgttggtgggcggcgatctggtcgaggtttctccgccgtatgacagttccggcaataccgcgctgctggcggcgaatttgctgtacgagatgctgtgcgtgctgccggggcagtga

SEQ ID NO: 443209 - DNA, 1389 bp, Serratia marcescens
atgaatctcgatctgttgaccatcgccatctattttctggttatcggcgcggtgggctggctgggcatacgcaaagccgccaccaaagaggattatctggttgccgggcgcaatctggggccggggctgtatctcggcacgctgtctgcggtggtactgggcggcgcgtccaccatcggcagcgtcaagctgggttacagctacggcatttccggcgtttggctgtgcgcatcgctgggggcgggcatcgtggtgctgagcaccctactggccaaaccgttgctgcagctgaaggtgtataccgttagccaggtgttcgcccggcgttatcacccggcagcgcgggtgaccagcgcggtgattatgctggcctacgatctgatggtggcggtcacctcggcgattgccatcggcagtgtaatgcaggtgatgttcggcctgtcgctggtgacggcgattctgctgggcggcggcgtggtggtactgtattccacgctgggcggcatgtggtcgctgacgctgaccgatattattcagtttatcattatgaccgtcggcatgatgctggtgctgctgccgatgagcatcggtaaagccggcggctggcaggcgttcagccagcgcctgccggacagctattaccagctgtcgtcgatcggcggcgataccatcatcctgttctttatgatctatttcttcggcattttaatcgggcaggatatctggcagcgggtctttaccgcccgcagtccgacggtggcgcgctacgccggcctgggggctggcatttactgcgtactgtacggcgtgtgcggcgcattgatcggcatggcgggaaaaatcgtgctgccgtcgctggagaatgccgacggcgcttttgccgccattacgcaggcggtactgccggccggggtcagcgggctggtggccgccgccgcgttggcggcgctgatgtccaccgccagcgcctgcctgctggcgtccgccaccattacgctggaggacgtcttgccggtgattcggcggcgtccggcggccggcctgcgcagcgggcgctggatcaccttgctgatgggcgtactgatgctggggctggcgctgttggtgcacgatgtgctggcggcgctgacgctggcctataacctgttggtgggcggcatgctggtaccgttggtgggggcgattttctggccgcgggccaccagcgccggcgcgatagccagcatgttggcgggcagcctgacggcgattggctttatgtgttatcagggcatacaggcgaacagcccgatttacggcggcctgatcgctggcgcgttggcgtttgtgatcggcagtctggcgacgcggtcgcagacggcggcggggcaggcgattttgtccaagtaa

SEQ ID NO: 443210 - DNA, 1329 bp, Serratia marcescens
atgagcaatgtagcaagcaagccgcctaaagttggatttctttcgttaggttgcccaaaaaacctggtggattcggaacgcatcctcactgaactgcgtaacgaaggctatcaggtggtgccgcgttacgatgacgccgaactggtgatcgtcaatacctgcggctttatcgacagcgcggtgcaagagtcgctggaagccatcggtgaagcactgcatgagaacggcaaggtgatcgtcaccggctgcctcggcgccaaagaagaccaaatccgcgaagtgcatcccaaggtgttggaaattaccgggccgcacagctacgagcaggttttgtcgcacgttcatcactatgtgccgaagccgccgcataacccgttcaccagcctgataccggcgcagggcgtcaaactgacgccgaagcactacgcctacctgaaaatctccgaaggctgcaaccaccgctgcaccttctgcattattccgtcgatgcgcggcgatctcgacagccgtcctatcggctcggtgctggatgaagccaaacgcctggtggagtccggcgtcaaagagctgctggtgatctcccaggacacctcggcctacggcgcggacgtcaaacagcgcaccggcttctggaacggccagccggtcaaaaccagcatggtcagcctgtgcgaacagctggccggcctcggcgtttgggtgcgtctgcactatgtctacccgtacccgcacgtggacgaggtgatcccgctgatggccgccggcaagattttgccgtatctggatattcccctgcagcacgccagcccgaaaatcctcaggctgatgaagcgtccgggcgcggtcgaacgcacgctggagcgcatcaagcgctggcgtgagatctgcccggaactgacgctgcgctccacctttatcgtcggcttcccgggggaaaccgaagaggatttccagctgctgctcgacttcctgcagcaggccaggctggaccgcgtcggctgcttcaagtacagcccggtggaaggcgccgcagccaacgaactggcggacccggtgccggaagaggtcaaagaggcgcgctaccaccgctttatgcagctgcagcagcagatctcggcgcagcgcctgcaggaaaaagtgggccgcgaactgctggtgctgatcgatgaggtcgacgcggaaggtgcgattggccgcagtatggccgatgcgccggagatcgacggcgtggtgtacctgaacggcgaaaccgacgtgaacgtgggcgatatcgtcaaggtgaaaatcgaccacgccgacgactatgatctgtggggcagccgcgtctga

SEQ ID NO: 443211 - DNA, 420 bp, Serratia marcescens
atgaatatcaccgtaacagaaaccatgaatgatgagacgttggacgccgtgcgccaggggctgatggcgcacaaccggccgtttatcgacaccagcctgcgtcagccgctcagcgtctacgccaaagatgacgacggccaggtggtcgccggcctgaccgccgtcacctggggcaactggctgagtatcgactggctgtgggtagcggaaagccagcgcggcagtggcctggggcgtcaggtgatgctggcggcggagcagcaggcgatggcgcgcggctgccgctatgcccgcgtggacaccttcagtttccaggcgcggccgttttatcagaagctggactatcaggtgcagatgacgctggaaaactatccgctggagcaccagtgctattttctgactaaaacgctgattgattaa

SEQ ID NO: 443212 - DNA, 1116 bp, Serratia marcescens
atgtttcgactgacccgaacgacattactcaccggcctgctgctgagcggcggcgtacaggccgcacctgaagtgacccagttgcaggagcggctggagtacccgtggtcgctggcgtttttgcccgcccagcaggggatgctgattaccgagcggcccggccgtttacgcctgtggcaacaggacaacgggctgtcggcgccgattgacggcgtaccgcaggtctatgcgcagggacagggcggcctgctggatgtggtgctggcgccggactttgccagcagccggcgggtgtatctcagctttgccgaagccggggacgacggtaaagccggcaccgcggtgggctacggccggctgagcgacgataagcgccggcttgaggatttccgcgtcatcttccgccagcagccgaagctgtcggtgggtaaccatttcggcggcaagatggtatttgaccgtcaagggatgctgtttgtcgcgctgggggaaaacaaccagcggccgacggcgcaggatctcgacaagctgcagggcaaggtggtgcggctgactgccgaaggcaagcctgcaccgggcaacccgtttgccggccagcagggtaaaaaggcggagatttgggcgtacggtatccgcaacccgcaggggctggcgatcaatccgtggaacggcgcgctgtgggaacatgaacacggcccgcgcggcggcgatgagatcaatattctgcagccggggaaaaattacggctggccgatcgccacctatggcatcaactattccgggcagccgattccagaggccaaggggcaatatgcagcgggaacgcaggcgccggcgcactactggcaggtgtcgccgggcatcagcggcatggcgttttatgataacccgcgctttggcggctggcagcattcgctgtttatcggcgcgctggcgcagaaggcgctgatccgactgacgctggtggacaataaaatcgtggcggaagagcggctgctggaggatcgcggcgagcggatccgtgaggtgcgcagcgggccggacggttatctgtatctgttaaccgatgaaagcaacggcaaactgctgcgcgtaggggaaggcccgtcaggttaa

SEQ ID NO: 443213 - DNA, 657 bp, Serratia marcescens
atggacttagccctgttcgacctggatgaaaccctgattaatgaagacagcgccagcatgtggatccgctggctggtttcccaggggtttgcgccggaagagctggccacgcaggaacagcaactgatgcagcactattatcagggcaaactgtcgatggagcagtatatgcaggccacgctgtcgccgctggccgggcgcagcgtccagaccgtcgccggctgggtggcgcgctacatccgccgtgatattctgccgcgcgtctaccccgcggcgcatgagcgtctgcagtggcaccgcagccgcggcgaccacatcctggtaatctctgccaccggcgagcatttggtggcccccatcgccgaacagctgggcgccgacggcgcgctggcgatcggcgttgaggtggacgacggccgctttaccggccgcacctacggcaccatgacctatcagcagggtaaagtaatccgcctggaggcgtggctggcgcagcatccgcagcggcatttcgggcagctgtacgcctacagcgactcgctgaacgaccggccgatgctggagtatgccgaccatgcggcggtgattaaccccgacgccgagttgcagacgctggcgcagcaaaacggctgggaaatctgccgctggacgcgctga

SEQ ID NO: 443214 - DNA, 1146 bp, Serratia marcescens
atgaccaagtttgccacccagaccgtacatgccggctatacgccggacgccaccggcgcggtgatgccggccatttatgccacctccacctatgcccagccggcgccgggcgaacataccggctatgaatattcgcgcagcggcaacccgacccgcagcgcgctggaaaatgcgattgccgagctggaaaacggcagccgcggctacgccttcgcctccgggctggccgcctgctccacggtgctggaactgctggatcaaggcagccatctggtggcagtcgacgacctgtacggcggcacctaccgcctgctggaaaaagtgcgcagccgcacggccggactgcgcgtcacctatgtcgctccgggtgacacgacggcgctggagcaggcgatcgaagccgacaccaaaatgatctgggtggagaccccgaccaacccgctgctgaagctggccgatctggcggccatcgccgcgatcgccaagcggcaccgtctgatcagcgtggcggacaacaccttcgcctcgccgtatctgcagcgcccgctggagctggggttcgacgtggtggtgcactccgccaccaagtacctgaacggccactccgatgtggtggccggcctggcggtggtcggcgataacccgcagctggcggagcagctcggttttttgcaaaacgcggtgggcggtatcctcgacccgttcagcagcttcctcaccctgcgcggcatccgcaccctggcgctgcggatggatcgccacagcgccagcgcgctgcacatcgcccaatggctggaacagcagccacaggtggaaaacgtctactatccgggcttaaccagccatccgcagcacgcgctggccggccggcagatgcgccagtttggcggcatgatttcactgcggctacgcggcgatgatgactacgcgcgacgggtcatccagcggctgaccctgtttacgctggcggaaagcctgggcggcgtggaaagcctgatcggccagcccgccagcatgacgcacgcctccattccgctggaacagcggctgaagaccggtatcacgccgcagctgctgcgcctgtcggtcggcattgaagacgccgaagatctgattgccgatctgcagcaggcgctggcggaataa

SEQ ID NO: 443215 - DNA, 1368 bp, Serratia marcescens
atggccatcgcacaatcggcgctcgcgacgatcggtaatacgccgatgctggagttgacgcactttgataccggcccctgccggttgtttatcaaactggagaaccaaaaccccggcggatctatcaaagatcgcgtcgcgctgtcgatgatcgagcaggccgaacgcgacgggaaactgcagcccggcggcaccattattgaagccaccgccggcaataccggattggggctggcgctggtcgccgcgctgaagggctaccgcctgacgctggtggtgccggataaaatgagccgcgagaaaattttccacctgcgtgcgctgggggccaacgtggtgctgacccgttcagatgtcggcaaagggcacccggcctattaccaggattacgcccagtacctggcggacgaaacgccgggcgccttatatatcgaccagtttaacaacccggccaacccggcggcgcacaccgcaaccaccgcgccggaactgtggcggcagatggatcacgacgttgacgccatcgtggtcggcgtcggttccggcggcaccctgagcgggctgagccgctacttttccgaggtttcccccaccacccgttttgtgctggcggatcccgccggttccattctggcggactatctcgacagcggaaatgtgacggaggcaggcagttggctggtagaaggtatcggcgaagactttgtaccgccgctcagcgactttcgccaggtggcggccgcctaccgcatcgacgatcgggaagccttcaccaccgcacgccagctgctgcagagcgaaggcatactggccggctcatccaccggcaccttgctggccgccgcgctgcgctactgccgggcgcagaccgagccgcagcgcgtggcgacgttcgtctgcgacagcggcaataaatacctgtccaaaatgttcaacgaccgctggatgcaggagcaggggctgctggccacttcccagtttggcgatctgcgcgatctgatcgcttaccgccacgatgaaaacgccgcggtaaccgccgcgccggacgatacgctggcggtggtgcacgcccgcatgcgtctgtacgacatctctcaactgccggtgttggacaacgatcggctggtcggcctgatcgatgagtgggatctgctgcataccctgcaggccgacgccggcaactttcgcctgccggccagacaggccatgacccgtcagctgcagacgctgcaaaaagacgccgacccgcaggcgctgctggcgaccttcaaccacggccacgtggcggtcattctcgacggcgagcgcttcctcggccttatcacccgcaccgacgttctgaacgcctggcgccaaaaactccgttaa

SEQ ID NO: 443216 - DNA, 1206 bp, Serratia marcescens
atgatgaaaacacatttagcttctccgatgaaaaagctgaccttcggcgtcggcttcctgttattggcaacgccggccgtgcaggccgccgcgccgccggcggctccgcaggttgacgccaaggcgtttattctgatggattacaacagcggcgccattctggcggaaggcaacccggatacccggctcgacccggccagcctgaccaaaatcatgtccagctatgttatcggccaggcgattaaggccggcaaaatcaagccgaccgactcggtcaccgtcggtaaagacgcctgggcgaccggcaacccgacgctgcgcggctcttccctgatgtttatcaaaccgggcgatcaggtgccggtgatggaactgaacaaaggtatcgtgatccagtcgggcaacgatgccagcattgcgctggcggattacgtggccggcagccaggatgcgtttgtcgggctgatgaacaactacgtcaaacacctcgggctgaaaaatacccacttcctgacggtgcacggactggatgcggaagggcaatacagcaccgcccgcgatatggcgctgttgagccaggcgctgatccgcgatgtgccggatgagtatgcgctgcataaagaaaaagagttcaccttcaataaaatccgccaggtgaaccgcaaccgcctgttgtggagctctaatctgaaagtggacgggattaaaaccggttataccagcggtgccggccataatctggtggcctcggcggccgaagggccgatgcggttgatttctgtggtgctgggcgcgccgagtgaccgcgtgcgtttcggcgagagcgagaagctgctgacctggggcttccgtttctttgaaaccgtaacgccaatcaaggcggataaaccgtttatcacccagcgcgtctggtacggcaagcagagcgaagtgccgctgggcgtggcgaaagacgcggcaatcaccattcctaaagggcagatgaaaaacctgaaggccagctataagctgaattccgccacgctggaagcgccgctggcgaagaatcaggttgtgggcaccattgatttccaactggacggtaagaccgtcgatcagcgtccgctggtggtgatggaggaagtgaaagagggcaacttcttcagccgcatctgggatatggtaatgatgaaagtgacccagtggttcggcagcattttcggctga

SEQ ID NO: 443217 - DNA, 606 bp, Serratia marcescens
atggagcagttgaactatcttcttttcgcctggattaacgcgaccccggcctcgcccaaatggtcgctcgatgtcgcgatcttcctggcgcgcgatgtgatcgccatcgttccgctgttgatcgtcggcctgtggttctgggggccgaaagacgcgctggtttcacagcgcgaagtggtggctaaaaccaccattgcactggcgttcgccattcttacctctgccgccatcggtatgctgctgccgcacgaacgtcccttcgtcgccggcatcggctacactttcctgcatcatgcgccggacagctccttccccagcgatcacggtaccgccatattcacctttgccatggcatttttatgctggcaccggctgtggtccggcattgtgctgatggttatcgccgtcgccatcgcctggtcgcgggttttccttggcgtacactggccgctggatatggtaggtggtttcctgcttggcatggtgggctgcctggtggcacagctggtgtggaacctgttcggcagcgcgatcgccgcccggctggaacgcctgtaccgtttcctgttcgccttccctatccgtaaagggtggatcaaagagtaa

SEQ ID NO: 443218 - DNA, 747 bp, Serratia marcescens
atggcgcccgaaaaaccatcccaatctttattaaatcaaccctcaacggcccaacactttaagaatggctctatttactccttggcgccatccttttaccgttggcaagtttttagcttaattgtcagtgggttgctatttttatggctgtcgcgtgatgaaagcctggattgggccatcagcaatagctggttcgacagcgccagcgggcatttcccctggcagcataacgcctggctggacgcgatcaaccaccgcctcctgaagatcggcgtgatcgccgcctcggtgctggcgctgctgtggggtatttaccggcgccatgcccggctgatcctgtgcatggcgctggtcggcgtcgggccactggtggtcggcatcctgaagtccaccagcgcgcactcttgtccgtgggatctggtgcaatacggcgggcaggcgatgtcatatccgctgtttggcgccttgccggccaatcccggtcccggccgctgctttcccggcgggcacgcttccagcggctttgcagtgatggcgctgttttttctgttttatccccggcggccgaaagtggcttatgcctgctggggcgccggcatcgccctggggctgctgatgggctttggtcaggtgatgcgcggcgcacactttttttcccataacctgtgggcaggttggtgggtttggttcagccaattggctgtttattggtgggttagcggcattgttcgccgcaagacgaggtaa

SEQ ID NO: 443219 - DNA, 510 bp, Serratia marcescens
atgaaaaagatctccttgttagtagccggcatgatgatggctgcttctgccggtgcggcgaccaacgcgactgaaaaggccgacatcagccagcagccgctggaaaagattgccccttacccgcaggcggaaaaaggcatgacgcgtcaggtgatttacctgccgaaacaggagcatgaagaaaactataaggttgagttgctgatcggtaaaacgctgcaggttgactgcaaccatcatgggctgggcggcaagctggaaagcaaaaccctgtccggctggggctacgactatctggtgctggataaactctccggcccgatgagcaccatgatggcctgcccggacaacaccaagcgcgaagccttcgtgacggcaaatctgggcgatgccgccatgcagcgttacaacagccgtctgccgatcgtggtctatgtgccgcaggatgcggaagtgaagtatcgtgtctggaaggctgaggatgcggtcagcgacgcggtgaagaagtaa

SEQ ID NO: 443220 - DNA, 546 bp, Serratia marcescens
atgcctgaacatcatgagcaggttattttgctggatgagcatttccatcagagtgggacaatggataaagccgtggtgcataccaatcagacacctctgcatctggccttttcctgctatgtgcttaaccgcaaaggggaactgctgattacccggcgggcgcttaacaaaaccgcctggcccggcgtctggagcaactcgttttgcggccatccgcagcccggtgaaagccaaagcgatgcaatagcgcggcgcgccgccttcgagctgggcctgaccatcaacctgccggaactggtggtttcccacttccagtactgcgtcaccgatgcctccggcgtgatggaaaatgaattttgcccaatctacgtcgcgcgcagcgatgcgcagccgcagcctaatccgcttgaagtgatggagtatgcctgggtcggtatcgaacaggtgataggcgccattaacgccgttcctcaggtgttttccccgtggatggcgctacagctgcagcagccggaactgctgaaaagaatcggcgcgttagcctga

SEQ ID NO: 443221 - DNA, 909 bp, Serratia marcescens
atgattgaaaatgtcagcatccaaaaacgccgggacgcggtgtttgagctgtggttatcctggcgttttgtcaggaacaacgtctggatcggcattatcgcgccaacgttatttacgctgtcgctctgcctcgcccgggggatgggaacgcaggcaataatatccagtattctggctacctttatttatgcttattttcatatctatatcgccgatatcaacagccagatatttggtattgaagaagacaaaatcaataagccggaccgtccgctggcggcccaggtcattacgctgaagtcggccaaaatccgcgccgccgttctcgccctgctgtttttcgcctatggtctttacctcggcgtgattggctgggtgctgttctggatactgtgctcactggtatacagctatacgccgtggagcaataactggctgttgaagaacgtctttgtttcgctgggcatactgacgcagctgccggtcgccgctcacaacgccggcgtgccgttcagggagattgccgactggctgctgccgctgttgctgatgaccagctatatgatcaccacgcaggatttcagggacattaaaggcgacgcgcgcatcggcagaaaaacctttccgctggtgtacggcatgcgcaagggaaaaataatcattgccgtcgcctatctgctttccatcgttattgcccactacacgctgtttatgcccggtgaacagagcggcaacgctagcgccctgtccctgtttgagataggatccgcgcttattttattgttcatctcagcgcgtctttgcaaaagagatgccgacagccgctatgaccatttcacctaccgactgtgggaatactggtacaccctggtgtgtatttccattattgccgtttatatcagccgttaa

SEQ ID NO: 443222 - DNA, 906 bp, Serratia marcescens
atggctgaagatatcagcatccaaaaacgtcgcggggtgatgtttgaactgtggctgtcctggcgctttgtcaaaaacaatatctgggcgggcgccgtggcgccgacactgtttactttggcgctctgttcagccaaaggtctgcccggtatggaaatcgccatcagcaccctggcatcatttgtttatgcctatcttcatctctacgtctttgatatcaacagccagatatttggcattgaagaagataaaatcaataagccggatcgcccgctggcggcaaaaatcattacgctggcgtcggcgaaaatcagggctgtcattttcacactgttgttttttgcctacggcatctgcctcggcgtcattggctggaccctgctctgggtactgttcgtcctgctgtacagctatacaccgtggagcaataactggctgctgaaaaatctctttgtcgcgctgggcatactgacgctgctgccggtcgccgcccacaacgccagtgtaccgttcatagaagttgctcactggctactgtcgctgctggtgatgaccagctatatgatcactacgcaggatctccgcgatgtaaaaggtgatgcacgcatcggcaggaagacttttcccttggtttacggcatgcgtacggccaagatcgccctgtcgctggcttacctgctctctatcgttatcgcccactatacgctgtttatcccaggtgaaaacggcagcagcggcgcgctgttgctcttcgagagcggatccgcgttaattttattatgtgtcgcagcgcggttgtgcaaacaaaacgccgactgccgctatgaccattttacctaccgcctgtgggaatattggtacacgctggtgtgtatttccatgtttgccttttatatcagccggtag

SEQ ID NO: 443223 - DNA, 381 bp, Serratia marcescens
atgaaaatttctacgatggttgcatctctcaccctggccggcttctgtttcgcggcaaacgcggctacccctgggaatattgcggtatatgcgacagagaagtcgaccggctccatatccattggcggcaaagacgcctacaccaaaacctttgacgtcgccctggcaaaattgtccggagacgatatcgatttatcaacactttgcctgaaggcctactcgccggataacaaggccttcaagctcgatacggttgatgaggcattaaccaccggcaccttgaaggacggcaagctggtgaagggcatcgccgtatttgccgctgacaacgccgcggtctacaacgcagccctggtaaaaattaccgacgattgtcaataa

SEQ ID NO: 443224 - DNA, 1503 bp, Serratia marcescens
atgttttccagcttgaagttgctgtatatcaccgatgatttaatttcacctgatgaatttccccggataatcagtcctgccagtgcatgccatgaactgtcatacatgccggaaagcgatattctgtcactcttcaccggttttaaaggtggcgagcggatacgccgtgaaatcggtttcactcatgagggaatgagctccaacctacgcggaaaggtgcagagtgccttgctgataggcgacattgtggcgattgaaacccgtccgggcgtactggcgacgatagggccattttacgctgacacggaaggctatctgagaccgcaggggcgacaggaacccaactaccgggtggatgagataataaggcgctatgaggaggccgtgaagtcttatggtggacgtcgggcgcgaccgtcagtttttccggcacaggtagcgcgggaaaaaccgacactggaaccggatgagctgacgaaggggggaagggtttcccgggaggtggcggctggttctatgaccaaagcggagcgttggcaggagcgaaaatatctgattgggcgagggcagaggagtatctacccggatgctcgtatcgcctcagaacgactggccgaaaacaatgttgccgtcgagaaggcaaaactggctgagaatgtctacaaaacaaccaacccgctcagggataccccgggtgttccggaggggtggaaggatatcagtaatgataataatgctctgagtaaaattgggctaaaaagaaagatgctctttgatagtgaggaaacacctgattttctggcaagggtatatcaacctgatagcagtgtttttggcgacgatatgaatccgacggttgtgttcagagggtcaagagcgccagagtttcctgagggatctagtattgcaacaaaaaaagcactagatggcgatctgtcaggaataaaaaatgtaaatgactggataaataatggcgcccaagcttctggcataaattcagaatattataaaagggctgtcgatattggggctaaaatatcaaaatatcccaatattgatatttcagggcattcattaggtggagggatggcctcggctacatcaatggccagtggaaagcctgcatggacattcaatgctgccggacttaacagcggaactgttgaaaaatacggaagtgaaatccttggtgctaccagtaatatacaggcctatcgggttgaaggtgaattattaactacactgcaagaggttaataacgaaagtgattatgcgctgataaaaaattccctgcctgaatcgctgcaaaaaccgtggggagtagcgttaccgttcactttaaaagagtggctatcgcttgcattgcctaaagctgccggtataccgcacacgcttcccggcggaacaggaacattgcttgacaaacacggtatagaccagacaataaagctgattgaagaccagaaagatgatgatgttgccactatcagggggagaatatga

SEQ ID NO: 443225 - DNA, 759 bp, Serratia marcescens
atggcaatggcgttaattttttctgtttttatggtgcaggggtgtaagaaaagtatggaatatgaaccaaaggatttttttgacggcagccagctggaaatcgcgcagctgatttatgacggcgatgaagcgaaattgaagcagaggcttccatccgtcagcaaggaagagctgaaccggccggcaaaagcagaaatgacgctgttattctggtcggtgctgaactcgatctatgataaaactgctcagggaagacttagaattattacggatttggttaagtctggcgcagacccattgcaaccaagatcaaaaggaggaagcagcccggcggagtttgtcctgaaaggcgacaagggggtttggataaaagcgatgcttgacggcgggttatctcctaatgccaaagataaaacctttaatgaaccaattgtatttgaaacattaaaagcgaaaaatactgaaactttaaaaacaatgcttgagtacggtgctgatataaatataaaagactcattgggcgatactctattgatagaatcggtagattcttattcatttgaccatgcaattcttttgctggaaaaaggtgcggacgacaaaatcaagggcaattcagggtggacgatggggaatcagttgcaacgatttataaatagaggtcaaggagatgctgatgataaggataaaattgaaaaaataaaagagctattaattaagaatggtggggattggccgcctaaatccgtgggggaatag

SEQ ID NO: 443226 - DNA, 441 bp, Serratia marcescens
atgatcaaaacacataaatatcaaatcagcctatacggcatgctgcttggcgcgctggccttgcttattagcctgtttcatttcaattatccgttagcgaccaagccgccgctggaagtcagcgtggcggagaaagtttcatctatcaaaaacggcattttagccggcctgaaaggtcaggaaccgccggtgacagagaaacgaactatcgatatagataacatactgaatagcgcgaccatcggtctggcgatcgttgcgttggtgcttgcttttatcggagggattcgcaaagagaacggctggggagttggcggagcgctgttttttggcggggggacgctggccttccatgcgatattgttcggcgccgggctgatcttcagtatcatcatactggttgccgtattatgttttttgttcgcttttttccccggttag

SEQ ID NO: 443227 - DNA, 390 bp, Serratia marcescens
atggttagctatcggtattggggcgggttcagcagctgttttctgttgttctgcctgatctttcttggtcagaataattcgctggagcagccgcatcatggcgaaaccggcctgttgctgtttaccattcccggctttatcgccagttaccttgccagtaaaaaacgcctgatctgtccgctgctcggcgcgttgtgcgcgctgccgctgtgcctggtggtgcgccacttctggctgatgtcgacccagtcgttctggcaggagttggcctacgccaccagctcggtattctggtgcctgtgcggtgcgctgctgtttctctttttccgcagcctgcgccagatgttacagctccggcaaagaaccctcggcaataaaaaaggcgcctga

SEQ ID NO: 443228 - DNA, 300 bp, Serratia marcescens
atgcgttcatttggtgagttaccccgcccgatattggtgctggaagggctggggatcgtgctgctgattctggcttatctgagcattcatggctatgttcagttgccgggggcgctgtcatcgcaggctgctgcggtggcgatgattttcctcggcgtggcgctgatgctgccggcggcggccctgctggtctggcgcgtggcgcatgggttcggcccgctgatgcgcggcggactgccgccggaaaacgatcggcgcaagccgccgcaacagcaacagaaacgcgatccgcgcgattaa

SEQ ID NO: 443229 - DNA, 480 bp, Serratia marcescens
atgtcagagatgctgaaaagcaagcagggaaccctgagagcgcaaacggatgtcccggtggcggtattgatcgccggtacggcaatggtggcgattaaatgtattagtatcctactgctgctgggggagctggggctgtccggcctgagcgagtttgtcagcaccagcgcgcaggcttgggattctacgctgatttttctggccggtatcgtaatgctctgcctgcaaatttactgcggctttgccgtgatgcgcggtaaaaatggcgggcgctggggctatgtggtctgtcaggcgctggtggtgggctatctgctgttggcgaccatcggcagcgtctttcccgaggtgtttaccgtggacggcgaaaccaacacccagattatgcataccctgattctggaaaaaatccccgacgtggtgattctcgggctgctgttcctgccggcggccagccgccgctatttttcccgtcgctga

SEQ ID NO: 443230 - DNA, 1131 bp, Serratia marcescens
atgcattgcgcgttgtatacggccggcagttgccgttcctgtcagtggctggaaaagccttatccgcagcagcttgctgataaacagcagcatctgcaggccctgctggccgaacgcgaagtcgggcagtggctgacgccggttgccggcgcgctgagcgcattccgcaataaggcgaaaatggtggtcagcggcagcgtggagcgcccgctgctggggatgttgcaccgcgacggtacgccggtcgatctgtgcgcctgcccgctgtatcccgccagttttgcgccgatgttcaacgtgctgaaaacctttatcgcccgcgccgggctgacgccatacaacgtggcgcgcaaacgcggcgagctgaaatatctgctgctgacggaaagcaccggtaacggcggggtgatgctgcgttttgttctgcgttcggagagcaaactggcgcagctgcgcgccgcgctgccgtggctgcagcaacagctgccgcagctgcgggtgatttccgtgaatattcagccggtgcatatggcgattatggagggcgatcgggaaatcatcctgaccgggcaacaggcgttggaagagtgcttcaaccaggtgccgctgtatatccgcccgcagggctttttccagaccaatccgcaggtggcggcgtcgctgtatgccacggcgcgcgactgggtgcgtgaactgggcatcgacagcatgtgggatctgttctgcggcgtcggcggcttcggtttacactgcgcacagccggaaacgcgtctgaccgggattgagatcagcgcggaggcgattcgctgtgcgcgccagtcagcggcgacgctgggactgcagcgggttgatttccaggcgctggactccacccgtttcgccacggcggaaggagacgtgccgcagctggtggtggtgaacccgccgcgacgcggcattggcaaggaactgtgcgattacctgcagcggatggcgccggactatctgctctattccagctgtaatgcacagagcatggcgcaggatatggcgcagctgccggggtatcgggttgaacgggtgcagctgttcgatatgttcccgcataccgcgcactacgaggtgctgacgctgctggtgcgggagaagtaa

SEQ ID NO: 443231 - DNA, 549 bp, Serratia marcescens
atgaaaacaaaaacgattgcggctgttttacctttagcgctggcgctgagcgcctgtaccaccgtagaaccggcttataaggacatcggcgcgcgcagcggcgcatgcattgaaggcggcccggacagcgtggcgcagaaattttacgatctgcgtctggaacagggcagtaccacactgccggacagcaaccgcctggcgcaactgcagccttacctgagccagcctctgtatcaggaactgctgggcgctaaccagaaagcagcgccgcagaccggcgctggcgcactgttcaccggcaatgccgaaggcgccaccagcgccagcgtagccagcgcgtcttccatcccgaataccgacgccaagaacatcccgctgcgcgtacagctgagctataagaaagatggcgacagcagcgccaaagagtggcagaacgaggtgctgatggtgcgcgaaggcacctgctgggtggtggatgatatccgctacctgaacgtgccgcagcacgccgccagcggcacgctgcgccaggtgctggaacacgactga

SEQ ID NO: 443232 - DNA, 831 bp, Serratia marcescens
atggctagatggatagggatcgtcgcggtgctgctggcgggctgccaggcttcagggccgggcaccaccgtcgaccgcggcgactatcagctggaaacgttgcaccaggcgcagggcgccgaccagcgcattcgttttctggtgatgcactatacggcggaagatttccatacctcgctgaagacgctgaccgacgagcacgtcagcgcccactacttgctgccggcccatccgcggcgcgagtacgccaggccgacggtttatcagctggtgccggagtcgatgcgcgcctggcacgccggagccagcagctggcgcggccgtacccagctgaatgacacctcgatcggcattgagatcgtcaaccgcggcttcagccgcagcatgttattcacccgctggcagccttacagcgccgaacagattgcgctgctgatccccttaagccgcgatattattcgccgctacgatattcagccggtggatgtcgtcggccacagcgatattgcgccgcagcgcaagcaggatcccggcccgttgttcccctggaaaactctggcggaagccggcatcggcgcctggccggagcagacggatgtgcagcgttatctggcggggcgtgaccctcatgcgccggtggcgctgtcggcgttgctcgataagctggcgcgctatggctacggtattgacccgcagtgggatgagcggcaacagaaaagggtgctggcggcattccaaatgcattttcggcccgccgattaccgtggcgagccggatgcggaaagcgaggcgattatcgacgcgttactgcataaataccacggcttatag

SEQ ID NO: 443233 - DNA, 1011 bp, Serratia marcescens
atgaaggtattggtcaccggtgcatgcagtggactaggccgtaacgccgtggaatatctgcgtcgccagggcatacaagtacgtgccaccggtcgcaaccgggccatgggccgcctgttggaaaaaatgggcgccgaattcattcaggccgatctcactaatctggtttcctcgcaggcgaaggcgatgctggcggaagtggacgtgctgtggcactgctccagctttacctctccctggggcaccgaagaggcttttgagctggccaacgtgcgcgccacccgccggctgggcgaatgggcggcggcgtatggcgtctcacaatttatccatatctcttcgccggcgatctacttcgactaccaccaccaccgcgatatcccggaagatttccgcccggcgcgttacgccaatgagtttgcccgcagcaaggcggccggtgagcaggttatccagcggctggcgctcgccaacccgcagacccatttcaccattttacgccctcaggggctgttcgggccgcacgataacgtgatgctgccgcgcctgctgcatatgatcaaacactacggcaatctgctgctgccgcgcggcggcgcggcgatggtggatatgacctatctggaaaacgcagtgcacgccatgtggctggcgaccatgaaacaggatacgccgtccggccgcgcctataacatcaccaaccagcagcctcggccgctgcatgacgtggtgcagctgttaattgacgaactgggcatgaagtgccgcatccgctccgtcccctacgcaatgctcgatatgatggcgcgcggtatggaaaagctcggcagcaaaagtgaaaaagagccggtactcacccactacggcgtcgccaagctcaacttcgacctgacgctggataccagccgcgcgcagcaggaactggattatcggccggtggtgtcgctggaagaaggcgtaatgcgcaccgcgcgctggctgaaagagcacggcaaactgcacggcctataa

SEQ ID NO: 443234 - DNA, 1440 bp, Serratia marcescens
atgagccatcaacgtattctggtccttggcgccagcggttatatcgggcagaacctgatcccccacctgacggcgcaggggcatgaggttatcgccgccgcccgtcgtcttgaatggctgcaggcgcaaaactggccgcatgtgcactgccagtacgtcgacgtctgtcagccggacacgctgccgccggcgctgtggcagatcgatacgctctactatctggtccacggtatgggtgacggccgcgactttattgaaaaagagcgccaggcggcgcagaacctgcgcgacgccctgcgccagtccggcgtcaggcaggtgatcttcctgggcgcgctgcagccgcagaaggacagctcgccgcacctgattgcccgccgtcttaccggagaaattctgcgccagagcggcattccggtcaccgaactgcgcgccggcattatcgtcgggccgggttcggcagcgttcgaagtgatgcgcgacatggtctataacctgccgttgctgacgccgccgcgctgggtgcgttcaaagtcttccccgatcgccctgccgaacctgctgacctatctgagtgaactgctgcggcacccggccgacgatcaccgcactttcgacgcggcggggccggaatacatcagctatcagaccatgctcaaacgttttattgccatcagcggccgcagacgctggctgatcccgatcccgctgccgacgcgccttatctcggtctggttcatcagcctgatcacctcggtgcccacctcgatcgcccgcgcgctgatccaggggctaaagcacgatctgcccgccgacggccgaccgctgcaggcattgattccgcagccgctgcaaacctttgatgaagcggtgaaagagaccctgcagcgcgaagcggaaataacagacagcgccgactggggctacgatccggccgcgcgggcgcgctggcggccggggtacggcttttacccgaaacaggccggccatacgctggagacgcaggcctcggcggccgccctttggcaggtggtgcagcagctgggcggcaaagagggctacttctacgccaacccgctgtggcagatccgcgcgcgcatggacgacctgatcggcaacggggtgatctacggtcgcccgccgcgccagacgctgcagctcggcgatatgattgacggctggaaggtcatcgctctgcagccggaacgcacgctttccctgctgttcggcatgaaggcgcccggccttggccggctgacgttcagcatcagggattacggtaaccgccgtaccctcgacgtgcgcgcctggtggcacccggccggttttagcggcttgctttactggttcgccatgatgccggcccacctgtttattttccgtggcatggccaaacggatcgtccggctggcggagcaggaagaccacaatttgccgtaa

SEQ ID NO: 443235 - DNA, 345 bp, Serratia marcescens
atgcggcttaatgcggtgtgttatggtttgttggcgttagccctggcggttagcgcatttctcccgcacccctggtgggcggggttgttactgctgaatgtgctgacgctggcgctgtatggcgccgataagctggcggcgatcaaagcctggcaacgggtgccggagatcacgctgctgacgtttggcttgatcggcggctggccgggagcgctgtgcggccagcggctgttccggcacaagacgcagaaacagccgtttaaaacctggtttatcgtcagcgtcctgctcaacgtggcggcgtgcggcgcggtgtggtacgccgtatacggccgcttcctctaa

SEQ ID NO: 443236 - DNA, 1017 bp, Serratia marcescens
atgctgatcgatctccgcagcgataccgtcacgcaacccacgagcgccatgcgccaggcgatggccaatgccgaagtcggcgacgacgtttacggcgatgaccccacggtcaacgcgctacaacatgaagcggcgcggctggccggcaaagaggcggcgctgtttttacccagcggcactcaggccaatctggtggcgctgctcagccactgccagcgcggcgatgaatacctcgtcggccagcaggcgcataactataaatatgaggccggcggcgcggcggtgctgggcggcattcagccgcagccgatcgaagccgacgacgacggcacgctgccgctggacaacgttgccgccgccatcaaacccgacgatattcactttgcccgcagccggctgctcagcctggagaacaccatcagcggtaaggtactgccgctcgcctatctggaacaggcgtggcagttcagccgcgagcggcggctggcgctgcatatcgacggcgcgcgcattttcaacgccgcggtggcgctcaacgtgccgctgcacaagattgtgcaatactgcgataccttcaccctctgcctgtccaaaggcctcggcgcgccggtgggatcgctgctgtgcggcagcgccgaatttattcagcgcgccattcgctggcgcaaaatgaccggcggcggcctgcgtcaggccggcattctggcggcggcgggccgctatgcgttagaaaataacgtcgcccggctgcaggaggatcacgacaacgcccgctggctggaacagcagctgcgcgatctcgggctcacgatcgtcgaaccgggcgcccagaccaacatactgtatatccgtcagtccgccgaacaggcggcgcagctcagcccgtggatgcgcgagcgcggcgtgctgatcggcagcgggccgctgacgcgtcttgtcacccacctcgacgtcagccggcaggatctgcagcaggtggtcgagctatggcgcgagtttttacaacggcacggctga

SEQ ID NO: 443237 - DNA, 1005 bp, Serratia marcescens
atgacccaaccccattctttgtgtccgaaccgcatgcaggtgcattccatccggcaggaaaccgccgacgtctggacgctgaacctgatctgccacgatttttacccttatcagcccggtcagttcgcgctggtaagcatccgcaacagcgaagataccctgcgcgcctataccctctcttcctcaccggggctcagcccgttcctcagcatcagcgtgcgctgcctgccggacggcgtcggctcgcgttggctgacgcaggaagtacgccctggcaatacgctatggctgtccgacgcgcagggcgagttcagctgcgtgcagcaccccgccgaacgctatttaatgctggccgccggctgcggcgtcacgccgattatctcgatgtgccgctggctggcggcgaaccgcccggcgtgcgatgtgcaggtgatcttcagcgtccgcagcccggaggcggtgatcttcgccgaacagtggcgacagctgtgcgccgcacacccgtcgctgaaactgacgctgatggccgaacaccgtgcgcagcccggttttctcagcgaacgcatcagcgacgcagtactgcggcagcacgtaccggatatcgccgaacgccgggtgatgacctgcggcccggtcccctatatggcgcaggttgaacagctgtgcctggcgctgggcgtaccgcccgcacgcctgcataaagagcagtttcacacgccggcggaaaacgccgggcaagcggacaatacgctggcgctgcgcatcggccggccgctgcgtgagttccgcgcaccggtcggcagcacgctgctggcggcgctggaatcccatcggttgccggtaaccgccgcctgccgcgccggcgtctgcggctcctgcaaaacccgcgtgctcgacggcgactacaccaccaccagcaccatgacgctgacgccggaagagatcgcccagggctacgtactggcctgcagctgccaactgcacggcgacgtcaccctcgcctga

SEQ ID NO: 443238 - DNA, 1650 bp, Serratia marcescens
atgttttgtgtgcaatgtgaacaaaccatccgaaccccggccggcaacggctgcgcctatgcgcagggcatgtgcggcaaaaccgccgaaacctccgatctgcaggatctgctggtcgccgcgctgcagggcctgtccgcctgggcgctgcaggcgcgcgcgctgggcattatcgaccaccagatcgacagcttcgccccgcgcgctttcttttccacactgaccaacgtcaacttcgactcggcgcgcattatcggctacgcgcgggagaccatcgcgctgcgcgatacgctggcggcgcgctgccgtctgctggaaccgtcggtcacggttgaccatccgctggcggcgctgcagctggccggcgatgatatcgacagcctgctgcaacaggcggcgcagtttgctctcgatcaggataaggccgaggtgggggacgacgtgcacggcctgcgtatgctgtgcctgtacgggctcaaaggcgccgcagcctatatggagcacgcccacgttctcggccagtacgatgacgcgatctatgcccagtatcacgggctgatggcctggctgggcacccaaccgtgcgacgtcgacaccctgctgagcaatgccatggccatcggccacatgaacttcggcgtgatggcgatcctcgaccgaggagaaaccgacgcgtatggcgatccgcagcccacctcggtcaacgtgcggccggtggccggtaaagcaattttgatttccggccatgatttgaaagacttacgcatgctgctggaacagactgaaggccagggcgtcaacgtctatacccacggcgaaatgctgccggcgcacggctatccggaactgaaaaaattcaaacatctggtcggcaactacggcagcggctggcaaaaccagcaggtggagtttgccaaattccccggcccgatcgtcatgacctccaactgcattattgacccgaacgtcggccattacggcgaccgtatctggacccgcagcatcgttggctggccgggcgtcaatcacctggacggcgatgacttttccgccatcatccgccaggcgcagggcatggccggcttcccctacagcgagatagagcacctgatcaccgtgggcttcggccgccagacgttgctcaacgccgccgatacggtgatcgatctggtcagccgcaaaaaactgcgtcatgtgtttctggtcggcggctgcgacggcagccgcggtgaacgcagttactacaccgacttcgcccgcgcggtgccgcaggactgcctgattatgacgctggcatgcggcaaataccgctttaacaaactggatttcggcacgctggaaggcctgccgcgcctgctggacgtcggccagtgcaatgacgcctattctgcgattatgctggcggtaaaactggctgagaaactaggctgcggcgtcaacgatctgccgctcagtctggtgctgtcgtggtttgagcaaaaagcgatcgtcatcctgctgacgctgctggcgctgggggtgaaaaacatctttaccggcccgaccgcgccgggcttcctgaccgacaacctgatgacgatcctcaacgataaattcggtatgcgtccgatcaccaccgtccaacaggatctgcaggccattctgggctga

SEQ ID NO: 443239 - DNA, 897 bp, Serratia marcescens
atgtattcaggactgttgatcattctggtgccgctgatcgccggctaccttatcccgctgcacagccatcgccttatccagagcatcaaccgtctgctcagccggatggtgtacgttattctgtttttaatgggcatcagtctggcgtttctggaaaacctcagcagtaatctgctgctgatcttccaatacaccgccgcgtttttcctctgcatcttcctcgccaacgcgttggcgctttacctactggagcgcaaactgccgtggcgcagcacgcataaacaggagaagctgccctcacgcctgcatatggcgttagagtcgctgcaactgtgcggcgtggtgctgattggcttcctgctcggcctgacgcagtggccctggctgcactacgccaccgccggcagcgagtacgcgctgattttcctgctgtttctggtggggattcagctgcgcaacagcggtatgacgctgcggcagatcattgttaaccgccgcggcatgctggtcggcgtggtcgtggccatcagcgcgctggccggcggtgcgctggcggcctggctgctgggggtgccggtgaaagccgggttggcggtggcctccggctttggctggtattcgctgtccgccattttgatcagcgacgcctacggcccggtactcggcagcaccgccttctttaacgatctgctgcgcgaactggtggcgattatgctgatccccacgcttatccgccgcagccgctcgacggcgctgggcctgtgcggcgccacctcgatggattttaccctgccggtgctgcagcgcagcggcggcctggagatcgtaccgccggccatcgtccacggcttcctgctgagcctgatggcgccggtactgatcgccctgttctcctga

SEQ ID NO: 443240 - DNA, 1659 bp, Serratia marcescens
atgtacttagaacgcattgagattgtaggtttccgtggcattaatcggctgtcgctgacgctggatgacaacacgctgctgctcggagaaaacgcctggggtaaatccagcctgttggatgcgctgacgctgctgctggcgccggaagagacgctgtaccgcttcgaaacgcatgacttccacttcccgcccggtgatgaagcggccaaggagcgctacctgcagatcatttttacgttctgtgagaaggacatcgggcatgcccatctgccgcgctatcgccatctatcgccgctgtgggtcaaggcggaggatggcctgagccgcatccattatcgctgtgaaggggagatgaccgatgatgacacggtgtgtacctggcgcagttttctggatgccgacggcaacccgctgttgctgcatcatatcgaccggctggtgcgcagcattattcgtattcacccggtgctgcggctgcgcgatgcgcgctttatccggcgtctgcgccccagctcgctcggcgatcggttgcctgccgataacgaggcgctggcgcagcagcttgaccaattgacgcgtgaactggtgcgcaacccgcagaaactgaccaatggcgagctgcgtcaggggctggcggcgatgcagcaactgctggagcactatttttccgagcagggttcacacgtcgccgggccgcgacgacagcgccggcagcaggagcagcaggcgtggcgttcgctcgataatatcaaccgcatggtggccgagccgaacagccgcagcatgcggctgattttgctgggtatgttctcgacgctgctgcaggccaaggggaatgtgaagctggaacctcatgcgcgcccgctgctgctggtggaggatccggaaacccgcctgcatccgattatgctgtcggtcgcctggggattgctgaatcagctgccgctgcagcgcatcactaccaccaactccagcgaactggtatcgctggtgccggtggtgcacgtctgccggctggtgcgcgagtccggccgggtggcgacctatcgccttgggtcacgcggtctcgggccggaagacagccggcgtatcgccttccatatccggtttaaccgtccttcttcgctgttcgcccgctgctggctgctggtggaaggggagaccgaagtatggctgctgaacgagctggcgcggcagtgcgggcataattttcaggccgagggcgtcagggtgattgaatttgcccagtgcgggttaaaaccgctgctgaagtttgcccggcggatgggaattgagtggcatgcgctggtggatggcgacgaggccggcaaaaagtacgccaataccgtgcgcagcatgctggacaatcatgaggataatgaacgtgaccgtctgacggcgctgccggcggcggacatggaacactttatgtataaagagggattcagcccggtgtatcaccgggtggcgtcggtgccggttaacgctcagatgccgatgcgcaaggtgatcctgaaagcggtgcaccgcgcctcgaagccggatctggcgatcgaagtggcgatgcaggcgggcgagtggggcaccgacgcggtgccggcgctgctgaaaaaaatgttctcacgggtgatctggctggcgcgcggccgggccgactag

SEQ ID NO: 443241 - DNA, 951 bp, Serratia marcescens
atgtcacaattcagctttccgctcgtcgccagccagccgatgaacggccaacggttaatcaccgcgctgctaagcggcagcatggcgcccgcccagtgctggcgcaaaacctcgtttcgcctgaagttcctcagccgttctctgttgaactggcagaccaccagcgggctgatgaacacgctggcggacaacccgctgctggaaaccatcctgcgcgcgcagcccaacctgccgtgcaaactgcaccgcccgtatctggcggccaatatgagcaaactcgacggcctgtttgcgctgcgcgaccactacgatctgattgcccagcgcatgccggggaaaatgctgcacgggcacctgggaacacagccgctggtgttaagccacgcgacggataaaaacggcgagacggtgacgctggaactggcggcgatcgataagctgaacaaagagggagaaactacgctgctgctgcgcaacgccgcgggcattatgctggcggaaatcaccttcaccctgatgcatttccggcaaaagagtacgctgtttatcggcggtctgcagggagcaaacgttgacgtgccgcacagcgagattcagcatgcgactaaagcctgccacggcctgttccccaaacggctggtgctggaaggggtgtgccacctggcgcgccatctggggattcagcaagtggtggccgtcggcaacggcagtcatatttaccagaactggcgctataaaaacaaaaagcgcgacctgctgcatgccgattatgaccagttctggctgtcgatggcggcccggccgctgcccggcggctacttcctgctgccggaacgcatcgcccgcaaaccgctggaggaggtcgccagcaaaaaacgcgcggaataccgccgccgctatcaactgctggacgcgctggaacaggggctggccgcgcatttttcccggtga

SEQ ID NO: 443242 - DNA, 1803 bp, Serratia marcescens
atggcagagccaaaagaactgaaacaaacactggtaagtcgtgaagacgcgattcgtcgcggcggatatcttcccgttggttattttaaaaatggctttaccctggagtccgccaatcaggcgctctatttggaaagcacgttgggatatgttgtatggcggggcgcgttgccgaaagtggttgctccaggtgtaacgccggaagatacgggcggttttgcccctgacgcttgggtagaagtgagcggtatggcgtcgtcgttcaagcttaataatatggtgctggtggaagatttctatcatctggttactgccgatggcgactggacgccggcggcgcaggcggcaattaattatgcgttttaccacggattgaataaagtttggtcattccaaaagatggtgttcaaatcgccgttgcgcattgataattgggaccggggattggaagtacgttttggatatttggcagcgcacgccgatttccctgcttctacggattggaaaaaggccaatcctttgatcattattggcgagaaatccggcggcgggatggttgcgctcgaaatccatattggttacatgtttggtaatgatcgcgccaatggtatttctgttcgcgggcctggctgtggcggttcacggattcatatcggcagagcgacaaactgtaatattgtttatgactgcagccagcaaacgcaccctgcggcctccaactttattaccggcgatttctggcacaacggaaagatgggcgcgtactttgctcgtgggacatcaggtgagcgtccgattgcggaagggcataaactttccgtcggttttattaccaggatgatttatggcggctctctgtggagaaatggttcgcagtatgggcagatttccggcgatgcagacttcaatggccgatatttatcggaagtgaccctatccggtaattcatttaccgggctggagcgcggcgccgaaatttctaacggtacggcaagcggtgaagtgttggccttctatgcacaaaccgcgggcgtctataaagttctgattatcgagaaagttaacgtgtccggcggtaatagttcctttgccacgggcgataagttgacctccggttcatggagcggtgaagtgtctgccgtacgcaccgcagagcaggggcagcagttctattttgatatcatcctcgatttttatggcagcgcctttgccaaaattgatgtggactgtggctatctgggcggtattgttggccattctctgcatagttgctccctgaactataagagttcgtactcggcatataccaactcgatgaacggcgcgcagtgggtgcattccggttcaacgatgacgctgcgggacagttacctgaataaaaacgtcttggacagcaccgctgattttgtggcgccgggcggccatctgtttatgcgcaattatcggacctatggttccgagtttgccgcaacgtttgccccgggtaagccagtgactattcgccagttcaaacatattggcagtaccaatgccccgggtatgaaagatatttatgaggtgcagatgtttggccctaatagccggctaaaggggctctgtgcaagttttaaagtggcggtatcgggcgaagatttggaaatttttgagagtacagtcacggatgcttcccgggtgaaagttattcctgtcgttgaaagggatcaggaagaaccgaacaatattgataaaattaagctgtttgtgcaggtacagcaggattcgccaaataccttcccgctctactttaccttcaacagaaagtaa

SEQ ID NO: 443243 - DNA, 1113 bp, Serratia marcescens
atgaagtttatgggacgtctacgacgcaggacgatcgtcatcgtgggactggtggttatcgccgtggcggcattctggtttttccgtcagccggcagcggtggactataaaacggtgaaggtggccaagcgcgacctgcagcaaaacgtactggcgaccggtcagctggatgcggtacgcaaagttgacgtcggcgcgcaggtcagcggccagttggaaagcctgacggttgaaattggcgataaagtgaagaagggccagctgctgggggtgatcgatccgcagcaggcgcaaaacagcatccgcgaaagcgaggcgatgctgcgcgaactgcatgcacagctgcagcaggcgcaggccgagcagcatctggcggcggtcaccctgcagcgcaatcgcgcgctgtcgcgtgtgcaggcggtatcgcgtcaggatttggataaatacaccagcgaactggcggtgaaaaaggcgcaggtggagagtatcaaggcgcaaatcgcccgtaatcaggccagcctggatacggccaaaatcaacctggcctacacccgcatcgaagcgccgatggacggtgacgtggtgcagatcaccaccctgcaggggcaaacggtgattgcggcgcagcaggcgccgaacattctgacgctggccgatctcagcaccatgctggtgaaggcgcaggtgtccgaagccgacgttattcacctgaagccggggcaaaaggcctggtttaccgtgttgggcgacccgaacaaacgctttgacggcgtgctgaaagacattcagccgacgccggagaaggtcaacaacgccatcttctactatgcccgtttcgaggtgccgaacccgcaggggctgttgcgtctgcagatgaccgcacaggtgcacattcaactgggcggcatcagccaggcgatggcgatcccgctggcggcgctgggcgagcaaattgccgataaccgctattatgtggcggtgctgaagcagggcaaggaagagaagcgcgaagtgaccatcggcatgcgtaataatatagacgtgcagattgtcaaagggcttggggtcggcgacgaggttatcgttaaccgcggcggcgcggaggccaactga

SEQ ID NO: 443244 - DNA, 705 bp, Serratia marcescens
atgcgcatagtgaaactgtcgccgcactccgtcgccttcccttcagcggagggcgcgctgcgcgatcctaacggcctgctggcgattggcggcgatctgagcgcgccacgcctgctggccgcttaccagcgcggcattttcccctggtattcgccgggcgaggcgatcttgtggtggtcgccggatccgcgcgcggtgttatacccggccgagcgccatatcagccgcagcttcaaacgcttcctgcgcgccgacccgttccgcattacgctgaaccatgacttcgccgcggtgattgccgcctgcgccgaacggccgcaggacggcacctggatcggcccggaggtacagcgcgcctatctgcatctgcaccgtctgggctacgcccattcggtcgaggtctggcaagatgacacactggtcggcggcatgtatggcgtcgctcagggcgcgctgttctgcggcgagtcaatgttcagccgcgtcaccaacgcctcaaaatgcgcgctgatggcgttttgccatcattttgccgcttttggcggggaattgattgactgtcaggtgttgaacgcgcacactgcctcgcttggcgcgagggaaatttcccggcgcagttttttacagcagctcagcgagcttcagcgccgaccgttggcggcagagtgctgggcagcgcaagtgatccccccacagcaggtttaa

SEQ ID NO: 443245 - DNA, 1737 bp, Serratia marcescens
atgcgcgttttactgccgtttctggcgctataccgccgccatgggttcctgattgcgctgggcatcgtgctggcgattatcactctgctggccagcatcggcctgctgaccctgtccggctggttcctcgcagcctcgtcgctggccgggctggcgggactgctcacctttaactatatgctgcctgccgccggcgtacgcggcgcggcgatcttccgcaccgccggccgctacgccgagcgcgtggtcagccacgacgccaccttccgggtgctggcgcacctgcgggtcttcaccttcagcaagattctgccgctatcgcccggcggcatcgcccgcttccgtcaggccgaggtgttaaaccggctggtggccgacgttgatacgctggaccatctgtacctgcgggtaatgtcaccgctgatcagcgcggccgtggtgatcgtggtcgtcacctttggcctgagctttgtcgaccagacgctggcgctgattctcggcggcattctgctgttattgctgctgctggtgccgccgctgttttactccgccggcaaaccgatcggcagcgaactgaccgccctgcgcagccaatatcgcaccgggctgaccgcctggctgcagggccaggccgagctggtggtgttcggcaccgtaaacgatttccgccacacgctcgatcagattgaacagcgctggcagcgccgccagtggcagcaggcatcattaggcggtatggcgcaggcgctgatgattttagccggcgggctgacggtgacgctgctgctctggctgaccgccggcggcgtcggcggcaatagccagcccggagcgttgatcgcgctgttcgtattcgccggactggcctcgtttgaagcgctgatgccggttgccgccgcttttcagcatctcggccaggtgatcgcctccgccacccgggtaaaacagctgatcgaacagcagcccaccgtcggtttccccaccgccggccctgcaacagcggcctgcgcgacgctgcaactgcgccacattgattttacctatccggggcaaccgcagccggtactgcagaatgttgaactggaagtcgccgccggggagcatatcgccctgctgggacgcaccggctgcggcaagtccacgctgctgcagctgctgacgcgcgcctgggacgccgacggcggcgatattctgctcaacggcgagccgttagcccgctacgatgaaagtacgctgcgcgccatgaccacggtggtgagccagcgggtgcatgtcttcagcgacacgctgcgtgaaaacctgcggctggcggcgccggaggcggacgacgaaactctgcaacaggcactgagccaggtcgggctggacaaactgctggaaaacgaagggctgaacgcctggctcggtgaaggcggccgtcagctgtccggcggcgaacagcggcgtctgggcatcgcccgcgcgctgttgcattcagcgccgctgtggctgctggatgaaccaaccgaagggctggacgccgagaccgaacaacagattctggcgctgctgcgtcagcactgtcagggcaaaacgctgatcctggtgacccaccgcctgtacggactggagcatatggaccgcatctgcgtgatggacggcggccgtatcgtcgaacaaggcgatcacgccacgctactgcgccagcgcgggcgctatgcccagttccgccaacgtatcagcaacgtctcgctgtaa

SEQ ID NO: 443246 - DNA, 1767 bp, Serratia marcescens
atgaaaaaaaccagacagcaccagttgacccaatggcttaaaacgcaaagcacgctggccaagcggtggttgcgcctttccatgctgctggggttgtgcagcggcctgttaatcgtagcgcaggcctggctgctggcttcactgctccatgccttaatcatcgaccatacgccccgcgaacagctgacctcatcatttatctggctggccgccgcttttgtcctgcgcgcgctgttcagctggctgcgggaacgggtgggttttattggcggccaggtgctgcggcgggaaatacgccggcaggtgctggacaaactgcagcagcttggcccggcctgggtgcagggtaaaccggccggcagttgggcgacgataatcgtcgaacagatcgaagatatgcaggattattactcgcgctacctgccgcaaatgtatctggcggtgtttatcccgctgctgatcctaatcgccgtttttccgattaactgggccgccgggctgatcctgctggcgaccgcgccgttaatcccgctgtttatggcgctggtcggcatgggcgccgccgatgccaaccgccgtaactttgtcgcgttggcgcgcttgagcggcagcttcctcgaccggctgcgcgggctggacaccctgcgcctgttccaccgcgggcaggcggaaaccgcgcagatcgcccgctcttccgaagacttccgccgccgcaccatggaagtgctgcgcatggcgtttctctcctctgcggtactggaatttttcgcctccctgtcaatcgccgtggtcgcggtctattttggcttctcttatctgggggatctgaacttcggcagttacggcctcggcgtgacgctgttttccggctttttagtgctggtgctcgcgccggaatttttccagccgctgcgcgatctgggcgcgttttaccacgccaaggcgcaggcggtcggcgccgcagaggcgttggaaaccttcctcaatgcagaaggcgaacagatcggtcagggcacactgacgctggacgatgcaatcccgctcacgctggccgccgatcggttggaaattctgtcgccgcagggcgtcgtactggcagggccgctgaccttcaccctgcccgctaatcagcgcatcgcgctggtaggcctcagcggcgcgggcaaaagttcgttgctgaatctgctgctggggttcctgccctaccgcggctccctgacggtaaacggcaacgaactgcgcgaactgaacgctgagaactggcggcgacagctgggctgggtcgggcaaaacccgcatctgccggcgcaaacgctgcgcgacaatattctgctcggtaatccgcaggccgatgaaccgcaattactgcaggcggtggaacaggcttacgtcagcgagttcttgccgcagttgccacaggggctgcagacggagcttggcgacagcgccgcccgcctgtcggtcggccaggcgcagcgggtggccgtcgcccgcgcgttaatcagcccgcgtcggctgctactgctggatgagccggccgccagcctggacgcccacagcgagcgtctggtgatgcaggcgctggatgccgcgtcacggcgccaaactaccctgctggtcacccaccagctggaagataccgaggatttcgaccagatttgggtcatggataacggaaagatcgttcaacagggcgactacgccagcctgagcgcccagccggggctgttcgccaccttaatcgcacaccgcagcggggagctataa

SEQ ID NO: 443247 - DNA, 417 bp, Serratia marcescens
atgaataacaatgttgcagccaagaatattgataaactgggttgggtttatatccagaataaaaaaattctgatggcgcgttcatataacaaagctgctttttatattcccggcggtaagcgggaagccggagaaagtgaccaggtggcgctggtcagagaaattaatgaagagctctccgtcgatttaattaatgacagtatcgttttgctcggggagttcaaagggcaggccgacggtaaggcggaaggcatagtggtgaatatacgctgttttaccgctgactttaacggcgagcttaaggctaacgccgagattgaagagatcgcctggctcacgtatgcggatcggcatcgttgctctatcgtctcggtacaggtattgaatgcgttaaaagacatgcagttgattgactga

SEQ ID NO: 443248 - DNA, 1020 bp, Serratia marcescens
atgatcggttcttcttattttaccggcaacctggtcggtaccatgctggccggtaagctgattaagcgcattggctttacccgcagctaccatctttcctgtctgctgtttgccgtcgcgacggcgggcatgacgctgtcgctcgacttctggagctggctgggatggcgcttctttgccggcatcggctgcgcctggatttgggtgatcgttgagagtgcgctgctgcgcagcggcactcagaccaaccgtggtcagctgctggcggcctatatgacggtgtattatctcggtacggtggtgggccagttgctgcttggcatggtctcttccgagctgtggaacgtgttgccatgggtgacggcgatcgtgattagtgccatgctgccgatgctgtttgcccgggtaaatagcgccgatgacgaaccgcagcaggcggcggtattgccgatgctgaaacgccgcagcgcgcgcctgggaattaacggctgcgtgatttccggtattgtacttggctcgctgtatggcctgatgccactttacctgtctcatcagggcttcagcgatgcggatgttggctactggatggcgctgctggttagttccggcattatcggccagtggccggtcggtaaaatggccgatcgctatggacgcctgctggtgttacgcgttcaggtatttgtggtgattatcgccagtatggcgatgctcggaggctacgcgatggcgccttcgctgtttattctgggctgcgccggctttacgctgtatccggtagcgatgtcctgggcatgcgaaaaagtgcagtctcatgagctggtggcgatgaatcaggcactgttaatgagctataccatcggcagcctgcttggcccgtcgatgacggcgatgctgatgcagaattactccgatcagctgctgtttgtgatgatcgccgcggtggcgctggtctatctggtgatgctgttgaagaaacagaagccggaccatcaccacacgccgtttgctgcggcctga

SEQ ID NO: 443249 - DNA, 2418 bp, Serratia marcescens
atgcacgctccacagcagagcaccggtaagcgctggttctttaccgcttatcgcctgctttttgtcatactcagtttttgtatcggtctgttttttgttatctggggaggaaaactggtttcgttaggcggtagtgcgtattacctgcttggcggcctggcctatctgattatcgccgtttgttttctcgtccgcagtaaacataccttctggctctccctcatcaccttcttcctgacgctctgttgggcgctgtatgaagtacagttcagctattggggcctggtgccgcggctggtggtaccggcgctgttattgatgctgagcctatggctcatcccgacgctgccgcaaaccggcaacggccgacgccgtctggcgaactggggtggcctgggcatttttgtggtgctgctggcgacgttggtggcggcgttttatccgcataatgttattcgcaacgacgtgacgctgagcaagcctgacgcgcaggccaagccggcaacgggtgaggatgattgggaattcttcgggcgtagtgcgtccggcacgcgttttgcgccgtatacgcaaatcacgccggaaaacgttaaagatctcgacgttgcctgggtttaccacaccggtcgtcgtaccaccggcagcggcatcggcgtggatgaaaatacaccgctgcaggtgggcaatgtgctttattcctgtacgccggaaaacctgatcaccgcgctggacgcggacagcggtaaagcgctgtggaaattcgacccgcaggcaaaaacggcggagcatgtcacctgccgcggcgtcggctattacgacgctaataaagacgacagcctgagcgcgagcgaaaagagcacgccagcgttgcagcagtgtccgcagcgtatcctggtttccaccgttgacgcacgttttatggcgctgaatgcccgtaccggcgaactgtgcccgggatttggcgataacggcagcgtcgacctgaagcaaggcatgggcgataccgaaaacagcaaacgctatcatccgacggcggcgccggtggtgatggggcatatcgccattatcggcggctgggtgcgtgatattgtgcacggcgagccttccggcgtggtgcgcgcgtttgatgtgcgtaccggcgacgtggcctgggcctgggatgtcggccagccggaaaatgtcaccgatccggtaaaagggcgcgcctatacgctggaaacgccgaacgtttggacgatcccaagtttcgataaagcgctgaacctggtctatctgccgaccggcaacggtccgccggattactggggcggcgatcgtaacgaagcgaaagagaaatacggttcggccatcgtggcggtcgatgccagtaccggtcagaccaaatgggtttaccagaccgttcatcatgatgtctgggactacgatttaccgtcgcagccggtgctgtttgatgtgatgaatgagcagggggaaactattcccgcgctgattcagaccaccaaaaccggccagatctttgtgctggatcgccgtaccggcaaaccggttacgcaggtggaagagcgggccgtgtcgcaggaaggtgtggcggaaggagaacgactgtctgccacgcagcctttctcggtcggcatgccgcaaatcggcgtcgagccgctgacggaaaaatcgatgtggggcgtctcgtcctttgaccagttgttgtgccgcgtcagctttaaagagtcggcctatcatggcatgtacacgccgccgtcggagaagccgtatatcgagtggccaagcctgctcggcggaatgaactggggaggtatctcaattgatgagcgtagcgggctgatgtttgtcaacgatatgcgtatgccattgcgtatgtcgctggtcagaaaagaggacgttgcgaaatataaaatctccaccgacgaagtccccggttttatggggacggtgcgtccgcagatcgccgggccttacggcggcgtacgtatcgatatcctgcagtcggcgctgggcgtgccgtgtaatacgccgccgttcggcaccatgaccgccatcgatttgcacagcaaaaagctggtatggcaggtaccgatgggctcggtacaggataccgggccgctgggcatgaaaacccatatgccgatcccgctggggatgccaaccctgggcggcccgaccgccaccgcctccggactggtgttctttgccggcacgcaggattactatctgcgcgcactggattcggcaaccggtaaggaactgtggaaagcgcgtctgccggtcggcgccgtcgccgcgccgctgatttaccagtcaccgaaaaccggtaagcagtatgtggtgatttccgccgggggcagcagccattcgccggacgtgggcgattacatcattgcctacgccttgccgcagcattaa

SEQ ID NO: 443250 - DNA, 981 bp, Serratia marcescens
atgatcgaacgtatctggtccggcagttcgctgctctacctgctgttactaccgctctcctggctgtatggcctggtgagcgggcttattcggctgagctacaggctcggctggcgtaaaagctggcgcgcgccggtgccggtggtggtggtgggtaacctgaccgccggcggcaatggcaaaacgccaacggttatctggctggtcgaacagctgcagcagcgtggttaccgggttggcgtggtttcccgcggctatggcggcaaatcggcggtttatccgctggtgctgaatgcacagacgacgacccggcaggccggggatgagccggtgttgatctatcagcgcaccgcggctccggtggcggtatcgcccaagcgtacggaagcggtacaggcgctgttggcgcagcacgatcttgatatggtgattactgatgacggcctgcagcattatgcgttgcagcgcgacgttgagctggtggtgattgacggcgtgaggcgttttggcaacggctggtggctgccggccgggccgatgcgcgagcgcgccagccgtttgcagagcgttgatgcctgcattaccaacggcggggtggcgcagccgggtgagatcgccatgaagctacaggcgcgtgacgcggtaaatattgctactggcgaacggttgccggcggcgcagctgccgcaggcggttgcgatggcgggcattggccacccgccgcgtttttttgccacgctggaaaagctgggcgttaacgtcgcgcgggaagtggcgttcgccgatcatcaggactatagcccagagcagctgcaggcgctggcctcaccgggtcagacgctgttgatgacggagaaagacgcggttaaatgccgcgcctttgctcaggataactggtggtatttgccggttgacgccgtttttcccgaagaacaggccgcatcactgctgcaacgtatcgaatcccatctgaagaagtaa

SEQ ID NO: 443251 - DNA, 1473 bp, Serratia marcescens
atgatcggcagcactttcaccggaaccgtcatttttcagataaaactgaacaaaggagcgatgcgcatgactgcccagcagttcgtttcacccaatgaaatccgcagccggttctctctggcgatgtcggaaatgtatcaaaaagaggtgccgctctatggcgagctattaagtctggtagccgaaaccaaccgccaggtactgagcagcgatagcgaattggcacatcagttacaaatcaccggtgaaatagagcgcctggccatggagcgtcatggcgccatccgcgtcggcacggctgaagaactgacgacattacgccggctgttcaacgtgatgggcatgtcgcctgttggttattacgatctggcgccggcgggcgtaccggtacattccaccgcctttcgcgccgttcacgaacaggatcttcaggccagccctttccgcgtattcacctcattattacgtctggagctgattgatcagcctgaactgcgtgcgctggcgcaacgcctgctggaacgccgctatattttcaccgaccgagcgctggcgctaatcgagcaacatgaaaaccagagcggattgaccgctgagcaggcagccgaatttgttgaacaggcgctggaaaccttccgctggcacagccaggctaccgtcagcgccgccgaataccaacagctacacgatcaacaccggctgattgccgatgtggtggcctttaaagggccgcacattaaccatctgacgccgcgcacactggatattgatgcggcgcagagcaccatgccgcaacgggggatcacgcctaaagccgttatcgaaggcccgccccgtcgccgctgcccgattctgctgcggcaaaccagctttaaagcactggtggaacaggtagcttttgttgaaagcgacggtgccgccgtaatgggacaacacacggcgcgctttggcgagatagagcaacgcggcgtcgcactgacgcccgaaggccgcgctctgtatgatcgcctgctgcaggcaaccaacgatgcgctgcagaccacgccaagcgaaggcaatgcggcgcattattaccaactgttgcaggacaacttccgcgcattcccggatgactatccgacgctgcgcgagcaacgcctggcctggttccgctacttccctaccgaactcgggctggcggcgaaggaacgtctggatgacagctggacgctggagcagttaatcgctgaggattacatccgcttccagccgctggtgtatgaagattttctgccggtcagcgccgccggcattttccagtcaaatttgggagacaacgcgcaggcacattataatgccacctccagccgcagcgcttttgagcaggcgctcggcatgaaagtggtggatgaactgacgctgtaccggcaaacgcagcagcgttcactacaggcctgcgcgcaagcgctggggcttggcgcgctggaggcctga

SEQ ID NO: 443252 - DNA, 222 bp, Serratia marcescens
atgtttaaaaatacaatgttaaaaatgggccgtgtaaaatggtatgaccaagccgcaggctacggtgtgattttaccggttgacggcagcgatgaaatttatgtgaaccgtcgcgctatcgccaatacgaaaaacaagtcattaaatgaaggtcagaacgttgagttctcgatctgtcgcagctcacacgggctgtccgccgcggacgttatcgcgttctaa

SEQ ID NO: 443253 - DNA, 1227 bp, Serratia marcescens
atgtccgttccggttatttcactggccgcagcccgtgcgctgcatctggccgctcaggggttgttgacgccggcgaaacgcaaagccgggccagaagatgtggtcgccgccattcaacgcatggggctactgcaaattgataccatcagcgttgttgcccgcagcccttatctggtgttattcagccggctgggggattatgcgccacagtggctggagcaggcgctggccggccgacagctctttgagtactgggcgcatgaagcctgttttctgccgattgaagacttcgccctattgcgtcatcgcatgctgaacccgcaggggatgggatggaagtattcgcaggagtgggtggaaaagcatcagggtgcgattaacgatatattgagccatatcgctgcaaacgggccgcagcgctcggcggattttaacgcgcagaagaagggcggtaacggttggtgggagtggaaaccggagaagcgtcaccttgaaacgttgtttaccgccggcaagctgatggtggccgagcgacgtaattttcaccgggtttatgatttgaccgaacgcctgttgccggactgggatgatgccagacaggcattgtccgaagaagaggcgcgccgggttatgttggcacgtacctgtcgctatctggggatttttaaagcggagtggctggctgactattatcgcctgaagcgcgttgcgcctaaaaaactactccagcagctgcagctgcagggcgagatcctgccgataaaggttgcacagctgtcgggcgatttttatctgcaccattcactggctgaggcgctgccgctggccgagcagaacaagctgcgctcacgggtcaccacgctgctttcgccgtttgatcccgtggtgtgggatcgccgccgggcgctggaattgtttaatttcgactatcgactggaatgctatacgccgaaaggaaagcggcagtatggctactttacgttaccggtgctcaatcgcggcgaactgattgggcgcatcgatgcgaaaatgcatcggcgaaccggggaatttgaggtgatcagtttccatctggagcccggtgttcgtatgggcaagcagcgctgtcaggatctgtttcaggctattagccgtatggcgaagtggcacggcgctgggcgagtcagactgagggcggtaccgggagcattgcgtgagcagtatggcgaaatttggcaagtgggataa

SEQ ID NO: 443254 - DNA, 774 bp, Serratia marcescens
atgctgttcaacctgaaaaagtttattggcggcatcatgatgccgctgcccgccctgctgttactgatggcgctggcgctgttgctgctgtggttcacccgctggcagaaaagcgggaaagtaattctcagcctgagctggctgtttttactgcttttcagcctgcagccggtcgccgatcggctgctgcggccgattgaatccacctacgccacctatcgcggtcatgacccggtcaattatatcgtggttttaggcgggggttacactttcaatccggactgggcgcccagctcaaacctgatcggcaacagcctgccgcgggttaccgaaggcgtacggcagtatcttgcacatcccggcgcgaaaatggtgtttaccggcgcgcgcggcgccaataccttgagcaatgcggaaaccgcagcgcgggtggcggaaagcctgggcgtgccgcgccgcgatatcgtggtgctggatcgcccggtggataccgagcaagaggcggcgcaggtcgccaaactgattggccggcagccgtttctgctggtgacctctgccaaccatctgccgcgcgccatgcgctttttcgaggcgcaggggctgcggccaattccggcgccggccaaccaactggccatcacttcaccgctgaatatctgggatcgggtactgccttccgccatgttcctcagccatagcgaacgcgcctggtacgaaaccctgggcagtttgtggcagcgtttaaagggaaatggcgagaagattgaagaataa

SEQ ID NO: 443255 - DNA, 1812 bp, Serratia marcescens
atgttgcttaaagaaagtaacagggtacgacgtttggcgctgagctgcgctatcgcatgtagttttgccgcgtcactacccgcatgggcaactacgcccggattgtccgcgggttcctccgccacgacagtggcgcaaagccgtgcagagctgatgtcggcgctgccgcgcggcgttacgccgcactaccttgccgcgctggccccgctgtatgcggccaaccagatgcagccgatgtggcaggatcgtgaaacggtgcagcagttccagcagcagctggccgagctggcgatttccggtattcagccgcagtttaatcaatgggtgaaacagctgaccgacccggcgattagcgacatggggcgtgacattgtgttgtcggatgcgatgcttggctatttgcagtttgtctcttccatcagcgccaacggcaatcaatggctgtacagcaatattccttataaactggccacgccgccggcaaccgtgattaaccagtggcagctggcggtgcgccagagcaaaacgctgccttatattgaatcgctggcgccgcagcatccgcaatacgcgaagatgcatcaggcgctgcgtgacctgctgaccgacagccgtccttggccgcatctggccagcggcccgacgctgcgtccggggcaaatcagcagcgacatccccgcgctgcgtgaaattctgcagcgcaccggcatgttgtccgcaagcgctggcaacatgccgcagagtcaggagccggcaatggtgaatagcaccgcgccggtggtggatgatgaccagtcggttgatgaagaaaagctgcgcgagaaccgtgctgcggtggtgagtccatcatcggcgtcggtgacctcggatgaaggcggcatgctgcagtccgccgccagcggcgacagcctgtacagcgacgagctggttgaaggcgtcaaacgcttccagaaatggcaggggctgagtgcggatggtctgatcggggtgcgcacgcgtgaatggctgaacgtgtcgccgcaaacccgtgccgcattgctggcgctgaatattcagcgtttgcgtattctgccggggcgggtgaacaacggtattatggtgaatattcccaactactcgctggtttattatcgtgatgggagtgaagtgctttcgtcgcgggtaatcgtcggccgtccaagtcgtaaaacgccattgatgagcagcgcgctgaataacgtggtggttaacccgccgtggaatgtgccgacgacgctggtgcgtgaagatattgtgccgaaggcgatgcgtgatattaattacttccagaaacacggctatacgctgttgtccggctggagcaatgatgcgcaggtgattgatccgtcaacgattgactggagttcgatctccgcccgcaatttcccgtatcgtattcgtcaggcgccgggtgccactaactcgctgggccgttttaaatttaatatgccaagttcggatgctatttatctgcatgacacgccgaatcacagcctgtttaaaaaagatattcgtgcgctcagttccggctgcgtacgggtaaataaagcctcggtgttagctaatatgttgttgcaggatgccggttggaacgatagccgtgtttcttccaccctgaagcagggcaataccactttcgttaatgtacgtgggcgtattccggttaaattgtattatttaacggcgtgggttgccgatgacggacagccacaattccgtacagatatttacaattacgataatactgtgcgatcgagcgcacaaattttgtcccaggcagaaaaattgctgtaa

SEQ ID NO: 443256 - DNA, 648 bp, Serratia marcescens
atgaaataccaaattatccctgtcacggcgtttagccaaaattgtacgctgatctggtgtgagcatacggggcaggccgcgctggtggatcccggcggcgaagcggaaaagctgaaggcggcggtgcgggatgccggcgtgcagctgacgaagattttattgacgcacggacatctcgatcatgtcggtgcggcggcggagctggcggaacattatcaggtgccgattatcgggccggataaagaggatgcgttctggctcgacggcttgccggcgcaaagccggatgttcgggctggaagagtgcgcgccgttaacgccgacccagtggctggccgaaggcgacagcgtgcagctgggcgatatgacgctggatgtgctgcactgcccgggacatacgccggggcacattgtgtttatcaatgataaggcgcggctggcgttggtcggcgacgtattattcaacggtggcgtggggcgcagcgatttcccacgcggcgaccatcaggcgctgattgcctctatccgcaataaactgttgccgctgggggatgatatggactttattccggggcatgggccgatgtcgaccttcggccacgaacggcagaccaatccgtttttgcgtgagcagccagaggcgtggtaa

SEQ ID NO: 443257 - DNA, 1701 bp, Serratia marcescens
atgaaagttaaatatcttatttatttttttacttttctattaaccgcctcgttcaccatttcaatttgcgatgagtggtcagaggccaaagagcaatataatgacagcgcctggaacctgagtaagactcagcactcagaagacgtttccggagcatttcaaaatagtctgcggctgcataggataaaacgcctgagtctggttaacccggcgctggaacctgcgctctggcaggaaaccgaacggcaaacgcgtaacaaaatccagcagatacgccgctatgccgactctgacgcccgacaacaattaacaacccagcaaaaaatcgacatccgctcaatgctgaatctgctggaaaaaatgttgaataacgacacgcagcaattagcgccgatgaataatcaaattcgtaatttattcaatatcaacagcgcttattacattactcagtccagcatggattattacagctatacctatgaaagccgcatcctgaatgccgatgcttttttattccttgagtccatacgcctgaacaaccagcttaatatcaccctgaccgagatcatcgatcaacttgttgatatcaaactcaacggactgaatgacaaagaatcctacctgaaaaccatccagctgaccggcgtactgaacgtgctgagttcacgcctgctgtttatggaaatggtctatagcgacccgcaggtcagccgtattatcaaccaactgctggaaaatctttctccacagcagaccaacggcctggccggcgagctctatgcgtcgatggcccatggcaaagagctcgatgccacacgcatttacgcctacgtcaaagagctggaccggctgtctcagcagttcttccagcgcagctttgatctggaaatcgagaaatgccgcaaaaaaatgtatcagagccagacggcaattaacggcctgatcgcctttgccgggctgctcgccctgtttctgctgatgccgaccctgattttctgttccaacatcagccgctggctgactaaaacgcaaggcaatatccagcatctttcgcaaggcaacatggcgattgatgcgccggaagtgttttacagccaggagctgatcgccatcactgatgccatcaatcagctcaagcaatatcatttggaaaaggtgcgtctggagcaggagaaacacgcgctgattaaagagctggagtcctcctcctatctcgacccgctcactaacatttacaaccgtcgccgcttctttcgtgaagccgaacagctgcccgccgccggctatccgctggccttttgcctgatcgacatcgataacttcaaagcccttaacgacacctacggccacaacatcggtgacctggcgctggtggcttttgccgatctgatgcgccacgccttccgcgccgaagatatcttctgtcgctacggcggtgaggagttcgccatcctgctgcaccattgtgcgctgccggacgccagagcggtgctggagaagctgcgccataaggttcagcggctgcggctgccggtgcccgacgggcagcccgtccgctttaccatcagctgcggcatcgccgcagtcgcgtccccgcatcaactgcaaagcgcaataaaactggccgatgaggcgctctacttttgtaagaaaaacagcaaggatcgagtggcgatcaacaccggttcgggctgccggtaa

SEQ ID NO: 443258 - DNA, 774 bp, Serratia marcescens
atgacgacgccaacccgaattcctcaggggactcccgtcaccctggagtccatcgctaaacgttacggcaaccgcacggtgctggataatctgcagctgcgcattagcgccggccagttcgtcgccgtggtcggccgcagcggctgcggtaaaagtaccctgctgcgtctgctggccgggctggaaaacgccagcagcggcgcattgctcagcggcagcgcgccgttaagcagcgttaaagaggatacccggctgatgtttcaggatgcacgtctgctgccgtggaaaaaggtcattgataacgtcggcctcggtctgcgcggcgactggcgcaatgcggcgctgcaggcgctgacggcggtcggcctggcggaacgggccgacgagtggccggcggcgctctctggcggccagaaacagcgggtcgccctggcccgtgcgctgatccaccgaccgcgtctgctgctgctggacgagccgctgggcgcgctggatgcactgacgcgtatcgacatgcaggggctgattgaaaatctgtggcaacagcatggctttacggtgttgctggtcacccacgacgtcagcgaggccattgccctggcggaccgcgtgatcctgattgagcaagggcgtatcggcctggatatggcgatcgatctgccgcgaccgcgccgcaaaggctcggccaggctggccgaattggaggcacagattcttgaacgggtgctgtcgccggcaaccgctgcggaaccggcgcgccgggcagcgaactga

SEQ ID NO: 443259 - DNA, 975 bp, Serratia marcescens
atgatgacgcgattttcttcctggcgccgctggctgcacaccacgtcgctgacggccattctggcgctgggcgttggtgcccacagcgccatggccgatcccggcccccagcagctgcgcatcggttaccaaaaaggttccgtcagtctggtgctggcaaaaagccaccgtctgctggagcagcgtttcccggataccaaaatcagctggaccgaattccccgccgggccgcaaatgctggaggcgttgaacgtcggcagtattgatgtcggcagcaccggcgatattccgccgatctttgcgcaggccgccggcgccgatctgctgtacgtcggcgtcgagccgcccaagcctaaggcggaagtgattctggtgccggaaaacagtccgatccatgacgtcgccgagctgaaagggcataaagtcgcctttcagaaaggctccagttcgcacaacctgctgctgcgcgccctgcagcaggccggcctgaaatttacggatattcagccggtatacctgaccccggcagacgcccgcgccgccttccagcagggtaacgtcgacgcttgggcgatttgggatccctactactctgcggcgctgctgcagggcggcgtgcgggtgctcaccgacggcagcaagctcaaccagaccggctcgttttatctggccgcccggccgtataccgaagccaacggcccgtttattcagcaggtgctgaaggtgctgacgcaggctgacgcgctgtcccgcagcgatcgcgaacagagtatcaccctgctggccaagaccatcggcctaccgcagccggtgatcgccgcctacctggatcatcggccggtgaccaccattacgccgctcaatgctgacaccatcaaagcccagcagcaaactgccgatctgttctatgccaaccgtctggtgccggtaaagctggatatttcacagcgcgtctggcaccccagcgcccaataa

SEQ ID NO: 443260 - DNA, 573 bp, Serratia marcescens
atgcacgttataaccctggccggcagcccgcgcctcccctcccgttctgcggggttactgaatattggccaacagtggctgcagcgccgcggcgttgaagtgacgccctacaccctgcatgacttcgacgcggaagacttgctgcgcgccaacttcaacagcccgacgattaaaacttttgccgcccgcctggcgcaggccgacgggctgctgatcgccaccccggtgtataaggcatcgttttccggtgcgttgaaaaccctgctggacctgctgcccgaacgcgcgctggaacataaagtggtgctgccgctggccaccggcggctctatcagccacatgctggcggtggattatgccttaaagccggtgttatcggcgttaaaagcccaggaggtattgcacggcgtgttcgccgatgacggccaactgacgtcacagggcgagcggttaacgctcagcgatgcggtggcgctgcggctggaagaggcgctggacaacttctatctggcattgaaccgtcgccagcctgcgccttctcccgcgccagagctgctgccggcgcaatcctga

SEQ ID NO: 443261 - DNA, 1104 bp, Serratia marcescens
gtgatcacgctttctcggctttacgtccatccggtgaaatctttacgcggtttacagctctcccacgcccaggtggcgaaccacgggctggcgttcgatcgcagctttatgatcaccagccccgacggaacctttatcaccgcgcggcaatatccgcagatggtgctgttcacgccggcgctgctggcggacggcctgtatctgacggcacccgacggcgacagcgcgacgattcgctttgacgactttgccgccgagcagcagccgaccgaagtgtggggcaaccatttcaccgcccgggtggcgccggcggccatcaaccagtggctgagcggctatttccagcgagacgtacagctgcgctggctcgggccggaactgacccggcgcgtcaaaaaacacccggaggtgtcgctgtcttttgccgacggctatccgttcctgctgattaatgaagcctcattccgcgatctgcagcagcgttgccctgccggcatcaagctggagcagttccgtccgaatctggtagtgagcggtgcagcgccctgggccgaagacggctggcaagtgatccgcgtgggcgaggtgatgttcgatctggttaaaccatgcagccgctgcgtgctgacgaccgtcagtaccgaacgcggacgcaagcacccgagcggcgagccgctgacaacgctgcagggcttccgcacggcggataacggcgatgtggatttcggtcagaatatgattgcccgcaacagcggtattatccgcgttggcgacgcggtagaggtcttgtcgaataaaccaccgcgtccttaccacgccggcaaggtggccgaaaaggtgcaggcaccgcagaaccaggcgcaaagcctcaccatcgactatcagggtcaggtgtttagcggcaacaatcagcagattttactggagcagttggaacagcaaggcatccgcgttccctactcctgccgggcggggatctgcggaacctgccaaatgacgctggtcaaaggcgaagtggcaccgctgacgaaaagcgcgctggcgaatgacggcacgattctgtcctgcagctgtatacccaaaagcgatctgacgttaagttag

SEQ ID NO: 443262 - DNA, 1647 bp, Serratia marcescens
gtgacggaaagtaatcatagcatcgcggatgttgaaaagattaagcgctggtcgccggtgtggattattccgatcgtcaccgcgctgatcggcgcctggatcctgttttaccatttcagccatcaggggccggtggtgaccttatataccacgacggcggaagggctggaggcgggtaaaaccaaaatcaaaagccgcagcgtagatgtcggcaccgtcgagagcgtgacgctgagcgacgacctgaataaggtgctggtgaaggcgcggctcaacgccggcatgaataaactgctgcgtcaggattccgccttttgggtggtgaagccgcaaatcggccgtgagggggtcaccggtctcggcaccttgctctccggcgcctatattgagctgcagcctggcagcaagggcgatgcgggtaaagacgagtatcaattactggatgcgccgccgctggcctctccggatgccaaagggctgcgtattgtgctcgacagcgataagtccggccagctgaacgccggcgatccggtactgttccgcggctatcgcgtcggctcggtggaaaccagctacttcgacccgaaaattcgcgccatgcgttaccagctgtttgtttccgcgccttacgatcagttggtgaccaccaatgtccgcttctggaaagacagcggggtgacgttcgacatgtcggcgcagggcatgcgggttgagatgggatcgctgactacgctgttcagtggcggcgtcagctttgacgtaccgcagggctgggagcgcggcgcgaaggcgaaagagaaatccgtgtacgagctgtacgagaaccagcgcagtatccaggattcgctgtataccgtgcataaagattacctgatgttcttctctgattcggtacgtggtttgcagcctggcgcgccggttgagttccgcggcatccgcctggggaccgttgctcaggtgccgttctataaagaaggcctggagcagagtctgaacaacgattatcgtattccggtgctgatccgcatcgagccggatcgcttccagaaacagctgggtaaagacttcgatatggagcagcatctgaaggacgccgagtcccgcggtttgcgtgcgtcgctgaagtccgccaacctgctgaccggttcgctgtatatcgatctggacttctacccgcagcaaaaagagtggaaagggccgcatacaatgttcggttatccgctgttgccgaccaccagcggtggcctggcgcaaattcagcagaagctgatgcagacgctggacaagatcaatgcgatgccgctgaacccgatgatcaacgaagcgaccaaaacgctggcggaaagccaacgcaccatgcgtgaaacgcaggaaaccatgaagtcgctgaacgagattatgtccagcaaggcgatgaaagatctgccgcaggatatgcagaaaacgctgcaggaactgaaccgcagtatgaaaggcttccagccgggttctcctgcctacaataaaatggtgggcgacatgcagcgtctggatcaggtattgcgcgaactgcagccggtgctgcgcaccctgaatgacaagagcaatgcattggtgtttgaagccaagagcagcgacgatcctcagccgaagaaggccaaacaatga

SEQ ID NO: 443263 - DNA, 561 bp, Serratia marcescens
atgatgaaatggattccggtaactctggcgctgttgctcagcgcctgtagcagtacgccacagaaaacctactatcagctgccggcgatgagcgcgccggcgcagcagggaagcgtcgcctcggcgtcgcgccagctgtggcttgagcacgtcggcgtggcggattatctggcgcagaacggcgtggtgtatcagaccaatgacgtgcagtacgtgattggtcagaacaacctgtgggccagcccgctggatcagcagctgcagcagtcattggtcactaacctgagcaatgcgctgccgggctggctggtttcctcgcagccgatgagcagcgatcaggatgtactgaacgtgacgatcaccggttttcacggtcgctatgacggtaaagcgattattcgcggcgaatgggtgctgaaccgccacggacagatgatcaagcggccgtttagtctggcgctgacgcagagcgaagatggctatgatgcgttagttcgtacgctggccaccggctggcagcaggaagcgcagaccattgccgcccagcttggtcgtttttga

SEQ ID NO: 443264 - DNA, 468 bp, Serratia marcescens
atggcgattaaatcaattcgttttcgcgcggaagtactcgagagtccattgaccgtccccgaattgggcggcggtttgttgccttttgcggcgccgccgcatgtttctggcccggccgacgtagagattatgatggcgaaggtgtctgactcgatattcagtgcggccggcagcagcgctgcggctatccaggggcagatcgtgttcagccaggcatgtaagacgatggtaggctactttagcggggcgcgggcggtggcggatgatacgctatttgccacgtcgcatccggatatcggcatccgactctcttgtatcggcaggtccatctttccggaacaggggcagaacttcccgctggttggcgatatgctggtgtttgaggcgatgctggtctcattaaatgaccaggtcaggccggggatgattgaggcgcggattgagtttcactacggcagcgattggtag

SEQ ID NO: 443265 - DNA, 1581 bp, Serratia marcescens
atgctgcttaaggcgcaggaaaaccgtgaatatctggcattaattgcgagtgcggtcacacagcgccagccacagcagccaagctgccccggcagccattacaccgtgcacaacggtcaggttcaggtagagccggccagccagggcgatgagccgtttgccgccggcggcgcctgcattttccaggaatgggttgagcctgaacagttgttcggctgcgcgcgtctgcagcaaggcaacattaccctggcgcctgggttgatacaccgcgccaacggcggcgtactgatcctctccgcgcgtaccctgctggcacagcccctgatgtggctgcgtctgaagcagatgatcggccaacgccaattccaatggttctccccggatgaaacgcgtccgctgccggtcactattcctccgatgccgttggagatgcgtcttattgtggtgggggaccgccttgggctggccgacttccatgatatggagccggaaatcagcgagctggcgatgtacggcgaatatgaagaagagctgcagcttgccgacgatgaagatatgacgctgtggtgcggctatgtgaatactctggcggccgaacggcagttgccggcgctggccgccgacgtttggccccctctgctgactcaggcgatacgctacagcggcgattgcgccagcctgccgctctcaccgacctggctaggccagcagctgtctgaagcgtcgctctatgccgaagaaggcctgattaccgccaaagcactcaatgccgccctgaccacccgccaatggcgcgaaagctacctggccgaacgcatgcaggatgatatcgagctaggccagatcctgatccaaaccgaaggcgaagcgatcggccagattaatggcctgtcggtgctggattatcccggacatcccggcagtttcggcgaaccctcgcgtattagctgtgtggttcacctcggcgacggtgaattcaccgacgtcgagcgcaaggcggagctgggcggtaacctgcatgccaagggcatgatgattatgcaggcatttttgatttccgagctggaattggatcaacagttgccgttttccgcttctatggtgtttgagcaatcgtacggtgaagtcgacggcgacagcgctacgctggccgaactgtgcgtactgatcagcgccctgtcgcagcagccgattaaccaacaaattgccgtcaccggctccgtcgaccagtttggtaacgtccagcctatcggcggcgtcaacgaaaaaatcgaaggtttcttcgacgtctgtcaacgtcgcggtctgacgggcaagcaaggcgttattttgccagcggccaacgtccgtcatctgtgtctgcgtcaggatgtggtcgatgcggtgcgcgaagaacaattccacctgtgggcggtggacagcgtagcggaaaccttgccattattaacgggttgcctctataccgatgaacagcagccaaatttactggcggcgattcaggaacggatagcgcaggtgaacccgcaggaacggcaacgtccatggtgtttacgctggctcaactggtttaaccacggctga

SEQ ID NO: 443266 - DNA, 1071 bp, Serratia marcescens
atgaaaaagacagctatcgcattagcagtggcactggccggtttcgctaccgtagcgcaagccgccccaaaagataacacctggtacaccggtgctaaactgggctggtcccagtatcatgacgtaggcttctacggcaatggcttcaccggtgccggtaacggcccaacccacgaaaaccaactgggtgctggtgcgttcctgggttaccaggcgaaccaatacctgggcttcgagctgggctatgactggctgggccgtatgccttacaaaggcagcgtgaacaacggtgctttcaaggcacagggcgttcagctggcagctaaactgagctacccaatcgctgacgatctggacatctacacccgtctgggtggtatggtatggcgtgcagattccaaagctaactttggccagagcggccgccgcgttagcgatcacgacaccggcgtttctccgctggctgcgattggtgttgaatacgcactgaccaaaaactgggctacccgcctggattatcagttcgttagcaacatcggcgacgcaggcaccgtgggcgcacgtccagacaacaccatgctgagcctgggcgtttcttaccgtttcggtcaggacgaagcagcaccagcaccagcgccagctccagctccagttgttgaaaccaagcgtttcactctgaagtctgacgttctgttcaacttcggtaaagcaactctgaaaccagaaggccagcaggctctggatcagctgtacagccagctgagctctatggatcctaaagacggttccgtagttgttctgggctacactgacccagttggtaaagatgcatccaaccagcgtctgtctgaaaaccgcgctcgcagcgtagttgactacctggtttctaaaggcatccctgcagacaaaatctctgcacgtggcatgggcgaagctaaccaagttaccgatagctgcggttacaaaaacggccgtgctaccaaagcacagatcgagtgcctggcaccgaaccgccgtgtagaaatcgaagttaaaggcgttaaagacgttgtaactcagccacaggcttaa

SEQ ID NO: 443267 - DNA, 513 bp, Serratia marcescens
atgcgtactcaatcacttcacaaagcccatcgcagccataacgcgtttaccctgaatggtgcgccggatgcctctgcgggcagcgccaacgaaaatggcctgatcggtgaatttgtttacaacgagcatcagcccgcggtcactcagcttctattattgccgctgttgcagcagttagccacccagtcgcgctggctgctatggctgacgccgcagcagaaactcagcaagctgtggctacagcgctctggcctgcctgcagataaagtcgtacaattaagccagatcagcccggttaacacggtcgatgcgatggaaaaagcgttgctgacggggaactacagcgccgtgctcggttggcttcctgagctaagcgctgaagatcgtctaaaattacagcgagcggctgaacagggtcatgcatacggctttattatgcgtcctcagcgtgacactatcccggctcagggacagtttccgaccctaaaaattcactcttctttgtatcattaa

SEQ ID NO: 443268 - DNA, 606 bp, Serratia marcescens
atgcatggaagaaccatagcaagagtcgcacaggcgaaagcctgttttgacgcattgggcaatattactacccgctcgcagtttggcggctatggattactggctgacggcgtcatgttcgccgtcgttgccgacggcgagatgtatttgcgcgccacaaaaagcctggagcccgagtttcgctcgcgcggcatggtcaatatggtgtactcaaagcgcggcgtgccgatcattatgcgctattactgggtcgaccatcagctgtggggggagccgcaggcgctgtttgcgctcgcctggcaggcgaaacgcgaggcgagcaaagagctacagagccgcagtcgcggcagcaggcgcctgaagggcttgccgaatattgatgccggcctggagcgtttgctgtggcgggtggggatacgcgacgtctatgatttacgtttgcagggggccagaggatcgtttctgaagctgatgctgcagcaaaagaacctggggctgaaggcgctgctgtcgttggccggcgcgattgccggttatcatcacgctgcgttgcctgaagagattcgcggagaactgagcgagtggttcaataaagaagtgtcgtaa

SEQ ID NO: 443269 - DNA, 2136 bp, Serratia marcescens
gtgcttgcttttgcaccggcgctgcgtcgttatgcctacaacagcagtctgctttacaacctgcgtatttttatcgctctggtcggcactaccgccgttccctggtggctgggcgttcccaagctcaccattcctctgacgctgggagtggtcgccgccgccctcgccgatctggatgaccggctcgccggcaggttgcgtaatctgctgattacgctggtctgcttttttatcgcctccgcgtcgatcgaactgttgttcccctacccttggctgtttattctgggcctggcgctgtctacctgcggttttattctgctgggcgcgctggggcaacgctatgccaccatcgcgttcggcgccctgttgatcgcggtgtacgccatgctcggcacctcgatgtacgacatctggtaccagcaacctattctgctgattgtcggtgcggtctggtataacctgctgacgctggtaggccacctgctgtttcctatccgtccgctgcaggagaacctggcgcgctgctatcagcaactggccaactacctggacgccaaggccaacctgttcgacccggacgccgagaaagacgccgacctgccgtggatggacgtcgccatggccaacagcagcctggtcagcacgctgaatcagaccaagatgtcgctgttgacgcgcctgaaaggcgatcgcggtcagcgcggcacccgccgcacgctgcattactattttgtcgcgcaggacatccatgagcgcgccagttcatcgcacgttcagtaccaggcattgagcaaacagttccgccacagcgatattctgttccgcttccagcggctgctcagtaaacaggcccgcgcctgccagcaactggcgcaatcgattctgctgcggcagaaataccagcataacagccgctttgagccggcgtttacccgtattgaagaagccctgtcgcgcatcgccgtcaatgcggataaccgcgaactgaccaaggcgctgtctcacctgctgaaaaatctgcgggcgattgacgcccaactggcaaatattgaatcggaacaggcgctggccaacggccaggaggaagagaacagcctgtcggacgaccgactgaccggctggagcgatatccgcctgcgcatcagccgccacctgacaccgcaatcggcgctgttccgccatgccatccgcatgtcggtggtgctgtgcatcggttatgcgtttattcagttgaccggcatgcggcacggttattggatcctgcttaccagtctgtttgtctgccagcccaactataatgccacccggcggcggctggctctgcgtattatcggcaccctggcggggattctgatcggcctgccgatcctgtactttgtcccgtcgatcgaaggccaactggtgctgatcgtgatcagcggcgtgctgttcttcgccttccgcacggtgcagtatgcacacgccaccatgtttattaccttattagtgctgctgtgcttcaacctgcttggggaaggcttcgaagtcgccgccccgcgcgtttacgacacgctgttgggctgcgccatcgcctgggcggccgtgacctttatctggccggactggcgttttcgtcagttgcccgccgtcgtcagcaaaacgctgaatgccgactgccgctacctggacgcgattctggttcagtatcacgaaggtaaaaataacggtctgccttaccgcattgcccgccgcgacgcccacaacagcgatgcggaactggcgtcggtgatttccaatatgtctgcggaccccaaagccgataaagcaacgcaggaggcggccttccggctgctatgcctcaaccatacgctcctgagttatatttcggcgctgggggctcatcgtgaacggctgaccaatatcgacgtgttcaacgtgctgaacgatgccgtttgctacgtagacggtgcgttgcaacacgacgcagccgatgctcagcgcatcaacctggcactggaaaaactgtccgcgcgcatcgcgcaactgacgccagaaccagaaagcaaagagcaattggtactacagcaaataggactggttgttgaacttctgccggagctgacgtcattgaacgcgcagatcgggcaatcacaatga

SEQ ID NO: 443270 - DNA, 453 bp, Serratia marcescens
atgcgtactgtactgaatattctgaattttgtgttaggcggttttttcacgaccctggcgtggctgttcgccaccctggtcagtatcgtcttaatctttaccctgccgctgacccgctcctgctgggagatcaccaagctctcgttcctgccttacggcaatgaggcaatcagcgttaacgaactgtacccggaaaaaagcaatgcgctgctttccgccggcggttcgctgctcaatgtgttctggctgatctgctttggctggtggctgtgtctgtcgcatattaccgccggcatcgcccagtgcatcagcattatcggtatcccggtaggcatcgccaactttaaaatcgccgccattgcgctgtggccggtcggacgccgggtggtttccgtcgaaatggctcagcaggccagaagcgaaaatgcgcgtcgccaatatcaacaacgttaa

SEQ ID NO: 443271 - DNA, 2055 bp, Serratia marcescens
atggaacttaaagcgacatcgctgggaaaacacctggctcagcatccttataacagagtacgactgttgcatgccggcgttgaggtcagcggtgaaaagcatgaatatctgatcccgttcaatcaactgattgaggtccgttgtaaacgcggcattgtctggggcgaactggagtttgaactgccggacgaaaaagtggtgcgcctgcacggcaccgaatggcaggaaacgcagcgtttctaccactatatgctgcaggcctggcagcgctggagcgccgaaatgagcgagatcagcgctggcgtgctgcaacagcaggtggaaaatatccagcgaattgagcagcaggataagtggttcaagcgctcggcgctgggcaaactgcagcagcagatccgcgaagccttcggcgcgctgccgatgccggcggcacgtctggaaagttttgacaactgccgtgatgattaccgactctgccaacagtggctgcagcaggggccgcacagcgtcgccgaacgtaaccggcagtggacggagcggatgctggcggaacatgctgatttcttccaaacggtggaaacctcaccgctgaacgtctcgcaaagccgggcggtggttaatggtgaagactcggtgctggtgctggccggggccggcagcggcaaaacctccgtgctggtggcgcgcgccgggtggttgctgcgccgacaggaggccgcgccggaacaaatcctgctgttggcgttcggccggcaggcggccgaagagatgaaccagcgcatagaagaacgtctcggcgtcagcacgattcaggcgaaaacctttcacgcgctggcgctgcagattatccagcagggcagccgcaaagtccccgtcatcagcaagttggaaaccgacagcaaggcccggcgtgaattactgatcgccagctggcagcagcagtgcgcggagaaaaaagcgcaggcgaaaggctggcgccaatggctgacggatgaactggaatgggaagtgcccgaaggggatttctggcaggatcggcgtctggcgtcacgtttggcgggacgtctggagcgttggctggggctgatgcgtatgcacggcggcagccaggcggaaatgattgagcaggcggatgacgaaaaccgcgatctgttctccaaacgtatccggctgatggcgccgctgctgaaagcgtggaaaagcgcgctgaaggaggagggagcggttgatttttccggcttgattcatcaggcggtctccattctggagaaagggcgcttcgtcagtccctggaagcatattctggtggacgagtttcaggacatttcgccacagcgcgcgcaactgctggccgcactgcgtaaacaaaacacgcagacctgtctgtttgccgtcggcgacgactggcaggctatctaccgtttcagcggggcggagctcagcctgaccaccgcatttgccgataactttggcgccggggcgcagtgcgcgctggataccacctatcgcttcaacgaacgtatcggcgatatcgccaaccgctttgtgcagcagaatccgcatcagctgaaaaagccgctcaacagcttaagcaagggcaacaagaagtcggtggcaatattgccgcaggagcaactggaaaatctgttggataagctcagcggttacgctaagcctgacgagcgcattttgctgttggcgcgctaccaccatttaaagccggaggtactgcagaaggccgccacccgctggccgaagctcaatctcgactttatgaccattcatgccagtaaaggtcagcaggcggagtatgtcattatcgtcgggctgcatgacggcaacgacggcttcccggcagtggcgcgtgagtcggtgctggaagacgtgttgctgccgcagccggaagatttcccggacgcggaagagcggcggttgttgtatgtggcgctgacgcgcgccaaacatcaggtgtggctgctgcaggatcgcgagcggccgtcggtatttgtcgaacagctgcatgagctgggcgtgccgcagcagaaaaaaccgtaa

SEQ ID NO: 443272 - DNA, 459 bp, Serratia marcescens
atggaagtgactacccgcacgattgcggaacgtaaacatatcgccctggtggcgcacgatcaccgcaaacaggatttgctgcggtgggtcgaagaacataaatcggcgctggcccagcatcagctttacgccaccggcaccaccggcaacctgatccagcgcgccagcggcattccagtacagagtatgctaagcggcccgatgggcggcgaccagcaggtcggcgcgctgatctcggaaggcaagattgatatgctgattttcttctgggatccgctgaatgccgtgccgcatgaccccgatgtcaaagccctgctgcgtctggcgacggtgtggaatatcccggtggccaccaaccgcgccaccgccgatttcctgattggctcttcactgttcacgcaggctgtggacatcaccattcccgactatcagcgctatctgcaagaacgcctgaaataa

SEQ ID NO: 443273 - DNA, 555 bp, Serratia marcescens
atgaaatttggtctggtggttacgggattgctcggcgtttgcctgagcctgtcggccgtagctacgaccctgaaactctccccggatatcgaactgttggtcgttgacggcaaacagatgaccggctcgctgttaaaaggcgctgacagtctcgaattaaacggcgggcagcatcaactcctgtttaaggtcagtaaacccctgcacgcggcaacgcagccgccttcgctatacacgtcgccattgatgctggtggcattcaactcgcataacgtcagcgcggtggcgattaaactccccccgatcgacagccagcaggatggccagcgctttgagcagcagcaaaattatcaggtgttcgatcaacagggaaaggcgctgccggcaaaacgcgatattctgcgcattaccccgccgtacgccaatgagcggctggaaaaaaccgtcgccgactataaccgccagccgcacccggccgccgtcccggcctttgccagccagagcgccaatgaccaggataacttatcccccggcaagccctggcgtaccccataa

SEQ ID NO: 443274 - DNA, 414 bp, Serratia marcescens
atggacgatcgtgagattgccgaggtgttgcggcaggtgaaaagtattgcgctggtcggcgccagtgataaacccgcgcgtgcgagctatggcgtcatggcctatctgttgtcgcagggctatcaggttacgccggtaagcccgaagctgaccgggcagacgctgctggggcagcaggtttatgccagcctggatgatatcccccatcctattgatatggtcgatgtctttcgcaatgcggaagcggcctatggcgtggcgcaggaggcgatcgctatcggtgccaaggtactgtggctgcagattggcgtgattaatagccaggcggaagagctggcgcaggcggccgggcttaaggtggtgatggaccgttgcccgaaaatcgaaatcccgcgtttggggctggagcgataa

SEQ ID NO: 443275 - DNA, 279 bp, Serratia marcescens
atgacgcagatttgtagaatggcgtatgtctacggcatggtgcagggcgtgggttttcgttacaacacacaggttaaggcgacggcgttgggcctgaacggctatgcgcgcaacctggatgacggcagcgtggaagtgctggcgtgcggggaacagctgcaggttgaggcgctgatcgactggctgaagcagggcggcccacgcagcgcgcgcgttgaccgcgtgctggtggagccaagcggcgagcaggccctacaggggtttacgattcgctactga

SEQ ID NO: 443276 - DNA, 996 bp, Serratia marcescens
ttgctgaaaattaccactaccaccatttgcggcacggatattcatattctgaaaggggaatatccggtgtccaggatgctgaccgtgggccatgagccggttgggattatcgaaaaactgggcagcaacgtgaagggctaccgcgagggacagcgggcgctggccggcgctatttgcccctcgtttacctcctatccctgccaggacggctaccccgcgcaggatggctcgcatctggcgggatgcgcctgccacggttataaggccaccgccggctggcgctttggcaacgtgattgacggcacccaggcggagtacgtgctggtgccggatgccgaggcaaacctggcgccgattcctgacggcctgtccgatgagcaggtgctgatgtgtccggacgtgatgtccaccggctttaagggcgcggaaaacgccggtatcaagataggcgatgttgtggcggtgtttgctcaggggccgattggcctgtgcgcgacagcaggcgcgcgtctgcgcggcgccagcctggtgattgccgtcagcagcgcgccggagaagctggcgatggccggacggctgggagccaatgtgctgctgaattacaaacaggtcgacgtggtggatgagatcctgaaaattaccggcgggcgcggcgtggatgccagcattgagtgtctgggcacgcagcgcacctttaatcaggcgctgcgggtgctcaaaccgggcggcacgctgtccagcttgggcgtctatagtgacgatttgcaattgccggtcagcgccattgccaatgggctgggggatcacaccatccgcaccgcgctgtgccccggcggcaaagagcggatgcgccgaatgatgaacgtggtgcagcatggcggcctggacttgacgccgctgatcacccatcgtttcccgcttgatgagatcgctgacgcctaccggctgtttgcagaaaaacgcgacggcgtgattaagctggcgattagcgcctga

SEQ ID NO: 443277 - DNA, 1305 bp, Serratia marcescens
atgatctcgccccagcattttcaacagcaggcggcgcatgcggcctggagcgctgaaagtatcgctcagatggggctgaatcacccatggggggtgttcgaggccgtattcgacgcggatatgctgaaactgggccgcctgcaggcccagcatttacacctgcgctttcaagacggcacgctggttgacacggcacaggccgatccgctgccgccggcgcttgcgcttgacggcgaacgtcaggacgccgtggtagtgctggccctgccgttgctgcgcgctaatggcggcaactgcctgaagccggatgagacggcggagcgtccggtgcgctaccgccagcgctggcgtgacgtgcgtaaccaatacggcgacgacgatcgccagatcgccgtgatgcaggcagagcttaccctgcgctttgcccatcagaataacggcgattacctgacctgcccggtcacgcgtctgctgcaggacccacagggaaactgggtgattgacgaagcgtttctgccgccgctgctggcaatgcaaggcagccgctggctgatggcgcagcttgagctgttgatgacgcagttacgcgcccgtctgatccgcctgatggccatgcgtcgggagagtaacgagcgcatggcggactttgccgtggcggacgtctcgctgttctggctgctcaatgccctgaacagcgcggaaccggtgctggggcagtttcagcattttccgcaaagcgcgccggagcggctttatccggagctggcgcgtctggccggcagcctgctgactttttctctggatcatcagctcagcgccattcctgcctggcggcatgagcagttgaatgcggtgttcccgccgctgttcgcgctgctcggcgagctgctggaagccagcctgccgtcacgggtgatggcgattgcgctgacgcacgacaaacggttgcgccagtggcaggcgcgcttgcaggagccgcgtctgcatgaaggggcggattactacctttccgtgcgttcgccactgccggcggcgcagctgcaggagcagtttccgcgtcagtgcaaagtgggcagccccgattatgtgaccagcctggtgaatacctcccgtcaggggatcccgctgaaaccgctgagccatgttccggcggccatcccgctgcggctggagaaccagtacttctcgcttgatctggcacaccccgcagcgcaggagatgctggccagcggcagctgtatgttttacgtcccgggcacgctgggcgagcctgagcttgaactgtttgcggtgctgagaacatga

SEQ ID NO: 443278 - DNA, 675 bp, Serratia marcescens
atgagtgaaaaacaagagtgcgacatcgatgcgctgttgcagaacacctggctgcaggtcatcagcctgcgccatggtccgtcgtttaatgatggggacggccgcgtgctgtgggagcgctgcgtggcggacgttgagcaggtccagcaggcgctgcgggagggcggctgcgacgaggcaagccgccggcatattctctatgcccagtgcgcattgattgatgaggcggtcaaagggcgcggcgtacaggatgatgcgtgcgtgcagtggtatgacatgccgctgcaggggcattttctcggcaccatcgatgccggcgacacgctgtgtgaccggatgcgcgatgtgctgcgtgagccggcgcctgacagcgcggtgctgacctgtttccaccgggtgatgctgctggggttcctgggcggataccgttcattgaacgatcccgagcgggagaagctgctgcaggcattgcacgaccgtgttccgccgtttggctatccgcagacgacgccggtgttggccggggttaaaggcggtcgcgggatgagcggctggtttaccgcctggccggtgcgcatcggctgcgcgctgctggcgctggccgcgctgtggtgggggcttgatcgctggctggatacgctgttggtcacgctgctgccgggagcggtgcaatga

SEQ ID NO: 443279 - DNA, 1719 bp, Serratia marcescens
atgagttccgcgctacggcgggggctggcgctgtggtgcgtactgctgaccgcgagcgtgagcctggtttttttacccgtctcctggccggtcgcactcctgctgacgctgctggtcgggggcgcgctgatggcgacgctctggctgacgcgtcgccatccggagcaggagatcgccgcctcgctggaaaatttgcctgaggcgagctggaaacggccggtggtgctggtgtgcggcgatttgtcccggcaatggccggcagcatcagcggtgctgacgatggcggaaggctgctggatccggattgagtcgcatcaggagctgctgcggaccgcccgccagctgctgcagatgcggccggcctgggggcgtcagcttgcggtgatggtcaccctgtgtccgcagagacataacgatacggaacgcttgaccagccatttgctggcgctgcgctggcagataagccaactgcgcagaaagagccgccatgccataccgctggtgctgcatgctcaggctggctgcgccatgtcgcccgagccgctctggcaggcggccatggcgggtgaacccgtctgcgtatggcgggaatcggcggcgcccgtttcggtcgccacctggatgaacagcggcggtgagagggcggcgcggcagcagattgtactcaacggactgatggcatggtttgaacagtctgtgacggcgctgtttacccatgaaaacccggacgcgcccgccgttgcgccgacggctgtcttatgggggctggggccgtcagttgacggtgcgctgccggcatcgctgtggcgcgagtggttacgccgccataccgcgctgagtcaggttgacggctggcagccagcggcagccacggatccggcgcgaatgccgctgcccgattttattttgcctttactgcctgcaggagacggattaacgccgcgccagcgggcagggcgcagcggactggcgatgtttaccctggcggtggccgtcgcgctgtgcggcagcgcctggaataacgcgcagctgctaaagcgcctggcttttgatatccgccactatcaccgcatcgccatggaggattacgggccgaaggcggaggcggtaaccaggctgcgtctgaacgccttactgctggacgactatgcgcgcaacggcgaaccgcagcgtttggggctggggttgtatcgcggcgaacgcctgcgaacgccgctgctggacgcgattcggtcgtatgttccgccaccggcgccgccgccagacgttaagcccgaggcgccggcgccgaaaattgtccgcctcgacagcatgtcgctgtttgactccggcaaggcggagctgaaagccggttcgaccaaaatgctggtcaactcgctggtggacatcaaggccaaaccgggctggctgattgtggtcagcggccataccgacaacaccggcaaggcaacgctgaaccagcggctgtcgctgcagcgcgccgaggcggtgcgcaactggatgcgtgataccggcgatgtgccggaaagctgttttgcggtgcagggctatggcgcaagccgtcctgtcgccgacaacgatacgtcgcaaggccgtgcgcttaaccgacgtgtcgaaatcagtctggtgccgcaggcggacgcctgccggctgccggacgcaaccccgccgtcatcattggaaggtgacggcgttgataacaacgagtggagaaaatga

SEQ ID NO: 443280 - DNA, 2640 bp, Serratia marcescens
atggaaaattcagccgtcctgttacgtcgtcttaacccttattgcgcccgcgccctggaaggggcggcgtcgctgtgccagacccgcgcgcatgcgcagatccagccggaacactggctgttgaagctgctggagcagggcgagggtgacctgacggtgctggcgcggcgttacgaatggaatatggatgagatctggcaggcgctgctgaactggctcgatggcctgccgcgctcggtgcgtgggcggccggaactggcggacagtttgctgacgctgttgcaggaggcctggttgctggcctcgctggccggcgagacgcagatccgcagcgttcacctgctgacggcgctggtaggcaagcccgcgctggcgcgctgcgacggcctgtggccgctgctgacgctggggcagagccagctggagcgcctgcgcccgctgctggatgcgcagtcggaagagcgtccggaggtgcagcaggcggcggaactgacgcagacccgctccgaggtaacggagcctgcggcggacgccgacctaaaggcgggcgaactctccccggcgctacagggcgcgctggataaattcaccctcgacgtgaccgccaaagcgcgggccggcgcgatcgacccggtgttcggccgcgataccgagatccgccagatggtggacattctctcccgccggcgtaaaaacaacccgatcctggtgggcgaaccgggcgtggggaaaaccgcgctggtggaagggctggcgctgcgtattgccgagggcaacgtgccggccagcctgcagccggtcaccctgcgcacgctggatctcgggctgctgcaggccggcgccggcgtgaagggcgagtttgaacagcggctgaaaaacattatcgatgcggtgcagcagtcgccgacgccggtgctgctgtttatcgacgaggcccacaccattatcggcgccggcaatcaggccggcggcgccgatgccgccaacctgctgaagccggcgctggcgcgcggcgaactgcgcaccatcgccgccaccacctggagcgaatacaaacagtacttcgagcgcgacgcggcgctggagcgtcgtttccagatggtgaaagtggacgaaccggacgacgccgccgcctgcctgatgctgcgcggcctgaaatcccgctatgcgcagcaccacggcgtgcatattaccgatgaggcggtgcgcgccgccgtcacgctttcccgccgttatctcaccggccgccagctgccggataaggcggtggatctgttggataccgccagcgcccgggtgcgcatgagcctggacaccgtgccggaagcgatcgtccacgcacaggccgccgttaccgcgctggcgctggaagagcaggcgttgctggcggatatcgccgtcggcaacccggaagaagagggacggctgacggccatcgccgcccagaccgcagagctgaaccagcgtctggcgcagttagaaggccagtaccgacaggagcaggaactgattcagcaactgttggcgtgccgtacggacggcgcgcgtcaggggaagatcgcggctgtccagcaggcgctggcggcgcttccccacgagcaggcgctgctcacggcggatgtggacgcccgcagcgtggccaacgtgattgccgactggaccggggtgccgctctcctcattaatgaaggacgaacagaacgaactgctgagcctggaggcggaaatcggccggcgggtggtcgggcaggatacggcgctgcacgccatcgcccagcggctgcgggcgtccaaaaccggcctgaccagtgaaaacgggccgcagggcgtgtttctgctggtggggccgagcggcaccggtaaaaccgaaaccgcgctcacgctggccgactgcctgtacggcggcgagaaatcgctgatcaccatcaacctctccgaatatcaggagccgcacaccgtttcccaactgaaaggctcgccgccgggctacgtcggctacggccagggcggcattctgaccgaggcggtgcgcaaacgcccttacagcgtgttgttgctggatgaggtggaaaaggcgcaccgcgacgtgatgaacctgttctatcaggtgttcgaccgcggctttatgcgcgatggcgaggggcgcgaaatcgacttccgcaacaccgtgatcctgatgacctccaacctcggcagcgaccacattatgcagctgttggacgaacagccggacgccagcgaaggtgatttacaggaactgctgcgcccgatcttgcgcgaccacttccagccggcgctgctggcccgtttccagacggtgatttaccggccgctggcggcggaagcgatgctcaccatcgtgcagatgaagctggagcaggtcagccggcggctgcagcgccactacggccttgccacccggattggcgacggcctgtacgacgcgctgaccgccgcctgtctgctgccggataccggcgcgcgcaacgtcgacagcctgctcaaccagcagctgttgccggtgctcagccagcaactgttaagccagatggcggcgaagcagaagttgcagacgttgacgctcgactggcatgacgaggacgggattgtgctggcgtttgataacgataaggaagagtga

SEQ ID NO: 443281 - DNA, 411 bp, Serratia marcescens
atgcctggaattaccctgacgctgtctggctcaaagaatcaaacattaaccaaagaatgtgtacttttagcgactcggatcacatgcgatgttttaaacaaaaacagcttcgaaaccatggtcattgtgagacatgtcgatgatgaggactggttcattgatggtaaaagtctggctgaatggggtaaaaattcgttcaggcttgaagtgaccgtcgtggatgaaacctgcagtaaagaccagaaagcggcataccaaaaagcaatgtacaacgcgatggagcaggcaatcggtaacttacacccccagtcgaacgttcatatcatcgactgtaaagcggcttcatatgggtacacggggatcacgcaagagtatcgataccagcataaagacgaattttacaaaaaataa

SEQ ID NO: 443282 - DNA, 1317 bp, Serratia marcescens
atgggtaagaaaatgcgacgtgtcgcctatgggatcgtgtcagtggcggtactgggggcggttggctataccgcatgggtgcagtacgggctgcacaaaagctatcctcaaatggtacagatttcttcaggtcctgccctgcaggaacaaatcaaacgcggtgagtatgtttcgcgactgtcggattgtaccgcctgccatacggctgaaggggggaaaccttttgctggtggttatcggcttaatacgccgtttggcgcaattttgtcatcgaacatcacttctgatcctgaaaccggtgttggtggctggactcaggaacagtttgaccgtgcagttcgtcacggtattggctcacacgggtatttgtatgccgcaatgccatacaatgcctatgccaagctgacggaccaggatttagcggacctgtgggcgtatattaaaaccattccgccggttaaaaataaagtggtggaaaaccagttacctttcccattcaaccagcgttggacactggctggctggaatttgctgttctttaaagatcgtgtgtttgagcccaaggcaacagccagtgagcagtttaatcgcggtgcttatcttgttgatggtccggggcattgtgcatcatgccacacagccaaaaacctgttgggtggagatacttcagcctacttgcaggggggagcattacaaggttggtatgcgccggatctgaccgccaatcctcattccggccttgggaaatggagtgaagaagatatcgtgtcttatctgcgttcaggcactaacaagattacggcatcatcaggcccaatgaccgaagcgattgagaattcaacgcagtacatgacagatgatgatttgaaagccattgcgcaatatttaaaaacgctgcccgcatcagaggccccggcgccaacgccgttatccagcgacaatacagccatgatgacgggtaaaaaagtgtatgaatctcaatgcagcgcgtgccatgtctcgaacggctctggcgtgcgtaatatgattccctcactgtctggtaatcctcaggtcaattcacctgatccatcaagcctggtgaatgtggtgctcaacggtactgacgggccattaacgcatgctaatccgacggctgccggtatgcctgcattttcgcagaagctttcagacagtaatattgctgacgtcatgacctatattcgcaacagctggggcaatgcggcggcaccggtttctgcccggcaaattgagaaagcccgcttagacctgcaggccaaaccttggctgggtgagtcgatgcacggcaaaaaatag

SEQ ID NO: 443283 - DNA, 1773 bp, Serratia marcescens
atgaattacaccagacctaaggccgatgcggtcattattggcctcggatgggccggctcgcttatggctgaagagctgacccgggcaggattaaatgttgtcgcaattgaacgcggcccgtgggagcagacgcaaaccaatttctctcctgctattgcagctgatgaactgcgctacggagtacgacgtgaaatattgaagccccctcgcgttgaaacattaaccttccgtaatgacagcagccagaaagcactgccggcgcgtgactggaatgccttccagatggggtatagcgttgggggagcgggtaagcactgggccgccaatgcctggcgttttaacccttctgactttgaaatggctactcgcctgcgcgatcgctaccataatatgaaacttgccgatggtctcatcgttcaggactggggcgtgagctacgccgagctggagccattctatgaccgtgtcgaaaaaatcgcgggcatctcgggtaaagccggcgtcattaatggggtcacgcagagcggcggtaacccatttgaaggcagccgcagcagtgaataccccacaccccctctgatccgttcccactggaacgacaagtttcatcagatcactgaaaagatgggtttccatccattccctatcccggccggaaccattggcgcaccttacactaacccgttgggtgtgaatctcgccccatgtacgtattgcggctactgcggcttttacggatgcggtaactggtctaagtcttcacctaatgtgtgtgttattcctgcgcttatggaccggaccaacttcacactgctgactgaatgtaccgcgctttatatcgataaagcggaagatggcaaaacagtcaccggggtgactttccgtgattctgacggtaataccggtttccagcctgccgatattgtctgcctgtcggcatatcagttagacaacgtccgtttgttgttattgtccaaaattggtaaagcctacgaccctgtaacaggggaggggacgctaggccgcgcttacaactatcagaccatgtcgatgggttacctgtattatgaaaatgaacatatgaacccgttcatttccaccggggccttgtcaacgcagattgatgatttcaacggcgataattttgatcactccggcttaggtttccttggcggggcggggattcaggcgctgtcagatcagggaacacctttgagcatgacggatcgcctgccgccaggcagtaaaatgtggggctccgcatggaaaaaagcgttccagaagagctaccaaaactatgccaaaattcaagggcaaggcacgtcttactcgcaccgggattcctatctgtcgcttgatcccaactataaagatgagaatggccagccattactgcgtctgacctttgactacaaccagaacgacagactgatggcgcgttttattcgcgatcgcatagaggatatctgcaaagtatctggcgccacatcatgggagacggaagccttccctgataagcataattctcctttccgtgcctatgacagctcgcacaccattggtggtgcagtcatggggcttgatccggccacgtccgtacttaaccgctaccagcagcattgggatgcgcacaacctgtttgttctgggagcgtcttcttacccaaataacggcggatataacccaacgattacgctcagtgcactcacgctatggaccgctcacgccatcgttaatgactatctgaaaaatccgggttcactggtgcgataa

SEQ ID NO: 443284 - DNA, 738 bp, Serratia marcescens
atgaagcgtagaagttttattaaggcagggttaattctggctggaacaggaacggccgcctccatatttacccccgcaggtgccgcggaaagaaaaaatgttctgaatggcggtaaaatttggcgtgcgaaagagaccccattgccgacccccgcagatcctacgcagcgtttattttttaatgcgcgtgagtatgcattggttaccgctatctttgaccgactaatccccgcggatgagttaagcgtaagcgcatctcaggcagggtgtgttgtctttatcgacaatcagcttgcgggagattatggcaaagccaaatggaaatataatcagggcccatttgaaaacggtaccgagtctcagggcaaccaaagcccttattctccggcggaaatctaccgtaaaggtcttcaggaactggatacacactgtacgcgtttatttaataaatctttcaccgaactctctcatgatatgcaagatgcttatttagagaagatggagtccggtgagtttacatacccgacattcaattcggaagtattattcggacagttcctggccaatgttcaggaagggttccttgccgatcctatttatggcggcaatcgcaatatggtcgggtggagaatgattgggttcccgggggcacgttacgactatcgtgattatgcgcctttaaaaggacagaagttaaatatcgaacctatcagcatcattcaactcctgaaagcgtaa

SEQ ID NO: 443285 - DNA, 765 bp, Serratia marcescens
atgctcaaagaggtcacgcagcgcctgaacgagcgtggttatatgactctgctcttaaacatagagtcgccagaaaattatcagtctgtattgcaaatggcagggcagcttcatgttgatggtctgatctatcttgccaccatcgtgagtgatgaattgctggtggtcgctgaatcgttgcaccatattcgcgcaattcacgtctttagaaatacagacagtgcggaagtcgaagttgtcaacattgatggttttaaagcgggtcagacattaggacaggtcttgctcaaagaaggctatcaacgctttggttatatgaaggggcccgatacgtcatccaatcatttgctgagactggaaggctacgaggcatcactagcgttagaaggtaaaaaagtagacgttgttttagtcgctggacgttacgatagagacttcgcctatcgctgcatgatgaactatctcaaagaatcaacggaacatgaccgccttgatgcattgttttgcgagaacgatgtgcttgcatttggcgcgatacaggcaataagagactttgatgcagaccttcagattggcgttgtagggtttgatgatatcgatgaagcccattctagcacgtgggagctgaccagttggaatcagcgggcagaccttcaggttgccgaagcaattaatcgactgatcgatcagcagtcagatcccgatggtgaatggcaatttggtgagctgcgtttacggcgttcacatattaaaaagcagaaataa

SEQ ID NO: 443286 - DNA, 798 bp, Serratia marcescens
atgaaaaaagtgatagcggctgccgcgatatcgctggttctcgcagattttgcgcatgccgatgaaaaaagaggtgaaaccatgttgaagattaccccatcaagcctttccgtcgccgatatacacgccgtttccccggccttggcccacttcggcaatgaagttatggctgatgacctctggcagcgtaccgagctttcgccacgcgatcgcagcatcgtcaccgtcgccatgctgattgccagaaaccagcccgccgagctcaggcactatgtcggggtcgcgctcgacagcggcgtgacggcggcggaagtctcggaaattatcacccatcttgctttctattccggctggccgaatgcgatgtcggcaattgcggtgacaaaagagatcttccaggcgcgcggggtcagcgcggcgacgctgcccgaagcctctcctgcgcttttgccgctcaatcaggaggctgaacagcagcgttcagcaaccgtggaaaaaaatgtcggccccgtctcccccgggctggtcaaatttaccgccgatccgctctttctggagctgtggcagcgccctgtactcaaaccccgggaccgaagcctggtgacggtcagtgcattaatcgcatcgggccagagcgcgcaaattggttaccaccttaaccgggcaatggacaatggcctgacggctgaagaagccggtgaaatcgtcactcaggccgccttctatgccggatggccgaatgcattttctgccgcgccggttgtgggtgacgtgctgcgcggccgcgtatcgaactaa

SEQ ID NO: 443287 - DNA, 432 bp, Serratia marcescens
atgaggacggctatacgtaccctttttctcctgatgctggtttttgtagcaaatgtgaacgccggggagaagacggtgaagattcaatttaattatcacggcaagacggtgattggctcgcttgaggataacccggcgtcccgggagtttttggcgatgctgccgctcacggtcaagatggaagactatggcgcagttgaaaaagtcgcatggctgccggacaagctcaataaggcaaatacgctgccggcaatcacaccggctaccggtgatattgcgtactacatcccctggggaaatttagcgatatttcgccaggactttcgtcattcaccaggtttgataaaactcgggtgcatcgacgaagggctggcagcattacagcaatcaggctcggcagaagtccgcataacgcgggttgaaaaccagtag

SEQ ID NO: 443288 - DNA, 978 bp, Serratia marcescens
atgactcaagattttacatttacgattaagcgcagccagtttgatgaaaactataaccctgccgaaagcacgcgtatcaccaccaactttgccaacctggccagagggcaaaaccgccaggaaaacctgcgcaatacgctcacgatgatgaacaatcgcttcaataacctggcctattgggataacccgaaaagcgatcgttatgctgtcgagctggacattatttccgttgagatgcgcatagaggggagcggtgcggctttccccgtgattgaaatattgcaaacccatatcgtcgacaagaaaaccgacgaacgtattgaaggtatcgtcggcaataatttctcttcctacgtgcgtgattatgacttcagcgtgttgctgttggatcacaacaaaaacaaagcagacttcaacattccggagaattttggcgtattgcacggcaacatcttcaaatacttcgttaactcacgcgaatatcaggaaagctttaaaaaacaaccggtgatctgtttaagcatctcaaacaaagacacctatcaccggacgggcaaccagcacccggtattgggcatcgagtaccggcaggatcgctcttcgctgaccgaccaatatttcaaaaaaatgggcctgcaggtgcgctatttcatgccgccaaacagcgttgcgccgttggcattttatttctccggcgacttactgcgtgattactctgacctggagttaatcggcaccatcagcacgatggagacgttccaaaagatttaccgcccggagatttacaatgcgaactctgccgccggtctgtgctaccagcccagcctgaataatcaggaccattcgctgacgaaaattgtttatgaccgggaagaacgcagccggctggctatcgagcagggaaaatttaccgaagagcactttatcaaaccataccagaatattcttgagcaatggtctgctaactacgcgctttga

SEQ ID NO: 443289 - DNA, 1023 bp, Serratia marcescens
atgaaaacattgctcccgacttccaccgccggcagcctgcctaaaccttcctggctggcgcagcctgagacgctgtggtctccctggaagttgcaaaatgaagagttaatcacgggcaaacaggatgcgctgcgcctgtctctggacgatcagctgcgggcagggattgatattgtcagtgacggtgagcaaacgcgtcagcactttgtcaccacgtttattgaacacctgagcggcgttgattttgaacagcgtcaggtggttaaaatccgtaatcgttatgatgcgagcgtgccgaccgtggttagcgccgtggaacgccagaaacccgtgtttgttgaagacgccaaattcttacgtcagctcaccaaacagccgattaaatgggccctgcccggcccgatgacgatgatcgatacgctgtatgataaccactataaaagccgtgaaaagctggcctgggaatttgccaaaatcctcaatcaggaagccaaggagttagaagccgccggcgtcgatatcatccagtttgacgagcctgcgtttaacgttttctttgatgaggtgaacgactggggcatcgccgcgctggaaagggccattgaaggcctgaaatgtgaaacagcggtgcatatctgctacggatacggcatcaaagccaataccgattggaagaagacgctgggttccgagtggcggcagtatgaagaagcgtttcccaagctgcaaaaatccaatatcgacatcatctcgctggagtgccacaactcacacgttccgatggatctgctggaactgattcgcggcaaaaaagtgatggtcggcgccattgacgtggcgaccaacgttatcgaaacgcccgaggaagtggccgataccctgcgtaaagcgctgcagttcgtcgatgccgacaaactctatccgtcaaccaactgcggcatggcaccgctggcccgtcaggtcgccagcggcaagctgcgcgcgttaagcgccggcgcggaaatcatccgccgcgagctgtaa

SEQ ID NO: 443290 - DNA, 795 bp, Serratia marcescens
atgctacacgtgaagattttcgaaaaaaatgaaatttatggaaagaatgttgtcaacttactcagcgatctgcacgaaaaaatattctcccctcccggtaacatcacgtcagatgacatcatctcggcgtacatccaccctgccgcgaccatcagcaagattgccatttattatgatgataggatccccgttggctttatgtgcatgcagcgatacgaaatagaaatagataaaaaaaagttaaacgtttttcgcagtcaggtcgggttattgaaagattacagaaacaaaaacatcgttaaattaacctacttaagatttgtgatttcagagatgttacgcaccccaagaaaatcactcttctttgaactatgcatccacccctccagctattgttcaatactcaagaaaggttgcaacagaaataaagcatggccaacaaaggaaaatgcgcaccaaaatagaccgatgaaggatctgtgtgagacattactcaataagtttgatctggagataaaaaaagaaaatggcgtcttgattcataacgatggactagggccaacccgtgtcgaaaaaaaaccgaaaggggatataagtagtgacgctaaattttttatagagacaaaccccggctatgtcaacggcgatggactagccatcattttaagcctttcagtgaaagatattctggttaacatcttccaccagacgttgagtaaaataaatcgtaaattgattatcagaccgcctaatggtcaagaggaatcccctcaagagaaacctaatgaaatataa

SEQ ID NO: 443291 - DNA, 348 bp, Serratia marcescens
atggcttttatccccaaaaactacgcgcggctggaaagcggctaccgtgaaaaagcactcaaaatctatccatgggtatgcggacgctgctcacgggagtttgtttattcaaacctgcgtgaattaacggttcaccatatcgatcacgatcacaccaataacccggaagacggcagcaactgggagctgctgtgcctgtactgccacgatcacgaacactcgaagtacacggaagccgaccagtacggcaccaccgttgtggcgggggaagacgcgcagaaagatgtcggcgcggccacctacaacccgtttgccgagctacaggcaatgatgaacaagaagaaataa

SEQ ID NO: 443292 - DNA, 699 bp, Serratia marcescens
atgtctacgattatcgatacctttattgcccctccgtgccatgagcaggtagacatcctctatcaggacgatcacctggcgataattaataaacccgccgggctgctcagcctctccggcaaaaatccgcaaaatctcgattcggtgcatcatcggctggtacagctattccccggctgtacgctggttcaccgcctggatttcggcacctccgggctgatggtgattgcccgcaataaggcaatcaatgccgccctctgccggcagttcagccagcgcacggtaaccaaggtgtacggcgctctgctctgcgggcatctggacaacgacgaaggggtgatagacgcagcgatagccaaagacccggcgctgttcccgctgatgtcgatttgctcaacccacggcaaacccgccagatcccgctatcgggtcatcgaacgttttgaacatacggtggaagatgggcggttactgccggtgacgcgggtacagctgaccccggagagcgggcgtactcatcagttacgcattcactgccagctgctgggccacccgattctgggctgcgacctgtacggcggcctgctgccgccgggcgctgaacgaaccccgcgactgatgctgcatgccagcgaattgcgctttgttcatcccgtcagcgaagaaccgttcaacatccggcatgattgtccgttctga

SEQ ID NO: 443293 - DNA, 645 bp, Serratia marcescens
atggcctactcaagccacacctcgctctccccacacaactctagccccctctccaccaatgccgctataatccccacaaatttctcaacgggttcagaaacgaagatggcaaaactcaccttacaagagcagctgctgaaggcagggctggtgaccagcaaaaaggcggccaaggtccaacgcacggcgaaaaaatcacgggttcaggcgcgtgaggccagagaggcggtggaagagaataaaaaagcgcagctggagcgcgataagcagctcagcgagcagcaaaagcaggcggcgttagccaaagagtacaaagcgcaggtgaagcaactgattgagatgaaccgcatcgtgccggcaaagggcgatatcggctttaacttcaccgatggcagtctgattaagaaagtgtatgtggataagaccacgcaaacccagttgatcagcggccgtcttgccatcgcgcgtttggccgttgatagcaacggcgagagtgaatacgccattatccccgccagcgtcgccgataaaattgcccagcgcgatgcaaacagcattgtgttaaacagcgcgctgagtgaggaagagcaggacgaagacgatccgtatgccgactttaaagtgcctgacgatctgatgtggtaa

SEQ ID NO: 443294 - DNA, 816 bp, Serratia marcescens
atggatgcagcactacttgatatgatgcgctctggtaggaataaatattgggcggagacaatggttaaccttgaggcgagaaagttgattaacacagcgaatacgctgtctgcttttcacctcaaagatagcctgactagaataaatttcgttcaggaaataaaagaatttgttgaaaaacagtttgccgttgcacggcgagcaaaatcaaacgaaaaatacatggaatgtattaaaaacttgagggctgaaacagaaaacctgcaggagcaggacaggatgctacgcacgaaagcagcaaagctttatgccaaagtggaatttgtccgggaaaataacaagattgtcgggtatgtgatttctgctgttcaaattgtggtctccggtgccgcattgtttggcgggatgatcatgatgtcaacaatgacccctgttggaatgctggctggagcgatactttttgttgatggtgttaatggaatcacaaaggaggcgactcactttcgttacggcgaccaatctgtgtcagaggggatatttgctgacggcactatggaagttgctaagtacatgggtttcaaaccagaggcagggctggcattttacaatacagttacgttaactgctggtatctatagtatttttagtcttgcacgaaaaccccaagcttggagactattcagatggctgcctcgagattattaccgaaacgttgaaactatgagcagacaaaaactaacgatgaaagttgttggctatggtttaaaagcaaaggttatttttgaccttttgactacggagaataatggttattaa

SEQ ID NO: 443295 - DNA, 372 bp, Serratia marcescens
atgatggacaaaaaaccagacaacgccgatatcggcctgcgggtgtttgattggtacgatgcgaagtggaacctgcgcacgcctttcagtaagaagaaaccgctgacgtcagacaccagcctgtcgacgggcaagtatccctggatctgggaggatggcctggaaatcatggaagagtattttgagttgttcaatgttgacagctcagggtttaactttatgaagtattggccgcaggaaatcagcgtaacctccgctgtgattgcctggctttgcccctggggtaagaggaaaaaatatcaagagcctgaagcgcttaccattgccatgctgatggagtctgccagggcgggaaggtgggtggatgggtag

SEQ ID NO: 443296 - DNA, 633 bp, Serratia marcescens
atgatcgacatctctaccttagcgctgttttccgccgccagtctggcgctgaccgtcacccccgggccggatatgctgcttatcgcctcgcgcagcatcagccaggggcgacgcgccggcttcgcctcactggcggggattcagcttggcacctattgccacgcgctggcggcggcgctggggctgtcgcagctgtttgtcgtcatgccgctggcctatgacgcggtgcgcgtgatgggggccgcctatctgctgtatctggcgtggaaaacgctgcgttcgggcggcagtctgcaggcttccgccggtctggcgccggtggcggtcggacgcatcttccgtcaggggctgtggaccaatattcttaaccccaagatggcgctgtttgtgctggcgctgttcccgcagtttatcaacccgcaggccggctcggtggtggtgcagatgctggtgctggcgacggtgctgaatctggtggggctggcggtcaacggcggcgtgattatgctggtcagcggcatgaagaaccgtttcgcaggccgctgtatcaacgcgcgctggccgaactatctgctgagcggagtgttcgccgcgctggcgtgtaagctgctgctatccagccggcagtcgtga

SEQ ID NO: 443297 - DNA, 1053 bp, Serratia marcescens
atgtgttttgcctttaataaaaaggaagttaagcatatctgcctgattttggctatggagcgcggcggcaaaaggttgcaagctaatgcaacgattgacgcaggggtaaagaacatgcaggcagagataaaacgcggttcgttggagatggtggcagcgatgctgatttccggttcgattggctggtttgtgctgatgtccggccaaccggtgattaacgtggtgttctggcgctgcgccatcggcgcgctgatactgctgctggtgtgcggcctgctcggacagctgcgtgcgccggggctgcggcgctcgacgttactgattgccgccatcggcggcattacgctggtgctgaactggctgctgctgttcagcgcctatcgctatgcgtcgatctccatcgcgacggcggtgtataacatccagccgtttatgttggtggtgctgggggcgctgtttctgggggaaaggctgacggcgcgcaagctgctgtggctggcgctggcctttgccggcatgatgctggtggtgctggcgcagccgcagcaggcgggcgcgggcggccagtatctgtgggggattttgctggcgctgggggcggcgtttttctatgcgctgacggcgctggcggccaagcgcctgaccggtacgccgccgcagttgatcgtgttgattcaggtcagcgtcggcgcgctgatgctgctgccgctggtggacttccacgccgacgccagcgccgggcagtggagcatgctgctggcgctgggcgtggtgcacaccgggctgatgtttgtgctgttgtacggcgccatccagaagctgccgacccacctgaccggttcgctgtcgtttatctacccggttgccgccatgctggtggaccgctgggcttttgcgcaccagctgtcgctgacgcagctggccggcgcggcgctgattctgctggccgccgccgggatgaacctgctgggcgaacgtcgtcggccgcagcctgcggctgaaaaatgcggcattgcgcacggcgaaactggaaaaacgccgtcgctgaggtag

SEQ ID NO: 443298 - DNA, 438 bp, Serratia marcescens
atggatattatcgatcaccaaattctggcgttgctggcggaggacgcgcgtatgtcgctgaaaacgctgagcgccaaagtggggctgtcttcgccgagcacctcagaacggttgcggcggctggaggagagcggcgtgattcagggctacaccctgaacgtgaatctgcaggcgctgggctacagctttcattcactggtgcgcatcaagccactgccgggcatgctgaagaaggtagagcagatgattgtcgccatcccggaggtgatagagtgcgacaaggtgaccggtgaggactgctttatcgtacgactggtggcgcgttctatgggacagctcgaccagatactcgaacaattggccgagcaggcgcagaacaatacctcgattgtgaaaaccacgccggtgaagcgccgcctgccgccgctggccgtttaa

SEQ ID NO: 443299 - DNA, 654 bp, Serratia marcescens
atgcgtgatacatacaccttgctcggctgccgcggctgcggttcgaccatcgtcgccgccgcgctggagctgaccggctttccctggggctatgaagaggtggactacgcggcggacagcccggagtgcgagcgtctgctgcggctcaatccgctgggggaagtgcccaccctgattctgcccaataatgaagtgatgaccgagagcgcggcgatcgtgctgctgctgcatgcgcgcgcgccccacgcggaactggcgccggaggcgggcgcggcgacgctgccgcgttttttacgctggctgatgtttatcaacagcgcgatttacccgaccttcacctatggcgaccacccggagacctggctgccgaagacccgccacccggaacggctggaggaggcgatcgccccgcgccgcgaacagctgtggctgcagtgcgccgcggccgccagcgacgccgggccgtggtttctcggccgcaccttcagtgcgctggatttgtacatcgccgtgatgtgcaactggcggcccggccgccgctggttcctgcagcactgcccgcagctgaccgccatcgccggtcgggtggagcagttgccgctgctgaatgcgctgttccaggcgcatttcgaccatgttgcgccgctggaataa

SEQ ID NO: 443300 - DNA, 1098 bp, Serratia marcescens
atgaaacgtcatcttctcgccgttattattccggcgcttttcattgcaccttcgacttacgcagcagaaatttataataaagacggcaataaactggatctgtacggcaaagtaaaaggattacactatttttccgacgacgccgacagcgacggggataaatcttacgtccgttttggctttaaaggctcgacgcaaattaatgaccaactgaccggttacggccagtgggaataccacgtcgccgtcaaccacgccgaatctgaaggcagcaaggatactaaaacccgcctcggcttcgccggcctgaagttcggcgattacggctccgtcgactacggccgtaactacggcattatctacgacgtcggcgcctggaccgatatgctgccggagttcggcgacgatgcctatatcaagaccgacaactttatgaacggccgcaccaacggcgtcgccacctaccgtaacaacgacttcttcggtttggtggacgggctgaaattcgccgtccagtaccagggcaaaaatgagaacgacgaccgtgcggccagcaaggccaacggcgacggctggggcctgtcatccagctacgaagtaactgacggcctgagcgtcggcgccgcctacgcctcttccaaccgcaccagcgcgcagaaattgggtgattacggtaaaggcgataaagcggatatttgggcggccggcgtcaaatatgacaacaataatctttacctggcggccacctattcagaaagccgtaatatcgtgccaatttccggcaccgcgaccattaaccagagcagcacgtcggtaaaaggcttcgccaataaggcacagggctttgaagtggtggcgcaatatcaattcgacttcggcctgcgcccgtccattggctatgtccagtcgaaaggcaaagatattgaaaatatcggcgatgccgatctggtgaaatatatcgacgtcggcgcctattattatttcaataaaaacatgtccacctatgtggattataaaatcaaccagctcgacagcgacaataaactgggcctgtcagacgacgacgtggtcgccgtcggcctggtgtatcagttctaa

SEQ ID NO: 443301 - DNA, 1476 bp, Serratia marcescens
gtgataactggtgctaaaagtggctggcgagacttgttctccggcaaaaatgcagcgagtgcgactgcgttgtcattgggggtggcgctccatgcgattaacattctggtagcgaccaccattttaccgtcggtggtgcaggatatcggcgggctgaatctgtatgcctggaacaccacgctgtttgttgtggcgtcgattatcggttccaccctgtcggcgcgcctgctcagcgggtatggcgcacgtcacgcctacctgacggcatcgctgtttttcatgtttggcgcgctgctgtgcgcgctggcgccgtcgatgccggtgatgttgatcggccggacggtgcaggggtttggcggcgggatgctgtttgcgctgtcctacgcgatgatcaatctggtgtttccgccgtcattgtggccgcgcgctatggcgctgatttccgccatgtggggaattgccacgctgatcggcccggcgatcggcgggatttttgccgagctgcacgcctggcgctgggcgtttggcatgttgttgccgatcatgggggcgtatacggcgttcaccttcatgattctgcccaaaggcaaagcgcaactggcggcgacgccgctgccgctggcgcagctgggactgctggcggcgtcggtgctgatcgtttccgccggcagcctggcggacagcctgtggctcaacggcggcggtatggggttggcgctgttgctgatggtatggctgctacggcgtgaaaaacacgcccgagcccggctgttgccgcatggcgcgctgcggcgcggttcaacgcaggcgtcgctgtaccttaccgtgtcgttattggtgatcggcatgaccagcgatatttttgtcccgtattttctgcagatcctgcacgggcagtcgccgctgagttccggttatattacggcgacgatcgcggccggctggacgctgtcggagatcgtcagttccggctggcgcggcgcgggcatccgccgggcgatcgtcagcgggccgctgttggtgctgttggggttgctggggctgatgctgtttatgccgacgccttccggcggtggctgggcggcgctggcaccgctgatcgcgttgttaacgctgctggggtttggcatcggcatcggctggccgcatctgctaacgcgtatcctgcaaaccgcgccggcgtcggacaaagatattgccggcgcggcgatcaccacggtgcagctgtttgccacggcgtttggcgcggcattggccggcatgatcgccaatctggccggtctgaacgcgtcgggcggcgttgaaggcgtcagcgccgccgctcgctggctgttcctgctgtttgccattgcgccgctgacggcgatctattacgcctggcgctgtgcctatcccggtgtgacagcggacgaggccgttgccaatccggaggcggatgagtgtacggatgaaagagagccggcggccggaaaataa

SEQ ID NO: 443302 - DNA, 654 bp, Serratia marcescens
atgtcaagaataagcttggaaaatggcgagtgcaccgcacaatctgtcagcgaccgtttactgaagctattgaaaacccgcggcccgcaacaggccaccgaggccggcaaagtgctgggcaccaccggtgaagcggcgcgtcagcagttcgttaagctggctaaagaaggcctggtggaggcacgtgccgaaacccgcggcgtcggccgcccggtgcagctgtggcacctgacccccgccggcaacgcccagttcccggactcgcaccctgaactgacggtgcaactgctgcgcaccgtgcgcgacaagctcggggagcaggcgcttgacgtcctgattgaaagccgcgagcaagagacgcgcatcaactataaacaggcgatgatcggcgccgtcaccctgcaggagcgcgtcgcccgtctggcgaaggtgcgctgccacgaaggctatatggccgaatggtgcgcgctggaagacggcagctatcagctggtggaaaaccactgcccgatttgcgccgccgccagcgtatgtcaaggtttttgccgcgccgaactcagtattttccgtgaggtgctgcaggcgcaggtggagcgtatcgagcacgtcctggctggctctcgccgctgcgcctaccgtatttctgatttataa

SEQ ID NO: 443303 - DNA, 495 bp, Serratia marcescens
atgaagctgcatgccgggttctggctgatcacgctgtgctttggcgcctattgggggctggcgctgttcgcgcgcgaccgggcggcgctggtgctggcgattggcgccgtggccgcgctggcgctgaccccgcaggtgcggcgcaaatgggcagtgctggcggcgctggcgggcattgcgatggatgcattctggtgttacagcggcgtgttgcagtttagcggcagcaccggcgtgcccgtctggatgatggcgctgtggctcgccttcggctgctggtggtgctggctgatgcagctgatccgcgcctccgcctggccgacagccctattcggtgcggtcgccgggccgctcagctatctgctcagttggaagttaaaggcgttcacgccgctgatcgccccggacctgctgctgctggcgctctccgtcggctgggccgtctacctgcccgccgtcagttgggcgctcacgcggcgccgcaacgccgcataa

SEQ ID NO: 443304 - DNA, 174 bp, Serratia marcescens
atgctgaaaaaagcgttcgtcatcattatcgccctgtgtgccctgggttccctcggcggcgtattcctcgccggcctgaatatctacactcgctccaccacgccgcagccggaagccagcagcgaaagcgccgctccgtccgttacgccggcgccggtcgcgcaagatcgttaa

SEQ ID NO: 443305 - DNA, 777 bp, Serratia marcescens
atgcaagtatctttaccgatgtacggcgtgacgcatcaacaggtggaaccgttctggcgtgcgctgcgcgccaggctgcaggcctacgggctggaagcgccggagacgctgacgtggccgcaggatttggcgcggcactggcggcagccggacttgctgctcagccagacctgcggctacccgctggtggcgtatctgccgcaggtgcaggtgatcggcacctatcactatcgggtcgagggctgcaacggccctaattacagcagttggctggtggtgcgggaggacgatcccggcgaacggctggccgactttcgcggccgcacggcggcgtataacagcaccgactctcagtccggctataacagcctgcgggcgctgatcgcgccgctggcgcaggacgggcgtttcttcggcaaggcgctggcttccggcgcacactaccagtcgctgaagatgatccagcgcggcgaggcggatattgccgccatcgacagcgtcagcctggaactgctgcgccgggcgcagccggaggcgctgcacggggtgaaaatcattggccgcaccgcctcggtgccgggactgccgctgatcaccgccgcaggcacatcgcaggggcaggtggaaatcctgcgtgcggcggccaatgagatggtcagcgatccggccagcgatagcctgctgattggtgatttcagcctggtgccgcgggcggactatcaggtgattgccgaactggaacggcaggccgccgctgccggcgtcacgacgctgtag

SEQ ID NO: 443306 - DNA, 741 bp, Serratia marcescens
atgagcgggcgtctgcggcgctggctgcgcgacccgctgccgtgggcgacggcgctactgctggcgctggtgttcggcatgaaccagctgcacggcctgttcgcctattggtttcccgacctgcagcggccggtctatcagcaggacagctttattgcgctgttgctggctcacctgacgctggtggggatttccagcctgattgcggtgctgatcggcgtatcggccggggtggcggtcacccggccggccgggcaggaatttcgttcgctggtggaaacggcggtagcggtggggcagactttcccgccggtggcggtgctggcggtggcggtgccggtgatgggcttcagcgagcagccggcgattattgcgctggtgctgtacggactgttgccgattctgcagggcacgctggccggtatcggtgcggtgccgcccgctgcgcgggaagtggcgaccggcgtcggcatgagtccctggcaggtgctgtggcgcgtcgagctgccgctggccgcgccggtgatcctcgccggcatccgcacctcggtgatcattaatatcggcaccgccgccatcgcctcgacggtcggcaccaaaaccctcggatcgccgattattatcggcctgagcgggtttaataccgcctatgtgattcagggcgcgctggttgtggcgttactggctatcattgttgatagggtgtttgaacgttgggtaaggcatatccgtcatggctga

SEQ ID NO: 443307 - DNA, 939 bp, Serratia marcescens
atgattaactttgaccaggtaagcaaactgtttcagggcaaagccgcggtggatgatttgtcgctgaatatcgccgccggggaatttaccgtgctgatcggcacctccggctccggtaaatccaccactctgaaaatgatcaaccgcctgattgagcacgataaaggcaagatctatttcgccggtgaagagatccacaaattcaaaccgcaggatctgcgacgccgtatgggctatgccattcagtccatcgggctgttcccccactggacggtggaggagaacatcgccaccgtgccgcagctgctgaagtggccgcgggcgcgcatccgcgatcgggtcacggagctgatggagctgctgcatcttgatccggcgctgttccgccgccgctatccgcaccagctgtccggcgggcagcagcagcgggtcggcgtcgcccgggcgctggcggccgaccccgaagtgctgctgatggatgagccgttcggcgcgctcgacccggtgacccgcgccgcgctgcaggcggaggtggcgcgcattcatcagctttccggccgcaccatcgtgctggtgacgcacgatatcgacgaggcgctggcgctggcggaccgggtggtgctgatggacgccggccgggtggtgcagcagggcacgccgctggagatgctgacccgtccggccaatgattttgtgcgcgactttttcggccgcagcgatcgcggcatcaaactgctggcgctgggctacgtcggcgagcgggtgcgtcccgggcaggccgacggcgaaccgatcagcacggcgatgagcctgcgcgaggcgctgtcggtgtttgtcgcccgcggcagcgactgcctgccggtggtggacgagcagggcgcggcgcgcggcgtgctgcattttcacgatcttcttgccccgcagcaggccctgtcatga

SEQ ID NO: 443308 - DNA, 1161 bp, Serratia marcescens
ttgactaccgttctaaaaaaccgcgtgctgttgacgctgtttctgctgttacttctcgcggcgtttggcctgcctttcctcagctatgcgcccaaccgcctgctgtccgggcaaactatctcactgctctccctgctgcacggccgcgcgctgtggctgctggcgccgctgctggcgctggcggcgctcagtctgctgccgccgcggcgcggttatgcgttgctgacggtgctggccgcctcggcgctgttgacgctgagcctctggctgagcggcgatgccgcacgtcagctggcgcagaacggctcggcgctggcgcgcacctcctggagcggcggctgctggctgacgctggcgctgtgcctgctgatggcggcgaatgccatggagcgcatcaccgcctcgccgctgtggcgcattgtcggcaataccctgacgctggcgccggcgctgtggctgctgttcagccagcagttggatgcgctctcgctgctgaaggagtaccacaaccggcgcgaagtgttcgacgccgcgctgtggcagcacctgagcattctgctgctgaccgtgctgccgacgctggcgataggcgtgccgctcggcgtgctctgtttccgctcgtcgcgctggcagacgccggtgttctccacgctcaacattatccagacggtgccgtcgatcgcgctgttcggcctgctgatcgcgccgctggccgggctggcggcggcgttcccgtggctggcgcgccacggcgtcagcggtatcgggctggcgccggcgatcgtcgcgctggtgatgtatgcgctgctgccgctggtgcgcagcgtgaccgccgggctgcagagcgtgccggccagcgtgattgagtccgcccgcggcatgggcatgacgcgcggccagatctttgcgcgcgtgcaactgccgctggcgttgccgctgctgctgaccggggtgcgtattctggcggtgcagacggtgggcatggcggtggtggccgcgctgattggtgccggcggcttcggcgccatcgtgtttcaggggttgctgagcagcgcgctggatctggtgctgctcggggtgatcccggtgatcgtgatggcggtcgtggtcgactcgctgtttaaactgataatttcaatgttggaagcaacccgccgatga

SEQ ID NO: 443309 - DNA, 930 bp, Serratia marcescens
atggcatttctctccccgcgcggacgctttctggcgttggcgctgagcctgttcacactggccggcggcgcacaggcggcggattcgatacgcgtcggctctaaaatcgacaccgaaggttcgctgctgggcaatattatcgtgcaggtgctggaagccaacggcatcaaaaccaccaacaaactgcagctgggcaccaccaaggtgctgcgcggcgcaattaccgccggcgaaattgatatttacccggaatataccggcaacggcgccttcttcttcgcggatgaaaaagatccggcgtggaaaaatgcgcaggccggcttcgccaaagtgaaacagcttgattacgacaaaaacaaactggtgtggctggacccggcgccggccaacaacacctggaccattgcggtgcgtcaggacgtggcagcggccaaccagctgaaaacgctggcggatctgggcaagtggattaacggcggcggcacgttcaagctggcggcctcggcagagtttatcgagcggccggacgcgctgccggcgttccagaaagcctacggctttacgctgaagcaggaccagttgctgtcgctggccggcggcgataccgcggtcaccattaaggcggcggcggaacagacctccggcgtgaatgccgccatggcctacggcaccgacggcccggtggcggcgctgggcctgcagacgctggcggatccgcagggcgtgcagccgatctatgcgccagcgccggtgatccgcgaaagcgcgctggtacagcatgccgctatcgccacgctgctgaaaccggtgttcgcctcgctggacggcccgacgctgcagcagctgaacgcgcagattgcggtggaagggcaggacgccaaacaggtggcggcgaactacctgaaggcgaaaggctttgtcaaaggctga

SEQ ID NO: 443310 - DNA, 747 bp, Serratia marcescens
atgcctaaatccgccggtcactgccactatctgcacgcccgtcagcgccgctggattcagcggctgcgccggcagtggtggtggcggctggagctgcccacctggggcgtcatcgtggcggtgtacggcggctggtttctgacggcggcgtactggcgcgtgctggggccgtggctggcgacgccgctgctgatcctgttcaccaccggctatctgtcgctgcagcatgagctgattcacggccaccccacgcgccggccatggctgaatcagctgttcggcctgctgccgcttgcggtgtggtatccctatgggctgtaccgcgacacgcatctgcgccatcaccgcaacccgcacctcaccgatccgcggcgcgacccggaaagctactatttcacccgggcgcagtggcggcgttttccccggctgttgccgcggctggcggcgctgcgcaactgcctgccggggcggatgctgctgtcgccgctgtgggatatcggcctgctgacggccgacgcgctgcggcgcatggcggcgggggacgggcgcacgctggcgatgtggctgctgcatggcgcgctgctggcgtggctgttgtactggctgcagcggcagggcatcgcaccgtggttttatctgctgctggtcagctacccggcgctggcgatcggtaaaatccgctcattttacgaacaccgcgctgaacgcgatgcggcggcgcgctcggtgctgaatgaggccgcctag

SEQ ID NO: 443311 - DNA, 1041 bp, Serratia marcescens
atgaccggaaaacgccgcgccgccgtgaccacttcgccgggcggcgccttacgctttgctcccctgcgcctgcggccgccgcgggctgacgaggtcgtggtgcgtctggccggttgcggcatctgccataccgatctcagttgccgcagcggcgtcgccgccggttcaattctcggccacgagggcgccggcatcgtcgaacgcgtcggtaacgcggtgcgcgcggtgcaacccggcgatgcggtggtgctctcctacaactcctgcggccgctgcgccgcctgcctccgccgccatccggccggctgcgaacacttctggcggcttaacttcgacttccagcggctggacggcagcagcggttatctgccgccgctgcacggccacttcttcggccagtccgccttcgccacccacgcgctggcaaacgagcgcaacctggtgcgggtcgcaggcgatctgccgctggccaccctggcgccgctcggctgcgggctgcagaccggcgccgggacggtgatcaattcgctgaacctgcaggccggcgagcggctgctgatcctcggcgtcggcgccgtcggtctggcggcggtgatggcggcaaaactacgcggcgccgccgccatcgtggcgctggaccatcagcgccagcgtctggcctgcgccggcgaactgggggctacgcagacgctgagcgacgtgcggcagattgcgcagctgcccgcgctggatgcggtgatcgacaccaccggcgaacacggcgtcatacaagcggcatggcagcggctgcgccgtggcggcacgctggcgctgctgaccggcggcggcgtggtgaaattttctcacgatcggcggattatcagcgtgattcagggtgatgccgtaccgcaacagtttatcccttatctgatcgcgcagtggcgcagcggccattttccctttgaccggctgctgcgcttctacccgttcggggccatcaatcaggcgctggacgccgcccagacgggcgaggcgatcaaagcagtgattcgctttgactaa

SEQ ID NO: 443312 - DNA, 1485 bp, Serratia marcescens
atgacgacagatatagcggccccctctgccgcaccttcttctgcagggaacgccgacagcgccggcgcagcaagcatcaccatccgcaatgccgccgacgtctcgcggctggtcaacagcggcgcggccaaacgcagcgatgcgcgcatcgtggtcgccatcgcgctgggcggcgtgtttctcgacgcgtacgatctgggcgcgctggcgttcggcatcaaggacgtggcgcgcgagttcagcctgtcccccaccggcaccgggctggtggcctcggccattaccttcggcgcaattatcggcgcctttatcggcggctacctgaccgataaaatcggccgctaccgggtatttatggccgatatgtttttctttgtggtggcggcgctggcctgcgcctttgcgccgaatgagtgggtgctcggcggcgcgcgtttcgtgatggggctgggagtcggcatcgatctgccggtcgccatggcgtttctggccgaattctcccgcctgtccggccgcggcaacaaggcggcgcgcatcgccatgtggtgcccgacctggtatgcggcgatcagtatttcctacctgttggtgctgctgctatatgcggtgctgccggacggccacaccgactggttgtggcggctgatcctcggcttcggcgcggtgcccgccctgttgattatcgccatccgcagccgctatatgagcgaatcgccggtgtgggccgccaatcagggcgatctgcagggcgccgccgccatcctgcgccgctcctacaatatccatgcccaggtggccgaagaggccgagcgcacgccggcggcgccggccagacgcgcggcctggcgcaactacggcgaactgctgaaaggggtgtacctgcggcgcaccgtgctggcgaccaccatcgccatcgcctcttcctttgcctataacgccgtcgccttcggcctgccggtgatcctctccacctttttggcgcagtcgatgctcagcaccattctggtgtcgctggcgctgaacctgctgttcgccttcgccggcggcctgctggcggtgcgtctggtgccgaccttcggcgcctggaaaatgacggtgctgggctacgcctgccagctggcggcgctgcttgggctggcgctggtcggcctgccggacggcggcggcgaagcggccttctccatcggcatgctggcgctgttcctgctcggccagggcttcggccccggttcgcacagcatgaccttcgcctcgctgagctaccccacctcgctgcgcggcgtcggcgtcggttttaaccagactctgatgcgcgccagctccactctgtcgctgttcctgtttccggtgctgtccgccgcgctgggcaccggcgtgttctgggtgattgccctggcgccgctggtcgggctggttgccctgctggccatccgctgggagccggccggctatgacgtcgacgccgaggatttccgcccggtttaa

SEQ ID NO: 443313 - DNA, 1140 bp, Serratia marcescens
atgaaacaggttcgtatcggattgatcggcaccggctatatcggccgctgccacgccattgcctatgcgcaggcgggcacggtattcccgctgaaaggggagctggtgctggagatgctggcggaagtgacgccggagctggcgcgtcagcgcgccgcggagttcggctttgcgcgcgccaccgacgactggcggcagctggtggccgacccggcaattgacgtggtggatatctgcgcgccgaactttctgcacaaggagatggcgctggaggcgattcgccacggcaaacacgtctattcagagaaaccgctggcgctggacgcccgcgacgcggcggaaatggtgctggcggcgcgccagcgcggggtgaaaaccctggtgggctttaactatatgaagaaccccaccagccagttggcgcgtgaaatcatcgccaacggcgagattggcgaagtggtgcatttttacggcacccataatgaggattatctggcggatccgcgcacgccgattgactggcactgccgcaaggccagcgccggattgggggcgctgggggatctggcggcgcatatcgtcaatatggcgcactatctggtgggcgatatcagcgcggtgtccggtgatatgcagacggtgatcaaacagcgtccggatccgaacgacccatcaaggctgtgcacggtggagaacgaggatcaggccagcgcgctggtgcgttttgccaatggggcgatgggcaccattgaaacttcacgcatcgcctgcggccgcaaaatggggctgacctatgtggtgaccggcaccaaaggcacgctcagctatacccaggagcggatggcggagctgaagctgtaccgccacgacgaaccggcggagcggcaggggtttaaaaccctgctggtggggccgaaacacccggactacgcggccttctgcatcagcgccggtcacggcatcggctttaacgatcagaaaaccgtcgaggtgcgcgatttggtcaacggcatcgccgccggcgatcgcatgtggccggattttgaggagggctggaaggtctcctgcgtgctggacgccatcgccgaatccgccgggcagcgcagctgggtggaggtgcaggatcggttaaattgctaa

SEQ ID NO: 443314 - DNA, 552 bp, Serratia marcescens
atgtcgccgaagattttaatcagcgcctgcctggccggtttcaaagtacgctataacggttccgataagccgctgctggacgccacgctggcgcgctggcagcgcgagggacgcctggtagtgtgttgtccggagctggcggcgggcttctccaccccgcgtccggcggcggaaatcagccccgatgccgacggcactgcggtgctcgcccagcgggcgcaggtgcgtgaaaccaccggtgccgacgttaccgccccctacctgctgggcgcgcagctggcgctggagaccgcacgccgccacgattgccgctttgcgctgctgaccgacggcagcccctcctgcggcagccagctgatctacgacggcagcttcagcggccaaagcaaacccggcagcggggttaccgccgccctgctgcggcaacagggcattgaggtgttttccgaccggcagatcgcagcgctggtcgcccgcgtcagcgagtacgagcggcaagcagcgccgccagccgctgacgcagatgggcaatcccctgcgggtggtgaataa

SEQ ID NO: 443315 - DNA, 429 bp, Serratia marcescens
atgatggcggagcaggattttggcggtgcaaagatcgcgctgctgcatcagggacaggtgctggtctaccggcgcgactgccgtgacgatataccgtggcccggccagtgggatctgcccggcggcgggcgcgaaggggcggagacgccgctgcagtgcgtgcagcgggaaacctacgaggagttcggcctgacgatcgccgccgcccaggtgcgcgagcagcgtcgttattccggacggcaaccgggggacgcggccacctggtttatgctgggcgatctcagcgcgcggcagatcgccgccgtgcgctttggcgatgaaggccagtattggcgcatgatgccgatagaggaatttattcaccacccgcaggggattgcccatctgcgtcagcggctggcggcgctgcttgccgctcgtactcgctga

SEQ ID NO: 443316 - DNA, 258 bp, Serratia marcescens
atgcgtcatgcgacattgattaatctatgcatttggcttgcctgtcttgtcgcggcattcttcattgtattgtttccgctgggtggcctactggattacctgtcacaagccaccaatcatgtattgaatattacagggttaggctttgctgacggtgaggccgatccctcattcctctgggtgctggcggcgcttatgctggttgtagcggctattctggtgagtgtggtcaattgggtcaggggtaggttcaggtag

SEQ ID NO: 443317 - DNA, 846 bp, Serratia marcescens
atgaactctccttttctggttaccccacaatggcttgaacaacatctccacgatgccgatctggtgctggtcgacgtgcgcatgtcgccggcgggcctgacgccgaagaaagatatgcaggccgaatttgaccgcggccatctgccgggcgcggtctatttcgatatcgacgacgtcgccgacaaacacagcgcgctgccgcatatgctgccggacgctgcagcctttggccgcgcggcgggcgagctgggcatcagcgaaaacagcacgctggtgttctatgacgagggcaaccagttttccgccccgcgcggctggtggaccttccgcaacttcggcgccaaacgggtttacgtgctggatgaggggctgaacggctggacggcgcgcggcaacgcgctggaaagcggccccgccaaacggccggccgccgtgtttaacgccagcttcaacccggcggcggtggttgacatggcgcaggtggagcaggcgctgggcagcgatatccagatcctcgacgcgcgcgccgccgcccgcttctacggcgacgcgccggaaccgcgtcccggcctgcaccgcggccatattcccggcagcatcaatattccctacggcgagctgctggaaaacggccgcgtcaaatcgctggaggcgctgcggcagaccttcagcgccaaaggggtcgatattaacggcccgatcgtcgtcagctgcggctccggcgtcaccgccgcggtgctggcctttggcctgcagtcgctgggcgcgccgcaagtcaggctgtatgacggctcctggagcgaatggggcctgctggacggcaagcagccgatagccaccaggtaa

SEQ ID NO: 443318 - DNA, 699 bp, Serratia marcescens
atgctgcaagtgaacgagctgaaccaatattacggcggcagccatattctgcgcggcgtctcttttgaggcgcggattggcgaagtgacctgcctgctggggcgaaacggcgtgggtaaaaccaccctgctgaaatgcctgatgggactgctgccggcgaaaagcggcgacatctgctggcagggacagcgcatcaatgggcgcaaaacccatcagcgggtgcaggccggcatcgcctatgtgccgcaggggcgcgagattttcccacggctgacggtggaggagaacctgctgatggggctgtcgcgctttgccgccgcagaggcgaaacgcgtgccggacagcatttatcagctgtttccggtactggcgcagatgaagcaccggcgcggcggcgatctgtccggcggccagcagcaacagctggcgatcggccgggcgctggcctgccggccgagcctgctgatcctggatgagcccaccgaaggcattcagccgtcggtgattaaggagattggcgcggtgatcggacagctggcggcgcagggggagatggcgatcctgctggtggagcagttttatgactttgccgccgaactggcggacagctacctggtgatggcgcgcggcagcattgtgcagcgcggcgcgggcgccgatatggagcgggagggcgccagggcgctggtggcgatttaa

SEQ ID NO: 443319 - DNA, 807 bp, Serratia marcescens
atgaacgccatgcaaatgaccgatgagctgtttacccatccgctgccggccgataagcgccgcgggcagaccgacccggtgctgcagctggagagcatcaacgtcagcttcgacggcttccatgcgctgcgcgatctgtcgctgcagatcggcgtcggcgaactgcgctgcgtgatcgggccgaacggcgcgggcaaaaccacgctgatggatgtgatcaccggcaaaacgcggccggacaacgggcgggtgttttacgatcagacgcgcgatctgacgtcgatggatccgatccggatcgcgcaggccggcattggccgtaagtttcaaaaaccgacggtgtttgaagcgctgacggtgtttgagaacctggagatcgcgcagaagaaccccaaatcggtgtgggcctgcctgcgcgccagactgagcggcgagcagcgcgaccgcatcgagcagatgctgcagacgctgcggctgaccagccagcgtcaccggccggccgggctgctgtcgcacggccagaagcagtttttggaaatcggcatgctgctggtgcaggagccgcatctgctgctgctggatgagccggcggccggcatgaccgatgcggaaaccgaatacaccgccgaactgttcaaatccctggcgggcagccattcgctgatggtggtggagcacgatatgggatttgtcgaagccatcgccgatcgcgtgacggtgctgcatcaggggcaggtgctggcggaaggttcgctggcgcaggtgcaggctgacgaacgggtgattgaggtctatctgggccgctga

SEQ ID NO: 443320 - DNA, 1581 bp, Serratia marcescens
atgcaatctttatttttatcccgactgcggccactactctggctgctgtgctgcctgccgctgtgggcgcaggcaggatcggccggcgatttcgccgccgccggccgcagccagcaggccaaattactgcagggctgggcgagcgcgcccgatgccgcacgcctgccgctgttacgggcgctgaaacaggagaacctggcggtggacgccgccgggcgcgtatttacccgccagaacggcggctggacgccgctggagggcgacgccgcgccgcagggaacgccgaaaaaagtgcggctgaacaaccggctgcgcatcctggtcgccaacgcgctggcggcgcagcagctggtgagcggcgataaggcggcgcggctgcaggcggcgcagacgctgcagcgtgacgcgcagcgcgaccagcggccgctgctgaaacaacggctggcgcaggagccggatgaggcggtgcgcgacgcgctgcgcatcgcgctggccaacctgcagctgagcgacgccgatccgcaggtgcgtctgcaggcggtgcagctgctgggcgaatcgggcgatccgcagacccaggcgcggctgcaggcgctgagcgccgcggacggcgaaccggacgccgcggtgcgcgccgcagcacagcagagcctggccagcgtcaaacagcggctgatgatcggcgatctgctcggccaggcgtttaccggcctgtcgctggggtcgatcctgctgctggcggcgctcgggctggcgatcacctacggcctgctcggggtgatcaatatggcccacggcgagatgctgatgctcggcgcctacgcggcctatctggtgcagggggcgttccagcagctggcgccgcagtggctggcgttctatccgctggcggcgctgccggcggcgttcgccgtgaccgccggtatcggcatgctgcttgagcgcacggtgatccgccacctctacggccggccgctggaaacgctgctggcgacctggggcatcagcctggtgctgatccagctggtgcggctgctgttcggcgcgcagaacgttgaggtcgccaacccggcctggctgtcgggcggtatccaactgctgccgaatctggtgctgccgtggaaccgcatcgcggtgatcgtctttgtggcgctggtgctgctgctcacctggctgctgctgaacaaaacccgtctggggatgaacgtgcgtgcggtgacgcaaaaccgtgcgatggccgccagctgcggcgtgccgaccgggcgggtggatatgctggcgtttggtttaggctccggcatcgccgggctgggcggcgtggcgctgtcgcagctgggcaacgtcgggccggaactggggcagggctatatcatcgactcgtttctggtggtggtgctgggcggcgtcggacagctggccggtacggtggcggcggcgttcggcctcggcatcgtcaataaaattcttgaaccgcagattggcgccgtgctgggtaaaatcctgattctggcgctgattatcctgtttattcagaaacgtcctcaagggctgttcgccctgaagggcagggtgattgactga

SEQ ID NO: 443321 - DNA, 708 bp, Serratia marcescens
atgcaactgaccaataaccgccataaggcgcggccggaggggctggcggagcgcatctaccagcaactgaaggatgacattttcgattttcgcctgctgccgggcgatcggttcagcgagagcgagattgccgggcggatggcggccagccgcacgccggtgcgtcaggcgctgttccggctggagcgggagggctacgtcgacgtgcatttccgcagcggctggcaggtgcggccgtttgattttgactatttcgaacagctgtacgacctgcgcatcgtactggagcgggaggcgctgaagcgtctgtgcgcccgtccggcgggcgagacgccgccggcgctggcggagctgacgcgtttttggatcgaagcgccgcgcctggaggacggcaaaagcgtctcgcggcacgacgaacagtttcatatggcgctggtggccgccgccggcaacggcgagatggcgcgtattcaccgcgacgtcaccgaaaaaatccgcatcatccgccggctggactttacccaggatcaacgggtcgatgcgacctatcaggaacacgccgcgattctgcgggccatttcgcaacgtcacaccgaggaggcgcaaacgctgcttagcgatcacattgccgtcagtaaggccgaagtccgaaaaataaccctgcaccgcctgcatcaggcgcgtttacagcaggggccagcgtcttga

SEQ ID NO: 443322 - DNA, 1833 bp, Serratia marcescens
atgacccagcctgttaagcaacacggatttaccctcagcgagtggcagcgctactaccagacgcagccagcggcggagcgtatcgcctgcgtcgccgccacgctttctcaacttgtcgccagccttgaccgtaacgacaacgcctggatttacctgcccgacgcgcggcagtgtgaggcgcagtatcagcagctggcgcagcgcctggcggcggtagccggggacctcagccgcctgccgctgttcggcgtgccgtttgcggttaaagacaacattgatgtcggcggctggccaacgtcggcggcctgcccggcatttacctatcaggccgatgaggatgccgccgtcgtcgccaggctgcgcgccgccggcgctgtcgttatcggcaaaaccaacctcgatcagttcgccaccggtctggtcggcacccgttcgccgtatggcgcggtggtgaacagcttcaatccgcagtatgtcagcggcggctccagttccggctcggcgtcggtggtggcgcgcgggctgacgccgtttgcgctcggcaccgacaccgccggctccggccgtgtaccggccgggtttaatcatatcgtcggtttaaaaccaaccaaaggctggctgtcgaaccgcggcgtggtgccggcctgtcgccttaatgactgcgtctccatctttgcgctgacggtggccgacgctgcctgcgtcgctgaactggccggcggctatgatgccgacgacgcctattcccgcgtgaatccacagacggcgccggcggatctgccggccgcgccgcgctttgccgtgccggatgcgccgtcgttctgcggcgacccgcaggcagagcaggcgtttcaggcggcgctgacgcagctgcgggagggcggtgcgcagttggaaacgatcgatttcaccccgttccgccaactggcgcagcagctgtacgaagggccgtgggtggccgagcgcaccgtggcggtggcgggcatgctcagcgatgaccccgaggcgatggacccggtggtgcgcgatattgtcggcaacggcctgcattacagcgcctgcgatgcctatcgtgccgaatacctgcgcgccgagctggcgcgtgagatcaaccggctgctggcgcagttcgacgcgctggtggtgccgacctcaccgacgatccgcacgctggcggaaatggcgcaggagccggtgttgttcaattcgcagttcggcacctacaccaacttcaccaatctggccgatctcagcgcactggcgctgccgggggcgctgcgcgccgatggcctgcccgccggcatcacgctgatcgcgccggcctggcacgatcgcgcgctggcggcattcggccagcgctggcagcagcaactggggctgtcgctcggcgctaccgggcgtgcgctgccggcacagccgccgctggcgcctgcgccgcagcatgtgcgcgtcgccgtggtgggcgcgcaccttcgcggtatgccgctcaacgcgcagctgacgcagcggcaggcggtgctggcggagcagaccaccaccgcgccgtgttaccggctgtatgcgctggccgatacgcagccgccgaagccgggtctggtgaaaacggaggacggcgcggcaattgaggtggagctgtgggacatcccgctggcgcgctttggcgagtttgttgccgaagtgccgccgccgctgggcatcggcacgctgctgctggcggacgggcgacgggtgaaaggctttatctgcgagccatgggcgctggcaggggcgacggatattaccgcatttggcggctggcgcgcatatcgcgccggcgcagagaaggaggcttga

SEQ ID NO: 443323 - DNA, 459 bp, Serratia marcescens
atggcaaagcatacaattatcattacccgcacctggcaaacagataactcaacgataagcagctatgagatcaccggcagctctattaaaggatacttcttagaaagacccgggcctgatactcaagaatcataccaaaggaaaagaattcccgaggggaattattcgataaaatggcattacagcagtattcctacggtcagcccctataatcctgtcccgctgctgtttaatgcgaccgtccctgaatcccgcaatatcttaattcacaacggcaatttcccccgcgataccgacggatgcctgctgattggctcatccaggggagttgattttgtcggcaacagcgtcaaaaagttaaaagagctgcaaaactttatcaccagcaaaggaatcagtaatttcagcctgacgatcaaatcttgctattctggctgcaccacttcggagggattatga

SEQ ID NO: 443324 - DNA, 657 bp, Serratia marcescens
atgattaaaaaactgatgctcgccctgctgctgtccctcggcgtgcagccggcgctggccgaagcgcagacgttcaacggcgtgctgcaggcctactggctgcctatctggcatgaagacgtcaatcagccgcagctgacataccgtttcttcccggatgagtcgtcggccgccaagggaaaagtcatcaacctgcgccagcccactctcgctctcaaacggctgcagcaggatcacccggagtttatcgcccggcggcaggggcacgtggagtattacggtacgctgaaggttagcgagtcaaccgcatataacgagtgcggcctggacttttatgaggcgcaaaaggccgcgtttacgcccaaagcgccgcagcctttcgatattgaacaactggaaaagcaaagcggctgtcagtcctacccctggctgctcagctatcagctaaaagcggacgacggcggcgccgtgctcagagccgcgcccgatagcagcgccgaggccgtcgcccaactctccggcgaccggccactggtgcaaatcaggcaggtcaacgccgactgggtgcaggtcgcactctatgatgccgccaaccagccgccgatgggcaagacgcgcggctatattgaactgcgccatctgcagccgctcaactag

SEQ ID NO: 443325 - DNA, 465 bp, Serratia marcescens
atgattaacaatgacgtcctgcgcagcgtgcgttacatgctgaaaatcaacgacgtaaaaatggcggacatcgccaaactggacggtttcgacgttgacgccgcagcgatgggcgcttacatcatcaaggaaggcgaaccgggcttccagaagtgtccggatgaggtgatgggacatttcctcaacggcctggtgttcttcaagcgcggcaaagacgataaatttccggcaccgccgctggagctgccgatcaccaataacctggtgttgaagaagctgcgcgtggcgtttgaactgaaggacgtcgacctgttccagattttcaccgcggtggatttccgcatctccaagccggagctgagcgcgctgttccgcaagccgggcaccaagaactatcgtccgtgcggcgatcagatgcttcgttacttcctgaaagggctggcgcagcgggtgcgcggcgagtaa

SEQ ID NO: 443326 - DNA, 897 bp, Serratia marcescens
atgttcgagcaaaccgtaagcacggaacggctgcacacgctgcgtcagcagcaccgggagatcttcagccagcagcggcgctatctgcgcactctggcgctggtcggcgcggggtttgtgctgtactacctgctgtttttccacttcttcggcatctcctggccgcagtttctcaccggctgccagcagctcggccgctactttatgcgcatgttcgtctggcacgattttcttaactggccgttcggctactacttccagcagatctttatcaccctcggcattgtgttcgccggcacgctcaccgcatcgttgattgcgctgccgctgtcgttctttgccgcgcgcaacgtgatggccacgccgctgctgcggccggtcgccgccgtggtgcgccgtttgctggacgtattgcgcggcattgatatggcgatctgggggctgatcttcgtgcgcgcggtgggcatggggccgctggccggggtgttggctatcgtgatgcaggacgtcgggctgctgggcaaactgtatgccgaagggcacgaggcggtggaaaaatcgccggggcgcggcctgacggcggtgggggccaacggcctgcagaagcaccgtttcggcatttttacccaatccttcccgacttttctggcgctgagcctgtatcagattgagtccaacacccgttcggcggcggtgctcggcttcgtcggcgccggcggcatcggcctggtgtatgcggaaaatatgcggctctggaactgggatgtggtgatgtttatcaccctggtgctggtggtggtggtgatgacgatggataaaatctcctcgctgctgcgcaacaaatatatcatcggcgaagatatcccgctgtaccaggcgaaacgccaaatcgattga

SEQ ID NO: 443327 - DNA, 936 bp, Serratia marcescens
atgatgaaaaaaatagcgatgctgagcgcgctggcaagcggcgtgctgatggccttcggcgcggcggcggcggatgcgcccaaagagctgaatatgggcattctcggcgggcagaatgccacccagcagattggcgacaaccagtgcgtgaagcagttttttgataaggaattgggcgtagacaccaaactgcgcaactcctccgactattccggcgtgatccaggggctgctcggcggcaagatcgatatggtgctgagcatgtcgccggcgtcgttcgcctcggtatacctcaaggatccgcaggcggtggatctggtggggatcgcggttgatgacgtcgacaactcgcgcggctatcactcggtggtgatcgtcaaggccgacagtccgtatcaaaagctggcggatctgaaagggaaatccttcggctttgccgatccggattccacctccggctttttgatgccggatcacgactttaaaaagcagttcggcggcaacgcggataaccaatacaacggttacttctccagcgtgaccttctccggcggccacgaacaggacattctcggcgtggtgaacggtcagtttgacggcgcggtgacctggacctcaatgatcggtgactacaacagcggctacaccagcggcgcctttacccgcctgatccgcatggaccagccggatctgatgaaaaagatccgcattatctggcagtcgccgctgatcccgaatggcccgatcctggtgcgcagcgcgctgccggcggagttcaaaaccaaactggtcgccgccatcaagaagctggataaagaagatcacgcctgctttgtgaaggcgatgggcggcaagcagcatatcgaagacaccacgctggcggagtaccagccggtgatcgacctcaaacgcgcgctggcgaagggcgagcgctga

SEQ ID NO: 443328 - DNA, 1029 bp, Serratia marcescens
atggccacaatgaatacattgatttgtcagcagccgaagcaactggtttatcaacagcgcccggtgccggaaccggcggcgggcgaagcgcttttacagatacacaccgtcggcatctgcggcaccgacattcacgcgtgggcggggaatcagccgtttttcgcctatccgcgcgtgctgggccatgaaatttgcggccatatagtcggcctgggcgcggacgttgcaaactggcgggtcgggcagcgggtggcggtgatgccttatctgtcctgcggcagctgcggcgcctgtcagagcgaccgcggcaactgctgtgaaaatatttcggtgatcggcgtgcaccaggacggcggtttttgcgaatacctcagcgtgccggtcagcaacctgctggcggtcgacgatctggcgcccgaaagcgccgcgctgattgaaccgttcgccatcagcgcccatgcggtgcggcgcgcggcggtggcgccgggcgagcaggtgctggtggtgggcgccgggccgatcgggctgggggtggcggcgattgcccacgccgacggcgcgcaggtggtggtggccgataccagcgcggaacgccgcgcccatgtggcgcaggtgctgggggttgcgacgctcgatccggcggacgccggctttgacgctgcgctgcgcgcgcagttttccggcatgctggcggccaaagtgattgatgccaccggcaaccggctggcgatgaacaactgcgtcaacctgatccgccacggcggcagcattgtgttcgtcgggctgttcaaaggggagttcagtatcgacgacccggagttccataaaaaagagaccaccctgatgggcagtcgcaacgcgacgcatgaagatttcgccaaagtggggcggctgatggcggcgggtaaaattcgcgccgagatgatgctgtcgcaccattttgccttcgacaccctggccgaatgctatgagcgcgacgtgatcaacaaccgcacgctgatcaaaggagtgattcacttccacaagtaa

SEQ ID NO: 443329 - DNA, 906 bp, Serratia marcescens
atgagcagaacacaaaacctgcggcagatggtgatcaatcagatgattgacggcatgacacggggccatctgacctcgccgctgccctctcaggccgcgctggccgagatgtacaacatcagccgcaccacggtgcgccacgcgctggcccactttcaacaaaccggcgtactggcgccgcaggccgacggctatgtcatcgcccgcctgccgcagcaggaggagtgtttcgactgccgcgagcagtcgccggaggcgcagaacgaacgctttgaacgggcgtttttccagctgattaaccagcaacagctgcgcgccggcgacagtttcagcgagctgcagctggcgcgccagatgaacgtcagcccggcggtggtgcgggagtttctgttgcgcctgagccgctaccagttggtcgacaacgtcaaacgcgggcagtggtgcctgaaaaccttcgaccagcattacgccgaacagctgttcgaactgcgccagatactggaaacccatgcgctgtcgcgctttctcaacctgccggctgacgatgcgcgctggctgcaggccagagagctgctgcgccgccaccgtgagctgcgtgacgatatcagcctgcactaccggcagttctccgcgctggacagcgacttccaccgcctgatcctctccgccgccaataatccgttcttcaaccagtcgctggaggtgatctcggtcatcttccatttccactatcagtgggacgccagcgacctcaagcagcgtaatatcatcgccattgaggagcatatggcgattctcagcgcgctgatttgccgcaacgaccagcaggccacccatgcgctgcaccgccacctcgacagcgccaaacaatcgatgatccgctccctcgcccacaccgtctcctga

SEQ ID NO: 443330 - DNA, 1356 bp, Serratia marcescens
atggaaaaaactcataccgctacccgcccgacggccgcagagccggacgcggccgattcgatcgttcccatgcctcccgacggcgcgctggtgcgttccgcgcgcatcaagaaaattcagaccaccgcaatgctgctgctgtttttagccgcgatcattaactttctcgaccgcagttcgctgtcggtcgccaactccaccatccgcgaagagatggggctgagcggtacggaaatcggcctgctgctgtcggccttttcgctggcctacggcctcgcccaactgccctgcggcccgctgctggaccgcaaggggccgcgcattatgctgggcctcggcatgttcatctggtcgctgttccagacgctgtccggcatgatccagaactttacccagtttatctgggtgcgcatcgggctgggcatcggcgaagcgccgatgaacccctgcggcgtcaaggtgatcaatgactggttcaacatcaaacagcgcggtatgccgatgggcattttcaacgccgcctccaccgtcggcctggcgatcagcccgccgatcctcaccgccatgatgctggtgttcggctggcgcggcatgtttatcaccatcggcctgctgggcatcgccctgtccatcggctggtacatgctgtaccgcaaccgccaggacatcgacctcagcgcgcaggagcagagctacctcaacgccggcagcgtcagcgcacgccgggagccgatgagctttaaagagtggcgctcgctgttcagaaaccgcaccatgtggggcatgatgatcggcttcagcggcatcaactacaccgcctggctgtatctcgcctggctgcccggctacctgcagaccacctaccacctggatttgaaaagcaccgggctgctggccgccattccgtttctgttcggcgccgccggcatgctgtccaacggttttgtgaccgactttttagtcagacgcggcatggagccggtcaaaagccgcaagctgtgcatcgtctccgggatgctgctgtccgccgcctttacctcggtggtggcgcaggccaccaccaccaccagcgcggtgacgctgatcggcatggcgctgttttgcatccactttgccggcacctcctgctgggggctgatccacgtatcggtcacctcgcgcatgaccgcctcggtaggcagtatccagaacttcgccagctttatcttcgcctcgttcgcgccggtggtgaccggctggatcctcgataccacccactcgttcagcctggcgctgaccctgtgctcctgctttaccctgatcggcgcgctctcctacctgctggtggtgaaacagccgatcaccgacgcgcagtaa

SEQ ID NO: 443331 - DNA, 873 bp, Serratia marcescens
atgaaaatcggatttgccgggctgggcggtatgggccgcgccatggcccataatctgctgcaggccggttacccgctgacggtgtggaaccgttcaccgcaggcggcgcagccgctggtcgacgccggcgcacggctggcggcgcagcccgccgatctggccgaggttgatatcttgatcaccatgctggccaacgacgcggcgctggaacaggtggtggtggaaagcggcctgctggcgcagatgcgccccggcgcggcgcacgtcaatatggcgaccatctccgtggcgctggcgcagcggctggcagaactgcatcagcagcacaatatcggctatctggcagcgccggtgctcggccgtcccgacgttgccgccgccggccggctgaatattctggccgccggtgacccggccctgctggcgcgggtgcagccgctgttcgacgtgctggggcagcgcacctggcctttcggcgagcggccggaacaggccaatatcgtcaaaatcgccgccaacttcacgctggcaagcgccattgaggcgatggcggaaggcagcgcgctggtgcgcaatcacggcgtatccggcgcggactatctgcagatgctgaccggcaccctgttttccgccccggcctatcagggctacggcgcgctgatcgccgaggagaactatcagccggcgggatttaaactgacgctggggatgaaagacgtggggctggcgctggaggccggcggcaacagccatacgccgatgccgttcgccagcgtgctgaaagataattttctggatgccatcgcccacggtgagggggaactggactggtcggcgctggccaatgtggcggcgcgacgcggcggcctgtga

SEQ ID NO: 443332 - DNA, 528 bp, Serratia marcescens
atgaagccagcattattgattattgatgtgcagaagggactgtttgtgccgccgccggcggatgccgatgcggtgattgagcggattaaccaactgagcgcgcgggcgcgtcagtccggcgtgccggtgatctttgtccagcatcagactgccgatcgggaactggcgcatggcagcgacggctggcagattgagccacgtctgcaggtggcagacaccgatctgcgggtggagaaaaccaccccggattctttcctgcgcaccaatctgcaggcgttgctggagcagcacggcgtaacgcaactggtgatttgcggctactccacggagtactgcgtggacagcaccacgcgccgcgcggccggccacggctacccggtggtgctggcggcggatgcacacaccagccatgataaagcgcacgccagcggcgcctggatccgcaatcaccacaatgcagcgctgtcgggtatgaaaagcttcggcgtgccgatccgcgcgctgcccgcggcggagattcagttctga

SEQ ID NO: 443333 - DNA, 1104 bp, Serratia marcescens
atgaacgagtcatatgtacttgctgaagtcagtaatgataaccagacgctgatggcggtggttcagcaagatcaccgggctgcctatttttatatttatcccgctgacgccttcagcgagcgttttcaggtgcgcgcctgctggctgcgcaatctggaggccgcgccgcagcaggaagaccgcgccgcgctggagatggggcagccgccgatgctggccgctgagttttgccgcaacctggaaggtgaagcgccgctgcagccggacggcctgcaggttatctggaacgagagcgacgacggcgcggcgctgtggtattacggccagctgctggcggtgatccccggctggagcctgtatatcgaccattcggtctgctattcggccagctgcattaaagaaagcccgctggcctacccgctgggttccgcctctaccaacacgcaatatgcgcaggccgaggccacccgccagttctggcggcgctggcagcgtgaagagggcaacccgtggccgaccatgcaaagcgagtatatggcgcgctatgagcagcatttcggcccgtcggtgaagtattacgccatcgatcagggcaagtggccaccgatggcgatctcccagcacgagcgcgacggcatctactatttcctcaccatgggcgtcagcatccggccgatgccgtggatggagatcctgtttaatgacgacgcttccctgtaccggcgtatcgagctggggatcgccatcgacggccagtatatgaccgaagagaacgcggtgcagatggccagcgcgctggccggcgtggcgcacgtgccttgggcgcagattacctggttcggcgaagggcatacgctggcgtcggaagtggcgccgcagggctatgaaggctatctgctgtcgtcgtcgttttatccgcaccagcagtatctgacgctgccgcagcagcagggcgacccggtcaatctgctgtgggccagcccggtgtttgccggcgagcgcgagctggcgcaggcaacgccgaacggcggccatgagctggtcagccggctgcgcgagcagggcgtcgatcacatcttccggccgcgccagccgctggcgtga

SEQ ID NO: 443334 - DNA, 438 bp, Serratia marcescens
atgataacgatcagagaacgtattccggcggacaatccgcaattggtggcgatctggcagcgttcggtacgcgccacccatcactttatcggtgaaaaacagatggcggagttcaagccgctggtcgagcactatctgccgctgctcggcgtctgggtggcggagagcgccgggcggcccagcggctttatcgcgctggatgataataaggtggagatgctgtttatcgatgccggacagcgcggccagggcgtcggcagcgcactgctgaaccatgcgcaggcgcgccacgacggattggtgctggatgtgaacgagcaaaacccgcaggcggtaggcttctaccagcgctacggctttgtggtgacaggacgctcaccgctggacggccagggcaacccctacccgctgctgcatatggcgctttccccgcgctga

SEQ ID NO: 443335 - DNA, 645 bp, Serratia marcescens
atgactatcaaagaagaggtcgctgcaaagaaaacccgcggcagaccgaaacagtttgatcgcgacctggcacttgaccgcgcactggagctgttctggcgtcacggttatgacgccacatcattggccgatctggtcgaggtcaccggcgccaaagcgccgacgctgtatgcagagttcggcaataaagaggggatgttccgcgcggcggtggaacgctacctgagcaaatacaccacctgcaccaaccaactgcttgaacagccgcagccgatcgccgaaatcatcgatgcctatgtgcgctcctccgcggaagtgtttaccgatccggaaacgccgtccggctgctttatggtgtgcgcctccgctgcgctctcctcgtcgtcggacgatgtcgcccagatgctgctgcgtaagcatcatgcgcaggaagccagcctgaaggcctgtttcgaccgcaaggtgcagcagggggaactgctggcgaaaaccgacaccgcgctgctggcgaaatatgtgatgtgcaccattgaaggcatgtcggtgcaggcgcgtgaaggggcgagccgcgccgagctgctgcgcctggtagatacgctgatgatgctctggccgcgcctgagccaggtgggcaacccggtctga

SEQ ID NO: 443336 - DNA, 258 bp, Serratia marcescens
atgaaaagcctgaaaatgaccatcgccgccgtagcccttgccaccgtatcattcggcagctttgccgcagaactggtagacagccagccggccaatatgcagaaagtcggcgtggttaacgccagcggcgcaaccaacctgaccagcctggaaaacaaactggcggcagaagccgataaagccggggcaaaatccttccagatcacctcgacaaccggtaacaacaaaatgcacggcaccgcgattatctataactaa

SEQ ID NO: 443337 - DNA, 915 bp, Serratia marcescens
gtggagatccgtgattttcgggcgttgtcgcgccgtctggtgcgtgaactggggatgttgaacaagcagagcaacggttcgcgcttttcaccgttgcagattcacctgatgattgaaatcaaggaacagccgctgggggtgatggagctggcggccaaactgtgcatcgataaggccagcgccagccgggcactgcgttcgttggtcagcgcgcagatgatcgagacggttgaacacccgcatgataaacgccacagcctgcaccgtctgacccggcaggggaaacacacgctggcgctgattgacagcgatgccgataactttatgcaggtggcgctggcgcagttggacgatgatgaacgggcggcgacggtggcgatgatgcgtaagttcagcggcgcactggccggcgcgcgcaagcagcggcaggccgaactgcgggtgcggccgatttgcgccgcagacgatgcggcgatggcgcagctgatccgcgactgtttccgtgaatacggtatggacaccatggagggcgtcagtctgcacgatccggatctggagcggctgactgaggtgtatcaacgcagcggcggtcattactgggtggtggaacggcagggggaaatcgtgggcggcgccggcattgcgcctctgcttggcggcgaagcggattactgtgaactgcaaaagctgtttttcaaacccgaaatccgtggcttggggatggcgcgttacatggtggtgcaggcgatgcgcgcggcgcgggccgccggttaccgctactgctatctggaaactaccgaacagctaaaagaagcgctggggctttatcagtcgctgggctttacgctgctcagcgaacggcgcggcgcgaccggtcatcacggctgttccatctatatgttgaagccgctgtaa

SEQ ID NO: 443338 - DNA, 357 bp, Serratia marcescens
atgaccataaaaaatataagtggggtgctgctggcagcaaccctgctggccggctgcgccgcgccaaaaacgctgtacaattgggatcattatcagactacactttatcagtattatcaacaggatggcgttagcacggaacaacagatcgcgacgctgaaccagaccgttgaaacctcccgcgccaaaaataaggcggtaccgcccggcttgcatgcgcagctggggctgctgtacgccaaaagcggccgtccggatcaggcttttaccgaattcaatacggaaaaacgcctgttcccggaatctgccagatttatggatttcctgatggccaaggataaagggagttttaaatga

SEQ ID NO: 443339 - DNA, 657 bp, Serratia marcescens
atgaaacggatactcggtttagttgccgctacagcggttctgctgctgagcggctgcgccaagaaagcgccgtatgattatgcggcatttcacgaaagcaagccggcctcgattctggtaccgccgccggtcaaccagtcaccggatgtcaaagccagccacagcgtgctgtccaccgctaccctgccgctggctgaagccggctattacgtgttcccggtcgcggtggttgaggaaaccttccagcaaaacggcctgagcaatgcaaacgatatccgcgccgtcagtctgcagaagctgcatcagatcttcggcgccgacgcggtgctgtatctggacattgtgcagtacggcaccagctatcgggtgatcgacagcgaaacccgcgtgaccgtaaacgcgcgcctgctcgatttgcgtaacggcaaagcgctgtggtcgggcagcgctaccgcttccagcaacgagaacagcaacaacagcggcgccggcctgctcggcatggtgatcaacgcggccatcgcgcaaatcgccaatacgctcagcgacaaaggcttcgatgttggcgctatcaccaacacccgtctgctgtccgccggccatgacggcgcaattctgtacgggccacgctcgccgcattacgccagccagcgttaa

SEQ ID NO: 443340 - DNA, 294 bp, Serratia marcescens
atgcacgtcacgctggtggaaatcaacgttaagccggataaggtggaagagtttatcgaggtgtttcgcgccaaccatctgggggcgatcgccgaaccgggcaatctgcgctttgacgtgttgcaggatgaaaccatcccgacgcgtttctatatttacgaagcctaccgcgatcagcaggcggtggatgcgcacaagcaaactcagcactatctgcagtgcgtggaacggctggaagcgctgatgactggcccgcgcaagaaaaccacttttatcggcctgatgccggcgtaa

SEQ ID NO: 443341 - DNA, 1566 bp, Serratia marcescens
atgcgcaacttgttgatggcattagacgcagggaccggcagcattcgggcggtgattttcgatctggaaggccgacaaatcgcttacggacaggcggagtggcaacatctggcgctgccggacgtgcccggctccatggagttcgacctggccgataactggcggctcacctgccgctgcattcagcaggcgcttgaacgcgccgacgccgggccgggcgacatccgcgccgtcgcctgctgctcaatgcgcgaaggcattgtgctgtacgaccgcaacggcgacgccgtctgggcctgcgccaacgtcgacgcccgcgccagccgtgaggtcagcgatctgaaggcgctgcataaccatcagtttgagcaggaagtttaccgctactccggccagacgctggcgctgagcgccatgccgcgtctgctgtggctggcgcaccatcgcccggacatctaccgccgggcggcaacgatgaccatgatcagcgactggctggccaaccgtctcagcggcgagctggcggtggatccctctaacgccggcaccaccggcatgctggatttagcccgtcgcgactggcggccggcgctgctggatatggccggcctgcgcgccgatctgctgtcgccggtccgggaaaccggcagcctgctggggcgggtcaccaacgaggccgcgcggcaaagcggcctggcggccggcaccccggtagtgatgggcggcggcgacgtgcagcttggctgtctggggctgggggttgtgcaggccgggcaaaccgcggtgctgggcggcacgttctggcagcaaatcgtcaatctgccgcagccgcagaccgatccggcgatgaatatccgtattaacccgcatgtgatccccggtatggcgcaggccgaagcgatcagttttttcaccggcctgaccatgcgctggttccgcgatgccttctgcgccgaggagaaactgctggccgaacggctgggggtcgatgcctatacgctactggaggagatggcggcacgggtgccgcccggcgcctacggcgtgacgccgatattttccgacgccatgcattttaaaagctggtaccacgcggcgccctcctttatcaatatgtcgctggatccgcagcgctgtaacaagcagacgctgttccgcgcgctggaggagaacgcggcgatcgtcgccgcctgcaacctggcgcagatcgcgcagttttccggcgtacagccgccggcgctggtgtttgccggcggcggtgcgaaaggcaagctgtggagccaaatcctcagcgacgtcaccgggctgccggtgcgggtgccggtagtgaaagaggccaccgcgctgggctgcgccatcgccgccggcgtcggcgccgggctgttcgacgatctggcagccaccggcgaacgtctggtgcgctgggagtgccagtatcagcccaacgcggagcaccatgcgctgtatcagcggcagaaagagaactggctggaggtgtacgccgaccagctgacgctggtggaccacggactgaccacctcgctgtggaaagcgccgggcctgtaa

SEQ ID NO: 443342 - DNA, 1395 bp, Serratia marcescens
atgcgttctcaaacacaaccaagcggcctgatcgaggataaatccatcgattatgtgccggcctcggagcgccacggcgaggtcaaaagcctgttcaccctgtggttctgcaccaatatcgcgccgctggcggtggtgaccggcgccatcgccacccatacgtttgggctgaatattctgtcggcgatgacggcgattatcgccgggcatatgttcggcggcgtctttctggcgctcacctcggcgcaggggccgcaggtgggcattccgcagatggtgcagagccgcgcccagttcggccgctacggctcgctgctggtgatcgcctttaccacggtgatttatctcggcttctttatttcgaacatcaccctgtccggcaaggtgatcaataacgtcctgccggcgctgcctgtcccgtacgccacggtgctgggggcgctgctggcgaccgccatcggcgtggttggctatagctttatccataaaatcaacaagctgggcgcctggattatgggcgcggcgctgctgctcggcatggcggtgatgctgacgcagccgctgcccggcgatttctggttgcgcggacgtttttcgctgagcggctggtttgcgacgttttgcatcggcgcggtctggcagatcagcttttcgccgtatacctcagactattcgcgctacctgcccgccgaggtggggatccggcggccgtttctctatacctggctgggcgcctgctgcggcacaatcctggcgtttctgttcggcatggtggcggtcaatctggtgggcggcaacgttgaggcgatggcggcggtgcggcaggccaccggctggctggggccggtgctgatggggctgttcctgatcaatatcatctgccataacggcatgaatctctacggcgcggtgctgtcgctgattaccgcggtgcagacctttatgccgcgctggcagcccaacgcgcaggtgcgggtgctgttttccgcactggtgctgctcggatcggtgctggtggcgctggcggcgtcggccaatttcgtcagcttctttatcaatctgattctggcgctgatcgcggtgctgatcccgtggtgcatgatcaacctgatcgacttttacctgatccgcaagcagcgctacgatatcgaggcgattttccgcgccgacggcggccgttacggcctgctgaacgggcgggtgctggcggtgtatttcgtcggcatcgtggtgcagctgccctttatggagaacgcctttttcagcgggccttattcgcagctggttcccggggcggatatctcctgggtgatcagcctggtggtcaccggcctgctgtatccgctgtgctgctggcgcagcgatctccgcctggcggccgcgccgcgcgagtaa

SEQ ID NO: 443343 - DNA, 1467 bp, Serratia marcescens
atggagtcgtttgatctctatattaacgggcagttcgagccgggcgcggcgcgctttgactcgctgaacccggcgaccagcgaaccctgggccagcgtggccgaggcgcacgaggcggaggtggatcgcgcggtggaggccgcctggcaggcgtttcaccgccccgaatggcgcaatatgaccgccggcgcgcgcggcaaactgctgctgaaactggcggatctggtggaggccaacgcggcggagctggcgcggctggagacgctggacagcggtaaaatcatccgcgaaacccgcgcgcagatcgcctatgtggcggagtattaccgttattacgccgggctggccgacaagatggaagggcacgtgctggcgatcgataaaccggatatggaaacctgggtgcgccgcgagccggtcggggtggtggccgcggtgatcccgtggaacagccagctgtttttgtcggcggtgaagattggtccggcgatcgccgcaggctgcacgctggtggtgaaagcctccgaggccgccccggcgccgctgctggccttcgcccgcctgatcgatcgggccggtttcccgcccggcgtgtgcaatgtgatcaccggttttgccgaacgctgcgcggcgccgctgacgcgccatcccaaagtagaccgcatcgcctttaccggcggagcggaaacggcgcgccatatcgtgcgcaacagcgccgagaacctggccagcacctcgctggagctgggcggtaaatcgccgtttatcgtctttgaggacgccgatctggacagcgccgccaacgcgcaggtggcggcgattttctcggcctccggccagagctgcgttgccggctcgcgcctgctggtggcggaaagcgtcaaggacgcgctgctggagcggctgctggcgaaggtgcgcactatcgtcatcggctgtccgcaacagccggaaacccagttcggcccgctgtgcaccgcgcggcaaaaggcgctgatcgaacaggtggtcgaacgttcgctggcgcagggcgcccggcggctgaccgcctcgcagcccatcgacggccccggtttttactacccgccgaccatcctggactgcagcgactgcccacaggcggagagcgtgacgcgcgagctgttcggcccggtgctgtcggtgctgagcttccgcgacgaagccgaggcgatcgccctggcgaacgccacggagtacgggctggcggccggggtgtttacgcaaaacctgacccgcgcccaccgggtgacccgccagctgcgcgccggcgtggtgtggctcaacacttaccgcgccgtttcaccgctggcgccgttcggcggctacggccagtccggcttcggccgcgaaggcggcatggaggcggcgctggagtacaccaccagcaaaaccgtctggttacgcaccagcgatgcgcccatcgacgatcccttcgtgatgcgctag

SEQ ID NO: 443344 - DNA, 1038 bp, Serratia marcescens
atgaaactgtctttatttatccatatggaacgaaccacccccgatgagccgcaggagcagctctacgaacagatgatggagctgtgcgaaatcgccgatcgcggcggcgtacacaccatctggaccggggagcaccacggcatgaattttaccattgcccccaatccgtttatcaatctggtggatattgcccaccgcacccggcaggcgcgtctgggcaccggcacggtgattgcgccgttccatcacccggtgcggctggccggcgaagcggcgatgaccgatctgatcaccgatgggcggctggagctggggattgcccgcggcgcctacagctatgaatacgagcgcctgatgccggggctgaccgcctgggaggccgggcagcggatgcgcgagctgatcccggcggtgaagaaactgtggcagggggattacgcccatcagggcgagtactggtctttcccgtcgaccacttcggcgccgcagccgaaacagcagccgcatccgccgatctgggtggcggcgcgcgacccgaacagccacgaatttgcggtgaaaaacggctgtaacgtgcaggtgacgccgctgcatcagggggaagaggagatcgtccggctggtaacctgctttaaggacgcctgccgcgaatatgcgccgccgcagccgctgaaaatcatgctgctgcaacacggctatgtggccgaggacgaggcggacgcccagcaggcggcgcaggaacttaaccgcttctaccattatttcggcgcctggttcaagaatgagcgtccggtcagccaggggttgatcaagccgctgagcgacgaggagatggcggccaatagctattacaacgcagagatgatgcgcaataacctggcgatcggcaccgccgatgaggtggtggcgcgactgaagaaatatgagcagatgggctatgcggaatttgccctgtggatcgacagcggaatgtccttcgcgcggaaaaaagcctcgctggagcgctttatccgccatgtaatgcctgagtttcactga

SEQ ID NO: 443345 - DNA, 930 bp, Serratia marcescens
atggacattgaacaacgcagacaactacgtgacgccttcggcgcctttatgaccggagtgacggtggtcaccgggctggatgccgacgggcagccgattggttttaccgccaactcctttacctcggtatcgctggatccggcgctgctgctggtcaatatcgacaagcgctcggccaatctggcgaactttaccgacggtgcgcactttgccgtcaatattctggccgaacagcagaaagagacgtcgaatattttcgcccagaaggtggacgaccgttttgctcaggtggcatggcgacgcagcgctgccggcgtgccgctgctggacggcagctcggcctggttcgaatgcgaacgttttcaggtggtggacgccggtgaccacgtgattctgatcggcaaaatcagcgcctttgactccagcggcaccgccgggttgggctactaccgcggcgcctacttcacgccggcgcagaacgccgaatcgctggtcagcgggccggaagtggtggtcagcgcgctgattgaatttgacggcagcgtggtgatggtcaaacagcaggacgggcgcttccgcctgccgtcacggtcggtggccgggcgcagcgtcggcgacagcctgacggcgctgctgcaggagctggcgctgcccgccagcccgggctttgtttactccatttatgacgaccgccagtcgaaccgccagcatattgtcttcctgtgcgcgctgcccagcgacgccggcgacagcgtgccgcagggcgaacaggcctgctggctgccgctcgctcagacggcgacgctgccgattgatgatgcggcgttgaagtcgatgcttaaccgcttcgtgcgtgaaaactcggtgggcaattacagcatttactacggcgatgagcatagcggtgcgatcaaacgatttgccagctga

SEQ ID NO: 443346 - DNA, 828 bp, Serratia marcescens
atgatgcgcaaaacccagcggctgtctgaattcaacctgcaggcgagctacctggaagcaggccagggcgagccgctgctgctgattcacggcgtgggcatgaacgccgacgcctgggaaccgcagttcagcgccctgcaggcgcagtttcacgtcatcgccgtggatatgccggggcatggcggaagcgacggctttacccatgcgccgacgctgcaggattacgtggcgtggatggcggcgtttctgcgcacccgtccgcagcagcgctttgcggtggccggccattcgatgggggcgctgattgccgccgggctggcgatcgaccatccggagctggtcagccacgcggtggtgatgagcggcgtttatcagcgcagcgagcaggcgcgcgctgcggtgctgcagcgtgccggcgaactggcgcgcggcgatgcgcaactggactcgccgctggcccgctggttcagcgatacgcaggaacaggcggcgctgcggcggcgggtcagcggctggcttaatcaggtcagtcgcgacggctacgccaaggcgtatcaggcgtttgccgccggcgatgcggtctatgccggccgctggggcgaaatacgttgcccggtgctggtgctgaccggcgagctggacgccaactccagcccggcgatggcgcggcagatggcgctcgcggccccgcaggggcaggcggtgatcgtcaacaacgcgaaacatatggtgaatctgacggacgcggcgcgggtcaacgaggagctgctggcctttttaaccccgacgcaccggcacgctacggcaggagtgaacgatggacattga

SEQ ID NO: 443347 - DNA, 603 bp, Serratia marcescens
atgcatccgatgattcgtaaaacgctggtgtctaccgaaacgctgtatatcgacggcggtaaagcggcggccaaacccctggtgatgattgccgccgccgcggtgattaagaacccctgggccggtcagggctatgtggaagacctcggcccgaaaatccgtgaactggcgccggtgctcggcgagctgctgaccgggctgattgtgaaagaggccggcggcggcgagcgggtggaggccttcggcaaatgtgcggtggtcgggatggacggcgagctggagcacgcctcggcgctgatccacacgctgcatttcggcaaccactatcgccatgcggtgcaggccaaaagctacctggcgttcaataacacccgcgggccggccaacgcgccgatcctgattccgatgatgcagaagaatgacgaaggcagccgcgaacactacctgacctatcagttcgccatcgccgatgcgccggccggcgatgaaatcgtcgtggcgctgggcgcggcgttaggggggagaccgcatcaccgtatcggtaaccgttatcaggatctgaaagagcttggccatgatgcgcaaaacccagcggctgtctga

SEQ ID NO: 443348 - DNA, 693 bp, Serratia marcescens
atgagagagaccgacaggatgacgcacaccccactgaagattgaaaacgcgccgctgacgctgcgtgaactggcgctgaataacgtccgccgcgcgattatttccggctacttcgccgccggcgaccggctggtggaacgaacgctcagcgaggagctgggcgtcagccgcagcgtggtgcgcgaggtgatccgttatctggaagcggaaggactgattgagattctgcccaaaaaagggccgattgtggcgatcctcacctgggagattgccgaacagatttacaatatccgcctgttgctggagcaggaagccgcgcacgactgcgcgctgcacgccaaaagcaaggataagaaactgctgcacgagaagctgctgcacatcgaccgcgcctcccgtgagcaggatgacatcaagcgcgtcgacgcctcgcaggagttttataaaaccatcttcgacgtcgccgggcacgccatcgcctgggagatcgtgcagcgcctcaacagccgcatcagccggctgcgggcgctgacgctgaaaacccatgagcggcaggtggcgggctatgaacgcatgacgcgcatcttcaatgcgattgagaaaaacgacccggcgcaggcgaagcaggaagtgtttgagcacctgaccgaagcctccgcgctggccagactgatactgcaaccacaggagtaa

SEQ ID NO: 443349 - DNA, 303 bp, Serratia marcescens
atgcccgcttactggattgcccacgtcacggtgacagatccgcaacgttatcaggcatatatggccgccgcccccgaggcgttccgtcagtacaacgcgcgttttctggcgcgcggcgaacaggccgaatcgctggagggcgcgcctttcaccaagcacgtgctgattgagtttgacgactaccagagcgcgctggcctgttaccgctccgaggcctatcagcgggcaaagcaggcgcgtacgggctgcgccgaggtgatgattacgattgtggatgggctgaacatcacgcagcaggcctag

SEQ ID NO: 443350 - DNA, 894 bp, Serratia marcescens
atggatcatcacttactggcgattcgcgtctttatccgcgttgttgaaaccggcggctttacccgcgccgccgatgcgctgcggatgccgaaagccaccgtcagcaagctgatccgcaacctggaaaatcacctgcagaccaagctgctgcagcgcactacccgcagcgtggcggtcacgccggaaggcgaatgctattaccgccgcacggtaaaatggctggcggagctggagcagatggaaggttgcatgaccgaatcgcaaagctcgccgcagggggtgctgcgcatcgacgtcggcggcagtaccgcgcgtcagctgctgctgccggcgctgccggacttcttcgcccgctatccgcagattcagatcgaccttggcgtcagcgaccggcaaatcagtctgattaatgacaacgccgactgcgtgatccgcagcgggccgctggcggactccagtctgatcgcccgccggctgttcaacctgagctgggtgacctgcgccacgccgggctatctggcgcgctacggtacgccacgccatcccgccgagctggagcagggctttccgctggcgcactaccggcacgcggcaaacgatcgcatccagccgctgcgttttgtcgaagagggccgacagtttgagatccagcaccgttatcaaatcagcgtcaacgaaggcggcacgctgctggccgcggcattgtccgggctgggcattgtgcagacgctgagctttatggcgcagccgcatctggcgcgcggcgagctggtcagcattctcgacgactggcagccgccggcggaacccacctacgtggtctacccgtccaatcgtcacctgagcagcaagctgcgggtatttatcgaatgggcgatagaacactttgcctga

SEQ ID NO: 443351 - DNA, 303 bp, Serratia marcescens
atgaaaaaacgtacgccgagccagcgcatgacggaagatgagtttatcaacagcgccacctcgcatacgctgcaggtgccggcgccagctgccgaggccaaaccgcaggggcgcaagcgcacctataaggcgctgtccgtcagcctgaccgacagccacgtcgaagccattgacgcgatgatcgtgctggcggcgcgcaacggcatcgtgcgcgtcacccgttccgatatcatcaagctggccatcgacggcctgacggaaaaaagcgagaaccacctgctggaattgctgaagaaatcctga

SEQ ID NO: 443352 - DNA, 882 bp, Serratia marcescens
atggatatcaaccggttacttgtttctgagcttatatcggcccagtttcctcagtgggctaatcttgccatatggcctgtggaaacgagtggatgggataaccggactttccatttagggaatgatatgctcgtccgcttaccaagcgcagctcattatgccgggcaagtggagaaagaacaggagtggttaccgaaactggccccgtttttgcctaataaaatccctgtccctttaggaatgggctcaccaggcgagaattatccctggaaatggtccgtttaccgatggattgaggggaaaacggttgcttcatcccctgaagttgacctctgtgtgctcgctaaagatttagcaaattttcttgtctcactccaggcggttgactcaaaagatggacctgttgcagggcctcaaaatttttatcgcggtggttctgttgctgtatacgattcagaaaccagacaggccatcagggtattaagcaataaagtacattcaggtctggtgacagaaatatgggaagccggcagctctcaaacctggtcaaaagagccggtttgggttcatggtgatataagcgcaggaaatttgttaattactaacaatcggctggatgcagttattgattttggacagctatgcatcggtgatcctgcatgcgatctggttattgcctggacattattcgatgctgaaagcaggcaggtattccatgatgctcttttgcctgattcgggcacatgggcacgtgcccgctcctgggctctatggaaggcattaattgtgatgacaaatgccgctcagactaatgttgttgaggcaaaacaagcatatcggacattcgaaaacattcttgctgaatatggtttaaaccactaa

SEQ ID NO: 443353 - DNA, 2298 bp, Serratia marcescens
atgaaatggctttgtacagtgggtttggtatccggtctggcggtcagtccggtctttgcgcaggagagcggcgcaacgcaaggaatcaatgttcagcagcgcgatgcgttcgtcagcaagctgatgaagcagatgacgctggaagagaaaatcggccagctgcgtttaatcagcgtcgggccggataatccgaaagaggcgatccgcgaaggcatccgtaaggggcagatcggcgcgattttcaacaccgtcacccggccggatatccgcgtgatgcaggatcaggcgatgcagctcagccgtctgaaaatcccgctgtttttcgcctatgacgtggtgcacggccagcgtacggtgttccccatcagcctggggctggccgccagtttcgatctggacgccatcgcgctcagcgggcgggtctccgcccaggaggccagcgacgacggcctgaatatgactttctcgccgatggtcgacattacccgcgacccgcgctggggccgggtgtcggaaggcttcggtgaggacacctggctggtgtcgaaaatcgccaaagtgatggtggacgcctaccagaacggcgatccggccaagcccggctcggtgatggccagcgtgaagcattttgcgctgtatggcgcgaccgaaggcggacgcgactacaacaccgtggatatgagcccgctgcgcatgcagcaggattacctgccgccgtacaaggcggcggtagacgccggcagcggcggggtgatggtgtcgctgaattcgattaacggcattcccgccaccgccaacccctggctgctgaaggatctgctgcgcaaccagtggggctttgacggcatcaccatcagcgaccacggggcgattaaagagctgatcaagcacggcgtggcgcaggacccgcgtgatgcggtgcggctggcgatcacctccggcgtcgatatgagcatgagcgacgagtattacgacaagtacttgccggggctggtgaaagaggggcgggtgccggagagcgacatcgaccgcgcctgccgtgacgtgctgaacaccaaatatgagatggggctgttcaaggatccgtacgtacaccttggcccggccggctccgacccgcaggacaccaatgccgaaagccgcctgcaccgcgccgaggcgcgcgacgtggcgcgccgtactcaggtgctgctgaagaatgaccaccagaccctgccgctgcgcaagcagggcaccattgcgctggtggggccaatggccgacagccagcgcgatatgatgggcagctggtcggccgccggcgtcagcaaacagtcggtgactctgctgcaggggatgaaaaacgcggtcggcgaccaggcgaaaatcatttacgccaaaggggccaacatcacgcaggataaaagcatcattgattatctgaacctgtacgagccggcggtggtgttcgacccgcggccgccgcagcagatgattgacgaagcggtgaacgccgccaagcaggctgacgtagtggtggcggtggtcggcgagtcgcagggcatggcgcacgaggcgtcgagccgcgccgatatcaccattccgcagagccagcgcgacctgatcaaagcgctgaaggccaccggcaagccgctggtgctggtgctgatgaacggccggccgctggcgctggagtgggagagccggcaggcggatgcgatgctggaaacctggttcagcggcaccgaaggcggcaacgcggtggcggacgtgctgttcggcgattacaacccgtccggcaagctgccgatgactttcccgcgctccgtgggccagatcccgatgtactacaaccatctgaacaccgggcggccgtttaacaaggataatccgggcaagtacacctcgcgctactttgactcgccgaacggcccgctgtatccgtttggctacggcctgagctacagccgcttcacgctgtcggacttcaccctgtccagcccgaccatggcgcgcaacggcaaaatcaccgccagcgtgacgctgaagaacagcggcaactacgacggcgccaccgtggtgcagctgtatctgcaggatgaaaccgcgtcggtcagccgaccggtgaaagagctgcgcaacttccgcaaagtgacgctgaaggcgggccaggcgaccacggtcgagatgccgatcgatgaaaacgatctgaagttctacaacgccagcctgaagtggggcgcggagccgggcaaattcaacgcgtttgtcggtctggattccgctcagacgctgcagcagagctttacgctgaagtaa

SEQ ID NO: 443354 - DNA, 921 bp, Serratia marcescens
atgcccacgacgttaccttcgctcgacgtgttgaaaacctttgttgcggtggcgcaacggctgaactttacccatgccgcgcaggcgctgcacctgacgcagggggcggtgagccggcagatcctcggtctggagcggcagcttggctacccgctgttcagccgccatgcgcgcgggctggcgctgacgccgcagggcgcgcagctgctggggccggtgagccaggcgctgagacagctggccgaggccgtcgcccgcgtcggcgcccagcccggcacgctgcgcatcaagtgcccgacctgcgccatgcgctggctgttgcccagaattattcgtctgcagaatgagcggccggaactgcatatcgaactgaccgcttcggtatcgcaccggctggattttgccggcgagcagtttgacgcggcggtgacctttggcgcgccgccgggcaagcggctgacggcgcacccgctgtttgacgaggtgttgacgccggtttgcacgccgggctacctgtccgccgcgccgcagctggcggagttggcggagaaaaccctgctgcacccgacgcgcgaccggcgcgactggctgcgctggctgaaggcggccggcggcgcggcgctgccctcgcgtaaatcgcagcatttcgacaccctggatctggcaatgagcgcagcgctgcagggattgggcatcgcaattggcgatctgtgcctgctggaggaggatattcaggcgcggcgcatcgtgacgccgtttgcgctgagcgtcgccagcggcgtcggctactatttggtctatcctgaacgtacgccgtcgccggacggactggccctgctgacggattttctgacgcaggaggcggcgcacagccgcgcccggctgacgcgctatctggcgacgacggctaacagcttgtaa

SEQ ID NO: 443355 - DNA, 1155 bp, Serratia marcescens
atgcagagcgcctgttcaccccgttccaaactgccggacgtcggcaccaccatttttaccgtgatcggccagctgagcgccgaacatcaggcgctgaatctggcgcagggcgcgccgaatttcggctgcgcgccgcagctgattaacgacgccgagcaagccatgcgcgccggtcataaccagtatgcgccgatgagcggcgtggccgccctgcgccacgcgctggcggaaaaaacgcagcgtctgtacggcgcgcgctacgacgccgacgcggagatcacggtgctggccagcgccagcgaaggcctgtacgccgccatcagcgcgctggtgcagcgcggcgacgaggtgatttatttcgaaccggcgttcgacagctatgcccccattgtgcggctgcagggcgcgcggccggtgcccgtccggctgtcgctgcaggatctgcgtattgactgggatgaggtcgctgccgccatcaacggcaacacgcggatgatcattatcaacagcccgcataacccgaccggcgcactgctcgacgagcaggacatcgcgcgcctgagcgcgctgacgcgcgataccgatatcgtgattctgtcggacgaggtgtatgagcacgtggtgttcgacggcgcgcagcatcacagtatggcgcgccatccgcagctggcggaacgcagcgtgatcgtctcgtcgttcggcaagacctatcacgttaccggctggcgcatcggctactgcctggcgccggcggcgctgacggcggagatccgcaaggtgcatcagttcctggtgttctccgccgacacgccgatgcagtacgcctttgccgcagcgctggccgacgcgcagagctatctcgggctggccgccttctatcagcaaaagcgcgatctgctggccgcggcgctgcaaggctcacgctttgagctgctgccgagcgccggcagcttctttatgctggcgcgctttagcaccttcagccaggagagcgacaacgacttcgccgtacggctgatccgcgaggcgaaagtcgccgccatcccgctgtcggccttttacagcgacggcgccgacaccggcattattcgcctgagcttcgccaaagatgaccagacgctgcgcgaaggcgcgcgccgtctgcacaccgtataa

SEQ ID NO: 443356 - DNA, 792 bp, Serratia marcescens
atgaacaccacactgaaaacactgctggccgccggttgtctgcttgccgccggcgcaacgcaggccgccgacctgcgcttcggcgttgaggcgctgtacccgccgtttgagtccaaatccgccagcggcgaactggaggggtttgatatcgatttgggcaacgcggtctgcgccgccgccaagctgagctgcagctgggtggaaacctcgttcgacagcctgattccggcgctgcaggcgcgcaagtttgatgcgattaactcggcgatgaacgtcaccgaacagcgtaagcgggccgtcgccttcacccgggcgatttatcaggtgcccaaccggctgatcgccaaagccgacagcgggctgacgcccgacgccaaagcgctggccggcaagcgcgtcggcgtgctgcaggggtcgattcaggaaaactacgccaaggcgcactgggcgccgcagggcgtcgaggtggtctcctatcaggatcagaatcaggtatacctcgacctgagcgccggacggctcgacgccacgctgattatggcgcccgccggccagagcggttttctctcccgcccggacggcaaaggctttgccttcgtcggcgacacggtgcaggacgcgaagattttcggctccggcatcgccttcgggctgcgcaagcaggatagcgcgctgaaacagcggctggacgcggccattgagcaggtgcagcagcagggcacggtcgataaactggcgaaaaagtatttcggcgatattgacgtgtccgtgcagccgcagacggcgaaataa

SEQ ID NO: 443357 - DNA, 1899 bp, Serratia marcescens
atgtcgtggatgaatcacatttcaatgaagatgaagctctttgtggcgttgctaccgatgctgctggcgctgtgctggtttgtcggctcgggcatggtcacgcgcatggaaacgcagcggcagatggacaacctggggcaactgatcgcactggccggcagcgtcggcggcgtgattgatgaactgcagaaagagcggggcatgagcgctggagtgctggcgtcagctgggaaaaacttcaccgccgagctggcggcccagcgcaaacagaccgacagcgcggtggcggttttccgtcgtgcgctggccggcgatcggcagagcgcgggcgataacgcccggatgttggcgtcgttcaacgatcgcctgcaagcgctcgatgccgttcgctcccgggtcagcgggctggatatcaacgccgccgacgccgttgcggtgtataccgccgccatccgcgatcagctgcgctttgtcggcgggttgagccagctgtcatcgtccggcgagctggtcagcgagctggcggcctactacagcctgctgaacctgaaagaacaggccgggttggagcgggcgctgctggccggcgtctttgctgccgatcgcttcggcaacggccagtatcgcgcgctgagcgcggtggtggcgcagcaggcggcctggctgacggccgctcagcgcctcagcaacccggcgctggcggcggcgctggaaaaatcacaacaggcttctgcggcgcaggccgccttgagattgcgtgataccgcgtttgcccgtgccgagcgcggcggattcggcatcgacccgacgcagtggttcagcgcgcagaccgcgcggattgatgcgctgcaccagttggaaaacggcgccgtcagcgcgctgcagaacacggtatcccagctgtcggcgcaggcgcgcggcgactggcagcgctttttgctgatcgggacgctggcgctggccgccgccttgtcgatcgccgtcgtggtcgccagacgcctccaccgtcatctggaggggacgctgggcaccatccagcggatggaaagcgactttaccctgcgtctggcggtgccgggcagcgatgagctgtcgcggcttaacgcggcctataatcaggcgagcggcaatattcagcggatgattcagcagatcaacgtcggcgccggggagttacgcactaccagcggcgatatcgccgtcggcaaccaaaatctggcgcagcgcaccgacgagcaggcggcgtcgatcgtggagacggcggcgagcatggagcagatcgccaccgccattgcccacaccgccagcaacgccggcgaagcggagcggttgattggcgccatgacgcaggaggtgcaggaggccagccgcatcgccgatgacgccagccagagcatggtggcgatccgcgcctccagcgaacagatcgcgcatatcgtcagttcgattgacgatatttcgtttcagaccaacctgctggcgctgaatgcggcggtagaggccgcccgcgccggcgagtcggggcggggcttcgccgtggttgccgccgaggtgcgcaatttatcgcagcgctgcacgcaggaagccaaccgcatccgtgcgctggtcggccagaatatggagcaaatcggcgaaggggtggcgcgggtggccgactcaaaccgcgcgctgcaggcggcggtgggcaacaccgggcagatgcggcaatacgtcagcgatatcgcccacgccgcgcaggagcagacgctcggcgtgtcgcaaatccaacaggcgctgaatcagctcgaacaggtgactcagcaaaatgccgcgctggtgtctgaggtggccgccgccagccaggtgctggacgagcaggcggaaacgatggccgcgctggtgcattcggtggggaaataa

SEQ ID NO: 443358 - DNA, 1107 bp, Serratia marcescens
gtgactaaacgacgtgttggcgtaatttttggtggtaaatcggcggagcatgaggtttcgctgcagtcggcaaaaaacattgtcgatgccatcgacaaagagaagtttgacgtcacgctgctgggcatcgacaagcaggggcagtggcatattaatgatgcctccaactacctgctgcatgcggaaaacccggcgctgatcgccctgaaccactccaacaaaaacgtagcgctggtgccggggcaggagagcagtcaactgattgaggctgacagcgccaacgttatcggccagctcgacgtggtgttcccgatcgtgcacggcacgctgggggaggacggttcgctgcaggggctgctgcggatggcgaatatcccgtttgtcggcgccggcgtgctgggctcggcggtcagcatggataaggacgtcaccaaacgcctgttgcgcgacgccgggctggaggtggcgccgttcgttaccctgacgcgcagcaaccgtgcgcagtacagctttgcacagctgagcgaacagctggggtcgccgctgtttatcaagccggccaaccagggctcctccgtcggcgtcagccgggtcagcgaccgcgcaggctatgagcaggcggtggcgctggcgttcagcttcgaccataaggtgctggtggagtcggcgatcgtcggccgcgagattgagtgcgcggtgctgggcaacgaccagccgcaggccagcctgtgtggtgaaatcgtgctgagcgacgagttctactcttacgataccaaatacatcaacgaacagggcgcgcaggtggtggtgccggcggcaatctccgagccggccagcgacaaaatccgcgaggtggcgctgcgggcgttccgcgcgctggactgtctgggcatggcgcgggtcgacgtgttcctgaccgccgatgagcgggtggtggtcaatgagatcaacacgctgcccggcttcaccaatatcagcatgtatccgaaactgtgggcggccagcggcatgagctacagccaactgatcaccaccttgatcgaactggcgctggagcgccatcagcaggatcgcgcgctgcacagctcggtgttcgagcgcgactaa

SEQ ID NO: 443359 - DNA, 1719 bp, Serratia marcescens
atgacgcacagcgcccgcagtgaccagcaggcatttatcagtcagttgaaacaaatcgtcggcggcccgcagctgcagaccgatgcgcgcagcaccgagcgctaccgcaagggtttccgctccggcgagggccaggcgctggcggtggtgttcccgacccgtctgctgcaattgtggcaggtgctgcaggcgtgcgtcgatgccgataaggtggtgattatgcaggccgccaacaccggcctgaccgaaggctccacccccagcggcaacgactacgggcgcgatgtggtgattatcagcacgctgcgccttgaccatattcaggtgcttgctcaaggcaagcaggtggtagctttccccggcagcactctgaaccatctggaaaagtgcctgaagccttacgaccgcgaaccgcattcggtgattggctcctcctgtatcggcgcgtcggtgatcggcggcgtgtgcaacaactccggcggctcgctggtcaagcgtggcccggcctataccgaactggcgctgtacgcccaactggacgccgacggtcagctgcggctggtcaaccatctcggcattcagctgggcgacacgccggaagagatcctcacccggttgcaacaaggcgactaccggccggaagacgtcgagtacggcgagctgcgcgcctccgacaatgagtacgccgcgcgggtgcgcgacgtcgatgccgacaccccttcccgcttcaacgccgacaaacgccggctgtatgaggcctccggctgtgccggcaagctggcggtgttcgccgtgcgcctcgatacctttgaaaaagagagccgcgagcaggtgttttatatcggcaccaacaacaccgcggtgctgaccgagctgcgccgccatatgctgagccagtttgagaatctgccggtggccggcgagtatatgcaccgcgatatcttcgacattgccgaggtgtacggcaaagacaccttcctgatgatcgacaaactcggcaccgatcagatgccgcgtttcttcacgctgaagggcaagatggacgccaccttcaacaagctgccgctgctgccgcacaacctgaccgaccgggtgatgcaggggctgagccatctggcccccagccatctgcccaagcgcatcaaggaataccgcgaacgttttgaacaccacctgctgctgaagatggccggcgacggcaccgatgaggcctacgcctacctgaagcaatactttagcgaggcggaaggcgacttctttgtctgcagcgcggaggaagggaaaaaagccttcctgcaccgctttgccgccgccggcgccgccgtgcgctaccacgcggtgcacgccgacaaggtggaggatattctggcgctggacatcgccctgcgccgtaacgacaccgactggtttgaaaccctgccgccggagatcgacagccagctggtgcataaactctactacggccactttatgtgccacgtgttccatcaggactacgtggtgaaaaaaggcgtcgactgccaccggctgaaacaacagatgctggcgctgctggaccagcgcggcgcggaatatcccgctgaacacaacgtcggccacctgtatcaggcgaagcccgatctgcaggcgttttaccgccaggccgacccgaccaacagctttaaccccggcctcggcaagaccagcaagctgaaaaactggggcgagcagcagccgtaa

SEQ ID NO: 443360 - DNA, 1128 bp, Serratia marcescens
atgactgaagccaagaaaaatgcacaagtgctgaacggtgtgaatgatgacattagcgaactgaaagcgttatccacgctgcgcaaacgcgtcatcagcgacggcgagatcgtcgccaaatcaccaaacggttttcgtctggcaaacggcaacaccggcgtgatattgcgtaacgacggtaaggatttttacgcgctgaccacgccgagcggccaggctcaaaatggctcgtggaacaccttgcgtcctttctcattcaatcttgcctccggcagagtatcgctgcgcaacggtgttgatatctccggcggcgcaatgatctcgcataacgccggtatttccaccaagaccaccggaccggctccgctaatcaacggacaaatttattatcccgcagatgtcagcgccaatttcaccagcggcaatgtcaccaccaccatgttgatgggatcgcgggtcgtcgccggcaaagaggattatgggttgctttcttaccgcgattggcaagggaactggaacgaaatccaggtgagagccaatgccgagttatcggtgggacaattagtaaagcgtaatccttatggctggattgtcgctgccggtaacttcgacaccaataacaatgccgaccgaattaccaatgccatgcgcctgcaggggaaagacgatctctttgccgacctataccattatgaacgcattggccaacaccattttatggggttgcatgtagccaacggcggcgcacaaggctggtatgaattccgcaacgacggccatgcttacaccaacggtgcctggaacagcagctccgacgcccgcatgaaaacggatatcacgaaaatctcaggcgcgctggagaagctgaccacaatcagcggttatacctacctcaagcagggcatgccggaagccggtgtgattgcccaggaagtggaaaatgtcttgccacagtccgtcacccaaaccgaattgaccatgaatgacggcagcgttctgagagacgcccgcagcatcaatatcaacggcgtcgtggcgctgctggttgaggcgcttaaggaagaacgggaagcccgcatcacattggagacgcgcatcgcggctctggaaaaaacacttgccggctaa

SEQ ID NO: 443361 - DNA, 2031 bp, Serratia marcescens
atggcaacacccgcatattacctcaatggcataccgcatgatgccggaggccgccctattatcaccatcaccggtggcccaaacagccccgtaggaaacggcggaatctatcccggaatatctttccctgtttatgttccctggccaggtatcggcagcagaccgaatagcggcggcagcatagcttatgacccgaacaaattaacatttaccggcttatattatctgcgagagagccagaaacaaataaatcaaatcctggaacaggccagcaatgcgtacccactgcatgcagatcaaaccagagatgaggccagtgcgttacttgctgacttaaaaaatagcggattgattaatcatcctgaaattaacccgctggctaatgctctacaggattctgttaatgcattacagattaatatcgatttaaaaaatcgagacggaaatattgccaatcggaaaacacaggaggctgaagacacgtttaaggacttcatgcatcgctataaactcgcgaactttatcgacaaatctgccgccatgattgatgtggcgatatcaacaacgggtccatggttcatcaagttatggaatgaaactgtcccccctaaaatcagcgaagagattgaggtaaaaaataagctcatttcatatctcgatcgggtaaaaacaattacagaagatgcaaataataagaaaaacaccctgactgagataaaaaacaggatagagattgaacaagcccgtaaggcggaagaagccagaaaagcggaggaggcccgccaagcgctgtttgccacagcgggggtacgggatactcccacctacacgccggaaaaagccaacgccgccactgccgccttgatgacggccggtaccatggtgctgaaccgcgcgcccggtatggtgcagttgtcaacggtggcaaacggcgtaatgacaacggccagcgagatggctggctgggtatccagcgcgatgtggcgaggcgcggtcgccgtagccgaggtggcaacggtcagtagcgtcggtgcgacggtcggcgcctttgtggtcggtttttggccgggcaaggccggggaaggcagcgaccacgttcccggccgcgatattaagatgtttgccacgcaggcaggtttgttcgctgccggtaaaaccgccgttcagccggaaatggatgtggtcgatttgccggtccgtggctttatcgcaacggatgatcatgggcagcagaatgtgtatcttgtcaaaaccggggccggcggcgtatctgccagcgtgccggtgtaccgaccggtgcgtgatgaacagaccggcctggacaggataacgctgccggcaatggccggggcgccgtcgcgaaccattttggtcaacccggtgccggtcggccctaccgcaccatcccacaccggtaacgatgcaccggtgccggtgacgccggtgcataccggcacggaggtgcggcaggcggacagtatcgtcaccaccacctttccggccggtgatatcccgccgctgcaggatttcatctattggcagccggatgccaccggcagcggcgttgagccgatttatgtgatactgagcggaatttatggagaaactaatgccaaaggaaaatacagcggacgtgactacaataccgaccaagccggtggccctatccagaacctggactggagaacggccaacatcgaccgggcaggcgtggataaggtgaagttgcataccgggcggtttgaagacacccccgaaaacaaggtgatgattgaccgactggagaaaattttgcagggtaagctacaggcaacggataccgacaagcgtttttatacccatgaaattagggaattggagcgttatcagaatctagggattaaagatggggagatcccagaaaactatgatgaagtttggaataatacccatacagcaaccctagaagactataaaatagatgaacgaactcaatctttatatacacctgaagcagaagaagcatatcgcaaagcagaggagggaaaataa

SEQ ID NO: 443362 - DNA, 264 bp, Serratia marcescens
atgctagatcttgaagggatttacaaaaatgaaagcgtagaagatgttcttttgcattttgccccacgaacaccttaccccagtatcgaccgtatgtacgtacgctacaaatttgaagtcattgcaaatggtgaattactacggactcatcaacgattattcaaagaaggaaagttgatgaaaacggaaaagaaactaccggagaaaggtcccaactggaaagaaccaaaattcgtcaccgagaaaaaatacggcatcggataa

SEQ ID NO: 443363 - DNA, 264 bp, Serratia marcescens
atgtcaccaattgaaaatattattaaaagtgaaagtgttgaagatgtgcttttacactttgcacccataacgtcatacccaggaattgatcggatgtatgttaattataaattccaggtgatagagcatggcgaattactgtcaacgtatcagcggctggtgaaggaaggtaaactaactaaagacgataaaggccatacgattaaaggaccgaactggaaagaacctaaatttgtgaccgagaaaaaatacggcatcgagtaa

SEQ ID NO: 443364 - DNA, 270 bp, Serratia marcescens
atggaatctcccgaaaacaaggtgatgattgaccgactggagaaaattttgcagggtaagctacaggcaacggataccgacaagcgtttttacacccatgaaatcagggaattggatcgctaccgggcgctgggcattcctgatggcaccacccaaaaaaatagctacgaagtctggaataatactcacacagcaacattagaagattaccagcttagttctgatgaaagcctgttatacacaccagaggctctgaacgcacataactaa

SEQ ID NO: 443365 - DNA, 291 bp, Serratia marcescens
atgatagattacaatgcaatggttaaaaatgaaaatatggcagacgttattctttatctagttggacgaaaagaagagggcatggcatatccatccattgacctgttctttggcagatataaagcagctgaaaaatatgagtcatataatataaaactaattcatgaaattaagcaccttgaggaaatcggtcaggtagttttagaaagagtttatggggctaaatgtaaaaaaggccctaactggaaagaaccaaagttcgtcaccgagaaaaagtacggtatcgaataa

SEQ ID NO: 443366 - DNA, 879 bp, Serratia marcescens
atgtttacaggtctgagcgcttttccgctgaccccggtgaccccttcggggatcgacgaaaaaggttttgtgaatatcctggcccggctgaccgaggccggggttgattcgctgggcgtcttaggttccaccggcagctatgcctatctgacgcgtgagcagaaaaaacgcgtcaccgcgctggcggcgcagcacgccggcggcattccgcagatggtttgcatcggcgcttacggcacggagcaggttctgcagctggccgacgatgcgcagacggcgggcgccgatgcgctgctgctgccggtgctgtgctatcagtcgctgacggatgatgaagtttatgcgctgtatgaaaccgtagcgcgccatagttccgtgccgctgtgcgtgtataacaacccgcgcaccacccgctttgagttttccgatgcgttactggcgcgcgtcgccgccctgccgggcgtgcagtcgatcaaaatccccggcgtgcaggcggagccggtgcgaatgcaaagcctgcggaagatactgccggcggaggttaccatcggcgtcagcggcgatgagtttgcagggcaggggctgaatgccggctgcgaggtgtggtattcggtgtgcggcggcctgttcccgcacagcgccagacagattgtcgacgccgcgcgggcaggggacagcggtcgcgttagcgagctggttgcgcggctggaaccgctgtggcaactgttccgccgacatggcagcatccgcgtgatggccgccgccgccggtatcctcgggctgagcgacatcgactgcctgccgcgtccgctgcagcccttgccggccgaagcctgccgcgatatcgccgcggtaatgacgcagttggaactgcgctaa

SEQ ID NO: 443367 - DNA, 852 bp, Serratia marcescens
atgcgagttatttcccaatcagccaatgccgcgatggcgacgctgtttgtgctgctgtggagcagcggcgctattttttcccgctgggggttggagcacgcctccgccttggtgtttttattcttccgctgcgccatcgccctggcgctgttgacggcgatcgggctgtggcagcgacgtctgttgcccgacgccggcagtcgccggcgcgtggcgctgatcggtctgctgatgatcggctgctaccaaaccgcctatctgctggcgctggaatggggcgtcacccccggcgtcctggcgacgctgctcggcgtacagccgatcatcacccagttcgttaccgaacggcgctgcggcgggctgcgcggcctggggctgctgctggcgctgggcggcctgacgctggtggtgtatcagagcatcaaggtggcgcacttttcaccgcttggcatcgcctgcgcctttgtcgcgctcggctgcatgaccctcggcaccctgctgcaaaaaggtatgcagcagtcgccgctggctgtgctgccgctgcagtacgccgtcgggctgctggtatgcgcgctggcaatgccgttcgcgccgctgcatgtcgaatggcggccgggctttatactgccgctgctgtggatggcggtggtgatctcggtgctggccaccttcctgctctaccggctgatccagcgcggtaatctggtgcaggtcaccagcctgttttacctgatcccggcggttaccgccctgctggattatctgctgctcggccaccggctggcggcgctgagcctgctcggcatggccggcatcgtgctcggcgtgatgctggtgttccgcaaggcgtaa

SEQ ID NO: 443368 - DNA, 468 bp, Serratia marcescens
atgaccgcaaaacttcgcacccgccagagcggcctggcggatatcacctatggtgaaaacgtcctggtggtcgaaccctgtaatctgtacggctgcaccctgggggacgaggtgttcgtcggcccctttgtcgaaatacaaaaaaacgtcaccgtcggcgcccgcagcaagatccagtcgcacagttttctctgtgaatatgtgacgctgggcgaggagtgctttgtcggccacggcgtgatgttcgccaatgaccgcttccagagcggcgcccctgacgccgacccggcgaactggggccatacgcacatcggcaaccgggtctcaatcggttccggcgccaccattttaccggtgcgcatctgcgacggtgcggtcatcggcgccggcgccgtggtgacccgcgatatcacccgcaaaggcatttacgccggcaaccccgcccggctactgagggagctgccctga

SEQ ID NO: 443369 - DNA, 540 bp, Serratia marcescens
atgaatgcagtccggattgaacgcatcaccgacctgcccgccggctatctggaaaataacgatttcaccttttacgtcgaatgctatgcacagccggcttttggcacgccggtcgaacgctggcctacccagccggtggcgccgtatcgcaaacactacccgctggcgccctttatcaacgacgaaggtgacacctttctggcgttgcgcgacggcgtggcggtcggccatatcacgctgagtaaaaactggaacgactacaccctgattgaagaggtggcggtcagccgcagcgcacggcgcaacggcatcggcagcgcgctgctggacgccgcgcagcagtgggcgcgcgaacgcgataccgccgggctgatgctggaaacccagaacaacaatctggccgcctgccgctgctatcagcgctacggctttaccctcggcggcatcgaccatctgttgtaccgcggccagccggatattgccgaccatgaaatcgctctattctggtatctgccgttcaataacgaggtcggttattaa

SEQ ID NO: 443370 - DNA, 825 bp, Serratia marcescens
atgagcaaggtcgctccatggttgttaatggtcgtattggccggctgtgccggcacgccggacggcggcgcgtcttcgccgcatcctgcacaacccgcggaaacccaagtgaacattgacgatatcacctcagcccggctgcagcgcctgctggcgctgcgtaaatcaatgccggcgctggacgacggcgccgtcattgaacggctgtcccgccagtttctcgacgtgccttacgtcgccgataggctgatcggcgacgccgctacgccggaacggctggtgattgattttcgcggactggactgctttacctatctggactatgtcgaggcgctgcgccatgccgatgaccaggcgcagtttgtccggcagctgatcgccacccgctaccgtaacggcgaggtcggtttcctgacccgtaaacactttttcagcgactgggcctatcagccagccgtccgcgccgatgacatcaccaccgacctcagcccgcacgccatcacgctgagcaaagtgctgaaccgcaatgccgacggcggccagtatctgccggggctgccgaacgccacgcgccgcatcagctatattcccagcgaatatgtcgatgcccggctgctcagccggctgcgcaccggcgattacatcggcatctacaccaatctggaggggttggacgtcacccacgtcggcatctatatcatgacgccggccgggccggttttacgcaacgcctcgtcgcgcaaggaaaaccgtaaagtggtggattcaccgtttatcgactacatcagcagcgcgccgggcattgtggttctgcgtccgcgctaa

SEQ ID NO: 443371 - DNA, 813 bp, Serratia marcescens
atggcaatttaccggcgttgcgccatactggcggcggccatgacggcctcgctgctgttagcaggctgcgatcggcaagacgatcgccaccatatcaaggtcggcgtgattaacggcgccgagcaggacgtggcggaggtggcgaagcaggtcgccaaggaaaaatatggcctggaggtcgagctgttcggcttcagcggtgccctgctgcccaacgacgccaccgataagggcgagctggacgccaacgtcttccagcaccgtccgttcctggcgcagcagaacaaagaccgcggctatcatctgacggcggtcggcaacacctttgtcttcccgattgccggctactcgaaaaaggttaaatcggtcaatcagctgcgggacggcgcggtgatcgccattcccaacgacccgaccaacctcgggcgcgcgctgctgctgctgcagaaaaccgggctgatcgcgttaaaacccgataaaggcctgctgcccaccgcgctggatatcagcgccaacccgcacaactaccgcattatcgagctggaaggcgcgcagctgccgcaggtgctggacgacccgagcgtcgacgtggcgattatcagcaccacctacatcaaccagaccgggctgacccccaccaaagacagcatctttattgaagacaaggattcgccgtacgtgaatatcgttgtggcgcgcgaagacaacaaggatgcgccgaaggtgcaggagttccttaaggcttatcagtcggatgaagtcgcagcggcggcggaaaagatctttaacggcggcgccgtcaaaggttggtaa

SEQ ID NO: 443372 - DNA, 1029 bp, Serratia marcescens
atgttattgaaagtcggcgaactggcgcgccgttctggtattaccgttcgcacactgcattactacgacagcattggtttgctggtcccttctgcgcgctccgacgccggctaccggttgtataaccgggccgatatcgcccgcctgcatcatatccaggcattacgccgtatgggaatgacgctggccgaggtcggggcgattctggaacgttcagatctggcgctacccacggtgctcagccgccagattgacatgctgaaccaacagctgacgcaaatcaccgcgctgcgcgatcgcctgcaagcgatgcatacgcaactgacggcgggtgatgagccggatctgaacgactggctgacaacgttggagttaatgaccatgtacgataaatatttcaccgccgatgaactggcgcagctgccgttttatcaggccgatacgcaacgccagcaagagtgggcgaccatggtgcagcaggtatgtgaactgatggcaaatggcacgccggcgcaagatccgcaggcgcagcgcattgcacgccgctggatgctggccctggagcgcgacaccgccggcaacccggcgtttctcacacgtctcaacaccatgcatgccgatgaaccctcaatgcgcgagcagaccggtatcacgccggccatgaccgattacatcacccaggcatttgccgaaaccaaactggcgatttaccagaaatacctggatgaagatgagtatgcctatgtccgcaaacactatttcgaccgcatacaggagtggccggcgctgatagcccgcctccgttctgctctcaacgacggtatcgcaccggacagcgggcaggcccggcaattggccgctgaatggctggcgctgttccgctcctacgccggcgacaacccggcgacgcagatgaaaatccgccaggccatggagcaggagccgacgctaagcgaaggcacctggctgacgccgccgctgctggattatctgcgcgaggcggtcgccaatctgatgcgcggcgagtag

SEQ ID NO: 443373 - DNA, 525 bp, Serratia marcescens
atgcagcaggccgcgctgaccattactgatgcgactcatgaaacattgatcgctgtgacacaaatctatgcttaccatgttctgcacggcgccggctcttttgaagaagtgccgcccactttagaagagatgcgccagcgtcacgatcgcgtacaaacagccggattaccctggctggtggcgaaactggacgagcagatcgtcggctactgttatgccgcgacttatcgaccacgtcctgcttaccgctttaccattgaagattcagtgtatatagcgccagatatgcaaggcaaaggcataggccatgcgctgctcagtgcgctgattgcccgctgtgaacgcgggccatggcatcaaatgctgtcagtcatcggtgattcagccaataatcacgcgtcgctggagctccatcggaaattgggattttgcagcattggcaccctgaaccaggtcggattcaaattcggcagttggcgggatacacacattatgcagcgagcattagggcaaggcgatcgttga

SEQ ID NO: 443374 - DNA, 918 bp, Serratia marcescens
ttggctggaagtagcttactgaccctgattgatgacatcgcctcgttattggacgatgtctcgctgatgagcaaaatggcggcgaaaaagaccgccggggtattgggggacgacctggcgctgaacgcgcagcaggtcaccggcgttaaggccgaccgggaactgccggtggtgtggaacgtggcgaaaggctcgtttatcaacaaggcgatcctggtaccgctggcgctgctgattggcacttttgcgccttgggcgatcactccgctgctgatgattggcggcgcctacctgtgctatgaaggctttgagaaggtatttcacagcctgacgcataagccggaacagggggaacagcgtgaagcgctgaatccgaacgaggacgtagcggcctatgaaaagcgtaaggtaaagggcgcggtgcgcaccgactttgtgctgtccgccgagattatcgccattactctgggcaccgtggccggcgccagctttacccagcagctgatcgtgctgtgcggtatcgccattgtgatgaccatcggcgtgtacggcatcgttgccggcattgtcaaactggacgacctggggctgtatttaagccgtaaaagcagcgcgctggcgcgcagcatcggcagcggcattgtcagcgccgcgccgttcctgatgaaaacgctgtcgatcgtcggcaccatcgccatgtttatggtggggggcggtattctgacccacggcctgccggcggtgcatcacctgtttgaagactgggcggcgcatattgcggtcgcaccgacgtttgaccatatcctgcagggcatcgtgccttcgctgctgaacgtggcgttcggctttgtcgccggcggcgtggtgttgctgctggtatcgatgatcggcgcggtacgcgcgcgttttaaagcttaa

SEQ ID NO: 443375 - DNA, 1104 bp, Serratia marcescens
atgtatcaggattttgaccgcgaactggcatgggcgatgcgccatatgccgcgtacccgtgcggcggtggcggcgctgccggatctgcagggcgtgcggctggcgtgcaacatgcatctggatctgaaaatggcgccgctggtggccggcctgctggagaaaggggcggagatttacctgaccacctgcaacccgaccacggtgcaggatgacgtggtggcctggctgacgcagcggggcgcgcaggcgcacgcctggcgcggtatgtccgacgccgactggtccgactctttcgaccgcgcgctggcctgggagccgacgcacctgtgtgagatgggcgcggatctgaccacacggctgcatcagtcgtccggcgggccgcagattaaagccgggctggaggcaaccggttcgggcatcagccgtctgaacggtgtgtcgccgcgctatccgattttcaactgggacgatctgccggtgaaagaggggctgcataaccggcatatggtcggcctgaccgcctggcacacctttttccagactacccacctgacgctgcatgaaaaacaggtgctggtgattggctacgggctggtcgggcagggcgtggccgcggcggccagggcctatggcgggcaggtgacggtggcggaagtggacccggcgcgtgcgttacaggcgcgctatgacggctggacggtgatggatttagatcaggcggcgtcgcaggcggaggtgatcgccaccgccaccggggcgaaaaacgtgttgtccgcccgccagttggcgcagctcagggacggcgcgtttattctcaacgtcggccatgtggcggaagagattgacgtcgccttcctgcagcgcctgccgcatcaggaaccaatgccgtttgtcgacgcctatcggctgggggacaaaacgctctatctgctggcgaacggctcgatgtttaacctgacggccggctacggcgacagcctcaacgcctttgacgtcacgctggcggtgatggcggccggcatcggccatattgtcggcgacggcgcggcacagccggcggggctgtatctgctgccgcagtcggcctggcagccggcgctgtaa

SEQ ID NO: 443376 - DNA, 564 bp, Serratia marcescens
atgaccgatttggcccactatattacggattatggttactgggcgctgtttatcggctgtctggctgaaggggaaaccatcacccttctcggcggcatcgcggcgcacgaggggctgctgcatctgccctgggtgatggcggtggtggcgctcggcggcacgctgggggatcagctgctgtattttgccggccgccgcttcggcggccgggccatcgcccggctgaaaagccagcgtcagcgcatcaaccgcgccaagcggctgattgcccgtcatccgatgctgtttgtgattggcgtacgctttatgtacggcttccggattatcggcccggtgctgatcggcgccagccggctgccgccttcgcgctttgtgccgctgaatattctcggcgcgctgctgtggtcagcgatcttcgtgctgctggggtatttcggcggtcaggcgctggagcgcgtgattaacggcttccataataagctgttcgtcgtgctgctgctggccgccgttgccgccgcgctgtggctggcgcgccgctggtggcatcggcgcacagagcagtga

SEQ ID NO: 443377 - DNA, 882 bp, Serratia marcescens
atgaatttcaccagcgacaatattgagctgttcttggcggtactggagcgcggttcgttttccgccgccgcgcgcgcactgcggcgcgtgccttcggcggtcagcatggggatcgccaatatggaggctgaactgggctttcaactgttcgatcgctcacaccgcgagccgacgccgaccgccatggcgttggcactggcgccgcacgcacgcctgattgccgatcagctgaaacagctgcagatccacgccattgaactgtctcaggggctggagagcacgctgtcgatcggcgtggcgtcggacatcaatacggaaaagctgctggcggcggtgaaaaccttgtccgaacgttatccgctgttgaatatcgagttgctgagcgcgccgcaggacgaggcgctgcatctgctgcatcagggtagggtgagcgtttgtctggcgtttggcgggctgaacgtcaatatcaaggagcagttccattttgtcggcagcgagtcgctgatcgccacgctgtcgtcgcggcatgcggcgttggcgcagggcggggagcgtctgttcctggaggatctggtcaacgtgcgccagatcgtagttgccagccgggatctgccgatggccgatctgcggccgcgggtggcggaaacctattggcgcaccgacagcctgcaaacggcgctgaacatggtggaggccgggctggggtggggcaacttcccgcagtcgctgattgcgccgctgctggcacaggggcggctgacgcggctgacgtttaaaaacaccaaaaatgagctgcgcctgccgatgcacctgatctggctgaaaaaccagccgctgcaaaaagccgcacgcgaactggtggcgctgatgcaggcgccatag

SEQ ID NO: 443378 - DNA, 438 bp, Serratia marcescens
atgggcgaccaatcacctatcacgcttgataagttgatgtgctttgccgtgtattcgaccaatctggcgttgaaccgcgtgtatcagccattgctggatgagatgggcctgacctatccgcaatatctggtattgattttactactggaacaggacgggctgaccgtcggcgagataagcgaacggctgtttattgacgccagcaccaccacgccgttgctgaaacggctggaaagccacggctatgtggtacgggtgcgcagcagtgaggatcagcggcaggtgcacgtgcgggtaacgccgcaggcgcggcagctgcgtgagggcatcgacagcctctatccacagttgctgtgttcggccgggctggatgaaacacggctgcgcggactgaagcaggagctggaagcggtgcgcagcgcgctgacggcgcgctga

SEQ ID NO: 443379 - DNA, 1857 bp, Serratia marcescens
atgatttctctgccggactacgcagatttgcaggcctatagcggtgatgaaacggcgctcatgattgaaaaccgctaccatcatggcctgtttacccgcgacgataacgatctcaccagcccggataacggcgccaccgtattacacgacggcaaaaagcgtcgctggaagcgcaatatcaacaacggcgattaccatatcgactggtggtatgagccaggtgatgcggacgactatgcgttaaccatcacccgcgccaataatttcctgcaggtgaatgaaaaggaatggggctcggtgcaaattcccagcaccccggccggcattaccctgatcgggccgggcggcgtgcgcgtctgtaaaaccaccgcctatttaaagctgtggaaaaactctatcgactttaaaggcaccatcctcgactttcgcaatccggactcaaaaaccaccgagtgcgtacgcgtgctttactgcatgggtgcgccggcgatttataacctgcgcatcgtcggcaatcgcagtgaaaacggcggtctgagcggcctgtgcgtctataccgacgccatgaacgtctttggtaaacccgccgcacagctgctggtgcaaaacgtctggctcagcaacctgcataagggcatcctctttggcaacaacgcctatatccaaagctggcacagcatcatggtcagcagctgtaactggccgatctggtcgcaaagcgccagcaacgccggcgaaaaaatcgtgttttacaaaagcctgttcggcagcaacagaaaccattatcagggcgtgcataccctgttcttccgcgattgttcctttgattacagcggctttaacaacgaaaccgatcagttggccgagaccaataaagaccatggcctgttcgatctgcggggcggcacgctgaactttaaagactgccactttgaatggggcaatgagcattcgcgcaactaccgcccggtatttaccagcagcaacggcgccaaagtgaagattaaagacagcatctggcacagcgtgaaaaccagcctggcggacacctcgacggacaaggatggtaaagtcattgtcggccagccctaccaatatgtcgactatttcttctttgataaatcggaggaaaaaaccggcaagtgctatatcgacggcttcgatctgatcaatgccgatatcaagaaaggctggtcgaacggccatattgagatgaaaaacatcggcgcaccggggcacgtcaatatgtggcgcatgctgtatctcggcgatggggtgaaccatctgccggaaccggcgtggaaagaagccaatgcgttacagctcaacaatgtatacgccgccagcggcacgcgcatctcgcagaccgaaagttcggatctggcgctgacgctgcaaaatggcgtgattaccgccaccaccaaaacggggggcgataaggcgaagcagattgcgctgtacctgccgatagccaaagacgatctggtgctgtggcgctgtacgctgaccaacccgcagggaacaggcaacccggacatcgccatcaacaccttttgggggcgctacgatctgcagggcgatgccggcgccgtcaccatccgtgagaaaacctgtcagtggggccgcgccggtacgcttacggccggcacgccgctcaccctgacgtcggatcgcattaccgcgttaaatgccgatgagtatctgccgctgcctgagggctatgccaactacgcgcgtatcgtgatcaccctgaaaggctttgccggcagcgccgccagcccggcctcgctggatatcagccagttgctgtgccagcggatcaacatcgtttcccgcaatcccaacaagtcctggtaa

SEQ ID NO: 443380 - DNA, 753 bp, Serratia marcescens
gtggatattcaacgctacctgcaacacatcgcctttgacgccacgccgcgtgtggatctggacacgctgcaacgcctgcaccacggccatatgctggcggtgccgtttgaaaatctgagtattatttaccatcagggcatcgacctgcgcgaacaggcgctgttcgacaaggtgatcaaccgccggcgcggcggcttctgctatgaactgaaccggctgttcgccgcgttgctgcggcagctcggttttacggtgacggcggttgccggtgaggtgcgcgcccgcgacggccacttcggcccgccgtttgaccatctggcgctgatcgtcacgctggaccgaccctatctggtggacgtcggcttcggcgacgcctttctgacgccgctgaccctggatgatacgccgcagccgcaggccagcggcacctttcatctggagcaggagggcgactatttttatctggagcggcgtaacggcgatcgcaactcacatgccaaaacgctgtatcgctttacgctgcagccgcgcgagttcgatgagtttgacgccatgtgccactaccacagccattcgccgcagtctgggtttacccagcggcttatctgctcccgccccaccgccaacgggcgcattacgctgagcgataacaaactgattattaccgccgaccatcagcgtacggaaagcacgctgcatgacgagcagcagcggcgcgcggcgctgctgcgtcacttcgccatcaggctatag

SEQ ID NO: 443381 - DNA, 948 bp, Serratia marcescens
atgcgcgttttactggcgccgatggagggggttctcgactcgttggtgcgtgaactgctgaccgaagtgaacgattacgatctgtgcatcaccgagtttttgcgcgtggtcgaccaactgctgccggtcaagtcgttttaccgtctctgcccggagctgcgccacgccagccgcaccccctccggcacgctggtgcgcatccagctgttggggcagcacccgcagtggctggcggaaaacgccgcccgcgcggtggcgctgggctcctacggcgtcgatctcaactgcggctgcccgtcaaaaaccgtcaacggcagcggcggcggcgcgacgctgctgaaagacccggaactgatctaccggggcgccaaagcgatgcgcgccgccgtgccggccgagctgccggtaacggtaaaggtgcgcctgggctgggacacgccgcagcacagtctggagatcgccgatgcggtgcagcaggccggcgccagtgaactggtggtgcacggtcgcaccaaagaggacggctataaagccgagcgcatcaattgggcggccatcggcgaaatccgccgccgcctgaatatcccggtgattgccaacggtgaaatctgggattacgccagcgcccgccgctgtatgacaaccaccggctgcgatgcggtgatgctggggcgcggcgcgctgaacatccccaacctgagccgggtggtgaaatataacgagccgccgatgccctggccgcaggtggtgcagctgctgcaaaaatatgtgcagttggaaaagcagggcgataccggtctgtaccacgtggcgcgcatcaaacagtggctgggctacctgcggaaagagtacgccgaagccggcgacctgttcgcccaggtgcgtgcgctgaagagttccggggagattgcgcaggcgattgccgcctgcgcggccgctatagcctga

SEQ ID NO: 443382 - DNA, 708 bp, Serratia marcescens
atgtcttctgcaggaaatcatcacccacgcggcgaacaggcgcggcagcagctgattgccgccgcgatagaagtcttcggcgaatacggtctgcagggcgccaccacccgcgccatcgcccagcgcgccgggcagaatatcgccgccatcacctactatttcaattccaaagaaggcctgtatctggcggtagcccagtggatcgccgactttattcagcagacctttcaaccgctggcggacgagattgaccgcctgtggctgctgccagccgaacagcgccgtcccgaactgtacctgcagcatctgaaacgcggcctgttggccttcagcgagctgatgacccagacccacacgctcaacctcagcaaaatcatgtcgcgtgagcagctctcccccaccgacgcctatccgctgattcaccagcaggtggtggcgccgctgcacggtaagctgagccaactgctggcggcctataccggcctggaggccggctccaccaaagtgattttgcacacccatgcgctgctcggcgaagtgctgtcgtttcgcgtggcgcgggaaaccatccgccggcaagccggctggcggcagatcggcgtgcaagaggcaaagcaggtcgccgccgtgctggcggaacatattgatttactggttaacggcctgcgccagcgttacggcaacggccccgacgttttaccgttatag

SEQ ID NO: 443383 - DNA, 987 bp, Serratia marcescens
atgaacaagcaacgcgttaccctggtggtggtcgtagcaatagtgatcgccgccgtggcggccggcatctggtattacgaacagcggcaggcgaagccgctgaccctctacggcaatgtcgatatccgcaccgtgaatctggggttccgcgtcagcggccggctggcgtcgctgacggttgacgaaggggataccgtcaagccgggccagttgctcggcaaactcgacgacggcccgtatcagaacgccctgctgcaggcgcaggccaacgtcggcagcgcgcaggccaagctggcgctgctgcaggccggctatcgtgatgaggagatcgcccaggtgcgctccgaagtggcgcagaaactgtcagcgttcaactacgccaacagttttttacagcgtcagcaagggctgtgggcgaaaaaggccacctccgccgatgcgctggaagatgcgcgcaccgcccgcaatcaggcgcaggccaatctgcaggcggcgaaagataaactgtcgcaatacctgagcggcaaccgaccgcaggagattgaacaggccaaagcagaactggcgcaggccagcgcggcgctggcccagtccaaactggacctgcaggacacccaactcaccacgccgtcggcgggcaccatcctgacccgcgcggtggagcccggcaccatgctgagcgccagcagtacggtatttaccctgtcgctgacccagccggtctgggtgcgcgcctacgtcagcgaagccgacctcggcaaggcggtgccgggcagcgagatgacgctgtacaccgacagccggccgggcaagccgtaccacggcaaggtcggttttgtgtcgccgaccgccgaatttacgccgaaaagcgtggaaaccaccgatttacgcaccgatctggtgtatcgcctgcgggtgatcgtcagcgacccggatgacgcgctgcgtcagggcatgccggtcaccctgcatttttctcaaccttag

SEQ ID NO: 443384 - DNA, 1734 bp, Serratia marcescens
atggaacagggccacaccattgatcttgagggattggaaaaacgctttcccgatctggaaaaaccggcggtcgccagcctgacgacccaactgcgcagcggcgcggttaccgggctggtcggcccggacggcgcggggaaaaccaccctgctgcgcatgctggccgggctgctgaagccaagcgccggcacgctgcgggtcgccggtctggacccgatcgctgacgatcgccggctgcacgccattctgggctatatgccgcagaagtttggcctgtatgaagatctgaccgtgatggaaaacctgacgctgtatgccgatctgcgcggcgtcaccggcgaagcgcgtcgcaccacttttcagcggctgcttgaatttaccgatctcacccgctttaccggccggctggccggcaaactgtccggcgggatgaagcagaagctggggctggcctgtacgctgatcggcgaaccgcaggtgctgctgctggacgagccgggcgtcggggtcgaccccatttcacgccgtgagctgtggcgcatggtgcacgaactggccaacgacggcatgctgatcctgtggagcacctcctacctcgacgaagccgaacagtgccgcgaagtgctgctgttgaacgaaggccagctgctgttcagcggcgcgccgcagacgctgacccggcgcatggcagggcgcagcattttgctggcggcgccggccggcagtcaccgcgcgctgctgcaacaggcgatctgtctgccgacggtgaccgacggcgtgatccagggcaaatacctgcggctgatcctgaaaccggacgccgatcatcagcaggtgctgcaggatcttaatattcccgacgtcgcgctgagcgaagcagaaccgcgctttgaggatgcgtttatcgatctgctcggcggcgggccgaacagcaaatccgcgctggcggcgattatgccgtccgtcagcggcgacagcacggaaaccgtgattgaagcgcagaacctgacgaaaaagttcggcgacttcgccgccaccgatcatgtggactttcaggtgaagcgcggcgagattttcggcctgctcggccccaacggcgccggcaaatccaccaccttcaaaatgatgtgcggcctgctggtgccgagcgacggcaaggcgctggtgctggggatggatctgaaaaccagctccggcagggcacgtcagcatctgggctacatggcgcagaagttttcgctgtacggcaacctgacggtggcgcagaaccttaagtttttctccggcgtgtatggcctgagcggtaaaaaacagcggcagaaaatggcggaaatgtccgccgcctttaacttcgccccgatcatcaatcaggcgccggatgcgctgccgctcggcttcaaacagcggctagcgctggcctgcgcgctgatgcatgagccggacattctgtttcttgatgaacccacctccggcgtcgacccgctgacccgccgcgaattctggctgcatatcaacggcatggtggacaagggcgtgacggtgatggtgaccacccactttatggacgaggcggaatactgcgatcgcatcgggctggtgtatcgcggcaaaatcatcgccgccggcacgccggatgatttgaagcagcaggttgccaacgagcaaaaccccaacccgtcaatggaacaggcgtttatcgaactggtgcagagttacgaccgggaggagcagtga

SEQ ID NO: 443385 - DNA, 1155 bp, Serratia marcescens
atgaacgataatccggctatcggcagcgacagtgccttctcctggcgccgggtgcgcgccctgtgtctgaaagagacgcggcagatcctgcgcgatcccagcagttggctgatcgcgtttctgatcccgctgctgctgctgtttatcttcggctacggcatcaacctggattccagcaagctgcgcctcggcattctggtggagcaacagagcgaagaagcacgcgatctggtcaacgcctttgccggatcgccctatatcgatccgaccatcagcgataaccgccaggcgctgatcggcaagatgcaggccggcgagatccgcggcctggtggtgatcccggtcgatttcgcccggcgtatggcgcggccgttcgacagcgcgccgatccaggtgatcaccgacggcagcgaaccgaacaccgccaacttcgtacagggttatacccagggcgtatggcagatctggcagcagcagcgcgccgaagatcgcgggcgcgacgacaaaccgctgattgaggtgcagatgcgctactggttcaacccggcggccatcagccagcactttattatccccggcgccattaccatcattatgacggtgatcggcgccatcctcacctcgctggtggtggcacgcgagtgggagcgtggcaccatggaggccctgctgtcgacgcaggtgacgcgcagcgagctgctgctctccaagctggtgccctactatgtcctcggcatgctcgccatgctgctgtgcatggtggtggcggtgtgggtgttcggcgtgccctaccgcggctcgctgctgctgctgtttgtcatcagcagcctgtttctcatcagcacgttgggcatggggctgctgatctccaccatcgcgcgtaatcagttcaacgccgcgatggtggcactgaacgccgcctttctgccgtccatcatgctgtccggctttatctttcagatcgacagcatgccggcggtggtgcgcgccgtcacctatatcattcccgcacgctatttcgtcagcacgctgaaaacgctgtttctggcgggcaatatcggcagcatgctgctgatcaatctgctgtttttaatcgcctccgccgtgctgtttatcgggctgaccgcctggaaaacccagcgacgtctggactag

SEQ ID NO: 443386 - DNA, 453 bp, Serratia marcescens
gtggacaacagtcgtattcgcgtccagcgcgcgttatttaacgtcggcgaggagtatgcctggctggcgcagtgtgatgatgacggcgcggtggtgacctttaccggcaaggtgcgcaatcacaatctgggcgacaacgtcagcgccctgacgctggagcactatcccggcatgaccgaaaaagcgctggcggagatcgtcgtcgcggcgcgcgaacgctggccgctgcagcgggtcagcgtgatccaccgcatcggcgaaatgttccccggtgatgagatcgtgtttgtcggcgtcaccagcgcccaccgcagcatggcctttgaggccgccgaatttatcatggactacctgaagacccgcgcgccgttctggaagcgtgaagccaccgagcagggcgaacgttgggttgaggcgcgcgacagcgaccagcaggcggcaaaacgttggtaa

SEQ ID NO: 443387 - DNA, 246 bp, Serratia marcescens
atgattgatattctgttttttgctcaggtgcgggagctgatcggcactgataagctgcgtttgccggcggagttcgccaccgtcgagtcgctgcgtcaggcgctgtgtctgcgcggcgatcgctgggcgctggcgctggcggccgacaatttgctgatggcggtgaaccagtcgctggtggcggcggaacacccgctgagcgccggcgatgaagtggcgttcttcccgccggtaaccggaggctga

SEQ ID NO: 443388 - DNA, 513 bp, Serratia marcescens
atgagtcatgccagcagtgaatttcttgcggcgcgtatcgccgttctgaccgtttccgacagccgcagcgccgcggaggatacctccggcgactctctgcagcaggcggcgcaggaggccgggcatcaggtggtcgcgcgcgcgctggtcaaagacaatatctatcagatccgtgcgcaggtttcggcctggatcgccagcgacgaggtgcaggcggtgctgatcaccggcggcaccggttttaccgcgcgcgacaacacgccggaggcgctgactccgctgtttgaccgccaggtggaaggcttcggcgaactgttccgcatggtgtcctacgaagagattggcaccgccaccattcagtcgcgcgccgtggccggcatcgccaaccaaacggtgattttcgctatgccgggctcgacccgagcctgccgcaccgcctgggagcgcattattgaatcgcagctggacgcgcgtaaccgtccctgcaacttccaaccccatttaaagaaataa

SEQ ID NO: 443389 - DNA, 246 bp, Serratia marcescens
atgagcgcacacaattccaaagatccgctgcacggcattacgctggagcaactgctgaacaaactggtggaatactacggctgggaagagctggccgaccgtatccgcatcaactgcttcagcaacgatcccagcatcaaatccagcctgaagtttttacgccgcacgccgtgggcgcgcacgcaggtagaggagctgtatatccatatggtcagcgataatccttggtatcaggggaaagactga

SEQ ID NO: 443390 - DNA, 711 bp, Serratia marcescens
atgttgagcctgcgttcagtcaatcagttttatggacagagccacaccctgtgggatatcaatctggagctgccgcgcggccagtgcaccgcactgctggggcgtaagggcgtcggtaaaaccacgctgcttaactgtattgtcggccatctgccggtggtcagcggcagcatgacctggcaacgcgccgacgaagcgccgaaaaacctgctgccgcaggcggtggagcagcgcgcggcgctgggcatcgcctacgtgccgcagggacagcagatcttctcgcagctcagcgtcgaggagaacttacaagtggccctgctggctggcaaaccgtcgccgcagcatatcccgccgctgatttaccagctgtttcccacgctggcggcgatgcgcctgcggcgcgccggcgatttatccgtaggggaacagcagcagctggcgatctcgcgcgcgctggtgcgggaaccggagctgctgattctggatgagccgaccgccggcatgcgtccgtcgatcgccagcgagattggcgctgccgtacagcgtctgaatcgggaatggggcatgaccattttactggtggaacatcgcctgacgctgatccgccgtctggccgatcgcttttttctgctggatcaggggcgcaacgtggcgaacggcacgctggcgcagttggatgacgctctgattgacgcctatctgacggtatga

SEQ ID NO: 443391 - DNA, 675 bp, Serratia marcescens
gtgattaaacgttggtttgtgaccggcaccgataccgaagtgggtaaaaccatcgccagcagcgcgctgctgcaggcggtaaacctggcgggctaccgcagcgccggttataaaccggtggcgtccggcagcgagatgacgccgcaggggctgcgtaacgaggatgcgctggcgttgcagcgccacagcggcgtggcgctctcctacgaggacgtgaatccttacacctttgctgaaccgacgtcgccgcatatcgtcagcgccgatctgcgccagccgattgaatttacggtgatgtcatccgggctgcggcggctggagcagcgcgccgactggctgctggtggaaggcgcgggcggctggtttacgccgctgtcgccgacgcagagcttcgccgactgggtggtgggcgagcagctgccggtgattctggtggtggggatgaaactgggctgcatcaaccatgcgctgctgaccgcgcaggcggtccgtcaggcggggctgccgctggccggctggatcgccaacgatatcgcgccgccgggcaggcgtcatcaggagtatctggcgacgctgcgccgcctgttgccggcgccgatgctgggggaaattccccatctggcaggcattgcgcagcagccgctgggccactatctggatctgtcattattgtaa

SEQ ID NO: 443392 - DNA, 768 bp, Serratia marcescens
atgccgtcagtgaatgacgcggttaacaaacaggcggtcgcctccgccttcagccgcgcggcggacagctatgacgccgcggcggtgctgcagcgcgaggttggcgagcgcttactgggtatcggcgctacgcatccggcgcggcaggtgctggacgccggctgcggcaccggctatttcagccgccgctggcgggaactgggcagacaggtgacggcgctggatctggcgccgggcatgctggcgtttgcccgcagccagcaggcggcgcagcactatctgctgggagatatcgagcatatcccgctgccggatgcggcggtcgatctcagcttcagcagcctggcggtgcagtggtgcagcgatttggcgcgcggtctggcggaactgcgccgcgtgacgcggcccggcgggctggtgctgttttccaccctggcgcaggggtcgctgcatcagctgggggatgcctggcagcaggtcgacggcgagcgccatgtgaatgatttcctgccgctcgcgcagattgaggccgcctgcgcgccgtatcgtcaccgtatggaagcgtgctggcagacgctgcattacccggatgtgatgacgctgatgcgctcattaaaaggcatcggcgccactcatctgcatcagggacgtgatgcggggctgctgtcgcgccgccgtctgacggcgctgcaggcggcttacccgcgtcaacgcggcgaattgccgctcagttatcatgtggtttatggagtgatttattgtgattaa

SEQ ID NO: 443393 - DNA, 1152 bp, Serratia marcescens
atgagctggcagcaacgcattgagcaggcgttaaccgagcggcgcgcgagcgccgcttatcgatcgcgtcaggttaaccagggcggtaacggccgccatatccagctgcatcagcagcgctacctcaatttttccggcaatgactatctggggctgagccggcacccggcggtgatcgacgcctggcagcagggggcgcggcagtacggcgtcggcagcggcggttccggccacgttaccggcttttgcgaggcgcatcagcagctggagcagcagctggcgcagtggctcggttatccgcgcgcgctgctgtttatctccggctacgccgccaatcaggcgctgctggcggcgttgatgcaggcggatgaccgcattctggcggacaaactcagccatgcctcgctgttggaagcggccgctcactcaccggcgcagctgcggcgttttcgccataatcagccggcggcgctggctgatttactggccaaaccctgcggcggccagcagttggtggtgacggaaggcgtattcagcatggacggcgacagcgcgccgctggcgcagctgcagcaactgagccgacaggccggcgcctggctgatggtggacgatgcgcacggcatcggcgtccacggcgaacaggggcgcggcagttgctggcagcagggggtgcggccggaagcgctggtggtgacgtttggcaaggcgttcggcgtcagcggcgcggccatcctgtgcgatgagccgctggccgagtatctgctgcagttcgcccgtcatctgatttacagcacggcgatgccgccggcgcaggcttgcgcgctgcaggcggcgctgcgctgcgtgcagcagggcgatgcgctgcgcagtcggctgcaacagcatattgcgcgtttccgccgcggcgtggccgacctgccgctgacgctgagcgattcgcagaccgcgattcagccgctgctggtgggggacaatcagcgggcattgacgctggcgcagcgcttgcgcgagcaggggctgtgggtcagcgccattcgtccgccgacggtgccgccgggcggggcgcgtttgcggattacgctgaccgcggcgcatcaggcgcaggatatcgatcggttattggaggtgctgcatgccgtcagtgaatga

SEQ ID NO: 443394 - DNA, 1275 bp, Serratia marcescens
atgtctctgtctcccgccgatctcgacttcgatcagcgccatatctggcacccttacacttcgatgagccacccgctgccctgctatccggtagaggcggcgtccggcgtggaacttcagctggccgacggccgtaaactggtggacggcatgtcttcctggtgggcggcgatccatggttataaccacccgcagctgaatcaggccgccgtccggcagcttgaaaacatgtcgcatgtgatgttcggcggcatcacccatccgccggccgtcgcgctgtgccgcaaactggtggagatgacgccatccgcgctggaatgcgtgtttttagccgattccggctcggtagcggtggaagtgtcgctgaaaatggcgctgcagtactggcaggcgcgcggtgaaaaacgccagcgcattttgacgctgcgccacggctatcacggtgatacctttggcgcgatgtcggtgtgcgatccggataactcgatgcacagcctgtatcagggctacctgacaccgcatctgttcgccacggcgccgcagtgccgttttgacgatgagtgggatgaacaggatatcgcccccttcgccgcgctgcttgaacagcacgcaggcgaggtggccgcggtgatcctggagccggtggtgcaaggcgccggcggcatgcgtatttatcatccgcactatttgcgccgggtacgggaactgtgcgaccgctacgatgtgctgctgatcgccgatgagatcgctaccggctttggccgcaccggcaaactgttcgcctgcgaacacgccggcattacgccggatattctgtgcctgggcaaggcgctgaccggcggctatatgacgctgtccgccacgctgaccacccgccacgtggcggaaaccatcagcaacggcgccgccggctgctttatgcacggcccgacatttatgggcaacccactggcctgcgcggtggcccacgctagcctgacgctgctgacggaaaaccactggcagcagcaggtcgcggcgatcgagcagcagttgcagcagcagctgctgccgctgaaggccgcgtccaacgtggcggacgtgcgcgtgctgggagcgattggcgtggtggagatgaagcaggcggtggatgtggcgcaggtgcagcgggaatttgtagaacgcggcgtgtggatccggccgttcggcaagctggtttatctgatgccgccgtacattatccggcccgaacagctcagccgtctgaccgatgccatcatggccatcgcggactga

SEQ ID NO: 443395 - DNA, 402 bp, Serratia marcescens
atgatttcactgaaaaaacgtacgccgtggtttggctggctgcgccgttgggccaaaggcatcaagcgcgatattgtggcgctgtggctggcggcacgcgaccgtcgcacgccgtggtacgccaagctgatcgcgctgctggtggcgggctatgcggtatcgccgatcgatctgatccccgactttatcccggtgctgggctatctggacgacgtgattctggtgccgctgggcattatgctggcggtgcgcctgatcccgaaaccgctgatggaggagctgcggcgcaaggcacagcagcgtatcgataatccacgcggtcgtttcgcgatgttaatgattatcctgttgtggatcggtgcgctggtttggctggcccgttatctggaccagcactggtaa

SEQ ID NO: 443396 - DNA, 483 bp, Serratia marcescens
atgacttttcgtttatacagcaatgacctgcaggacggcgccaccatgccggaggcgcaggtatttaacggtatgggctatcaggggggaaacctgtcgccgcatctggcgtggagcggcgcgccggcgggcagcaagagcttcgtcgttaccctgttcgaccccgacgcgccgaccggctccggctggtggcactgggtggtcgccaatattccggccgacgtgaatgaactgccgaccggcgccggctccggccagccgggactgcccgccgacgcgattcagacccgcaccgatttcggccaggccggttacggcggcgcggcaccgccgcagggagaacgccaccgctaccagttcaccgtacacgcgctggatgtcgagagcattgaggtcgatgcaaacgccagcggcgcgatggtcggcttcaacgtgcacttccacagtctgggcagcgccagcctgacggtgcactacagctaa

SEQ ID NO: 443397 - DNA, 525 bp, Serratia marcescens
atgatttattgttcgttaaatctcgataaaactagggatgcaggcaaaacaggagacctgatctgttatggcattggcactttctcagtattctccggtataggcccctatacgaataaagcaggttgttctggaatagataaaggttctattcccactggtaaatattggattgtcgcgcgccctacgggcggcttacgctctaaaatgcggacagcaattcaagactggtggacaggaaacgatcactcaacttggtttgcattatatcgccaagatggtgtcatggatgattggacgtttattaatggtataaaacgcggcaatttccgactccatccaaaccgtccagatggtcaaggcgagtcatggggatgcatcaccttctataatccgactgaatttagtattctcaggaaccgacttctgcgcacacagcaagtccacattcgcggaagttcaggttttatggcttatgggcaagtcacggtaaccggaaacagcgaggccaactgcgatgtttaa

SEQ ID NO: 443398 - DNA, 264 bp, Serratia marcescens
atgtttaaacgctttctactctggtttttattcaccgttattttcattctattactgcgtctgctgcccttcacatttaacctgctgtcgtcgctggcccgtaccatcgcttctcaggaacgctggtatcaactgttgcattggccattaacagcggaaacctacggcgatgtcgaggcgttagccctgctcacactctgcgcgataccagcggcaatcattgccatgctgtgcatcacattcggcagaaaagccaaaaattaa

SEQ ID NO: 443399 - DNA, 993 bp, Serratia marcescens
atgaagcaaatcgtttatgtcgccagcccggaaagccagcaaatccacgtctggcagttggatgacgccggcgcgctggcgctgctgcaaaccgtcgaggtgccgggacaggtacagccgatggcgattcacccggaccgcacccatctgtacgtaggcgtacgcccggcgtttggcgtggtgagctatcgcattgagcacgacggcacgctgcaggaagcgggcatggcgccgctgccgggcagcccgacgcacctctccaccgatttgcagggccgttatctgttcgccgtgtcctacagcggcaacaacgccactatcagcccaatcggccacgatggcgtggtgaccgcgccgctgcagcagctggacggcctgaccgcgccgcactccgccaatatcgatccgaccaaccagctgctgctggtgccgtgcctgaaagaagaccgcgtgcgcctgtttgatctgagcctggacgggaagctgacgccgcacagccagcagagtgtggcgaccgccgccggcgccggtccgcgtcatatggcgttccacggcaaccaacgctacgcctacctggtgaatgagctggacagcacggtggacgtgctggcgattgaggacgatggcaagcgctacaccacggtgcagaccatcaacgcgatgccggcggactttgaaggtacctgctgggcggcggatattcacctcacgccggacggccgtttcctgtatatcagcgaccgtaccgccagcattctgagcgccttcgcggtatcggcggacggcagcacgctgagcgttatcggccactacccgaccgagcaacagccgcgcggcttcaatatcgatcacagcggccgctttgtgctttccgtcgggcaaaaatccgaccacctggcggtgcatgccattcaggcggacggcagcctgaaggatctggcgcgttacccggtaggcaaaggcccgatgtgggtcagcgtgctggcgaagtaa

SEQ ID NO: 443400 - DNA, 822 bp, Serratia marcescens
atgacctaccgcgttatcgccctcgatctggacggcaccctgctggacacccaaaaacgtatcttgccgcagtcgctggaagctctggcggcggcgcgcgccgccggcgtcaaagtggtagtggtgaccggccgccatcacgtcgccattcatccgttttatcaggcgctggaactggacacgccggctatctgctgcaacggcacctatctgtatgacttccagcagcaaaaggtgctggcggccgatccgctgccgaaagagcaggccaggcaggtgctgcagatgctcaggcagagcgggatccacggcctgatgtatgtggacgatgcgatgctgtatcaggagcccagcggccatgtgacccgttcgctggcctgggctgagaagctgccgcccgcacagcgcccgacgctgctgcaggtcgacagcctgacccaggccgccgacgacgctcgctcaatctggaaattcgccacctcgcatgccgataccgcggcgctgcgcgagtttgccgaaacggtggaaaaagagctggggctggcctgcgaatggtcgtggcacgatcaggtggatatcgccaagaacggcaacagcaagggcaaacgcctgcgtcagtgggtggaatctcaggggctgacgatggaccaggtggtggccttcggcgataactacaacgatctgagcatgctggaagccgccggcctcggcgtggcgatgggcaatgccgacgaggcaatcaaacagcgcgccgatctgaccatcgccgatcacctgcagcccggcatcgccgaggttatccgcagccgcgtcctggcttga

SEQ ID NO: 443401 - DNA, 1068 bp, Serratia marcescens
atgttagaattggatttcagccagcgcctcggcgatctgcaactgcaggtcaaagagagcctgccggcgcagggcatcacggcaattttcggtctgtccggcgcggggaaaacctcactgatcaacgcgatcggcggcctgacccggccggacagcgggcgcattgtcctgaacggacgcacgctggtggattgtgaacgcggcctgtgtctgccgccggaaaaacgccatatcggctatgtgtttcaggatgcgcgcctgttcccgcactaccgggtgcgcggtaatctgcagtacggcatggcggcgtcgatgcgcgcccagttcgataatatcgtcgacctgctgggtatcggcgcgctgctgggtcgcctgccgctgacgctttccggcggcgagaaacaacgggtggcgatcggccgcgcgctgctgaccgcgccagagctgctgctgatggatgagccgctggcgtcgctcgatctgccgcgtaagcgcgagctgctgccgtatctggagcggctggcgcaggacgtcaatatcccgattctgtacgtcagccacagtatggatgaaattctgcggctggccggccaggtgatggtgctggaccgcggtcaggtgctggcctgcggcgatctggaggcggtgtgggccagcaatgcgctgcgcccgtggctgcagcgggaagatcaaagcagcgtgctgaacgtcagcgtgattgaacaccatgagcgctatgcgatgagcgcgctgcggctgggggaccaacgcctgtgggtcagcgcggtggatgcgccaatcggcacgcagctgcggatccgtatcaatgccgccgacgtttcgctggtgctgcaggcgccgcataacagcagcatccgcaatattctgccggccaaggtgatagagtgcctggaagtcggcgggcagacagaggtgaaactgttggtcggcgacagcgtgctgtgggcgcgtattaccccgtgggcgcgcgatgaactggcgattaagccgggccagtggttgtatgcgcaggtaaaaagcgtctcaatcagccgcgaagcgcgttaa

SEQ ID NO: 443402 - DNA, 774 bp, Serratia marcescens
atgaaacagcaatggactcggtggctgggcggtgcggtattggcgtccggtctggtgatgcaggcgtctgccgcggacaaggtgaccgtattcgccgcggcatcgctgactaacgcgctgcaggagattgctacgcagtatcagcagggcaaagacgtgcaggtggtttcctcatttgcttcctcttcgacgctggcgcggcagattgagcagggcgcgccggccgatctgtttatttccgccgaccagcagtggatggactatgccatcgacaagcaacagatggtcaaagacagccgctacacgctgctggacaacgatctggtgctgattgccgccaaagacagcaaactggataaggtggcgatcacgccgcacaccgactggcagaaattgctcaatggcgagcgtctggcggtgggcgatccggatcacgtgccggccggtatttacgctaaagaagcgctgcagagcctgaaagcttggccgcagctgacgccgaaactggcgcgcgccaacaatgtgcgcagcgcaatggcgctggtggaacggcaggaagcgccgctgggtattgtttacggctctgatgcgttggccagtaataaagtgaaggtggtcggcgtgttcccggcggacagccacaaaccggtggaatacccgatggcgatggtcaaaggccacgatagcccgacggtcagcgcgttctatacctacctgaaaagcccgcaggcggcggcggtgtttaaacgttacggattctctccacggcaatga

SEQ ID NO: 443403 - DNA, 144 bp, Serratia marcescens
atgttggaattattgaaaagtttagtatttgctgtagttatggttcccgtagtcatggcggtgatcctcggtttaatttatggtctggcggaagtgttcaacatcttctccaaagccggtccggcgaaagaaaaacgcagctga

SEQ ID NO: 443404 - DNA, 792 bp, Serratia marcescens
atgcaggccgaaatacttctgacattaaaactgcagcaaaaactgtttgccgacccgcgccgcatcgccctgctcaagcaggtggcccataccggctccatcagccagggcgccaagctggcaggcatcagctataaaagcgcctgggacgccatcaatgagatgaatcaactggcggaacagaccgtggtggagcgcgccaccggcggtaaaggcggcggtggcgcacagctgacccactatgggcaacggctgatccagctgtacgatctgctggggcaaattcagcagaaagccttcgacgtgctgcagcaggatcggctgccgctggacagcctgttggcggccatctcacgcttctccctgcaaaccagcgcccgcaaccagtttttcgccaccgtgacggcgcgcgagcagcaacaggtgcagcaacacattcagctgttgctggccgacggccacacccggctgaccgccgccgtcaccgaacagagcgccgaccgcctgcaactggcgccgggcaaagaagtgctggcgctgatcaaggccccctgggtgacgctcagcaccgatgacgccggcgacgacgcggcggataacgtactgcccggccgggtcgcccatattcagcccggcgacgcgtacagcgaagtgctggttaccctcgccggcggtgaaacgctgtgtgcgacgctggacaatcagcagctgcagcagttgcaactgcagccggagatgccggttaacgccctgttcaatgccgatcgggtgattatcgcgacgctgtgctga

SEQ ID NO: 443405 - DNA, 1473 bp, Serratia marcescens
atgtcgtcattgcgcatttcgcaaggttcatttcgtttaagcgatacccgcaccctgtcgctggagacgctggagatccgcgccggcgacagttgggcgttcgtcggcgccaacggcagcggcaaatcggcgctggcccgtgcgctggctgatgagctgccgctgctgcgcggcgaacgccacggcgactttcagcagccggtgcgcctctctttcgaacagctgcagaaaatgctcagcgatgagtggcaacgcaacaataccgacctgctcagccctgacgaagaagataccggccgcaccgccgccgagattattcaggaagaacatccgtatccggcgcgctgcgcacagctggcggcgcagttcggcatcagcgcgctgcttgagcgccgttttaaatatctctccaccggcgaaacccgcaaaacgctgctgtgccgcgccctgatggggcaaccggacctgctgattctggatgagccgtttgacgggctggacgtcgcttcgcgcgcccagctggccgaactgttggcgcagctggcgcaacagggctataccctggtgctggtgttaaaccgctttgacgaaatccccgactttgttcagcaggtcggcgtactggccgactgcacgctggccagccagggcccgcgccaacaggtgatggccgacgcgctggtggcgcagctggcgcacagtgaaaacctcgccggtctggcgctgccggaaagcgaggatccgcaacagcagcccgccctgccggtggatcatccgcggatcgtactgcgcgacggcgtggtcagctataacgatcgtgccatcatcgatcgtctcagctggcaggtggatcccggccagcactggcagatcgtcggcccgaacggcgccggtaaatctacgctgctcagcctgatcaccggcgatcatccacagggctacagcaacgatctgaccctgttcggccgtcgccgcggcagcggtgaaaccatctgggagatcaaacgtcatatcggctacgtcagcagcagcctgcacctggagtaccgcgtcagcagcagcgtgcgcaacgtgatcatttccggtttctttgactcgatcggcatctatcaggcggtatccgatcgtcagcaccaactgagcgaacagtggctgcagctgctggggctgggcggcgcccagggcgaaacaccgttccacagcctgtcctgggggcagcaacgcctggcgctgatcgctcgtgcgctggtgaagcacccggctctgctgatcctggatgaaccgttgcaggggctggatccgcttaaccgccaactggtgcgccgttttattgatgtgctgatcggcgaaggcaccacccagctgctgtttgtctcgcaccacgcggaagacgccccgcagtgcattacccaccgcttaagctttatcccctccggcgacggttaccgttatcagcaagagccgctgcagtaa

SEQ ID NO: 443406 - DNA, 822 bp, Serratia marcescens
atgtggggcgtactgtcgactgcactattttttctgccgtttaaccgtctgatcgcctgggtgattttggcggcatcggccggtatgggcatctatcatcagattctgacgccgcagggagccgcgtacctggccgttatcgctctggccgccgggctgcgtcatcactaccgcgccaacgccgggctgtccgtcgcgctggaagtcctgctggtcgccagcagtctggcgctgtttctgcacctggtgcccggcatcaacaatcagctgatggtggacggcagtaaggccgggccgctcagcgcgccttatacgctgcgctataactttgataaggcgctgctgccgttcctgctgttcgcctgtttgccgacgctgttcaacagcggcaaagcggcgaaaaacgtcggcagcctggcctggctgctgctgattttgtgcgtgccgctgctgctgttgctggcggtggcgctgggcggcctgaagctggaaagccacttcccaagctggatattgcctttcatgatggccaacctgttctttgtatcgatggcggaagaagcgctgtttcgcggctacctgcagcagcgactgacccagtggctgggcgcctggccggcgctggtgatcgccgccctgctgtttggcgcggcgcacttcccgtccggcatgctgatggcgatcttcgccacgctggccgggctgttgtatggcctggcctggatgtggagcggacgcctgtgggtgccgatcgcactgcactttggcctgaatatgacgcatctgctgttctttacctatccgttctatcagcatccttaa

SEQ ID NO: 443407 - DNA, 1050 bp, Serratia marcescens
atgacggattttaatcctatcgatcaccctcatcgccgcttcaatccgctgaccggccaatgggtgctggtttccccccatcgcgccaagcgtccctggcaggggcagcaggaagcgcccgcgcaggaaagcctgccgcagcacgatcccgactgtttcctgtgccctggcaatacgcgcgttaccggcgaccaaaacccggactatcccggcacctacgtgtttaccaatgacttcgccgcgctgatgagcgatacgccgcaggcgccggaaagcgacgatccgctgatgcgttgccaaagcgcgcgcggcaccagccgggtgatctgcttttcgccggaccacagcaaaacgctgccgcagcttagtctgccggcgctggagctggtggtagcaacctggcaggaacaaaccgccgagctgggccgcaactacccctgggtgcaggtgtttgaaaacaaaggcgcggccatgggctgttccaatccgcacccccacggacaagtatgggccaacagcttcctgccaaatgaagtcgagcgtgaagaccggctgcagcgcgactattatcagcaacacaacagcgcgatgctgttggactatgcccgacgcgaacagcaggacggcagccgcacggtggtggaaaccgatcactggctggcggtggtgccctattgggcggcatggccgtttgagaccctgctgctgccgaaaagcgcacggcaacgtctgaccgaccttgatgcggcgcaaagcgccgatctggccgtggcgctgaaaaagctgaccagccgctatgacaatctgttccagtgctctttcccttattcgatgggctggcacggcgcaccgtttaacggcgccgataaccgccactggcaactgcacgcccacttctatccgccgctgctgcgctccgcctcggtgcgtaaatttatggtgggctatgaaatgctggcggaaacccagcgcgatctgaccgccgaacaggccgccgaacgtctgcgggcggtcagcgatatccattaccgtgaagccggagcccaataa

SEQ ID NO: 443408 - DNA, 1152 bp, Serratia marcescens
atgcgtttgcaagaattgacccagagcgtttttacccagcatttcggttacgcaccgaccctcaccgtacaggcgccggggcgcgtcaatctgatcggcgaacacaccgactataacgacggctttgtactgccctgcgccatcgactatcagaccgtgatcagcatcgccaagcgcgacgatcgtcagatccgcgtactggcggccgattatgatcatcaggtagatcaattcgccctcgaccagccgatcgtgccgcatgagcagttgcagtgggccaactacgtgcgcggcgtggtgaagcatctgcagcagcgcaacggcaagtttggcggcgccgacctggtgatcagcggcaacgtgccgcagggcgccggtctcagctcttccgcctcgctggaggtggccgtcggccaggccttacagacgctgtatcagctgccgctcgacggcgtggcgctggccctgaacggccaggaagccgaaaaccagttcgtcggctgcaactgcggcattatggatcagctgatttccgcgctcggccagccggatcacgcgctgctgatcgactgccgttcgctggcgacccgcgcggtgccgctgccggacgacgtggcggtggtgatcatcaactctaatgtcaaacgcgggctggtcgacagtgaatacaatacccgtcgccagcagtgtgaacaggccgccggattctttggcgtcaaggcgctgcgcgacgtcagccagcaacagttcaacgcccgcgagcatgagatggacccgctggtcgccaaacgtgcgcgccatattatcagcgagaacgcccgcacgctggccgctgccgaggcgctggccagcggtgatttagcccggatggggcaattgatggccgagtcgcacgcctccatgcgcgatgactttgaaatcaccgtgccgccgatcgacgcgctggtggagattgtcaaagcggcgatcggcgaacacggcggcgtgcgtatgaccggcggcggcttcggtggttgcatcgtcgcgctgatgccgcagcggctggttgaaccggtgcgtgcggcggtacaacgggagtacccgttgcgggccaacggcctgcaggaaaccttctatgtctgcaccgcatccgcaggagcaggctcatgctga

SEQ ID NO: 443409 - DNA, 1047 bp, Serratia marcescens
atgctgaacatcgctgaagaacaacgtgcgccggatggccggccgtttaccttaaccaccctgcgcaacgccggcgggatgacggtaacgctgatggattggggcgcgacctggctctcagcgcggctgccgctcagcggcggcgaaacgcgtgaggtgctgctcggctgcgccacgcctgccgactatctgcggcaaagcgcctatctcggcgctacggtaggccgctacgccaaccgcatcgccaacgccagcctgccgcaggacggcggcgcgctggcgctgctggccaatcaggggccgcaccagctgcacggcgggccggagggcttccacgcccgccgctggcacattgcccagcaggatcggcagcaggtaacgtatcagctgcattcgcccgacggcgatcagggcttccccggcaatctgcaggtcagcgcccgcttccgcctgacggacgaccaccagttggagatcgactaccaggcgcagaccgatcgtccctgcccggtcaacctgaccaaccatgcctatttcaatctggacggcgccggacaagacgcgcgtcagcagacgctgcagctcaacgcggatcattacctgccggtcgatgagcaggggatccccagcgcggcgctgacggcggtcgacggcagcagcatggatttccgccagcctaaaacgctggcgcaggatctgctgcgtgatgccgcccagcagcgggtgaagggttacgatcacgcctatctgctgcagcgcgactgtctggcgctggataaaccggcggcgcggctgtgctcggcggacggccggctggaaatgcacgttttcaccactgcaccggcgctgcaactgtacagtggtaactatctcgccggcacgccggcgcgcgacggcggcagctacggcgattacgccggcgtggcgctggaaagcgaatttctgccggacagcccgcaccacccggaatggccgcagcccagttgctggctacaaccggggcaaaactatcacagcatcacccgctatctgttttccccgcgttaa

SEQ ID NO: 443410 - DNA, 345 bp, Serratia marcescens
atgcgactgattactgcacttccgttactggcaggtttgctgctgagcgccaacctgatggctgcagaagccccggcaaaaaaagctccgtctccggcgcaggccgcccaacaaaaacgtatgaccgactgtaatcaacaggcttcttccaaatctctgaagggcgccgatcgtaccaccttcatgagcacctgcctgaaagccgaaggccatcaggccgccggtaaagcgctgacgccgcaacagcagaaaatgaaaggctgtaatgccgacgccgccaagcaaagcctgaagggcgacgcgcgtaaaacctttatgagcagctgtctgaaaaaagccgcctga

SEQ ID NO: 443411 - DNA, 612 bp, Serratia marcescens
atgacgatgctttccctgttactggttgacgatcacccgttggttcatgtcgcactggaagcggcgctgataaaatccggccatccctacgtcctgacggcgcagccggacgatagccaagcgctcgcctggctcagccggcagcgctgcgacgtgctgattctggatatcggcctgccgcaggttgacggcctgcagctgttgaagaagatccgccgccactacccgcaacagcgtatcatcatctataccgcgcaggaggaagcgctgtatgcgcgtctggcctaccagtccggcgccagcggttttgtccataagggcgcatcgctggaacagctggtgcgctgtattgaacaggtgatgcagggggaacgcgttttcccgccgtcgctcggcgacgagcaggaagagaacggtcccggcccgtcgttaaccgccaaagaattgcaggtgctcgccctgctgagcaagggactatcaaacctgcagattgccgagatgctgaatatcagcaataaaaccgtcagcacccacaagaaaaatattctgcgcaaaaccggtgcggcaaatctgctggagctggcggcagtgtttaaagagctggcgccgtga

SEQ ID NO: 443412 - DNA, 3168 bp, Serratia marcescens
gtgaaacgcctgattctgctgttcagcctgttggcgctgtgcgcctcggcgctggccgcgcagccgccccgctatcatctggtcagcaatctgtcgctgccgaatgacatgctgctggcgcgggagaaaaacccctggcgcggtaagatgctgcgcgtaggcattatcagcgaaaacaccagcccttataacatcatcgtggatgatgatctgtatgggctgaacgccgactacctcgactacattcagcaggtgaccggcatccgcttcgaggttctcggcttcgccaacctcgcccggctacagcaggcgctgcagcgcggggagatcgacctgctgtacggcataccccggcaggccgtatccggcccgctgcagctgtcgcacccctattacgccagcaacctgcgggtactgcgcgatcgcaacaataaccggccggtgatgctcaactcggcaaccgcgcgcgtcgccatcggtgccctgaccgatatgcaggccggcacggcgctgcagggcgtcacctctcaggtacagcgctatgacaataattttcaggcggtctacgccctgcttaacggcagcgatgattactttattgccgatgacgccagcgccagttttattatcgatcagctgcaattagggcagctttaccaggtggaaagcgccatcaacctgggcagcctgtcatttgtcttcgccgcgaacgacgccaggctcattgattcattgaataacgccatcgccgatacgccgatggagttgatgaacagcctgcagagccgctggagtaaaaaaatccccagctatctggataccggcaacgccgatctgacgccgatggagaaaaactgggtcgccgcgcagcgcagcgtgccctatgccgccgttgagaataacttcccctttgtctatcgcgacgccgataaccagccgcgcggctatctggtcgatattcttaataccatcggtcaaaacagcggcctgcagtttaccccggtctgggcacgcaacgccgagcaggccgacgcgttggtcagcagcggccaggcgctgatgcgcgccgcgctgccgctcaccgccgacgccaaagcccattacagcgccagtatgccggtccatcgcgcgttatggggcgtctacgtcggtcgctacgccgaaaatatcgccggctgggccgcgctgcagggcaaacgcatcggctttgtgcagggcgacctcgggcgcagtctgatccctgccggcaatcaggcaatcgcattcagcgacgccaaaagcctgtatgacgcgctggcgaacggccgggtggacgcgctggtggacaatgtcatttccgccaacttcctggcgctgtcgcgctattccggcgccatccggctggcctttcccgccaataatatcgcctatcctatcgccttcggcgtacgtcccgatcggcccctgctgctcggcattctggataagaacctgatgcagatcccggcggagacgctgcggtcgctgcgtgagacttggattgtcgaccgcagcagcctgatcgacgcggtgaacgataaccgcatgccgccgcagaccacctggctgctgacgctgctggcggtgattattctgctgctgttgctgtggatcgtgcgccgctaccggcagcagcgccgtgagcagcgcgagcaccgccggctagaacaggcgcgccgtcaggccgaagcggaaaaccgcaggaagagtaaatttctggcgacggtcagccatgaactgcgcacgccgatgcacgccatcctcggcctgctggaactggagctgaaaaaaacgccgacgccggcagggctgccggtgatttacagctccgccgcctcgctgctgaatctgctgaacgatctgcaggactacgccaagctggaaagcggctcgctcaccctggcgcccaagccgctggcgctgcgcccgtggggagaacatctgcaggcgctgtaccggccgctgctcggcaacaaggcgctgaccttccgcgtccgtcttgatgagagcttgcccgacgccgtcactatcgatggtgagcgtttacttcagatcgccaacaacctgataaataacgccattaagttcaccacgcgcggctacgttgaggttggtctggcctggcaagacggcacgctgcacctgagcgtcgccgacagcggctgcggcatcgccgccgatgagctggacaagctgttccaacccttttaccgggcacgcggcgcacagcgtatttctgtgcagggcaccgggctgggactgtcgatctgtaaagagattgtcgagcagatgggcggcgcgattgtcctgcgctcgcagccaggcgtgggtacacaggttgatgtgacgctgccggccgccacggcgcaggccatcacgccgccgccgcaggacgccgcgccggcgcgacgtttttcaccggcgctgcgggtcgcgctgattgacgaccatccgaccaatctgttgctgatggaacgtcagctgcgccatttcgctctgcagccgacgctgtttgaacacggttacccgctgttgcaggcccaccgccaacggcccttcgaactgttgtttatcgactacaatatgccacgcccggacggcctgacgctggcgcgcctgatccgccgcgatgaacggcgtcgtgggttgcctgcctgccacatcgtgctgtgttccgccgacgtgcaggagtttacccgcattcccgccgggcaggtgcatattgaccattttctcaccaagccgatttccctggcggcgattgaacaggttttagccgaaaacagccgctttacccagccccagttagcccttactgacctaaaaaaccagctaacggtgctcggcggcgataatgtagccatgcaacagcggctggcatccacgctgcgcactaccctgctggccgatcgccaacgactgcaggcggcggcgcaacggcaggattggcaggcgctgggccaggcggcgcaccgtattaagggcagcctgctgatgctgcagctcggcataccggcgcagcgctgccagcaggcgatcgacgccgccaggcgcggagaattcgccgcagaggcctatactgagatcgacgccgccgtggcgcagctgttaacgcagctggacgccgccgcgccgacgatgaatgattga

SEQ ID NO: 443413 - DNA, 771 bp, Serratia marcescens
atgaacagtaacttcagacgtcatctgttgggtctgtcgttgctggttggcgtagcggccccttgggccgctactgcccaagcgccaatcagtaatgtcggctccggctcggtcgaagaccgtgtcaccacgcttgagcgtattgccaatgctcagagccagctcttgaaccaactccagcagcaagcctccgacaaccagcgtgatatcgattcgctccgtggtcaaatccaggagagtcaatatcagctcaatcaggtcgtagagcgccaaaagcaaatctatgatcagatcgacagcctcgagcagggcggtggtcagagcgcctctgcgccggcagcgtctgctgcggcaggcgcgggtagtgctgcggcttcttctgcagcgcctgccagtaagggcgatgaaaacagcgattacaacgccgctgtttcgctggcgctggagaaaaagcagtacgatcaggcgatcccagcctttcagagcttcgtaaagcagtatcccaagtcgacttaccagccgaacgccaactactggctggggcagttgttttacaacaagggtaagaaagacgatgcggcctactattttgcggtggtggtgaaaaattacccgaaatcgccaaaggcctctgacgcgatgtacaaggtcggtatcatcatgcaggaaaaagggcaggctgataaagccaaagccgtgttccagcaggtggttaaacagtacccgaacagcagcgcagccaaacaggcgcaaaagcgtattgctggctaa

SEQ ID NO: 443414 - DNA, 294 bp, Serratia marcescens
atgagttcgttaaccgataaactgtacgccatcgctgacaagggcccggttcgggtcctttccctggtctttgcactggcgctggccggctgcgtgttctgggatccgacgcgcttcgccgcgcgcaccagttcactggagatctggcaggggctgctgctgatttgggcggtttgcgccggcatggttcacggtgtcggtttccggcctcagcgcatgcgctggcgggcgtttttcgcaccgctgccggcgcttgtcatcctggcggcaggattactttacgtttctttataa

SEQ ID NO: 443415 - DNA, 348 bp, Serratia marcescens
atggtaaacaatgcttccgcattagggcgcagcggcgtacacgactggttgttactgcgtgcttccgctatcgtcatcaccctgtatgtcctctatatcctgggctttgtcgtcacggctccggacatcacctatgaaatctggcgtggtttcttcgccacctctattacgaaagtcttcaccgtgttgaccttgctgtcgattctggcgcatgcctggatcggtctgtggcaggtgctgacggattatatcaagccgttggcgttacgcctggtgctgcaactggcggtggtcgtcgtgttgctggtctatttactgtacggaacaatcgtagtgtggggtgcgtaa

SEQ ID NO: 443416 - DNA, 792 bp, Serratia marcescens
atgccagaaggaccggaaatacgtcgggcggcggacacgctggcggcggcgattctcaatcagccgttgcgtgatgtctggttcgccttcccccagttgcagcactatcaggccgagctgatcggcgagcgggtgaccgctattgagacgcgcggcaaggcgttgctgacccatttttccaacggactgacgatgtacagccataaccagctgtacggcgtgtggaaagtggcggcggcgggggaaacgccggccaccaaacgtgatttacgcgtgcggttggagacggcgcagcaggcgattttgctgtacagcgcctcggacatcaccctggggccgcgcggcgagattgagcagcatccctttttacagcgtatcgggcctgacgtgctggatgaacgactgacggcgcagcaggtggcggaacggttgctgtcgccgccgttccgccggcgtcagctggggggcatgctgctggatcaggcctttctggccgggctgggcaactatctgcgggcggaaattctctggcaggcgcagctggcgccgcagcaccggccgcaggatttgacgcctgaggcgctgcagcggttggcacaggcgctgctggcggttccgcgtctctcttaccacacgcgcggacaggtgaatgacgatcgtcaccacggcgcgttgttcagttttaaggtgttccaccgcagcggcgagccgtgcccgcgctgcggcgcgatgattgaaaaaacgatgctgtcatcgcggccgttttatttctgtccggtctgccagcgttag

SEQ ID NO: 443417 - DNA, 648 bp, Serratia marcescens
atgcaacatacagtattgattaccggtttcgagccgtttgacggtgagcatgtcaatccttcctgggaagtggtgaagcagcttaatgatatggagctgggcggcgtgcgcgtggtggcgcgccagctgccgtgcgtattcggcgaagcgttggacgtgctgaatgcggcgattgatgaactggcgccgcagatggtgttggcggtcggccaggccggcggacgctgcgatatttcgctggagcgggtggcgatcaatatcaatgatgcgcgcatcccggataatcaggggcagcagccgatcgatgaaccgatcgtcgccgacgggccggcggcctatttcagcacgctgccgatcaaggcggtggtcgacagcatgcgcgaggccggcattccggcctcggtgtcgcaaaccgccggcacctatgtgtgcaaccatgtgatgtacggcctgctgcaccggctgcgcggccagccggcgatcaagggcgggtttattcatattccctacctgccggaacaggcggcggcgcatccgggccagccgagcatggcggccggcaccgtgctgtttgcgctggagctggcgatttccgttgccctgcaggtggagcacgatctgaaagtgtcgggcggcgccacgcactaa

SEQ ID NO: 443418 - DNA, 1008 bp, Serratia marcescens
atgaacttccaactgcaatatctctactggctggccgggattatcctgctgattgtcgccgtgatgtcgctgcgcgaccgcgccaacccgcgtcgttttaccaccggcttattctggggactgtatggcctggtgtttatggtcggcgactggacctatgatttgttcggcgccggcgaagaagcccggcgactgctgcatatcgtcatcggcgcgctggtggtgctgatggcgctgattgccggcctcggcggggtgcgtctgggcagttaccatcagcgtacgcagcagcagcgcgaagagagcgccaaacgcctcggcaaccggctgtttgtaccggcgctggcgatcccggtagtgacggtgatcggggtgctgctgttcaacaatattccggcgctgcaaagcgcggtgtttggtcccggcaaccactcaacactgattacgctgttctcgatggcggtgggggtgatcctcggcggcgttattgcggtgaaaatgacccatgaacgcgtggcgcagccgctgcaggaagcgcgccggctgctggattccatcggctgtgcgtttattttgccgcagatcctcgccatgctggggctgctgtttaccagcgccggggtaggtacggcggtggcgcacctgacgcaggaatacctggcggtggataaccgttttatcgccgtggcggtttacgcggtcggtatggcgctgctgaccatggtgatgggcaacgcgttcgcggcgttcccgattatcaccgccggcgtcggcattccgattctggtgctgcagcacggcggcaatccggcggtgatggcggccatcgggatgttttccggctactgcggcacgctgatgacaccgatggcggccaactttaatatcgtaccggcggcgctgctggagctgccggacagaaatgcggtgattaaggtgcaggtgccgaccggcgtcctgttgctgacggtgaacgtatttctgctctatttcctgatgttcctgtag

SEQ ID NO: 443419 - DNA, 933 bp, Serratia marcescens
atgttaaaagtactgcgtgccggcatctataccacggtacaggatctggggcgaaacggcttccgcagcctgggcgtcagccagggcggagcgctggatacgccggcgctgaaaatcgccaacctgctggtgggcaaccgtgcggacagcgccgggctggagattacgctggggcagttcagcgctgaatttacgcagcctggctggatcgcgctgaccggcgccggctgcgacgctctgctggacggcaaaccgctgtggaccggctggcgttatccggtgaaaaagggccagcagctggtgctgcataagcccagacacggcatgcgcagctatctggcgatcgccggcggcattgcggtgccggaggtgctgggttcgcgcagcaccgatctgagaaccggttttggcggtctggcagggcgaaaactgcaggacggcgaccaattgccgctgggggggcgcgagaatacgccgagcaagccgttcggcgtcaagcagctgctgtttaataaccgcattcgcgcgctgccggggccggagtatcaggagttcagcgcagcagcacgggaggcgttctggcgtacggcgtggcagctgagcccgcagagtaaccgtatgggctaccgcctgcagggcagcgcggagttaacgcgcgccaccacgcgggaaatgctgtcgcacggcctgcagccgggcgtggtgcaggtgccgcataacggccagccgatcgtcctgatggcggatgcgcagaccaccggcggctacccgcgcattgcctgtgtgatcgaagccgatctctatcatttggcgcagatccgtctgggggagccggtgcactttattccctgttctctggaagacgcgcagcgcgccaaaaaggagcaggatctgtttattcaacaaattgcctgggggctacatgatcgttga

SEQ ID NO: 443420 - DNA, 660 bp, Serratia marcescens
atggtgcaacgagcacaatattacctattgggtgaaagggcgatcgtgcttgaattggcaccgccggtgacgctgcccagtcagcagcggatctgggcgttggcagaaaaatttgcccatcacccacatgtacaggaagtggtgccgggtatgaataacctgacgctgttgctacagacgccacaggcggatatcgccgcgctgctggagttgctgcggcagggttgggagagcagtgaaacgctggtgccgcaggcgcgggaagtggatattccggtgatttacggcggggagatggggccggatctggatgaggtggcgcgccataccggcatgacgccgcagcaggtggtggagtgccacgccgcagcggcgtatgtggtgtatttcctcggttttcagccgggttttccttatctcggcggtatgccggagcagctgacggcgccgcgccgggcggaaccgcgcctgagcgtgcccgccggttcggtcggcatcggcggcagccagacgggcatctacccgcaggctgcgccgggcggctggcagctgatcggccgtacgccgctggcgctgtttaatccgcaggacacgccgccgacgctgctgcgtccgggagacagcgtgcgttttgtgccgcatcgggagggcgtatgttaa

SEQ ID NO: 443421 - DNA, 744 bp, Serratia marcescens
atgcataacctcgatctggaaagcttgataaacaatgtacttaatagcgccgcgtttcaggactatgcgccaaatggcctacaggtcgaaggacgggaaaacgtacagcgcgtcgtcaccggcgtgaccgcctgccaggcattgctggatgcggccgtggaacaccaggccgacgccattttggtgcatcacggctatttctggaagaacgaggcgccggtggtgcgcggtatgaaacgtaaccggctgaagacgctgctgggcaatgatatcaatctgtacggctaccacctgccgctggatgcgcatccgctgctgggcaataacgcccagctggcgcagctgctggatatccgcgtgctcggtgaggttgagccgctggtgccgcatggcgaatttgaacagccgctcagcggcgcagagctgcagcagcgtcttgaagcgcgtctgggacgcccggttctgcactgcggcgacaatgcgccggcggaaatccgtcgcgttgcctggtgcaccggcggcggtcagggctttatcgacagcgccgcgcgttttggcgtcgacgcctttatcagcggtgaagtctccgaacagaccattcatagcgcgcgtgaaatgggcattcactttttcgccgccgggcatcacgccaccgagcgcggcggcgtcaaggcgctgggcgagtggctggccgaacaccatggccttgatgtgacctttatcgatatcccgaatcccgcctga

SEQ ID NO: 443422 - DNA, 981 bp, Serratia marcescens
atgttgaagaaaatactggccgtctgtctgagcggctattcggcgctggcgctggccgggtttgatgtggtggcgctgggcgtcgacggcggcgtcagcgacggcaacctgacctcttatcttatccgcagcgacagtcagacgcagtacgtggcattggacgccggctcgctgctgcccggcatcggcaaggggttggaaaaaggcagttttccgcaggtgacgccagaagcggcggcgccatatacgccgcagggccatattttccggcggctgattggcgcctattttatcagccatgcgcatctggaccatctggccgggctgattatcgcgtcgccggaagatggtaaaaaaacggtgtatgcctcgaatgacacggtactgacgctgcgcaaccactatttcaactggaagagctggccgaacttcagcgactccggcaacggccagcgccttggcacctaccggctgcagccggtgcgtgaacagcagcgcttcaccttcggcaccaccgggctgagcggggtgatgtatccgctcagccatgcgggttatcactcttcgatggtgctgcttgccgatcgcacgggcgctttcgcctactttggcgataccgggccggacgcgctggaacagtcgcgccagctggacagcgtctggcgggcgctggggccgctggtcgccaataaaaagctgaaaggcatgattattgaaacctcttacccgaatgaggtgtcagacagcaaactctatggccatctcaccccggcctggctgctgaaagagctgaaaaatctgcaaaaatacagcggtggcgacggttcgctggcgggactgccgatcgttatcagccacattaaaccgagcctgcaacagggcgaagaccggcgtgcgatgattcagcaacagctggagcaggccaacgatctgggtgttaaatttatttttatggcgcagggcgatcgccaacagttttaa

SEQ ID NO: 443423 - DNA, 1434 bp, Serratia marcescens
atgaccacccatttggtctggctgcgcaatgatttgcgcatcacggacaacaaggcattgcacgccgcctgcagcgatccgcaggcgcaggtggtggcgctgtttatcgccacgccgcaacagtggcggcagcacgagatggcgccgcggcaggcggcttttatttacgccaacctgctgccgctacagtcgcagctggcgcagcgcggtattccgctggtggtgcatcagtgcgatgattttgccgactcggtgcgctggcttacggactattgccgcaccaccggcgtcgaggcgttgttttacaaccggcagtatgaactgaatgagcggcggcgtgaccggcaggttgaaaccgagctggcggatacgctgacctgtcacgcgtttgatgacgcgctgttgctgtcgccgggcagcgtgcagaccggcaacggtgagatgtatcaggtctatacgccgtttcgtaaggcgtttttgcaacgtctgtacagcgccgatgtacgctccctgccggcgccagcggtgcgtgtgagcggtgcgattgcgccgccggcgccaccggttccgtttgttgatcctgatgccgcatgggatgcggcggcattcccgccgggtgaggaacacgccttgcgccggctgcgcactttttgccgcgagcaggtgcaggactaccgacagcagcgcgactttccggcgctggacgccaccagcggcctgtcgccgtatctggcgataggcgtgttatcgccgcgtcagtgcgtcaatcgcctgcggctgacctgtcctgacctgctggagcagccggacggcggcgcgtttacctggctgaatgagttaatctggcgtgaattttaccgccatctgctggtggcttatccggccctgtgccgccatcgcccctttatcggctggacggacgccgttcgctggaatccggacgccggggcgctacaggcctggcagcaggggcgcaccggctacccgattgtcgatgcggccatgcggcaactgaataacaccggatggatgcataaccgtttacggatgatcgtggccagttttctggtgaaggatctactgatcgactggcgagccggcgagcgctattttatgcgccagctgctggatggtgatttcgccgccaataacggcggctggcagtgggcggcgtcgaccggtaccgacgcggcgccttattttcgcatctttaatccgacgacgcagggcgaacgttttgatccgcaaggcgcttttatccgtaaatggttgcccgaactggcggatgtaccggacaatgaacttcatcatccccaccgttgggcggaaaagcagggtattgcgctggcgtatccgctgccgattgtcgatcaccgccaggcgcggctgacgacgctggcggcgtttgaggcggcgaaacgcggaggggattaa

SEQ ID NO: 443424 - DNA, 207 bp, Serratia marcescens
atgtctacttatcaagcttatccattgcatcggattctcctgcgccgcggcgcagtgatcctggctggcgtgctggctctgccggtgatgctgttccgctccgatcgcgcgcgtttttacagctatctgcaccgcgtctggtcaaaaaccagcgataagccggtctggctgcaacaggcggagctggcgtccggcgatttttactaa

SEQ ID NO: 443425 - DNA, 567 bp, Serratia marcescens
atgtcttatttacgtcctgcgctggtgatgctgattttgctgacgctgctcaccggtatcgcctatccgctgctgaccaccggcctggcgcagctgctattttcccagcaggccaacggctcgctgctgtaccatggcgacaaactggccggttcggcgctgatcggccagaattttacccaaccgcgctatttctggggccgcccttccgccaccgccgattcggcctataatgccgaagcgtcaggcggcagcaatctggcggcgtcaaacccggcgctggataacgccttcgccgagcgggccgccctgctgcgtcaggccaacccgaccatgcgcggcccgatcccggtcgacctgctgaccgcctccggcagcggcctcgacccgcagatctccgtcgccgccgcgcagtaccagctggcccgcgtcgccgccgcccgccatctgccgccggcccgggtggcgcggttaatcgccgaacacagcgaacgacccgcgccgggctttctcggcacgaccacggtcaatgtgctgcagttgaatatggcgctggacgcgctgtaa

SEQ ID NO: 443426 - DNA, 2694 bp, Serratia marcescens
atggttgatgatgaacagcagcgccccgatccggacagcctgctggcggtcgccaacgaaaaacctcgcggccgtctgaaagtatttttcggcgcctgcgccggcgtcggtaaaacctacgccatgctgcaagaagcccagaggcaacgcgctctgggccttgacgttctgatcggggtggtggagacccacggccgcaatgagaccgccgcgctgctggacgggctgagcgtgctgccgcaaaaacggattcagcaccgcggccgcgtggtgcgtgagttcgatctggatgccgcgctggcgagccatccggcgctgatcctgatggatgaactggcccacagcaacgcccacggctcgcgtcaccccaaacgctggcaggatgtggaggagctgctggatgccggcatcgacgtactgaccaccgtcaacgtacagcacctggaaagcctgaacgacgtagtcggcggcattaccggcgtgcgggtgcgcgaaaccgtgcccgaccacgtcttcgatcaggccaccgaagtggtgctggtcgacctgccgccggacgacctgcagcggcggctgaatgagggcaaggtctacctgcccggccacgccgagcgcgccattgagcacttcttccgcaaaggcaacctgatcgccctgcgcgagctggcgctgcgccgcaccgccgaccgggtggacgaccagatgcgcgccttccgcgatacccaggggcaggagaaggtctggcacacccgcgacagcattttgctgtgcgtcggccacaacagcggcagcgaaaaactggtgcgcattgccgcccgtctggcggcgcggctcggctgccactggcacgcggtctatgtggaaacccccaagctgcaccggctgccggaaagccgtcggcgcgccattctgcgtgcgctgcgtctggcgcaggaactgggcgcacagaccgccacgctggccgcaccgtcggaagagcgcgcggtgctgcgttacgcccgtgaacataatctgggtaaaattattatcggccggcgtggtgaacagcgctggaagttccgcagcagtttcgccgaccgtctcggccagttagggccagacctcgatctggtgatcgtggcgctggaggatgagcgcccgccgagcgtgctgaaagaacccgataaccgcagcttcagcgataagtggcgcatgcagctacgcggctgcgcggtggcgttcgcgctgtgcgcgctgatcaccctgctctcccaatggctgctgccgggattcgatcaggccaacctggtgatggtgtatctgctcggcgtggtgattgtcgcgctgtttttcggccgctggccatcggtgctggcggcggtgattaacgtcgccagtttcgatctgttctttgtccagccgcactggtcatttgccgtcagcgatgtgcagtatctgctgaccttcgcggtgatgctgaccgtcggtatcaccatcggtaacctcaccgccggcgtgcgttatcaggcgcgcgtggcacgctaccgcgaacagcgggcgcgacacctgtatgaaatgtcgcacggcctgagccaggcgctgaccgccgaagacgtcgccagcaccagccgtcacttcctttccagcagttttcacgccaaaaccgtgctgatgctgccgcaggaagacggccagctgcggcaaatggtcggccaggacggcggtctgctgtcggtggatgaggccatcgcccgctggagctatgacaaagggcagcccgccggcgcgggcaccgatacgctgcccggcgtgccttaccaactgctgccgctgaaaacctcgcagcacaccttcggcctgctggcgatcgagccgaacaatctgcgccagctgatggtgccggaacagcagcggctgctgcaaaccttcagcgtgctgatcgccagcgcgctggagcgtcagcaactggcgcgcagcgccgcgcaggcgcggctggataccgaacgcgagcagctgcgcaactcgctgctggcagcgctgtcgcacgatctgcgcacgccgctgacggtgctgttcggccaggcggaaattcttacgctggacctggcgacagaaggatcccggcacgccccgcaggccagccagatccgccagcaggtgttgagcaccacccggctggtgaataatctgctggatatggcgcgcattcagtcaggcggttttatcctgcgcaaagagtggcagtcgctggaggagatcgtcggcgcgtcgctgcatatgctggagccgatcttcaaccagcatgaggtcaaggtggagctgcccgatgaaatggtgctgatcaactgcgatggtagtttattggagcgtgtattcaccaacctgttggaaaatgccgataaatatgccggacaggatgctattatcggtattcgcgcccgcactttgccggagtggctggaggtggaaatctgggataacggccccggtattcccgccgagcaaaggcagcatatcttcgacaaattctctcgcggcgataaagaatccgccattcccggcgtcggtctggggctggcgatctgtcgcgccattatcgagctgcacggcgggcgtatttgggcggataacggcaaccacggcggcgccagcttcaagtttctgctgccgctggaaagcatgccggaaatggacggcgcagacttcgatttataa

SEQ ID NO: 443427 - DNA, 306 bp, Serratia marcescens
atgccgggacaccgttttcgtattaccgttgaggcgctgagcgaccgtaaaggcgcgccggtagaaaagacgccgctggtgtttgaagtggaaaatcatgacgacattctggagattgtcgaacgcattcaggggcgggaggatttggccttcggcaaggaaaaaagcgccgcctttgccgtcgggctgaaactgttttccgaggtgatgattgaaaaccgtaaacatgcggtgtttgcgccgctgcgcgacgcattcaaagcgtttatggtcggtctgaaaaaagggccgcaggcgggggaatag

SEQ ID NO: 443428 - DNA, 609 bp, Serratia marcescens
atgtttcatcgattccgttcggatcgcttctgcgatcgtcatggtgaaatgcatgaacgccacttccaccatcatcgcgccgggcgtcatgcgatgggcggccacggcagtaaactgcaccgcctgtttgaacacggcgaactgcgtatggtgctgctggcgctggttgagcgcaaaccgagccacggctatgaattaatcaaggcgattgaagaggcctcctccggcctgtatgtgccaagccccggcgtgatctatccgacgctgacgctgctggaagaacaggatttcctggaagcggaaacctcaggcaaagggcgcaagaactaccggatcacggatgccggcagagcggaactggcgcagcatcagaccacggtagacgtgattttcgcccgcctggccggtgccggccttcgccgcgaagggaatctggcggaaggcattgccgacaccatgcatcgtctgaggtgcgtgctgcgcggcaatatgatgcgcgccgatctgacccaggagcaggttgagcgtattaaccaggcgctgcttgaagcgctcggccgtattgaggccgaagtggccacacatgacaacgcagaggagcaagcctga

SEQ ID NO: 443429 - DNA, 534 bp, Serratia marcescens
atgaaaactattgaagtcgacgaagaactttaccgttatattgccagccacacgcaacatatcggggaaagtgcgtccgatattttacggcgtatgttgaagttttccgcagggcaacctgtgcgtagcgcaagcgtagtggcccagggtcaggagccggaaaaagcggcggcgccacgcccgcgcgatcgcgtacgcgccatgcgcgaactgctgctgtcggatgaatacgccgagcagaacaaagccgtaaatcgctttatgctggtactttctacgctgtacaccctggatgcggccggtttcgccatggcgaccgacgcgttgcatggccgtacccgcacctattttgccggcgatcagcaaacgctgctggcaaatggaacgcacaccaaaccgaaacacgtaccgggtacgccttactgggtgatcaccaataccaataccggccgtaaacgcagcatgatcgagcacatcatgctggctatgcagttcccgacggagctgacagaaaaggtttgcgggactatttga

SEQ ID NO: 443430 - DNA, 855 bp, Serratia marcescens
atgcgtcagcactgccaatccatcacctttgcagataatgagtatgataccctatcagaacctctcaagatcatgaacttcgcgatgaaattacattatcaattgctggccgcacagtcggagaacgccgatacccttcctatcctgctgatccacggcctgttcggcaatctcgacaacctcggggtgctggcgcgcgacttaaatcagcaacacagcgtcatcaaagtggatctgcgcaaccacggcctgtcgccgcactctgacgagatgagctacgcggcgatggcgcaggatctgctgacgctgctggacgacctccggattgagcgcgccatcgttatcggccattccatgggcggcaaggccgccatggcgctgaccgcgctggcgccggagcgcatcgaacgtctggtggcgatcgacattgcgccggtggactaccaaacccgccgccatgacgaaatcttcgccgccctgacagcggtcagcgacgccggcatcacccagcgccaacaggcggcgcagctgatgcgcgactatctggatgaagaaggcgtgattcagttcctgctgaaatcctttcatcagggagagtggcgcttcaacctgccggtgctgattgccaactacgcggcgatcatcggctggcacgacgtgcccgcctggcctcatccgattctgtttatccgcggcgggctatcgccatatgtgcaaaacagctaccgtgacgctattgcgcgccagttcccacaggcgcgcgcctatgaggtggccggcaccggacactgggtgcacgcggaaaaaccgcaggccgtactgcgcgcgattcaccgctttttagccgaaccataa

SEQ ID NO: 443431 - DNA, 2664 bp, Serratia marcescens
atgaacagatttaaactgagtgccctggccgtactggcggcgaccgccggcatgttcggcgcgatcggcaacgccatggcggatcaaccgctggtggatcgcctcagccaggtgaagctgaatatcaaaatgctggacaaccgcgcggccgacagcggcgtggattgcgccaggctgggcgccgactgggcggcctgcaacaaggtgatgatcacgttggccaacgacggccaggcgattaccgccaaagattgggcgatctatttccacagcccgcggcagacgctggaggtgggcaaccaacagttccgcatcactcacctgaccggcgatctgtacaggctggagccgaccgacgcgttccggggcttcccggccaaccaggcggtggaaattcccatcgtggccgaatactggcagctgtttaagacggatttcctgccgcgctggtatgcgacttccggcgatgccaagccgaaagtgctgaccaacaccgataccgaggatctggatcggttcgtggcgccgtttaccggcgatcaatggaagcgcaccaaagaggataaaaacgtgctgatgacgccggcctcgcgctttacgcgtaacgcggacctgcagacgttgccggccgcctcgctgcgtggccagatcatcccgacgccggtgtcggtgcaggtccatgcgcaggatatcgatcttggcaacggcgtggcgctggcgcttggcgccttggatcaggcgacggcgaacgtggtgcgcgatcgttttgcacagcttggcgtggcgagcgcggcggcgggctacccgataaagactgaggtaaacccggcgtcgttcagcggagaaatggcgcaatccggcgcctatacgctgacgctgggtgagaaagaagcgcggattaccggttttgatcagagcggggtgttctacggcctgcagtcaattctgtcgttgatcccgctgcacggcgataaaaagattgccacgctggaggcgcgcgacgcgccgcgctttgcctatcgcggcctgttcctcgacgtggcgcgtaacttccaccataaagatgcggtgctgcgcctgctggatcaaatggcggcctataagctgaataaattccatttccacctgaccgacgatgagggctggcgtattgaaatccccggcctgccggagctgacggaggttggcggacagcgctgccatgacctgagcgaaaccacctgtctgctgccgcagtacggtcaggggccggatgtgtacggcggtttcttctcgcgtcaggattacatcgacattctcaactatgcgcaggcgcgccatattgaggtgattccggaaatcgacatgccggcgcatgcccgtgcggcggtgatcgccatggaggcgcgctacaagaaactgcatgcgcagggcaaacagcaagaagcgcaggagtaccggctggtggatccgaccgatacctcgaacaccacctcggtgcagttcttcaaccgccagagctacctgaatccatgtctggactcttccacccgctttgttgacaaggtgatgggtgaaatagccaagatgcatcaggaggcgggacagccgatcggcacctggcactttggcggcgacgaggcgaaaaacatccggctgggcgccggctataccgatgtgaagaagccggaagcgggcaagggcatgcttgacctgagcaaagaagacaagccatgggcgaagtcacaggcctgccaacggcttatcgacagcggcaaagtggcggatatggaacatctgccgagctacttcggtcaggaagtcagcaagctggtgaaggcgcacggcatcgatcggatgcaggcctggcaggatggcctgaaagatgccaaggacgccaaagcgttcgccacctcgcgcgtgggcgtcaacttctgggataccctgtactggggcggttttgactcggtgaacgactgggccaacaagggctatgaagtggtggtttccaacccggactatgtctatctggacttcccgtatgaagtgaacccaaacgacagcggctattactggggcacccgcttcagcgatgagcgtaaaatcttcagcttcgcaccggacaatatgccgcaaaacgccgaaacctcggttgaccgcgacggcaatgcctttaccgccaagagcgataagccatggccgggagcgtatggcctgtccgcccagctgtggagcgaggtggtgcgcaccgatccgcagatggagtatatgatcttcccgcgtgcgctgtcggtggccgaacgcgcctggcaccgtgccgagtgggaactggactatcaggcgggccgcgaatataagggcggtgaaacgcagtttgtcgataccaaaaagctggcgcaggagtggctgatttttgccaatattctggggcagcgcgaactggccaagctggatgcgggcggaatcagttaccgtctgccggtgccgggcgcccgtattgtcggcggcaggctggaggccaatattgcgctgccgggcttgacgatcgaatattcgaccgacggcggtcagcgttggcagcgttatgatgatgccgccaggccggtggtgcagggcgaagtgcagattcgttcggcaagcccggatggcaagcgctttagccgcgcggagccggtagcggcttaa

SEQ ID NO: 443432 - DNA, 342 bp, Serratia marcescens
atgaaaaaacgcatgttggcggtaaccgtgacggtagggttggcgggctgcgtacagccgcaggcggcgccggaagacggccgcttacggcaggcatacgccgcctgcatcaataccgcagaaggctcgccggaaaaattgcagtcctgccaggcggtgctggatgtcttgcggcaagagcaacggcaccagccgtttgctgaacaggaaacggtacgcgtgatggattaccaaaaatgcattcaggcgctgcacagcggcgacggccaggcgtatcacgagcgctgcggcaagctgtggcaagaaattcgggcgaataataacgatgaccaaggagtctga

SEQ ID NO: 443433 - DNA, 1182 bp, Serratia marcescens
atgaagacttctcaaacagagtacgacgtcgccgtggtcggcggcggcatggtcggcgcggccgccgcgctggggctggcgcaggccggatttagcgtggcgctgctggagcatcaggcgccggcggcgtttgatccgcacagcgcgccggatctgcggatttccgccattggctgtgcctcggtcgctctgttgaaacagctgggcgcctggcagtcgctggcgcagatgcgctcggcgccgtaccgcaggctggaaacctgggagtgggaatcggcgcgggtggcgttcgacgcggccgagctgggcctgcccgaactcggatttatggtggaaaaccgcctgctgcagctggcgctgtggcagcagctgcagcactgcgacatgctgacgctgcattgtccggccaggctgcaggcgctgcagcgcggggagggcgcatggcgactgacgctggatgacggagagacgctgacggcgcggctggtggtcggtgccgacggcgcgcactcgcaggtgcgcacattggcggatatcggcgtcagcggctggcagtatcgtcagtcctgcatgctgattaccgtgcagaccggcgcgccgcagcaggatgccacctggcagcagttcttcccttccgggccgcgcgcttttctgccgctgtatgacgactgggcctcgctggtgtggtacgacagcccgcaacgcattcgtcagctgcaaagcatgccgatggcgcagctggagcaggagattgccgcggcgtttccggcgcggctcggcgcggtgaaggcgcatgccgccggctcgttcccgctggtgcgccgccatgcccagcgttacgtcctgccggggctggcgttggtcggcgacgcggcgcacaccatcaacccgctggccgggcagggggttaacctgggttaccgcgatgtcgacgcgttgctgaacgtgctgctggaggcgcgcgagcggggtgaggaatggtcgagcgaagcggtactgcagcgctatcagcgccggcgccgcgccgacaacctgctgatgcagagcgggatggatctgttttataccgccttcagcaatcgcctggcgccgcttggcatagcgcgcaatctggcgctgatggccgccgaacgcgccgggggactgaaacaaaaagcgctgaagtatgcgctgggcttataa

SEQ ID NO: 443434 - DNA, 1530 bp, Serratia marcescens
atggccaacgcctctttattcgatcgccagcgggttcgcgccctgctggcgctgttgaccggcgcctgcggcacgctggcgttttctccttatgatatctggccggcggccatcgtttccctgtgcggactgctggcggtcacgcttaaccgcagcgtgcggcagtcggcgctgctcggctttatctgggggatggggctgttcggcagcggcatcaactgggtgtacgtcagcatcgccgacttcggcgggatgccgttcgccgtcaatatcttcctggtggcgctgcttgccgcctacctttccctgtacaccgggctgtttgccggcctgctgacgcgcctctggccgcaaacccactggctgcggctggcggtcgccgccccggcgctgtggcaggtcaccgagtttctgcgcggctgggtgctgaccggcttcccctggctgcagttcggctacagccagatcaacggcccgctgaaaggcctggcgccgctgctgggcgtcgacagcatcacctttgtgctgatgtcgctgagcggcctgctggtgtacgccgccgcacggcgccgcatcctgccggcggcgatcgccgtcgccatgctgctgctgccgtggccgctgcgtcagctgcactggtttaccccgcagcccgacaaggcggtcaacgtcgccatggtgcagggcaacattgcccagtctctgaagtgggatccgcaggcgctggtcagtacactgcaggcctatctggacgccacccgtccttacgtgggcaaagcgtcgatgattatctggccggagtcggccattcccgacgtggaaagcaaccagaacggttttctgaccatgatggacgatctggtgcgcgccaaacacagcagcctgatcaccggcattgtggacgcccgcgccacccggcagggcacggaatactttaacagcgtgattgttctgggtgaaaaagagccgtaccgctacccggccgccgaccgctacaacaaacaccacctggtgccgttcggcgaattcgtgccgctggaaacgctgctgcggccgctggcgccgttcttcgatttacccatgtcctccttcagccgtggcaattatgtccagtcgccgctcaaggtgcagggctacgatctgacggcggcgatttgctatgaaatcgtgctgggccagcaggtgcgcgacaacttccgtccgaataccaacttcctgctgaccatctccaacgacgcctggttcggccactctatcggcccgtggcagcacttccagatggcgcgcatgcgcgccctggagctgggccggccgctgctgcgcagcaccaataacggcgtcaccgccgcggttggaccaaccggcgacgtcatcgccgagcttccgcagttcacccgccaggtgctggaggtgaaggtgaccccgaccaccggcatcacgccgtacgcccgcttcggcggcctgccgctgtgggtgattaccgccctgctgggcggcctggcgctgttgttcggcctgcgccgccgttaa

SEQ ID NO: 443435 - DNA, 933 bp, Serratia marcescens
atgccacgccctattattatcgattgcgaccccggacttgatgacgccattgcgctggcgatggcgctgcgcgcgccgcagctggacatcaaggccatcaccacctccgccggcaaccagacgccggagaaaaccctgcataacgccctcggcctgctgacgctgatgcagcgggaagatatcccggtcgccgccggcgccgccaaaccgctgctgcgcgagctggtgatcgcagagcacgtacacggtagcaccggtatgggcaacacccatttaccgacgccgggcatcaaaccggcgccacacaccgcggttgaactgatcgccagcctgctgcgcaccagcccggaaccgatcacgctggtggttaccgggccgatgaccaatatcgccctgctgctggcgcagtaccccgacctcaagccccgcatcgagcgcatcgtctttatgggcggcgcgcttcacggcggcaacgccacgccggtggccgaatttaatatctacgtcgatccggaagcggcggaaatggtgttgcagtccggcgtgccgttgaccatggcgggcctcaacgtcacccatcaggcgtttgtgctgcctcaggaggcagagcgcatccgcgccatcgccaacccggtggcacaggcggtagccgagatgctcgacttctacctgccgatatacctcaaccacccgcgcgggctgccgggcgccgcgatgcacgacccgtgcaccatcgcctggctgctggcgccagagctgtttgacagccgcgaacgctgggtcggcgtggaaaccaaaggcgaatataccctgggacaaaccgtggtggacgatctgcaacaaaccggcaaaacgcccaacgtgcaggtgctgaccaatatcgatcgggccggctttattgatctattgctagactgtctgacgcgttattaa

SEQ ID NO: 443436 - DNA, 168 bp, Serratia marcescens
atggaacagcaagcctctatcatcgcggattatttttaccttaagaatcgtggttataatgagtggctatcaaaaattggtgataatataaacttccgtggggtcaccgataaatacattgttcataagtataaacacaccctatctgatttttttaaacaatggtga

SEQ ID NO: 443437 - DNA, 267 bp, Serratia marcescens
atggtctccctcagcattgatgaagtaggtaataaggacaacatattcaataaattttatgatggtgacggcttggcagttgcatctgacaaatgcataccgacatacaactatccgtttagagccggccatacttacaatgtttccattaccctgcgttcgcaagataaaaagagcaaaggcatcgtgccaacagcgcgtttatacgacgtcagcttcaccttaacgggtaaggatgacgagctggttataagctctataaattaa

SEQ ID NO: 443438 - DNA, 267 bp, Serratia marcescens
atgatcacactgaatatcgaggaaataggtaacaaagaaaacgggttcaacaaggtttttgatgattacggattaaaagtttcatctggtaaatgtataccaacctacaactatccgtttaaagccggccatacttacaccatttccatcaccctgcaatcacgagataaagagaggaaaggtatcgtaccctcaggacgcgcatacggcgtcggcttcactttaacagacaagaatggtgaactggttgtcagttctatcaattaa

SEQ ID NO: 443439 - DNA, 417 bp, Serratia marcescens
atgaaaaagatacctatactgcttacccttgcttcactccttagcggctgtttccaccttggcgatccacgcgcgaaaagctataaagcatccgtggtggtcgttgccaatcacatctgcgtgttaattcagcccgaaggggatgaaaaaatggtctccctgagtattgatgaacccggtaacgaagaaagcatatttaacaaatattatgatggcgacggcttagcggtttcagccgataaatgcataccgtcatacaactatccgtttagagccggtcatacttacaccctttccatcaccctacgttcgcaagataaaaagagaaaaggcatcgtgccggcagcccgcttatacggcgttagcttcactttaaaagagagggatggtgaactggttataagctctatcaattaa

SEQ ID NO: 443440 - DNA, 561 bp, Serratia marcescens
gtgcgacttcgtattacaacgttgttgctggggctggtggtgctgatcaccgccggctgcggttatcacctgcgtggcaccacgcaggtaccatcagagatgaaaacgctgatgctggacagctatgacccatacggtccgctgacccgcgcggtacgcgcacagctgcgcgccaacggcgtaaccattgtgaaagacgcgacgcgtaaagatgtgccgtcgctgcgcatcgtcggctcctcacaggggcaggataccgtgtctatcttccaggacggtaaaaccgccgagtaccagatggtgatgacggtggatgcgcaggtgttgattccgggccacgatatttatccgctcaaggccaaagtcttccgttcgttcttcgataacccgctgaccgcgctggcgaaagactccgagcaggagatcatcctgcaggaaatgcgcgagcaggcggcgcaacagctggtgcgtaagctgctgacggtgcatgctgcggaagaagaagcccagcagcaggccgcggcggccgataaaaacgcggaaagccgcccagcgcaatga

SEQ ID NO: 443441 - DNA, 1035 bp, Serratia marcescens
atgacccgtctctatcctgaacaacttgccgcgcagctccgagaggggctgcgcgcttgttatctactgtgcggtaatgagccgctgctgctgcaggaaagccaggacctgattcgtcaggcggcagtgcagcaacagttcagcgaacattacagtatctcccttgacgcccataccgactgggacgccatcttcagtatctgtcagtcgatgagcctgttcgccagccggcaaacgctgctgctgatcctgccggaaaacggcccgaccgccccgatcggtgaacagctggtcaaactggcggcgttgctgcacgaggatatcattctgatgctgcgcggcccgcggctgaccaaagcacaggaaaacagcgcctggttcaaggcgctgggcacaaacggcgtctacgtcacctgccaaacgccggaacaggcgcagttgccgcgctgggtcgccaagcgcgccaaagcgatgcagctggaactggacgagccggccaatcagctgctgtgctactgctacgaaggtaacctgctggcgctggcgcaggcgctggagcgtctggccctgctgcatccggacggcaaactgacgctgccgcgcgttgagcaggcggtcaatgacgccgcgcacttttccccgtatcactggctcgatgccctgctggccggcaaaagcaagcgcgcctggcatattctgcagcagctgcgtcaggaagatgtcgaaccggtgatcctgctgcgcacgctgcagcgcgaactgatgcaactgctcaccctgcagcgccggatggcgacaacgccgctgcgtacgctgttcgaccagcataaggtgtggcaaaaccgccgtaacctggtgacccaggcgctgcagcgcctgtcggccgcgcagctgcagcaggcggtacggctgctggcgcatattgaggtcaccctcaagcaggattacggccagtcggtctggccggaactggagtccctgtcgatgttgatctgcggtaaaccgctggctacgagtttttccgatgtctactaa

SEQ ID NO: 443442 - DNA, 663 bp, Serratia marcescens
atgtctactaacacacccgcagccaccgggctgcacgcgctgttcggcggtacgttcgatcccatccattacggccacctgcggccggttgaggcgctggcccgggaagtggggctggaccaggttgccctgctgccgaaccatgtgcccccgcaccgcccgcagccggaagccaatgcccggcagcggctgaaaatggtagagctggcgatcgccggcaacccgctgtttgccgttgacgaccgcgagttgcaccgcaccacgccgtcgtataccgtcgaaacgctggaggcgattcgtcaggaacgtggcccggctcagccgctggcgtttattatcggccaggactcgctgctgagcctgcataaatggcaacgctggcaagacctgctcagcctgtgccacctgctggtgctggcccgcccgggttacaacgaccatatggaaacaccgacgctacagcgctggctggaagcccaccgcgtcagcgatccggcagcgctccgcagccggccgcacggttcgctgtatctggcggatacgccactgctggaaatttccgccaccgaaattcgtgagcgccgccaccagggcgccagctgtgatgacttactgccgcgttcggtgcagcgttatatcgaattacagggtttatatcgttag

SEQ ID NO: 443443 - DNA, 1065 bp, Serratia marcescens
atgcgtaaggaatggctttggatcggcgcggcagcggtattactttccgcctgtgccaccactgatgagcagcaggcgccgcccgccgcgccctataacggcccggtggtcgaaatcagcggcgtggagcctcattatgaaccttataacccaggcacgctgcaggattataaagtgaacggcgacagctaccgcatcgtcaaaaacccgcagaatttctcacagaccgggctggcaagctggtacggcgaagagtccagcggcaaccgcaccgccatcggcgaaacgtttgatccctatgccctgagcgcggcgcacccgacgctgccgatcccaagctacgtgcgcgtcaccaacctggccaacggccgtcagctggtggtgcgcgtcaacgatcgcggcccttacgtgaaagggcgcattatcgacctgtcgaaagccgccgccgaccgcctgaatctgtcgaacaatacgcgggtgaaagttgattttatcaacgtcgctccggacggtacgctgagcgggccaggcaccgtcggcaccaccgtcgccaaacagagctatgccctgcccgcgcggccgaatctgagcagcggcgccatgggtaccccggtgcaacaagacgcgccggcgctgaacaacaacaatgtacgcgccattgataacagcagcctgaccaacggccaggccactgccgaaaccggcagcaacggcggcctgatcggcacggcccccggcgacgttcaggccggcaacagcgccgcggcgtcctcgtcggcgccggtagccgctgcagcgtccgccacggccggcgccgcaaccgccgcttccgcgtcaaccgccggctatgttgttcaggtgggggcgttaagcgacgccgcacgcgcgcaggcatggcagcagaaactcagccagcagttcggcgtgccgggcagcgtatccgtcaacggcgccgtacatcgcgtacagctcggcccgttcagcgatcgtcagcaggcgctggcgctgcagcagcggctggtcgcggaagcgcaacaacaatcatttgtcaccgccgcaccttaa

SEQ ID NO: 443444 - DNA, 666 bp, Serratia marcescens
atgcccgtgcaacacgataagatcatagtccgtcagctggggctgcagccctatgagccagtctcccaggccatgcacaacttcaccgatcgccgcagcgaaaacaccacggacgaactgtggctggtacagcactccccggtcttcacccaaggccaggccggcaaagcggaacacgtgctgatgcccggcgatatcccggttattcaaagcgatcgtggcggccaggtcacctaccatggccccggccagcaggtgatgtacgtgatggtcgatctcaagcgcaataaaattggcgtccgccaactggtcagcgcgattgaagacaccgtggtgcataccctcacccacttccatattgattcgcgcgcgcgtcctgacgcacccggcgtatacgtcggcgaccagaaaatctgctcgctggggctgcgcatccgcaaaggcagctccttccacggtctggcgctcaatgtggcaatggatcttggcccgttccagcgcatcaacccctgcggttatgccggcatgcagatgacccaggtcagcgcgctggcgcccgctgtgtcgctggaggacgtggcgccggttctggtgcaggagtttgtccgccagctcggctatcggcaggttgaaacgggcagttgggctttaggtgattatctgtag

SEQ ID NO: 443445 - DNA, 210 bp, Serratia marcescens
atggaaggaatcagtattaccaaactgttggtgattgcggtattgatcgtcttattgttcggtaccagcaaactgcgtacgctgggcgctgacttgggcgcggcgctgaagggctttaaaaaggcggtgggtgatgataccccgccggtgcagaatacggcggacagcagtgccgcaggccagcagaacgtcgagaagaaagacgtctga

SEQ ID NO: 443446 - DNA, 384 bp, Serratia marcescens
atgttgaattctttactggccgtatttatcggcggcggcttaggcagcgtactgcgctggagcatcagtttgcggctcaatccgctgcacccggcaattccgctgggcaccctgaccgtcaacctgctgggtggctttattatcggcctggcgatggcgctgatggcccgcgccagcgctatcgatcccacctggcgcctgctgctcacgaccggtttctgcggcggcctgaccaccttttccaccttctcgctggaagtggtttccctgctgcaggacgggcgctttctgtgggcgctgaccaacgccatgctgaacctggccggctcactgctgatgaccatgctggcgtacctgctggtcgcctggatcaccgggcagtaa

SEQ ID NO: 443447 - DNA, 612 bp, Serratia marcescens
atgtcatccccaacagaaagcaggcaggcgaaagccgaactgcgccgtaaccaaatcgtcgcagccgcgaaagtctgctttcgtcaatatggctttcatgccgccagcatggcggagatcgcccagcgttcagccttgagcgtcgggcagatttaccgctacttcgtcaataaagacgccattatcgccgaaattgttgaccgcattattaacgataaaatgcggcgtcttgaggatcttagcgaccacatcaacctgattgccggtacgctcgccacgcggacgctgtatcaattacctgggcagagcgaagacgaccacctgctgatgctggaagtgaccgccgaagccacgcgcaacccggcggtggccgccatgctgagcgatgccgaagcgcgcctgttccgccacgtctgccgtaatctgcaacagctctatccgtcgttcagcgacgaagaaatcgccgcgcgcgtcgaatttatcgccgtgctcagcgaaggcaccggttatcgcctgcttaccacgcaaaaagccgaccccaaactgctggaaggtttataccagcaggctatctcccatctgttccgtgagtccgccacacctaatgagtaa

SEQ ID NO: 443448 - DNA, 1191 bp, Serratia marcescens
atgagtaaacaacacgcccgtcaacgattagtttatgccgccgtgcttggccttctggccgcactggggccattgtgcatcgatctttacctgccggcgctgccgcaaatgaccgccgagctcaacacttcaaccgccacggcgcagctgagcctgaccgccggcctgctggggcttggacttggccaactgatcttcggcccttacagtgacaagctgggacgtatccgtcccttactgctgtcactgctaattttactggcagcctcgctgtggtgcgccttggccaccagcatcgaccaactgttgatcgcccgcctgctgcaagggctggccggttccggcggcgccgtaatctcccgcgccatcgcccgtgacatgtattcaggccatgagttaacgcgcttttttgcgctgctgatgctggtgaacgggctggcgccaatcgtcgcgccggtgctgggcggcgcgctgctgaaatttatggactggcgcggcatttttgacgcgctggcgctgatcgccctgttgctcttcaccctgtccctgctgaagctcaaagagtcgctgccacaggagcggcgcagccagggcggcttgttgtcgatgctgttgtcgctgggtggcctgttgcgccaacggcaatttatggggttgtgcctgacgcagggcttcgtgatggccgggatgtttgcctatatcggcgcatcgcctttcgtcctgcagcaaatctacggtctcagcccgcagatgttcagcctgtgctttgcgatgaacggcatcgggctggtaatttctgcccagacggcagcgcgtctgagccgacgcttcggtgaactgcgggttctaaaatgcgggctgacgctggcggcaagcgcctcactgctgttgttgctggccggctggctgcacgcgccgttgccgctgttgctggcgccgctgttcttcgccattgccgccgtcggcagcgtcggcccgacggcttcctcgctggcgatgcagaaccagggcgacaaagccggcagcgcttcagcgctgatcggcgtctgtatgttcgcgctcggcgcctgcagcgttccgctcaccgggttgggcggcacctccagcgtctcgatggcactgacgattttcggctgctatttcatcgccattgtgctgttcaccctgctggtgccgaaagcccgccgctga

SEQ ID NO: 443449 - DNA, 1164 bp, Serratia marcescens
atgccctgtcaactggccgaacaaatcatcacctaccgccgtgaactgcatcagcaccccgaactgtccaatcaggaattcgccactaccgaacgtattacccgctggctgcaacaggccgatatacgcatcctgccgctggcgctatccaccggcgtcgtggccgaaatcggcagcggcgacgggccgctaatcgccctgcgcggcgatattgacgccctgccgattgcagagctcgccgatgtccccttcgcctcacgtcagcatggggtgatgcacgcctgcgggcacgatttccacaccgcggtgatgcttggcgccgcccacctgcttaaagcgcgtgagtcctcgctcccgggccgggtgcgtatctttttccagccggcggaagaaacctgcgacggcgcgcagcagctgattgacgccggcgcgctggacggcgtcgcggccgtgttcggcctgcacaacgccccggaattgcctaccggaaccttcgccacccgcgccggtcccttctacgccaacgtcgatcgctttcagatccgtatcaccggcaaaggcgcgcacgccgccaaaccggaacagggtattgataccatcgtcaccgccagccatatcgtgaacgccctgcaaaccctgccgagccgcagtttcagctcgctggaggcggtagtggtcagcgtgacgcgcatcgagggcgggaatacctggaatgtgctgccgcagacggtggagctggaaggcacggtgcgcacccacaacggtgacgtgcgccgtcaggtaccggataaaattcgccaggtgatcgacggcgtcgccgcctcgctcggcgcacaggccgaactgtgctggcaccccggaccgccggcgctggtcaatcacgcccactgggcggacttcagcaaaacggtggcggcggagtacggctatcaggtcgaagaagccgaactgcagatgggcggtgaagatttcgctatttatctgcatcacgttcccggcgcttttgtcagcatcggctcagccagcgaattcggcctgcatcatccgcgctttacgcccgatgaacaggctattttcccggcgtcgcaatactttgaacgcctggcggagcgcgccttacagcaactggcgcaggtgccgcaacgggccgtcagcctggcctga

SEQ ID NO: 443450 - DNA, 477 bp, Serratia marcescens
atgaacggcaagataacgactttttttgcagagaaaggcttcggctttattaccgatgaaaatggtgaaaatcgctatttccacgtggtaaaagtgcaaaaccccgatctgattaagaaaaacgctgcggtaacgtttgagccgaccaataacgccaaagggccctccgcctatgcggtaaaagtgctggctccaagcaaatacatcatcattgccaatgaacgtataaaaatcagcagcatcaaatccttccacaccttcaccaaagaagtaccggtgcagaaccaggtggacaaagaaaacaccgtattatcggttgggctgctgatgaaccgtatccgcccgcagacggagagcgccccggagatgcagacgctgcgcatgctgtcggtggtcaccttccagaacgtgacccataccttctccgaacatgagatcgatctggacgacacgctacaggcgctccagggcctgtaa

SEQ ID NO: 443451 - DNA, 1437 bp, Serratia marcescens
atgctttctaagcatggactgccgggcgcagtgcgtctcgttaatctttttttgctggttttctttctttctctcgttggcattttttcccgtcctcttgattctctctccttattctggccggttaacgccattttgttgggcgtgttattgcgtaagccggcctatgccagcccggcaggctggctggtgacctatatcgccatgattgccgcggatttgaccaccggtgaaggctggatgctggcgctatggctcaacctgtgcaatatgtcgctggtggcgacgggctactgcgtgatgcggctgttgccgcagtctcagcggcgcatggggaatccacaggccattttgtatctgtttgccgccggtctggccggggccgtcgtggcgtcgacactgtcgatactgcgtaatgacagcctgtacaataatacggtgctgaccgcctggctggcatggtttagcgaacagttctccacgactttgctgattttacccgttctgctggcggcgccgcgcttaaaaacgctgctgcgtatgcagtatcactggaacctgagtgatggtctgccgctattggcgctgctggggtcgttgctgtttagcatctatatcggcggccccggcgctatcgcgttcccgatcccggcgctgttgtggtgcgcggtgcgctatcaattgtttaccgtcacgctgttgaccttgctgaccggcgtggtggagatctgcaccatttccgccaatgtgatgctgtacgaaacgccgacgtcccgtggcgcattactggataccctgatgtcggcgcgtctggggatcgccatgttggtgatggggccactgattctctccagctcgatggtggctaatcgcaaactggtgcgccgcctggaacatagcggcaatcatgactttctcaccggaacgctgacgcgtagcgcgctgacgcgtaaggcgagggaattgctggaacacaagcggcgctctaaagaagcggtatcgctgctgctgattgatattgaccactttaagctgattaatgatacccatgggcatattgtcggcgacagggtattgacccatgttacccacgtattgcggcgtgaactgcgccacgatcagcctctgggacgactgggcggtgaagagtttgccgtcgtattgccgcgcgcgctggcggctcaggcggtagcgttaggggagtttctgcgccagcaggtggaaaagagcgaggtgaagagcggtcataaggcgctgaaggtcaccatcagcgtcggcgtagccagcctggcgatgaaggaggttaaatcctgggagcaactgatgaatatggccgatatcgcactgtatcgcgccaagtcgctggggcgtaaccgggttgagtcttttaatgtggtgagcggcagcagcgtcgatcacatctggtttaaagagtag

SEQ ID NO: 443452 - DNA, 480 bp, Serratia marcescens
atgaaatttcttgctgcttcaaccatgatgctgtccatgctcgcaccggcggtttctgttgccgcggaggatgaggataaggtcaaagtacagcgcagcggtgctcagccctctcaggctggcccgacgaactattttaccggccaggtgcgcatcgacgcgcctttccagggcagcgatgatgcccgcgttggcggcgctaccgtaacctttgagccgggggcgcgcaccgcctggcatacgcacccgctgggtcaaacgttaatcgtgacgcaagggcgtggctgggtgcaggagtggggcggtaaggtgcaggaaatgaatcagggggatatcgtatggatcccgcagggcgtaaaacactggcatggcgctacggctgataccgccatgacgcatattgccattgccgaatcgctcgacggcagtccggtgacgtggctggaacaggtcagcgacgagcagtatcgccaacggtag

SEQ ID NO: 443453 - DNA, 807 bp, Serratia marcescens
atgttaggagaaaacgttaacgatttaatcgccttcctgatggtggcacaggaacgcagcttcacccgtgccgctgccaagctgggcgcagccctcagccatgccgtccgcggtctggaagagcggcttgcggtgcgctccacgcgaagcgtcgccccgacggaagccggagaacgcttggtcaacgccattggcccacacttcagggatattgaagccgtgctgtggccggcgctgaagccatttttacaacgctatcccgatatcaaggtagaaatcatcgccgacgatagtctgaccgatatcgtcagcgagcgctttgatgccggcattcgtctgggcgaacaagttgccaaagatatgatcgccgcacgtatcggcccggatatccgcctggtggtcgccggatcgccggattatctggtgaaaaagggcatccccgccaccccgcaagcgctacagcgccaccgctgtatcaatatgcgtctgctgacgctgggcggcatctatgtctgggagtttgcaaaagatgggcgggagattaaagtacgcgttgacgggcaggttacttttaacaacctgcgtcaacgtatcgatgccgccagcgcagggctggggctgactttcgtgccggaagacgccatacaggcggaaattaccagcggtcggttggtcacagtactcgacgagtggtgtccgccccttcctggctattatctgtattaccccagtcgtaaacagcacaccaccgcgttctctctgctgcttgaggcgctaccctacccccctcatcctgttaacgcttag

SEQ ID NO: 443454 - DNA, 870 bp, Serratia marcescens
atgatttcagggttcttttcatccctggtcatcaccagaaaaggcgccagtcattatacggaaagtagaaagaaacgaatttttcgtccaacgattatctctttgttcaccattcttcctctgacggcgctattaatgtttacccttcaggatcatagagacttacaatcgtacttctcctatcggcatatatggttcctggtagccttatccatgattagccttgttaccttttgcaatcctcagggattcgttaatctggctaaaaaaacttctgattttttaaagaataaaccatatatttttataacagctgtatttgctggtgcttattttatttctaacgtatcattcattctcagtaagaaattcttaccgcgagaaataaatgtcttcttccaaatcagtgaagctgtactctatgttgccccattctttattggtatgatcctttacttccttagtaaactaccatctaaaggcaccatcatcacttattttttactgttcacgctatggtatgtcgcatcattgacaccgacttacgatacacttccaggaccaatcaaagtgctgttgaaagatacgttcacaataatggtatgcctctcgatcttctactttttctacagcctgaaactaccagcaagcaagttcatttctgagctttcacggatagccttgccgttttatctattccatctgccgatccttattcttctatcatcgctatattgtaaaatcacagaaaacgactcggatatacagtatgcattaattatcatacctctgactgtggttgtaacttatttcctatcatgggtttcaatcaaaaacacatcagtacagaggagtctgggcatagcctaa

SEQ ID NO: 443455 - DNA, 237 bp, Serratia marcescens
atgagaaatgttttattctttgattcgatgcttactccaaaaattatcaccgtggtttattggttaacgctgttaggcgtgataatcagcggtattggcgtcatggcgtacagcggggtgtttagtggcctgcttggcatcctgattggcggcgtatttgtccgcgtcgcattcgagatgattattattgcctttaagaataatgaatatctaagaaaaatcgctgaaaagccttaa

SEQ ID NO: 443456 - DNA, 213 bp, Serratia marcescens
atggaaatttttaatctggataaccacccgcacgtcgaactctgcgatttgctgaagtttcagggctggtgcgaaagcggcggcgcggcgaaagaagtcattgccgatggtctggtcaaggttgatggccagcaggaaacccgcaaacgctgcaaaatcgttgccggacagcaggtcagctttgccggccggacggtcaccgttcaagcttaa

SEQ ID NO: 443457 - DNA, 1500 bp, Serratia marcescens
atgagtctgttctcagggtttgttaaatcgttatccaaactgtccatgattggccgcgcgctgatgctgccgatctcactgttgccggccgccggcctgctgctggcattcggcgacaaattccatctgccgctgatgatgaacgccggcggggtgattttcgataacctgccgatgctgttcgccatcggctcggcggtggggctggcgtcagaatcaggcattgccgcactgtccgccgccgtgtcggtgttcgttaccaatatcaccatcggtacgctactcggcatcacgccggagatggccgcccagggcggaaaatatgcgttggtggtcggcattcccaccctgcagatgggcgtattcggcggcctgatctgcggcattctcgccgcctggtgctataaccgcttccacgctatgcaactgccggaatttctcggcttcttctccggcaaacgctttgtggccatcgccaccgcttttttgtcgttcatcatgggcctgctgctgccctacgtctggcagcatattcagtcgggcattgatgcgctctcggtggtggtcaacggcgataatcaggcggcctccacctttatcttcgggctggtggagcgagcgctgatcccgcttggcctgcaccatatctggtatccctccttttggtattcgtttggcgactacaccaccgccgccggtcaggtgatccacggcgatcagaccatctggttcaaaatgttggaagaaggtgtgaaatccttcagcagcgacagctatcaggacgccggtaaatttatgcagggcgaattcccgctgatgctgttcgccctgccggcggcctgcctggcgatgtatcatgaagcccagacggccaacaaaaaaatcgccgccggcattctgttttccgccgcgctgacctgctttttgaccggcatcaccgagccggtggagttcacctttatcttcgtggcgccgattttgtacgtctttaacgccatcatggccggcctggcgtatatgaccatgtatctgctgcatgcgcatatcgccaagtcgttctcggccggctttatcgactacctgtcattcggcattctgccttcgttcaacggatatcagacccacttcctcagcgccattatcgtcggtattccgatggcgctgatctactacttcaccttccgctttgtcatccgccgcttcgacgtcaaaacgccgggccgcaccaacgtaaccgccaatgcggatgacaagaccgacaccgagctggcaacggaaatcatcggcctgctgggcggcgcacagaatattgactccgtcggttcctgcatcacccgcctgcgtcttgaggtggcggacagcaaagcggtggataaagacggcctgaacggcctcggggcgcgcggcgtggtgttcgtcggcgatagcggtattcaggtgatttttggcgcgcgggcgcaatttattgcccaaaccatgtcgacgatgattggcaaataa

SEQ ID NO: 443458 - DNA, 1017 bp, Serratia marcescens
ttgaagaaagtcagcattatcgacgtggcaaaacaggcgggagtttccgtctcgacggtgtcgctggttctgcgccagaaaggcaaaatctccgacgccaccatcgccagggtgcaggccgctatccgccagttgggctacgtgcacaacgtggcggcagccaatttgcgcgccagcacctcaaacctgattggcctgatcctgcgggatttcagcgacagcttctccatcaaggtgatggccagcatcgtgcaggaactggaagcccagggctatatggtgtttctcggccagccgcaggatgaacaggagcacctggaacgctgtctgctctctttcaagcagcagggagtggccggagtgatttatctggcgtccgatgccgcccgcccgcagctgcccgcgcttatccgccagtgtccgctgccgctggtggcggtttcgcaatcgctgctggaggaggagtgtaacctggtgatgcgcgataaccgccaggccgcggggctggccacccgctatctgatcgaacgcgggcaccgcagcatcggctatattggcggccgacaggattcactgattcgccagcagcggctactgggatttcatggcatgcttgcccagcacggcatcgcctgcaaagaagagtccgcccccgcctgcagcgacgatacccgcgccgccagccaggccacccgtcgtttgctcgagcaaaacaataccatcaccgccctgctctgccactcgccggacgccatgatcggctgtatcaacggtattcatcaggtaggccgcaccatcggcaaggatgtgtttctgacgcagcaggtggcgctgattggctttgaagatatgctgcacgtcaacctgacctcgccgtcgtttacctacgtctcctccgccagcgaagaaaccggccgtcaggccgccgcgctgatgctgcgccagctgaaggagccggcgttacagacccagcgcatcacgctgtccggccagttggtcagccgggagtcggcataa

SEQ ID NO: 443459 - DNA, 723 bp, Serratia marcescens
atgcacacgctgtttatcgcagatctgcatttatgcgcacaggaaccggcaattactgccggttttctgcattttttgcagcgcgacgccgttcacgcggacgcgttatatatccttggcgacctgtttgaagcctggatcggcgacgacgatcctgaaccgctgcacgccgagatcgccgccgcgctgaaggcgctgcagcaggccggcgtcccctgctatttcatccacggcaaccgcgatttcctgctgggcaaacgcttcgcccgcgccagcggcatgaccctgctgccggaagagcaggtgctggaactgtacggccgccgcatcctgatcctgcacggcgacacgctgtgcaccgacgatcgtgactaccagcacttccgccgccgcgtgcataatccgctgattcagaaactgtttctggcgctaccgctgcgctggcgtctgaaaatcgccgccggtatgcgcgcccgcagccagcagagcaatcagcacaaaacgctggatattatggacgtgaatccgcaggcggttgagcagacgatggcgcgccacaacgtgcgctggatgatccacggccatacgcatcgtcccgccatccacgaactttcgctgcacggcgcagcggcgcatcgcgcggtattgggcgcctggcaccaggaaggctcaatgatcaaagtcagccgtgacgacgtcgagctgatcgccttcccgttctga

SEQ ID NO: 443460 - DNA, 2433 bp, Serratia marcescens
atgatttggcgctggttttggcgggaatggcgttcgccatcgctgctgattgtctggctggcgctgacgctggcggtggcctgcgtgctggcgctcggcagcatcagcgaccggatggaaaaaggcctgagccagcagagccgcgattttatcgccggtgaccgggtgctgcgcagcgcgcatccggtgccggaaggctggctgcttgacgccagccggcaaaacctgcagataagccgccagctctcttttaccaccatgacctacgccggcgatcggccgcagttggccaacgttaaggcgaccgatctggcttatccgctgtacggcaagctggaaacgcgcccggcgaacgtcaagccacagccgggcacggtgctggtggcgccgcggctgctggcgctgctgggcgtcaaagtgggcgatgaactggacgtcggcgacgccacgctgcgcatcgccggggaaatactgcaggagccggactccgggtttaatcctttccagaccgcgccgcgtattctgattaatatggcggacgtcgagaaaaccggcgcggtgcaacccggcagccgcctgacctatcgctatatgtttgccggcgccgaggcggacctggaccgttatgcggcgacgctgacgccgcagctgaaggccgatcagcgctggtttgatacggagaacgccggcggcgcgctgggcaaatcgctgcagcgttcgcagcagtttctgctgctgtcggcattgctgacgctgttgctggccgttgctgcggtggcggtggcgatgagccactattgccgcagccgtcacgatttgatggcggtgctgaaaacgctgggcgccggccgcaaggcgctgcgccggctgattgtcggccaatggctggcggtgctgctgctggcggcgctgtgcggcagcctgctggggctggcgtttgaggcattgctgatccggctgttagcgccggtgctgcccaaggcgctgccggccgctggcggctggccgtggctgtgggcgctgggtgcgctggtgatgatctccctgttggtgggactgcgcccttaccggcaactgctggcgacccagccgctgcgcgtgctgcggcgcgacgtggtggccaacgtctggccgctgcgttacttcctgccggcggcgctgttgatcgtggtggcgttgctgagcctgttgatggggggcagtacgctgctgtggtcagtattggccggcacggtggtgctggcgttgctgctcggcgcgatcggttggggctgcatcgcgctgctgcgtcgcatcaggctgcgcaacctggcgttgcggctggcggtcaaccggctgttgcaccagccgtgggttaccgtcagccaactggcggccttttccatgtcgtttatgctgttggcgctgttgctggtgctgcgcggcgatctgctggagcgctggcagcaacagctgccgccggaggcgccgaactactttctgatgaatatgacggcgcagcaggtgccgcaggtacgcagtttcctgcagcagcatcagatcgcgccggaaactttctatccgattgtgcgcgtacgcctgacggagattaatcagcaggcggcgaccgagctggtgcgtgaggacgatcccggcggcgaggcggtcaaccgtgagttgaatctgacctggctggcgcagcgaccgcagcacaatccgctgaccgcaggccagtggccgccgcagcgcggcgaagtatcgatggatgccggcattgcggagcggctgaaggtaaaactgggcgacacgctgaccttcagcggcgatacccagtcattccaggcgaaagtcaccagcctgcggcaggtggattgggagagcctgcggcctaatttctactttatcttcccgccgggggcgctggacggccagccgcagacctggctgaccagtttccgctacggcggtgacggcagcatgctgacccagctgaaccggcagttcccgacgctcagcctgttggacatcggcgccattttgcatcaggttggcggcgtgctgcagcaggtcagccgcgcgctggaggtgatggtgattctggtggtgttgtgcggcggcttattgctgttggctcaggtgcaggtgggcatgcgccaacgtcgtcaggaactggtggtgtaccgcacgctgggagcgagcaagcgcctgttgcggcgtacgctgtggtgcgagtttgcgctgttggggctggccgcggggtttgcggcagcgctgggagccgaagccgcgctgtggcagctgcagagccgggtgtttgacttcccgtggcagccgacgccggtgctgtggtgggcgctgccgctgctcagcgcgctgctgttgtcgctgtgcggcggttggctgggcgtgcggttgctgcgcgggcaggcgctgttccgccgctatgacggttag

SEQ ID NO: 443461 - DNA, 555 bp, Serratia marcescens
ttgattcttggcgacagtttaagcgccggctaccgcctgccggtggcgcaagcctggccgacgcggctggccgaacagtggcggaaacagcccgacagacccgaagtgatcaacgccagcatcagcggtgataccgccgctcagggactggcgcgcctgccggcactgctgaaacagcatcagccgcgctgggtactgattgagctcggcgccaacgacgggctgcgcggttttcctccgccggacctgcaacgcgaccttgagcaaataatcaccctgacgcagcaggccggcgcccgtccgctgctgatgcagattcggataccgccgaactacggccgccgctatactgaatcattcagcgcggtctacccgcggcttgccaaacagttcagtatccccctgctgccattctttatggagcaggtggctattaagccggagtggatgcaggatgacagcctgcacccgaatctggatgcccagccgtttatcgccaactggatggcggaacgcctgacccccttagtgacacagaagcctgcgccccattga

SEQ ID NO: 443462 - DNA, 777 bp, Serratia marcescens
atgcaaaaagcggtattaatcaccggctgctccagcgggatcggcctgatcgcggcgcaggatttacgcagccgcggttatcgcgtgctggccgcctgccgcaaggcgcaggacgtcgaccatatgcagcagttcggctttgagagcatccagctggatctggacgacagcgccagcgtcgagcgcgcggcggcgcaggtgatcgagatgaccggcggccgcctgtacggcctgttcaataacggcggctacggcgtttacggcccgctcagcggcatctcccgccaacagctggaacagcagttttccaccaacctgttcggcacccaccagctgacgcagctgctgctgccggctatgctgccgcacggcgaggggcgcattatccagaccagttcagtgatggggctggtcgccagcgccggacgcggcgcctacgccgccagtaaattcgcgctggaagcctggtccgacgccctgcgtatggagctacacggcagcggtattcaggtcagcctgatcgagcccggcccgctgaccacccagtttacccagaacgtcaatcagacccgcagcgataagcccgtacataaccccggtatcgccaaacgcctgacgctgccgccggaggcggtgctgcccaaactgcgccatgcgctggaaagccctaaagccaaactgcgctatccggtcactttgctggcgcacgcgctgagcgtgctgcgccgtattctgcccggccgggcgctggactggctgctgcgcggcaacggttaa

SEQ ID NO: 443463 - DNA, 855 bp, Serratia marcescens
atgctaacgccgacagttattgagattaacgaaaccaacctgcatcagacgctggaacagtcaatgtccgttccggtgctgttttacttctggtccgaacgcagccaacactgcctgcagttaacgccggtgctggacaaactggcggcggaatacgccggtcagttcgtactggcgaaagtcgactgcgatgtccaacaggcgatcgccgcgcaattcggcctgcgctccatccctaccgtctatctgttcaaagacggccagccggtggacggcttccagggaccgcagccggaagaagccattcgcgaactgctgcagcgcgttctgccgaaagaagaagacctgaagctggcgcaggccggcgaactgctgcaggaaggcaaggcgatcgatgcgctgccgctgctgaaagaagcctggcagaccagcaatcaacgcagcgatatcggcctgctgctggcggaaacccaactgacgctgaaccgcgttgaagacgccgaagcggtgctggccaccattccgctgcaggatcgcgatacccgctatcaggggttggtggcacagattgaactgctgaaacaggccgccgatacgccggagatccaacagctgcagcagcaggtcgagcaggatcccgccaacgccgagctggcgacccagttggccttgcagttgcatcaggtcggccgtaatgaagaggcgctggaactgctgatggggcatttgaaacaggatttggccgccgccaacggcaacgcgcgcaaaaccctgatggatatcctcgccgcgctgggcaccggcgacgcactggccggcaaatatcgccgccagctgtattccctgctgtactga

SEQ ID NO: 443464 - DNA, 1152 bp, Serratia marcescens
atggattcggtcggtattaatacgctgtctcgtagaaaagatcgctggtacgccatggttgaagagatgctggcgcaggccggtattacgattaacggcagccaggcgtttgatattcaggtgaataatccgcagatgtttaagcgggtgctgcaggagggatcgctgggcttcggtgaaagctatatggacggctggtgggagtgtgagcgtctggatatgttattcagccgcctgctgagcgccggcgttgacgagcggttgccgaagaatatcgcggatattgcgcgtattgcctacgcccggctgtttaaccgccagtcgcgtaaacgtgcctggcaggtgggcaaagagcattacgatatcggcaatgatttgttcagccgtatgctcgatccctatatgcaatactcctgcggctattggaaagaagccacaacgctggcgcaggcgcagcaggataagttgcgcatgatctgcgaaaagctgcagctgaagccggggatgacgttgctggatatcggctgcggctggggcggtctggcgcagtatgcggcggaacattacggcgtgaaggtgtttggcgtgacgatttccgccgagcagcaaaaaatggcgcagcagcgctgcgccgggctggacgtcgagattctgctgcaggattaccgcgatctgcaccagcagttcgaccgtattgtttccgtcggcatgttcgaacatgtcggaccgaagaattacgacacgtacttcagcgttgcagcacgcaatctgcgcccggacggtttatttttattgcacaccatcggctccaaccagaccgacctgaacgtggacgcctggattgataaatacattttccccaacggttgtctgccgtcggtcaaacatattgccgatgccagcgaagggcgttttgtaatggaagactggcacaatatcggcgcggactacgatcgtacgctgatggcctggctggagaattttaaacgggcatggcccgagctggctgctgactattcggaacgttttgaacggatgttcacctattacctgaacgcctgcgccggtgctttccgttcgcgcaatattcagctgtggcaggtgttgttcagcccgaaaggggtagagggcggcgtgcgggtttatcgctga

SEQ ID NO: 443465 - DNA, 462 bp, Serratia marcescens
atgctggcggcgattgtggaaaacccgcagtggttctggctgtcgctcggcggcctgctgctgattgccgagatgctcggcaccagcggttatctgctgtggagcggcgtggcggcggcaatcgtcggcacgctggtctggctgtttccgggcatcggctgggaatggcaaggggtgctgtttgccattttggtcgtcgtggtcgcctacctgtggtggtattggctgcgcgcccgtgcctccgccagcgacggagctcaggcgcttaaccaacgcaaccggcagttgatcggcacccgcgctacgctgaccgaaccgctgcataacggcctgggtcgcattaatatcggcgacggcagctggcgcgcccgcgcggcgcaagatttaccggcgggcaccgaagtggaagtggtcgccgtggagggcacgacgctggtgatccgcgccgtcaaccgcggataa

SEQ ID NO: 443466 - DNA, 405 bp, Serratia marcescens
atgaatatcagcgatgtggcgaaaaaaaccggcttaaccagcaaggccatccgcttctatgaggaaaaaggcctggttaccgcgccgatccgcaccgacaacggctatcgcagctacaaccctaaacatattgaagagctgaccttgctgcgccaggcgcggcaggtgggctttaatctggacgagtgccgtgagctggtggcgctgttcaacaatccggcgcggcatagcgccgacgttaaagcgcgcaccctgcacaaggtgacggagatagaaaaacatatccaggcgctgcaggagatgcgccagcgtctgttgacgctggctgagcagtgtccgggcgatgacggcgctgactgcccgatcattaataacctggccggctgctgccatacgccgggttaa

SEQ ID NO: 443467 - DNA, 204 bp, Serratia marcescens
atgtcgaacactaccgtacttacgctgcagggcctcacttgctcacactgcgtcgggcatacgcgtaaagctctggaagccgttcccggcgttaccgccgccgacgtcacccttgagcaggccaaagtcaccggcgacgccgcgccgcaggcgctgatcggcgccgtagagcaggccggctaccacgctcagctggccgggtaa

SEQ ID NO: 443468 - DNA, 807 bp, Serratia marcescens
atgggtcaactgttacgccgttttgccgtttttcttggcttaatatcgccagcggcctacgcctatccgggcatagatattacgctgccgggcgatcggcaactgcatctggtcggcagtatccatatgggaacggccaatatggcgccgctgcccgcccggttactcagccgtctgaagcaggccgacgctctgattgtcgaggccgatatcaccggttcggcatcgccgtttggcgaggcggaagagcagccgccgctggctgaacgcctgaatgataaggagcaacagcgtttacagacgctgtgccaggagttgggcgccgatagtgcactgttcgatacgctgcccggctggcagattgcgctgaccatgcaggcgcgtcaggcgcagcggttggggctgcgtgcggaatacggcatcgaccatcagttgctggaagccgccaaaagccagcagaaacaggtgatagagctggaaggcgccgacacgcagctcaaaatgctgcaacagctgcccgaaggcgggatggcgctgctgcgcgatacgctgacgcactggcacaccaacgcccgcctgctgcaaaccatgatcggctggtggctggacagccagcccagcatcgctctggatacgctgcccaccaccttcagcaccgggctgtatgatgtgctgatgcatcagcgtaatctgcagtggcaacaccagttggaggcgctgccgcccggtaactatgtggtggccgtcggcgcgctgcacctgtacggcgaagacaacctgccggagatgctgcaaaaagcgccataa

SEQ ID NO: 443469 - DNA, 963 bp, Serratia marcescens
atgacgcaagaaaaacatggggtattgctggtcaaccttggtacgccagaagctccgacgtccgcggcggtaaaacgctacctgaaagaattcctgagcgacccgcgtgtcgtcgatacctcgccgctgatttggaagccgatcctcaacggcgtgattctgccgatccgttcgccgcgcgttgccaaactgtaccagtcgatctggatggatgaaggttcgccgctgctggtgtacagccgccggcagcagcaggcgctagccgccagcatgccgtcggtgccggtggaactgggcatgagctacggtacgccgagtctgaacgacgccatcgataagctgctggcgcaaggggtgacgcatctggtggtgctgcctttgtatccgcaatactcctgctcaaccagcgccgcggtctgggacggcgttgcgcgcgtgctgcgcggctatcgccgtctgccgtccatcagttttatcagcgattatgccgaacacccggcctatatctctgcgttgcagcagagcgttgagcgcgcgttcgccgagcatgggcagccggatcggctggtgctctcgttccacggtattcccaagcgttatgcgcagaccggggatgactacccgttgcgctgtgaggatacccgccgcgcgctggccgctacgctgccgctgccggcggagcgtattatgttgacctatcagtctcgcttcggccgcgagccttggctgacgccgtataccgatgaaacgctgaaatcgctgccggcgcagggcgtgaagcacattcagctgatctgcccgggcttctcggcggactgcctggaaacgctggaagagattaaagagcagaaccgtgaaatcttcctgcaggccggcggggaaaaatttgagtacatctccgcacttaatgacgaaccggctcatatcgagatgatgcgccaactggcgacgcagcagttctga

SEQ ID NO: 443470 - DNA, 1149 bp, Serratia marcescens
atgaaaacgctgaataaagtggtgatagcgccggattcatttaaggagagcctgagcgcgctggaggtggcgacggcgattgaacgcggattccgccagatttacccggatgcccgctatgtgaaactgccgatggccgatggcggcgaaggcaccgtcgacgccatggtggccgccacggacgggcaaattgtcaacgtgaccgtctccgggccgctgggccagccggttgaggcgttctacgggctgctgggtgacggtaaaacggcggtgatcgagatggcggcggcgtcgggcctgcatctggcgagcggcgatcgtcgcgatccgcgcattaccaccagtttcggcaccggagagttgatactggcggcgctcgatcgcggcgtcagcgccattattctgggcatcggcggcagcgccaccaacgacggcggcgcgggcatgatgcaggcgctgggggttaaactgctggaccggcaggggcagccgctgccggccggcggcgcggcgctggcggatctggcgcagatcgaacttggcgcgctggattcgcgcctgcggcgggtaacgatcaccgtggcctgcgacgtggataatccgctgtgcggcaaacagggcgcgtcggcggtgtttggcccgcaaaaaggcgcgacgccgcagatggtggatcaactggatcgggcgctgcgccactatggcgagctgttggagcgggtgaccggctgtggggtgattaacgcgcccggcgccggcgcggcgggcggtatgggcgctgcgctgctggggatgctcaatgccgaactgcggccgggcgttgagatcgtggtggaaacgctgcggctggaggcggcgctgcaggatgctgacctggtgatcaccggcgaagggcggctcgacagccagtcgatccacggtaagacgccgatcggcgtcgcgcgcgtcgccaagcgtcatcagcggccggtgatcgccattgccggcagtctgacgcgtgattaccaggtggtgcaccagcacggcatcgatgcggcgttctcggtgctggaccgggtggtgacgctggaggaggcgctgacggacgcggcgcgcaacctcgaagtcacggcgcgcaacgtcgctgcggtatggcgactggctgaacggtaa

SEQ ID NO: 443471 - DNA, 1134 bp, Serratia marcescens
atgctaagaccgaccaatttcttggaagaatccaccgcccgccaaatcgtccagcgcgcgatgggcattatcgcctactcggtgaatgtgatggacaacaacggcgtcattattgcttccggcgacgcctcgcgcctgttccagcgccatgaaggagcggtgctggcgctgacggagaaccgcgtggtggagattgacgtcgccaccgccgcccacttaaaaggcgtgcagccggggattaacctgccgttctgtttccgcaatcagcgggtgggggtgatcggtatttccggcgatccgctgcaggtgcgcaactatgcggagctggtcaaaatggcggcggagctgatggtcgagcaggcggcgctgcttgaccagcatcagtgggagaagcgttaccgcgaagagctggccaaccagctgctgcaggggacgggagaccgggcggcgctggaggcaatggccgcttatctggggttggatttgctgcagccgcgcatcgtgtggattattgagctgcacgatcggcagccgcatctgctgcgtgaactgcttaatgagctggagagcggccagcgtgaagcgctgatcgccatgaccggtctcaacgagctggtgctgctgcgccccgccagctggctgcagggaagctggagccaaaagctggagcgtaagcaggcacaggcgctgcaggctcggctgcagcagcgtttcaacgtgcggctgatcgttggcggttacttcgccggcgaagagggcgtttttcgttccgggctgacggcccgcgccacccaggcgatggcgcggcggctgaagctgcgtcataaatcgctgttctatgacgactacccgctgccgtcgctgctgtgcgacatgtgcgaagactggcgggcgctggagctgagcaagccctggcgcattctgagcgaacaggatgacaaaggggtgttgcgccacaccctgcggcaatatttttcgcggaactgtgatcagacgcagaccgcgttgcagctgcatatccacgtcaacacgctgcgctatcgcctgcagcgtatcgaagccattaccggtttaaaaatcaacgcattgacgacagcgctgcagctctatatcggcatgctgctcaatgagtaa

SEQ ID NO: 443472 - DNA, 1950 bp, Serratia marcescens
atgagctatcaggttctcgcccgtaagtggcgccctcaaacgtttgcagatgttgtcggacaagaacatgtcctgacggcgctggctaacggcctctcgctggggcggattcatcacgcctatctgttctcaggcacgcgcggcgtgggtaaaaccaccatcgcccgcctgctggccaaaggcctgaactgtgaaaccggcatcaccgccacgccgtgcggtcaatgcgataactgccgcgagattgagcaggggcgttttgtcgacctgattgaaatcgacgccgcctcgcgcaccaaagtggaagacacccgcgatctgctggataacgtgcagtacgcgccggcgcgcggccgcttcaaggtctacctgatcgatgaagtgcatatgctgtcgcgtcatagcttcaacgcgttgctgaaaacgctggaagagccaccggagcacgtcaaattcctgctggcgaccaccgatccgcagaaattgccggtgaccattttgtcacgctgcctgcaattccatctgaaagccctggacgttgaacagatccgcaaccagctggagacggtgctgcaggccgagagcatcaccagcgacgcgcgagcgctgcaattgctggcgcgcgccgccgacggcagcatgcgtgacgccctgagcctgaccgatcaggcgatcgccatggggcaggggcaggttaccgccgccaccgtcagccagatgctcggcacgctggacgacgagcagccgctggcgatccttgaagcgttggtgaccgccgacggtgaaaaggtgatggcgcaggtagcgcaggccgcttcgcgcggcgtcgactgggaaaacctgctggtggagacgctggcgctgctgcaccggattgccatggtgcaactgctgccgtcggtgctggataaccattacgcggcgattgagcagcggctgcgcgagctggcccgcacgttgccgccgactgacgtacagctgtattaccaaacgctgctgattggccgtaaagaactggcctacgcgccggatcgccgtatgggcgtcgaaatgacgctgctgcgcgcgctggcgtttcatcccaaggcattgattccggagccggtcgccagtgcgccggtggccgttcaggcaccgcaagcgccacaagcaccgcaggtgcagcacatgcaagatgcgccgccgccgttgggcagcagcgcaccgccgcaacgcgcggcggcaacatcattaccggatgccaccgcgcagttattgaaagcgcgcacccagttgcagcggcaacagggggcatccaccgcaaaaaagagtgagccggcggcgccaggaagagcgcggccggcaaactcagcgctggagcgattagcttccgtgactgagcgcagccagcagcgtcaggcggaaaagatcgtgcagcagaaaccggccaagccggaagcttaccgctggcgtgcgcaaaccgagccggaagccgcgcctgagccggtcgccacgccgaaggcgctgcgcaccgcgctggaacatgaaaaaacgcccgaactgtcggctaaactggtggcagagtcgattgaacgcgacgcctgggcggcggaaatcgataagcttaacattcccaaactggtgcagcagctggcgttaaacgcctttaaagagcagcaggcacccggaaaaatttgtcttcacctgcggccggcgcagcgccatctgaattcgccttcggcgcagaaggcgctcagcgaggcgctcagcgagctgcacggcggcccggttgagctgacggtggtggaagacgaaaacccggcggagcgtactccgctggaatggcggcaagccatttatgaagaaaaactggcgcaggcgcgtcagtctatcgttgcggataccaacattcagacgctgcgtcggttcttcgatgcggatttggatgaagagagtattcgccccctttaa

SEQ ID NO: 443473 - DNA, 384 bp, Serratia marcescens
atgatggcgcgttggctgttgattgtggtcggttggctggcggtggtactggcgacgctcggcgtggtgttgccgctgctgccgacgacgccatttttactgctggcggcctggtgttttgcgcgctcctcaccgcggtttcaccactggctgctgtatcgctcatggtgcggcggctatctgcgccactggcagcagcataaggcgctgccgcccggcgccaaatggaaggcgatgctgctgagcacgctgaccttcgccgtgtcgatctggctggtgaatatcggctggctgcgacttctgctgttgctgatgttgatcgcgctgctgatttttatgtggcgtctgccggttgttgatctgccacaagaaaaacggcgctga

SEQ ID NO: 443474 - DNA, 537 bp, Serratia marcescens
gtgagcacacaccgactgatacaggttctggaacagcagatcgcccaactggccggcgaggtttcgccgcacggcgacgcgccgatcccgcaggcccgcttcgacagtgcgctgttcagccaccaaggcacgcggctgcgcgactatctggcgcagattcagcacaactttgcgcaactgcaaaccgcggtcagtgaaagccgtacgccgcaggtggcgtttctggcggaaaagctggtggcacagatcgccgcgctgcaacgcgaactggcgacgcaggcgctgcggcgtaaaaaccagcccaaagcggcaaaagaggaagatctgtatcacaagctggcggaacatcaggattatgaacgtcggctgatcgccatgattcaggaccgggaaagtttactcggcgctcagaccacgctggcggcgcagcgcaagctgcagcaggaagtggcggcgctggagggacgcctgatgcgctgtcgtcaagcgctgacgcgcatcgagcgcggcattgagcgtaaagaaaacggtttttga

SEQ ID NO: 443475 - DNA, 354 bp, Serratia marcescens
atgtcatctatcgtgttggtcgccagcggcgcagcctatggccaggaatccctgtttaacgcgttacgcctggcgatcgcgctgaaagaacagcagagcgcgctggagctgaagatttttctgatgtccgatgcggtggtggccggcattgccgggcagcagccgcatgagggctatcatttgcagcagatgctggaaattctgacggcgcagcaggtgccgatcaaactgtgcaagacctgcgccgatgcgcgcggcgtcagccgcttgacgctgaccgacggcgtggagattggcacgctggtggaactggcgcagtggacgctggcggcagagaaggtgctgacgttttaa

SEQ ID NO: 443476 - DNA, 663 bp, Serratia marcescens
atggcacgaaaaaccaaacagcaggcgcaagaaacccgacaacagattctcgacgctgcggtgcgagaattttccgagcgcggcgtttccgccacgtcgctcacagatattgcaacggcagccggggtgacgcgcggtgcgatttactggcatttcaagaataaggtagacctgtttaacgaagtttgggaattatcagagtcgaaaataggcgaccttgaaatagagtatcaggcaaagtttcctgataatccactgaggattttacgtgaaatcctcatttatgtcctgacggcgacggtggacgacgtacgccgccgcgctctgatggagattctctttcataaatgtgagtttgtcggcgaaatgatgcagctgcatgacattcacaaagttttatacctcgaaagttacgatcatattgaaagcgtgctgcgcagcagcatgcgctgcggtcagctgccggccgatctgcatacccggcgcgcggcggttattttacgcgcttacgtcaccggtttgatggaaaactggctgtttatgccggaaaccttcgatctgaagggggaggcggcggcgctggtcgatgcgtttatcgaaatggtgcagtattgtccgacgctgcgcgttaaaccgtccgattgtgcggcgctgacttcctga

SEQ ID NO: 443477 - DNA, 1185 bp, Serratia marcescens
atgaacaaaaacagagggttaacgcctctggcggcagttctgatgctttccggcagcttagcgcttacaggatgtgataataaagaagcccaacagcaaggcgctcaacaggcacccgaagtgggcgtggttaccttgaaggcacagcctctcaatatgacaaccgacctgcctggccgcaccgctgcatatcgcatcgccgaagttcgccctcaggtcggcggcatcatcctgaaacgtaactttgtcgaaggcagcgatatcaaggccggcgaatctttgtatcaaatcgatcctgccacctaccaggccaactacaacagtgccaaaggtgatctggccaaagcacaggccgcggcggaaatcgcacgtttaaccgtcaaccgttacaaaccattgctgggtaccaactacatcagtaagcaagattacgataccgctacctccaccctgcagcaaaacaacgccgcagtgctggccgccaaggccgcggtggaaaccgcccgcatcaatctggcttacaccaaggtgacctcgccaatttccggccgcatcggcaagtcctctgtgaccgaaggcgcgctggtaacgaccgggcagagcaccgcgctggccaccgtacagcagctggatccgatgtatgtcgacgtcacgcagtcaagcaacgatttcctgcgtctgaaacaggagctggctaacggcaccctgaaacaggaaaacggcaaggcaaaagtcaagctgctgctggaaaacggtcaagaatacgcacaggaaggttccctggagttctccgacgtcaccgtcgatgaaaccaccggttccatcaccatccgcgcggtattccctaacccgaacgaccagctgctgcccggcatgttcgtgcgcgcccgtctggatgaaggcgtacgcagcaacgcgctgttggtgccacagcagggcgtgacgcgcaacccgcgcggtcaggctaccgctttggtggtcggtgccgacaacaaggttgaaatgcgtaccctgcaggctgaccaggccatcggcgacaaatggctggttaccgacggtctgaaatccggcgaccgcgtgatcgtcaccggtctgatgacgaccaagccaggcatgcaggtaaaagcacaagaagttgacactcaggcgcaaaaacagccgcaggctgacgcgcagaagtcataa

SEQ ID NO: 443478 - DNA, 255 bp, Serratia marcescens
atgaaacccgacattcatccgcaataccgcccggtggtcttccacgatctgagcgccaatagctacttcaaaatagggtcgaccatcaaaaccgatcgcaccgtggagttcgaaggcgaaacgctgccctacgtcaccattgacgtctcctctgcttcacatccgtattacaccggcaagcagaaagagttttcgaaagaaggcagcaccgcacgtttccaacagcgtttcggccgctttatcggcagcaaataa

SEQ ID NO: 443479 - DNA, 876 bp, Serratia marcescens
atgaaacctttatcaatcgttttggtggcatcgttattggccagtccggcggcaatggcgaaaaccgtggaggccgtcgccagtttttccgttctggcggatatcgttaaacaggtgggcggcgagcacgttaacgtggtgtcactggtcgggccgaatggcgatccgcacgcgttccagccgtcgccacgggacagcaaggccctgaagcaggccgacgtggtgtttgttagcgggctggggctggagggatggctggaccggctggttagcgcttcgggctaccaggggccggtggttatcgcctcggaggggatcgatacgcgtcacatggaggaagaggggaagcaggttaccgacccgcacgcctggaacagcatgaagaacggcgtccggtacgccaccaatgtgatgaatgcgctggtggttgccgacccgcaggacgctgactattttcgtcagcgtggcaaagcctacgtacagcaactgcaacagttggacagctgggccaagagtgagtttgcgacagttgcgcctcagcggcgtaaggtactgaccagccatgatgccttcggctattttggccaggaatatggtgtgaccttccttgcaccggtaggtttttcaaccgaatcggaggccagtgccagcaaggttgccggcttaatcgaacaaattaaacatgagggcgtacacagctatttcattgagaatcagaccgatccccgcctggtgaagcaaattgcggcagcaaccggcgccaaggccggtggtgaactgtatccggaggcgttatccgatgaccgagggccagcttcttcctatgtgaaagcgtttaaacacaatgtcaatgcgatggttgccggtatgaaataa

SEQ ID NO: 443480 - DNA, 867 bp, Serratia marcescens
atgatgctgcttcacctgctggcggatccctttacttcgtttggttttatgcgccgtgcgttggtcgcctgcctggcgctgtcactgagcagcgcgccgttgggggtattactgctgctgcggcgtatgagcctggtgggtgatgcgttgtcgcatgcggtgttaccgggggcggccatcggctatctgatctccggtatgtcgctggtggcgatgggcgccggcgggtttgtcgccgggctggcggtggcgatgctgtccggcgtggtcagccgacgtacgccattaaaggaagacgccagctttgccgggttttatctaggttcgctggcgttgggcgtcaccctggtttcgctgcgtggctccagcgtggatctgttacacgtgctgttcggctcgattttggcaatcgacgctcaggcaatggtcatggtgggggcgatcgccacgctgtcgctgctgatgttggcggcgctgtaccgcgcgctggtgattgaggcctttgacgtaacctttctgcgcgtcagcacgccgcgccggcaggcgctgatccacggcgtatttctggcgttggtggtacttaatctggtggcgggctttcagatcctcggcacattgatgtcggtgggggtgatgatgctgcctgccgccagtgcgcgtttttgggcacgtgacttgccacaaacgctgctggtttctatgggactggcgatgtttgcctgtctggtcgggctgaccggctcctattatgcgtcgctgccggccgggccgtcgattgtgttgagcgccagtcttgtctttttcatttcagtattgtttggcgcgcacggcgggatatttcccgtagtgcggcgtcgtttggcgtaa

SEQ ID NO: 443481 - DNA, 705 bp, Serratia marcescens
atgatcgcgttgcatcaggcgaccgtcggctatggcgaccttccgctgtttcctccgttaagcggacattttgccgccggctcactgacggcggtaatcggcgtgaacggcgctggtaaatctacgctgctgaaaaccattgccggacttctgccgctgcagggcggctcactgaagttcagcccccatccaccgccggcgatcgcctatttgccgcagcagcttgaacttgatcgccagtttcccattacggtaggcgacctggtggcgatggggtgctggcggcgaagcggcatctttggcgcggtcaagcgggcgcagcggcaatgtattacggaggcgctggaaacggtaggtatgacgtcgctggtgcacaggccgcttaatgcgttatcaggcgggcagttgcagcgggcgctgttcgcccgcctgctggtacagcaaacgccgttgattctgctcgatgagccttttaccggcattgatactgcgacgaccgggctgctgctgcgggtgatcgaacaattacaccggcagggaaaaacgctgatcgccgtactgcatgatatggcaatggtggccgaccattttccacaggcgttgctgctgagcgcgcagcactgccgctggggaactgcagacgaagtgctgacgcaaggccgtgtgggcaatacggtgacatatcggcaggcggtcgcgccatga

SEQ ID NO: 443482 - DNA, 147 bp, Serratia marcescens
atgtcccaacattctcctgaacgtaatctgaaaccggcggtgaacgtcagcgttttcaccgtctcggccgctcgtcgttgcctggcggttgtattgttgctggctgttttgtggctggccatcgcctgggcggtggcgctgccatga

SEQ ID NO: 443483 - DNA, 933 bp, Serratia marcescens
atgtttgaaccctggcgccggcttcccgcgctttccctgaaacagattcagtattttgtcacactggccaggctgcggcattttaccgataccgcgcaccgcttggcgatcagtcagccggcgctgagcagtgcgttacgacagatagaatcggtgctgggcggacggctggtcaatcgcaccgcgtcagcggtgacattaaccgagctgggagccgcgattttgccgcatgccgaacgattgctgaatgtggcgcaggcgtcgtttggtgatatgcagaaaattatgctggacgggggcgacggtacgctgcgtatcggcctggtgccgtcggtgggcagccttttgtttcccgcggtgccgcaattattgatgcagtattttccccgtttgcgcgtggaatatcacgatcagaccaatgattctttattgacgcagttggacaacgggcagattgacttcggcattggcgcgcttgaccgttcggtaccggcgacgctggaaattcacccgtttctggaagacccgtttatcgtggtggcgcaccgcgacgatcccctggcggaatctcatcatgtgccctggcgacagttaatcggccgggatattgcgctcttttccaaagggaacgtcagccggttggtgacggcgctggcggaaacccatcggcttaattttaccccccgttatcaggtcgattttctggaaaccttatatgggctggtgcgttcgcaattagcggtggccattttgccgcagttgtatactacgcatttgcatgatgatgaattagcgctggtccatttacaacagccgttgctgagccgcagcgtcgcactgatgcgcgccaggcagggaatacgctcaccgttaattgaagagtgcttccaattaatcctgcagaactttcaatgtcaaaaccgagacggttaa

SEQ ID NO: 443484 - DNA, 1788 bp, Serratia marcescens
atggcctcctcctccgtcagcctccacgaacgtcaacgcgccattgccgccgcgctggggaaaacgccgttcgatctgttgctgaccaacgcccgcatcgtcgatatggctaccggcgaaattcgcccggccgatgtcggcatcgtcggcgtgctgattgccagcgtacacccctgcggcgccttctccgccgcacacgatacgcatgatttaaacggcgcctatctcagcccggggctgatcgatacccatgtgcacgttgaaagctcccatttaccgccggcgcgctacgcggaaatcgttgtcgcacaaggcaccaccaccatcttctgggacccgcatgagctggccaacgtactcggcgtcgccggcgtacgttacgccattgacgccagccgcgatctgccgctgcgggtcatttgcgcagcgccgtccagcgtgccgtcaacgcccgggttggagatgtccggggcggattttgccggccaggaaatggaaaccatgctgggctggccggaggtggccggcgtcgccgaagtgatggatatgcacggcgtgctcaacggcagcgaacggatgatggagatcttaagcgccggcctcaacagcggcaaactgattgaaggccatgcccgcggcctgagcggtgctgagctgcaggcgtacctcgctgccggcgtcacctccgaccatgagctgacctcggctgatgacgcactggaaaaactgcgtgccggcctgaccctggaaattcgcggctctcacccttatctgctgccggatatcgtcgcggcgctgaaaagcctgccgcacctgtcatcccagatcaccgtctgcaccgatgacgttccgccggatacgctgctggaaaaaggcggcattatcgccctgctgaatatgctgatcgagcacagcctgccggcgactgacgccctgaggatggcaacgcttaacgccgccatccgcctgcaacgcaacgatctggggctgatcgccgccgggcgacgcgccgatctggtggtgtttgacacactggaacagctttgcgcccgccgggtatacgtttccgggcgctgcagcgcccagcacggcaaaatgctgacgccggtggccgacaatccgcagctcagcgtaccgcgcgataccctgcgcctggcgccgccggcggcacaggcgtttgtcctgaaggtgccaaacatcaggcacgggcaggccacgctgcgccatatcaaaggcgcgcgctttacccagtggggtgaaaccacggtggaggtgcgtgacggccaggtacagctgccggccggcttcagcctgatctgggtgcagcaccgtcacggtcgccatcaggcgataccgcagctggcgctgctggaaggctggggagagctgcgcggcgccatcgccaccagctactctcacgactcgcataacctggtggtgctggggcgagatccgcaggatatggcgattgcggccaacgcgctgatcgccagcggcggcggcatggcactcagccagaacggcgaaatactggcgcaggtcgccatgcctatcgccggtatgctgtcggatctgccgccggccgaactcgcgcagcagttcaaaaacctgcgcgaccttagcgccaaaatcgccgactgggaaccgccctaccgggtcttcaaggccatcgagggcacctgtctggcctgtaacgccgggccgcacctgaccgatcttggtctgaccgacggcaccacgcgccagattgtcgatccgctggtcgcctgctgggaaacgccggcctga

SEQ ID NO: 443485 - DNA, 1344 bp, Serratia marcescens
atggccgataattcagtgaatgctgcagcaccggggagctggttacaacgacgttttcaactgcacgcccggcgcagtacggttaaaagcgagtgcctggcgggcgtcaccggttttctggcggccgcctacctgctggtggtgatccccggcctgctggcggttggcggcatggataaaggcgcggcaaccaccggtacgattttggtctttgtcgccggtacgctgctgatggcgttttacggcaacctgccgtttatcgtcgggccgggcatcggcggttcggtcctggtcggcgtgacgctggccggcagtgaggacatcagctggcagatcgggctggggatcgcctgctggtcaggtatcctgttttttgcgctgaccctgttcgggctgcgggaagtggtgacccgttccgtaccgcagtcgataaagctaggcctgaccgcgtcgattggcctgttcgtcgccgtgctgggctttcgtaatgccgggctggtgctggccaacgccaaatccaacgccctgatgctgggggatttcaccgcgccgggcgcgctggtggcgctggccgggctgtttttagccatcgccctgcaggcaagaaaaattcccggcgctatcctgtgggcgatactgttcgccacgctgatcggcatcccgttcggcgtcacccaattgcccgcccgttttatcgccgcgccgcacgcgctgacgccggtttgggcgcaggtggatatgctgggggcgctgaatatcgccttcctgccgttcctgttcgtctttttcgcctccgagttcttctctaccatgggcaccacgctggcggtcggcggcgaagctggtctgctggacgaacacggcaatatgccgcagatcaaccgcccctttatggtggactccatcgccgccgcgctgggtccctgggtcggtattccggcggcaacggcgctgatcgaatcttccgccgccgctgaagccggcggtaagaccgggctgacctcgctcgccgccgccgtcatgttcctgctgatgctgctctttaccccggtagcgttgatgatccccaaagaggcgaccgccccggcgctgattttgatcgggttgaatatgttcagcgggctgcgcaaggtcgatttagccaactttaccgacggcctgccggtgctgatgatggtgatgatcacgctgatcgccaacagcttcggcaccggaatcgccggcgggctgctgttttatatcattatcaaggcgatcgccgggaaatggcgcgaggtgccggcaggcctgtatctgctggcaatcccgctggtctactacttcgctacgctggtcaggcattaa

SEQ ID NO: 443486 - DNA, 423 bp, Serratia marcescens
atgaagaaatctttcttgtgtttgttggccgtgacgatgtctggctgtcaactgggcgatccgcggccgccgatggagcgggccgcagttagcgtcgtagcgaatcaggtatgcatcagggtgcaaccggaaggtgatgaaacgatcggtgctatttatattgaggaaataggtaacgtcagccacaaaatggataagcggttcggggaaaacgacagcgggcggctggccgtgtcggcggatgattgcgtgcccacgcagggctatcagtttacgccgggccgggcatacaacgttgccgtcgaactctattcggccagtaaggcgaaaaattacatcgctcctcaccggcgcgattttgccgtgcaactttccgtatggcgggataaccgtggtgtgctgcaggcggcgccgcagtattaa

SEQ ID NO: 443487 - DNA, 1422 bp, Serratia marcescens
atgacacagcataaacctgaagggcggacgacgtctgccccgcagaaactgacgcgcggcctcggtgagcgtcatatccagatgatcgcgcttggcggcgcgattggcaccggcctgtttatgggggcgggcagaaatatcgccatctccggcacgtcgatcctgcttatctatgtactggtcggtttttttacctatatggtgatgcgggcgatgggggaggtgctgctgtcaaagctggactaccgctcgtttgccgattttgtcggtgattacctcggcccgcaggccagcttctttttaggctggacctactggctgagctgggtggtgacctgcattgccgacgtggtagtgtgcggcagctatatgcagtactggtttccggaaatgtcggcctggatcccggcgttattcactcttggcctgctgtgcctgtttaacctgctgtcggtgaaaatgtttggcgaggcggagttctggttcgccttgatcaaggttatcaccattatcgcgctgatcctgaccggcggctggatgattgcctccggctggacatcgccggacggcgtgcaggcctcgctgacgcatatcaccgatccgcaggtgtttatgccgcatggcatcaccggttttctggcaggctttcagattgcgatcttctcctgcaccggtattgaactgctggggacgatgaccgcggaaaccaaagatccgcagaagatcctgccgcgcgccattaattcgctgccgctgcggattattattttttatctgctgtcgatgattgtgattatcggcgtgacctcatggccggggatctcgccggatagcagcccttttgtgacgctgtttgacaaggccggtttgcccgcggcggcggcgatgattaattttgtcgcgttgacgtcggcaatgtcgtcggcgaacagcggcgtctattccagtacgcgtatgctgtacggcctgtcggtggaaaagcacgcccacgggcagtttcgcatcctgtcgcgcaccacgcgcatcccggtgcgcagcctgctgttctcctgtttttgtatgttaagcggcacgctgttgctgttcctggtgcccaatgtgatgacgctgtttaccatcgtctcgacgctggccgcgattatggtggtgtacagctggatgatgatcctgatcgcctatctggcataccgcaaaaagtcccccgaactgcatgagcggtcgatgtttaaaatgccggcgggcgtgttgatgagctgggtgacgctgctgttcttcgcctttaccatcttcatcatgctgtttgatccggatacccggaaggcgcttatcgccacgccggcgtggtttattatgctgtggctgttctggcgtatgaaacagaagaaagaagcgcgctatgttgccttagagcgcagtctataa

SEQ ID NO: 443488 - DNA, 1365 bp, Serratia marcescens
atgaccgcaaaaacgcagtggatgtcgggcgctgaagccaactttgacggcctggtcgggcctacgcatcactatgccgggctctccgtcggtaatgaagcctcgcagaacaaccgcgacgggctgtccaacccccgtcaggcggcgctgcaggggctgcataaaatgaaagcgctggcagaccggggatatattcagggcattctgccgccgcagccgcggcccaatgttgccgcgttgcgcgcgctgggctttcaggggacggatgcgcagattgtgcagcgcgccgccgctgacgcgccgcagctgctgtcggcctacagttcggcctcatcgatgtggaccgccaatgccgccacggtttccccgtcggccgacagtgcggacggcaaactgcacttcaccgtcgccaacctgaataacaaactgcaccgtgcgcaggaagcgccggtcacctcggcgattctgcgcgccaccttcgccgatgagcgttacttctgccatcacgcggctctgccgcagcagagcgacttcggggatgaaggcgcggccaaccataaccggctgtgtcagaactataaccagcaggggctgcagctgttcgtttacggccggcgcgcctttggcggcgggccggcaccggtcaggtatccggcccgtcaaacgctggaggcctgtcaggcggtggcgcgactgcatcaactgaagccggaatacacgctttatgcgcagcagaacccggcggccatcgacagcggggtattccataacgatgtgattgcggtcagtaaccgtaacgtgttgttccatcaccagcatgcgtttctgaaccagcaagaggtgctggcggcgctgcgcgaaaaagccgacgcgctggaactgccgtttatcaacgtcgaggtgccgcaggagcgggtcagcctggaggatgcggtggcctcatacctgttcaacagccagttgctcagcaagccggacgggaaaatgctgatcgtggtgccggaagagtgtcgccagcgcgccaacgtctgggaatacctcagcgatctgacgcgcgacggacgctcgcccattgatgaagttgcggtattcgatctgcgtgagagcatgcgcaacggcggcgggccggcgtgcctgcgcctgcgggtggcgttgaacgatgccgaactgtccgccgtcaacgccgccagtctgatgaatgatgaacgctatcaccgcctgacgcagtgggtcgaaaaacattatcgcgaccggctgcacgcccgcgacctggccgatccccacctgttgtatgaggtgcggcaggcgcttgacgagctcacgcaaattttacgccttggctcaatctatgatttccagcgctag

SEQ ID NO: 443489 - DNA, 1005 bp, Serratia marcescens
gtgattatttttcgacccgttcgggaagacgatctgaatggcatcatgcggctggcatcacgcgcgggcgtcgggctgacgtcgttgcccaatgacagggcgcggctggaagcacgcattcgccgcagtatcgataccttcgccggcaagttaccgcgcgctcagcaagggtttctgttcgtgctggaagacaccgagagcgcgtgcgtggcgggcgtcagcgcgattgaagttgcggtagggctggatgagccgttctataacttccgcctgcagcgtacggtgcgggcctcgaaagagctgggcgtgtataaggaccttgaactcctcaatctgagctatgaccataccggccacagcgaactctgcaccctgttcctcgatccggaatatcaaaaaaatcgtaatgggctgctgctgtccaaggcgcgcttcctgtttatttcagccttcaggagctggttttcctcccatatttttgccgaactgcgcgggctgcttgatgacaacggccattcgcctttctgggatgcgctgggccaccatttttttgctattccttttgccgaagcagaccgcctcagcggcagcggtatgaaaactttcattgccgaactgatgccgtcctacccgatttacgtctctctgctgccggacagcgccaggcaagccatcgggcaggtgcacacgcaaacggcgccggccagggcgatcctggaaaaagagggattcagttggcaggggtcggtcgatatttttgatgccggcccggtgctggaggctgaaaccgataagctcaaggcgattcgccgcgtgcaacgtacgttggcgcatcagctgacgctcgatccgacatcgccggtgattgtcgctaataaccagtttgcccatttccgcgcgctgttgatcgcggcggaagaagcgcagacgcttggccagccgttgctggatgcgctgcaaagcggcgaacgggacccgctccacgtgctcacacttaacccttag

SEQ ID NO: 443490 - DNA, 1275 bp, Serratia marcescens
atggaaaagttatcttacgcttccgaaagctccacctctccttgggtaacctatctgcgccaaatcgaccgcgtcgcgccccatctgggtgacctggcccattggatcgaaacgctgcgccaccctaagcgcgcgctgatcgtcgatattccgctgcaaatggatgacggcaccatccgccatttcgagggctatcgcgtacagcacaacctgtcgcgcggcccgggcaaaggcggcgtgcgttatcaccccgatgtggatctcaatgaagtgatggcgctttcagcctggatgaccatcaagtgcgcagccttgaacctgccgtacggcggcgccaaaggtggtatccgcgtcgatcctttctccctgtctgaaggggaactggagcggctgacccgccgttataccagcgagatcggcctgattatcggcccgcagaaagatattcccgcaccggatgtcggcaccaacggcaaagtgatggcctggatgatggatacctactccatgaaccacggcaccacaatcaccggcgtggtgacgggtaaaccgatccacctgggcggctccctcggccgcgaaaaagccaccggccgcggcgtatttattaccggctgcgaagtcgccaaacgttccggcattgagattgaaggcgccaaaatcgcgctgcagggcttcggcaacgtgggcagtgaagcggctcgcctgtttgagaaagcgggcgcacgcattgtggccgtacaggaccactcggcaacgctgtacaacgaagccggcatcgatttaaccgagctgaccgtctggcaagccgaaagcaaacagattgccggcttccctggcgcgcaggaaattgccaaagaggagttctggacgctgcagatggatattctgatcccggcggcgctggaaggacaaatcacccgcgaacgcgcggagaacctcagctgcaaactggttctggaaggcgccaacggcccaacctacccggaagcggatgacgtactggccgagcgcgggatcctggtggtgcctgacgtaatctgtaacgccggcggggtaacggtcagttacttcgagtgggtgcaggatatggccagcttcttctggagcgaagaggaaatcaaccagcgcatggacaaaatcatgaccgacgccatcgcccacgtgtgcgataaagccgaagaaaagaactgttcactgcgtaccagcgcctatatcgtcgcctgcgaacgtatcctgctggcccgtaaggaccgcggtatttatccgggctga

SEQ ID NO: 443491 - DNA, 597 bp, Serratia marcescens
atgaaagtttatactttcccaaaaagccgctcgttacgcgtgctgtgggcgcttgaagagttacatctggattatgagacggtacgcgtcgatctgctgtctgccacgccggaaatccgttcaccccatccgcagaataaggtgccggtgctggacgataagggattcctcatttttgaaagcgcggctatctgtaagtatgtgtgtgccaagacggcagggcagtgtttatatcctgccgaactccgcgctaatgcccgcgttgagcaatggatgagctttgcactgaccgaactggagccgccgctctggtctttgttgaagcatgtggcattacttcccgatgcgctcaaggttgctgcggtggcagaagtggcccggcgggaggcggagagtgccattaagtgtcttgaacatcagtctattgcatcgtggattacgggggacacattcacgattgctgatatctttgtcgcccaaaatctgatgtgggcaaaagcgtgcgggattcctctgccgaccgtgtttgaggagtatctgctgcgttgtcagacgcgggaggcctatcaacaagccgtgatcaggaataatggctga

SEQ ID NO: 443492 - DNA, 606 bp, Serratia marcescens
atggacattaacctgcctggttttatccccgcactgttgcccgtcgcgctttctcccggcgcgagtttcacgctggcgatgaacggcgcgctggcggacggccgccagggattgctcagaacgctgctcggtacggcgctgggcatctacacccatgcactcctgattggccttggcgttaccgccgtattggcggcgtcgccggcggcgttcggcgtgctgaaaatagccggcaacctgtacctgctctggctggggattcaactgatccgcagcggcgtttccgcacggcggctggcgctgaatagcggtcgggggagcgtcacgttgaagagcgcgtggttgctcaatgtgctgaacccaaaagccattatgttctatctgacggtggtgtcgcagtttgccgggcggcacggggagtttggcaactatttgctgctggcttcggtgcatattgcggtgatgagcgtctggctgattgcggtcagctatgcgctggtgttctccgccagaaaagccgatcccctgacgctgaaaaagtacatcaatatcggtggaggcatgctgctggtgtttttctccctgggcagcctgcttcatcattag

SEQ ID NO: 443493 - DNA, 516 bp, Serratia marcescens
atgagtagcgatacttattcaaaagacaacttgatatcgttcttagagaaattgccatctctcggggttgtatcagacaatacagtaaaaaacctgaaaacagttccgcgacttctagagtttgcacatcaagattttgatgatgtacgtaacattgatatagacaaagtgctcctaacttatgcagagcacagcggtgaagtctctgaacagtcactacgcagctataagagtcgcattcagcaggctatcaagattttcgttgaatatataaacgatcctaaaggctttagtgggaaagcaccgatggcaactgaaaagaaacaaacttcacgacggaaaccacaggtaaccagtgtaaacgagtcaaatacatttaacttaccggttccattgcgtagcggattgacagtaacgatcaataatttgccacgagatttgaccaagaatgaggccaaatttatcagcagtatcattgagacttacgggatgtttgaagatatagcgaaagattaa

SEQ ID NO: 443494 - DNA, 138 bp, Serratia marcescens
atgaaagcgcatgatattactcgtgatgattacatttacgagcatgataaaccagtgtatgtgcgtagctactgccgtatacgttacggtgagcttgaacacgtaactgatcactatcgctcttatccaattcgttaa

SEQ ID NO: 443495 - DNA, 852 bp, Serratia marcescens
atggataacaatcatcaaaaattcgattcgcagtcgattgcaaaccgggtcagagaactctttcttcatcacgggatcggtaaacgtcagcaagcaaaggagctcagccgtattctggcgctaagtttttcccatgcccaccgcaagctgaaagggcagagcccctggacgctggaacagatcaacagcgtcgcggcggcgctggacgaaacgccggcggccattgtggatatcaacgtggagaatgagcctcctgcgcaaactattgcacgagatgccatcttttcgccggccgggatgacgattccttgcgtggcatacatcggcagcgaagtcagcggcgggcgtttttctgaatatgtcgcgcagcaggaagacgaaaagtgggtgatttaccgggccgatgaggcgccggccggcagccgctattgcgtggagctgatcgagattcgtccgacgaatgtcgacgatgagcggttaagcatcgcggtgctggatgattcgcatcaggcggcggatgaactggccaaatacctgaacagccgcggttttaacgccgttgctttttacgatgttcagacgttcaaacaggcgctgagccgcagcctgttcgacggttacgtggttgactggctgatcgggcaggaaacctccgagcaatgcatcgaagcgattcgcgcctctgataacccggatgcgccggtattggtattgaccggccaactgggcaccgggctgcgcgagtcagaaatcgccaaggcgatgcgcgattatgacgtgcttggcccgtatgaaaaaccggtgcggctgcatgtgattgaagccgcgctgcagcgctgttttaacctttaa

SEQ ID NO: 443496 - DNA, 1785 bp, Serratia marcescens
atgaagctgacccagttcaagaacggcagccggctggcgattccggccatcttcgccgccctgttcattgtggcttccaccatcaccctgtattactacagcgccacgctgtcgaaaaaggggttgtacgccatcgccggtacgcaggaaaactactcgtggtcgatcgcgaagttctccatcaagctggcggagttcgaaacctatgtggaacagctgaagaatgcgcccaaggtggatatcgacgcgttaaggctcaggttcgaaattctctattcgcgcttttacgtgctggagaccgtatcggaatccacccagccgctgtaccgcgaagccggctatcccgaggtgattaagcagatggtggcgcaaatgaatcagctcgaccatctgatcagcgcctctccgccgaacctgcaggaaattacccagtccatgcagcaaatgaagccgtttgcggtcgagatggccaacctggccgaccatgcggaagtgaagcagcgcaccgtcgcctacaacgactatattgagaagcgccatattattttctacggcctggtgatcatcatgttctcggtgattgcgctggtcgccattacgctgatagtcctgcgccagcagcgcattaccattcagcagcaggccaaggccatcgaggcggaaaaagccacgcactcgaaaaacgccttcctcggcgctatcggccatgaactgcgtacctcgctgcagagcattatgtccgccattgacgtattgatgaataccaatgtgtccaccgagcacgttgataccttccagcggctggaaaccgccgcacagcagattgaaacccagatgaaggatttgaccgactacgcgcatctggacagcggtatgatggaactgcgcattatgccgttcaatgctgagcaactgattcagcaaaccaccgatgaagtcggcatgctgatgagcaaagagcagatcacattgttgtgcgaggtcgacttcagccacgcgcaaatgtattccgatccgctgcgcatccgccagattctggtcaatctgctgaccaacgccttcaaatacaccgaaagcggcaccatcaccgtgcacggctgcctgcgtcgccaaaccggcggcaatgcgctgatgttggaagtgaccgataccggtatcgggatggaagaggaaaagctggggcagatattccagccgtttacccagttggatcagtcgaataccaaacagtacggcggcgtcggcatggggctggcgatcgtacgcggcctggtcgcgctgctgcagggcaccgttaccgtttacagcgaacagggaaaaggcagcacctttatcgtcagcattccggtggaagtcagcgaagatcagacggaagaagaggcgcagccgcaggcgctgtccgatatggcgatgaaagaacagcaggtgctggtagtggacgacaacagatcggtgggagaagccttcgccgccctgctggataaactgggctatcagcacgagctgtgcgattcatcagagcgcgcgctgcaaaagctgctgcgccggccttacgatgtgctgttgctggatttacaaatgccgggcatcgacggcgcggcgctggcgaaaaagctgcgcggccaacgcggccccaaccgccatattccgattatcggcatcagcgcccagacgccggagctgctgacgctggagcaacgtgcgctgtttgatgattacctgataaaacccgtgcggctggaagcgctgtccaccgcactgtccgccctgttccttaaaggttaa

SEQ ID NO: 443497 - DNA, 495 bp, Serratia marcescens
atgctgtcgaccctgatcagaacccttaccctggcgctcttcgccctgatcgccacccaaacctccgcgttaagttttactctggaagtttctggcaatatcagccatttcaccgatacggccaacaaacgctatgtgtttagcgaccaggatctgttcgccatgccggtcaactcgatttccacctccacctcgtggacgccgcggcgtaaattcgacggcgtagcggttgcggacatcctgaaaaaagtgggcgccaaggggcagacgctgtcgatgcatgcgctgaacgactattacatcgatattccgctgtccgacgtggagaaatacaacattatcctggcctataaaatggacggggaaatgttgaagatccgcaacttcggcccgctgtttctggtttatccacgcgatgaaagcggcccggagttaaattcgccgctgtataactcgcgctttatctggcaggtcaacaggatcgtgattaaatga

SEQ ID NO: 443498 - DNA, 417 bp, Serratia marcescens
atgacgagtaaacagaacatattggagcaatatcccgacgcattgcgctgggcgttcggcgacagcccgcagctggcggatgaactgctgcagctggtaatcgcgggagagaaaacggcaacctgcagttcttacgttgcctaccggcaggagaaagcgccgctggtcggcgactacagcgtgattctggacggcaggggcgaggcgcgctgcgtgatccgcacgcgtgcgctgctgcttatccgcttctgcgacgtcagcgccgagctggcggcgaaagagggagaaggggataaaagcctggcctactggcgccaggggcatcaggcgtttttcacccgtgaaggcacctttgcgccggatatgtggctggtgtttgaggagtttgaacgggtggcggttcttgaggtgaagtga

SEQ ID NO: 443499 - DNA, 1269 bp, Serratia marcescens
atggcaaagggattttttctatatcacctggatgaaaccacctgcggtgggcgtattatcagcggggcaaaggatgatacctatctaggcagacagcgtgtacgtgaactcgatccggtgacctgtggcaagcatgaagggttgtttcatgtctgcggtggcatgggtgacacctataacgtcaacggtgttagccgccagtgggctggatcgatagagagcttcagttcctgcccgtgtcaggcgcgttttattccgtcaatacgcacagatacctatgactacaactgcaatgccggacgggccgcagaacatgcacgcgaagttgaaaaaaaagtatcacttccttcctatcttaccggtgaaaaatctgcatcagggtttgtgcccgattatccggccctgcgtaatactcgtgattttcctgatgaagagttacgaaatattatgagagtgaataatcaggatgtgatgtttctcacgctttcagaaacgttcgaggtactggcgtcatggggggcgtggaagcatggttggattagtattacgcaaagcggccctgggcagattgtggtgaattatggcacgaatattaaagatgttgtgacgacttcaatgattattagtcagttgggcagttggggaataaaggctactccttatcttaatgagaaaggcactgaattaataaagttgagtggctaccctgggataaggcgaatacttaacgctccggtgtttgctgccaagaatcctaaaatagttgacgtgggtatcggtaaatatggcgtttcaaggtctattgtgaagggagcaagattgacgttttatgtagcagcagcatttaggacgatagattttatcatgaatgatgaagcatcccttgctaaatttattggttcactggcaacagactcggtaaaaataggtgttgcatccgttgtaagttggggggctgtaagtgcaattacagcctttaccgcatttgtttccgttcctttggttgcggtagttgctattggtcttgttacagctgtcgttcttaatgaattagatgataaatttggtgccacagataaagttgtttcttacatagagcatgcccaacaagaatttgttgagaaagcgcgcgaaattggaagcggtttttgggatctgggagctatgtatgccgcccggatgttagataaagggattaaggttatagagtctgaggtgaggcaatatttgagggaaaaaatagatgatataatcccaaggagtttataa

SEQ ID NO: 443500 - DNA, 441 bp, Serratia marcescens
atgacaaagtttagcctcagtagacgtattttctttattttttttgatttggggttggcgttgattacactcacttcattttatttcggtttgaaaaggatcggtgtttatctttcttacccggatgtttttgtgttttctattttttctgttttttccgttttgtttttcataataagcatcccagttattgctttgtctattagccctatatttacaggtgagcaggcgagtatttactttcagattaaaatggcgagtgtgataaagtttggggtgcttgccattgttcttttatcgattgcctttaatgttatttatactaacaaaattagagacgatggatatgtaaaatgtcatggtgttccatcgggttggatgccgggaatggcgacaaagtattcaatggctgaacacctctgtaatcaaaaaacttattaa

SEQ ID NO: 443501 - DNA, 1899 bp, Serratia marcescens
atgaaaaagacgctcctttccctgttgctttgcctgggcagcaccgcgatggccgccgagccggtcaatatcaccattctgggcacctccgatctgcacggcacctttgtgccctgggactacgccaccgacagcgaaaacctggccggcagcctgagccaaatcgccacccaggtgcgcaacgtgcgtgcgcagcagccgaacgtgattctggtggatgcaggcgacaccattcagggcaattttgtcgaaacgtttaagaacgacaaaaccagcccgatgatcctgggttttaacgcgctggactatgacgtctgggtgatgggcaaccatgagtttgatttcggcctgcagccgctgtccacctcgcttaaccagttcaaaggcacggcgctggcgggcaatatcctgtgggacagcggcaagccctatttaccggcctacaagatcgttgagcggcagggggtgaagatcggcattatcggcatggatacgccgatgaccgccgagtttgccaagggtaccgatcgccttaagggggtgaattttaccgatccggtacaggcggtaaaacaggtgatccaacagatccagggtgaggttgacgccatggtgctggtggcgcacatgggcatcgataatgaaaatcagcggccgggcaccggcgtgggtgatattgcgcgcgccaatccggaactggcggcgatcgtcgccgggcatatgcatgtgaaggtcgataaggcggtgatcaacggcgtgatcgtgaccgaaccggataaatacggccgcgcgctgtcgcggatcgatctgcagtttgaacggcataacggcaagtttgtgctgatcaataaagacagctacacctatcctattcagggcacggcgtcagacgaacagctggaagctatctatcagccgtaccacaagattctgcgcgccaacgccaaccggccgattgcccagctgacggggcaggatctggtgccgccggacgcgatcaagggcattccgcaggtgcacgtgcaggataccggcatcagcaagctgtatcaggaggccagccgttactatgcgccgcaggctgaggtgattgcgctgcagattgataacgaccggccgaaactgaacgtcggcaccatcgccgccaaagatatcgccttcaactatcaatatgccggcggtgaaatcaccgtctaccagatgaccggcaaagagctgaagaaatatatggaatggtccgccggctatttcaaccagctgcacgacggcgatgtcacctacagctttaacccgcagcggcgggcgtccaagtattccaccaatgatttctttgacggcgtgacctacaagatagatctgcgtcagccggcggggcagcgcattgtcgacctgaaaatggccgacggcacgccggtgaccgacagtacgccgattcgtctggggatgaacagctaccgcatggggcacctgacgcagcagggcggtgcgctggagggtatgcgcttcccggtgctgtcggacagcaagcaggagtacggcgaggaggcagggacgatccgtaatctcaccatccgctatctgaccgaagtgaaaaaagggcggtatcaggggcaagcggtgcagcgctggcagcttcttgggctgaatggctacgaaaagcagcgtaaaatcgtcgaaaagctgctgaatgacggcaggatcagcgtgccgaccacggcggacgggcgttacagcaatgtggcgtcgattaacgtgaaagggctgacgttcagcgacccgcaggcgcgtttacgcaaagaggccgagctgaaagcgcaactgaagacggccggcgatccggcgctgcaaaaacagctgcaggaccagctggtgattattgccgcgctgaatcaggcctga

SEQ ID NO: 443502 - DNA, 1161 bp, Serratia marcescens
atgaatttcaatttctcgaatgcccaggaacggcggtatgagtcagcctatcgctttgcactggacgtattggatcaggatgcgcaggcgcgtatcacgcaacgggggctaaacctcgagctatggcggcaagccgccgcccatggttttacactgggcccgctgtcagaccagtttggcggtgaggagatgggggcgttggatacggcgctgatgattgaggctctgggaaaaggcagccgcgatctgggcctgtcgttttcactctgtgcacatctttgcgcctgtgtgatcccgctgtcccgttttggttccgatacgctgaaagcgcaatatctggaaccgctggttacgggcaaactgatcgcagccaatgcagccaccgaacctgaggccggttcggatatatacgctatgcgctcaacggcgcagccctgcgacggcggctatcgtctcaatggcaaaaaggtgtttatcaccaatgcgccaatcgccgatctgtttgtcgtctacgccaaaaccaatcccgaccatggctttatgggggtttcagcctttctgatcgagaaaggcgcgccagggctgagcgtcagtgagaccatcccgaaagactgtctgtccaactgcccttggggcgaattgacgtttcacgatctcttcgtgccggaaacgcagcgcatcggcatgcccggcgccggcggggcgatttttcacgattcgatgatttgggaaaaaggctgcctgtcggcgctgttcatcggcgtgatggaaaggctgctggacacctccctgacctatgcgaaacagcgccagcagttcggcaaaccgatcggccagttccagtccgtttccaaccgcattattgagatgaagctgcggctggagcagtgccggctgatgctctatcggggctgctggcgtcacgatcagggacaggatgcggagctggatatcgccatgagcaaactgctgatttccgaatatgccgtgcagtcggcgctggacgccattcaaactttcggcggcgcggcgatggatcaagagctcgggctggtgcgcgagctgctgaacgttatccccagccggattttttccggtaccaacgatatccaaaaagaaatcatggcccgcaagctggggttacgaggaggaagagggtga

SEQ ID NO: 443503 - DNA, 2022 bp, Serratia marcescens
gtgattattcaacgactctttggcctgctgtatatgcttgccggcctggccaaggcttttcccgcactggagaatgttcctgctatcttgcatcaggcggcgatcgccaaccagggcgcctggtatgccggcgcgacgcagtggctggcggatcatggcgcagcggtcaatctgttggtcggcgtcttgttgttcggctctggtttggtgctggtgcttaacccgcgctggacggtgcgggtgatttacggtcagctgttgatgatggcggtctttgtcaccctgctgcaccgtgcacagccgcaggtgatctatctggacgcgctgttcgcgctggctgcgctgtatatgatgcgcgtacagcaccggcgcaagcctcagacacgcacgttccctacccgttcattctcatcgcccgccgccacggttccccagacaacgtcgccgctggaggatgactacgacgtggtgattatcggcggcggcgtgtccggcctgacagccgccagtgaactgagcggccgccgggttttggtgctggaaaaaagtgccacctttggcggtaatgcccgtttcaataccctggatacgctgaaatttcctatcgccggcgtctgttttcagcagccgcagccgaactcggccatgatgcgcgtgttggaaaaaatcgggctggaggacgcctaccgctctaatgagcacgacactctggtgttttttgacacttttctattgctcagatgtctgggggaagtcaccgtcggcttcctcaaatatccgtcctacctgctcaagcctgcggtttggggattgaccggtcagctcttcctgcatgcgttgataggcaagccttatgtcatcgccgccaaacagttgggcgatccgattttcgccgagctgtacacctttcttgaccgtttttctccggacggcgatcgctatccttatgttccctggtcgccggagagcggctggagccgggaggagatgacgcagctcgatacgatgtcgctgcatgactatctgttctctccgggcgctgcggacgcgttgccggcgcatctgcagccgccgaagaagctcggcaaattggtggaaaatgcggtcagcaccacgttgcgggttgaatgtttggacgtgcgtgaggtttccgcctacgtcgggctgcattttctggtgggctacctgcgcggcacgctggtgacgttaccgggcggcaacggcagtatcggcgccgggctgtgcgattacctcagcagacaaagcggcatgcggctgcaaaactgcgcccgcgttgaggctgtcacgccgcagggcgagacaacgcggcttcaggtgaatatcaacggtgagatccgccaggtgaatgcgcgccaggtgatctgggcggcgcccaaaacgcatctgacgcagtttttaccgaacctgccggctgcgcagcgtagcgcgctggacgccatccgccacgaagattattacctggcgaatgtgcaactggccgcgccgattctcagccattcgttcggcggctatctgatcgagccggataacccgcgcgccccctacgcctggtgtaaggccggcacgtgcctggtcgctaactggatggacagcgagagcggcgcggaaaagggcgtactgaccctgctgaagccgaccacccggcgggagcggcaagggcgcagcgcgcaacatgactttctggggctgcagcagcaaacctatatcgaaattgccggtgtgctgcgcaatatggggattgaggccgacgtgattgaagacatcaaaatctggtactggccggcaggtttggtgacctccgtgattgggcaacaggcgcagggcgtgttcagcgacgccagccagccggttgaaaatattcatttcgccaatcaggacagcatcggcatcggcaatatcgagagcgcggtgcaggccggcgtactggcggccggagcggcgaaagcgcgtttgggcgccgctcagcggctgacggatgtcgtaatggaggtggcgcgatga

SEQ ID NO: 443504 - DNA, 2676 bp, Serratia marcescens
atgagcaacgcgttagtggttgaactgtctggcgatcaggcgctggaacagcatcgcctaggtggtaaggcctactcgttaaatcatctgattcaggccggtctgccggtaccgcccgccttctgcgtcaccgcgcaggcttaccggcaatttatcgacgatgcggtgcccgcaacgctgctgaacgccggtgaatcaggcaacgtgcgcgatatgattttaaacgccagcatgtctgaaccactcagccaggcgatccgggatgcctgccggcggctcggcggcgatgtgtcactcgcggtccgttcctcggcgctggaagaagacggcctgagccaatccttcgccggccaatatgatacctatctgcacgttaacggcgccgacgaggtattgcgcaaagtgcgttcctgctgggcgtcgctgtgggctgagagggcggcgcaatacagccgggtgcacgccgcgcaaagcgacatcgccgttgtattacaggtgatggtcgacgccgacgcggctggcgtgatgtttacccaggacccgttaaccggcgacacggattgcgtggtgatcgacagctgttggggtctgggcgaaggcgtagtttccggtcaggtcaccaccgacagctttattctggataaggcgagcggcgcgctccgtgaacagcaggtccgtcataaatcccattattgtcagcgtaacgagcaggggcagattgtgctgctgcataccccggaagcgcaacgcgacgcgcccagcctgaacgcggagcaactgcagcgtttggtcaccctcggcagacaggcacggctgatttacggcaccgagctggatattgagtgggcggttaaagacggccaggtatggttgctgcaggcgcgcccggtcacggtgctggccaaaccggcacagggcgtctacgccaatccttgggaagacagtcaggcggtcagggatcgcgcctttttctcacggatggataccggcgaaattgtgaccggactgatgacgccgctggggctgtcgttttgtcagttctaccaaaagcacattcacggcccggcgatcaagactatggggctggccgatatcagcgactggcaaatctatatggggtatatccagggttacgtttacctgaatatttccggttcggcttatatgcttcggcagtgtccgccgacccgggatgaaatgaagttcaccacccgctacgccaccgatgatatcgactttagccagtaccgtaacccttatggtaccggcgttcagggctggggatatatcaagagcagctggtactggctgaagcagcaggtgcataacttgcgtaatgccgccagcattgtcgaacagatgatcgcgctgcgtcagcgcgaaacccggcgctttctgaatcttgatttagcggcaatgtcgctgcaggagctgaacgacgaactacagcgcatcgacgggtatttcctggaaagttgcgcggcctatatgcccttctttctacagtcattcgccctctacgatgcgctggcgctgacctgcgagcgctatctcaaaggcgaaggacagggactgcagaaccgcatcaaggcctcaatgaataatctgcgcaccattgaggtcacgctgggcattatcaggctggtggacaagattgagcgtcagccagcgctgaaaacgttattcgaacgtcacagcgccgctgaactggtgacgcttctgccggaacatacgctggcacgcgatttttggcagcaggattttagcgccttcctgctggagttcggcgcccgcggccgccaggagtttgaactcagcattccgcgctggcgagacgatcccagttacctgctgcaggtgataaaaatgtacctccagcatccggtcgatctgcagaagaagctgcgggaaacggagcagctccgccaacaggacagtgaaaaactgttgcggggtatgccttgggcggggcggcttaaactgaaaaccctgaccaaactgtacggcgtgatggcagaacgacgtgaggccaccaggccgacctttattacggaaacctggttctaccgctgcatcatcgtggaggttctgcggcgtcttgaggggcagggactggccagcgctgccgatttgccttacttggattttgagcgttttcgcgcctttatggcgggggaaatgtctgcgcaagaggcgttttcgccgtcgttgatcgacagtaatcgtcaccaacatctgctgaacctgcacgcggaagagccgccgatggcgatcatcggcgcctacacgccgaaaatgaaggcgcatgcgtcgggtgatgcagcgaccgacgtcctgagcgggctggcggccagcccgggaaaagtggtggccaaagcgcgggtgatcaccgatttgcaggcccaggtggcagaggtgcaacccaatgagatcctggtggcgcgctttaccgatgccagctggacgccgttgttcgctcaggcggccgggattgtcaccgatatcggctcaaccctgtctcacagctgtattgtcgcccgcgagtttggcattcccgccgtcgtcaatctgaaggttgcgactcaggtgatcaacagcggtgacactctgatcctcgacggtgacagcgggacggtcatcattcagcccggggagcctcccgatgctgctgcgtaa

SEQ ID NO: 443505 - DNA, 2601 bp, Serratia marcescens
atgacactcatgacaggacaagcaagacccgccagctgtgcttcctatgaacaggtgtggcaggcagaacagcacgctgacgcgtcaaaggcaccggacaccatcacggtcggcgtggtggtggtgacgcgcaacccgacgtttttccagaccggactcagcgtgctgaatgatattcgcgattatgtgttcaaccgcgtccatatccagtcggaattaccgctgcagttgcttgggttggcgaatgcgccgctttatcaggaagcgcgtgaaaaagccctgcattttctgaagcgtcagaataaaaccatcaatgtccgcattatccagtgcgccagcctcgccgaggcgacaggcaaaattatctatacccatgcgttggagcagtggcccgagtttcatctggggatgctgttttacgatcagagctcgccggccggcaccgacgacagtattgaacagatcgaccgcgatctggacgccttttacagcgcgttgcagcgcagcgggatcccggcgttttacactacgttttctaccgttgcctttatccgcgaactgcgttcgccgatccgctatctcccccagcaataccgggagatcgtccgcagcgacgatcccgccatcttccaaaccgaactgctgtgtttgtggatggacttctttgagatgaactacaccaaccgccgggttaaacccattggggcacaggcgctgcataatacgctgggcgaacagctgatccggtttttcgaacgcaccaccgcgagccgctggctggtgtcttactataccggctccatcatttccaacctggtcggctatctggatcggcatgcggaagcgcgcggcgcgctgattctgcgcggtcccaatgagcatgccatcgcctgcggcgccatggcgaactggcagctgtaccgtatgccgtttttaggggtggtgacgtccggcatgatggacgaattcaaaggcacgctggctaacctgaaggaaacggcggcccagggaatcatcatcgccgcagagaaccgcaacgcacagtggtacagcttccagggcacgcaaacgccgacggaggatatgcgtgaagtgctggccgcccgccgtatcccctatgtctatattgatgaggtcgagggcattgccgacggtctggcggaagcgttccgctattatcatcaggaacaggggccggtggtcattctggcgacgcaaaacgtgctggagtcgactttggcgctggagcatgagattgatgatccagcgccgatgccggcgctggatgcggacgatctgccgccgatgagcgacagcctgacgcaggcgctggcgttgattaaccacggcccggaaaagctggtgtggcagcttggcccggtcagcgacgacgaatacgccctgatccatgaaatcgccgatgctgccggcattgcgctggtggactcgttggcgcatcccggttcggcgccgaaatattatcagggccggcgcaacccccactatttaggcacgttggcgatttacggctacagcccacgggtctacaacttcttgcataccaacgacaagctgaacccgatgagtgaacagagcctgttcatgattaagagtcgggttgcccagattacaacgccgttctccgatggacggctggagcgcaaggtgcatttggtgcagctcacgcacgatgagcgtcatctctcaccttatgccgatctccacctgcatatggactgcctggcctttttacgcgccgttaaagccaaccttaatgtcgacccggcgctgcgggacaaacgtaaggcgctgatcgccgcctatctggactcgccgtctgatgtggtcagccaattgcccagtttgccgatgtcggccaactacttcttttgtcagttgaaccgggtgattgaacagctgatagaaacggaaaatttcgattttaccggcatttacgatgtggggcgctgcggtatttccgccgcgcgcaatgtcgcgaaaacgcggcggggattttccggctggtacggccgcgcgctgatgggcgatgcgctgctggccaccggctatctggcgtataccagcccggggcacgtggtggcgtttatcggcgacggcgccagagggatcgtgccggatattttgcccgcctttatcgacaacatccttacgcatccgcagttactcgataaaagcatctcggtcttctatttctgcaatggcggcctgtccgtcatcaatacctatcaggaacgcattctctttaaccgcacctcgcggcagatgcggctggtgaatgtggatcagcccgaatttacgcaaacggtcaataacttccagatccagagtaagacgctgacgcactttgacgaagaggcgatccgccaggcgcttacggcgcggcggcggctcaatctgttttccgtggtgctgggacacaacaacgaaggcgatggcatctcattagccaccgccaagggatggcagcgcgatccctgcgactgggaagaactgcaagagcgtaaagcctgggcggcgttgcagcctgaatcaaccagcactgcttttgaccaagatcagacacaggaaaccacatcatga

SEQ ID NO: 443506 - DNA, 2559 bp, Serratia marcescens
atgaagttcggattcatcgcacatcccacctcggtagggctgaaacgctacgttaaaatgctagacctgctgcagcgcaactcgaccgagctgcacagcggctacacacgcgagctgtggcagcgggagaacctggtgccgtttatgaacttcgccaaaattacctcggctaccggcgccacctgcgaaggggtgattaaatacatgccgttggtggcggacgaaatgctggccgatgcccgcacgatcgccgggcgggtgctgcagggcattgacgaattggtggccgatggcgccgaactggtgggcctgggcggctttacttctatcgtcggccgccgcggcgaagccaccgccgaaaaatcgccggttcccgtcacctccggtaactcgctgaccacctatgccggctataaagcggtgctgcagatccagtcttggctggatattcaggccgatagggagcctgtcgctatcgtcgggtatccgggctcgatctgcctggcgctcagccgccttctgctggcccaggggttttcactccacctgttacaccggcccgggcatgagcgcgacgagctgctcagccatctaccggagcagtatcactcgcaggtgacgctgaccggcgacgccagcgaactctatgcacgctgcaaactgtttattgccgccacatcggccgggggcgtgatcgaccccgccagactgcaagccggctctatttttattgatgtcgcgctgcccagagatattcaggcggatacccgtcccgagcgggacgatattctgattatcgatggcggctgcgtcacggcgagcgatgcggtcaaactgggcggagagtcgctgaacgtcaccatcaaacagcaaatgaacggctgcatggcggaaaccatcgtgctggcgttggaaaaccgccgggagaatttctcgctcgggcgctatctggcgccggaaaaagtgttggaaatcggcgagattgccgagcggcatggcttctttgcctatccgctggcctcgtatggcgagcgtatcgaccggcagagcgtcagccaccttaaacgctactatcaccatgagatttatgccggcgaacgcggcgaaatgtcccagacttcatcccgactggcgtttgtcgacgccattatcgcccaggagccggcgcgggaagatacgctcgaccgttaccaccagttcgtcaacccgatgatggtggactttttaaaactgcagcattgcgacaacgtgtttcgtcatgcggcgggcactcaactattcactggcgaaggggaagccttcctggatatggtggccggctacggctgcctcaaccttggccacaatccgcagccggtcgtcgacgcgctgaaaaattacctcgatacccagggccccaactttatccaatatatttcggtgcccgaacagaccgctaaactggccgaggtgctctgccgtctggcgcccggcaagatgggcagggtgttcttcagcaactcggggactgaagcggtcgaagccgcgatgaagatcgccaaggcggcgactggaaaaccgggcatcgtctatctgcaaaacagttaccacggcaaaacgctgggtgcgttgtcgattaccggacgcgacaagcaccgccgttatttcaaacccctgttggaatccatggttgaagcgccgttcggcgatctggatgcgctgcggcaggcgctgacgcgcgacgatatcggggcggtcatgatcgaaccgattcaaggggaaggcggggtgcatattcctcctgaaggttatctgcaggcggtgcagcaactctgccggcagcatgacgtgctgctgatggttgacgaggtgcagaccggtctcggacgtaccggcaaactgttcgcctgcgaatgggaagggatcgagccggatgtactgatgctgtcgaaatcgctgtccggcggtctgatcccgatcggcgccacgctgtgccgtgccgatatctggcagcaggcctacggtaccgcggatcgtttcctggtgcacagctccacctatggcggcggcaatgtggcgtcggtcgtggcgctcagcgcgttacgcgagatcctggctcaggatctcgcggggcacgccgagaggatgggggcctatttcaaacaggcgctgagcgagatcgccgcccgctatccctttgtggcggagatccgcggtcgcggcctgatgctggggatccagttcgatcaaacttttgccggcgccgtcagcgcgtccgcccgtgagttcgccacccgtttgcccggcgactggcacacgacctggaagttcctgcccgatccggtgcaggcccacctgcgcgccgccatggatcgcatggagcagtcgctcggcgaaatgttctgcatgaaattcgtcaccaaactgtgccaggaccacaaaatcctgacctttattaccgccaacagctcgacggtaattcgtattcagccgccgctcatcatcagtaaagcggagatcgatcgcttcgtcaccgccttcgccgcggtttgcgatgaattgtccacctttttgaaatag

SEQ ID NO: 443507 - DNA, 1029 bp, Serratia marcescens
atgtctttaaccaagcaagacgcagtcaatcagatgatgggtttttttcaggccaaggcgctgaccgccgcgctggcgctgaatctgtttgattacctgcgtgatgaagatcttgacgcggcgcagctggcggagcggcttgaatgccccagccgctcgaccgaacagctgctgattgcactgcaggcgatgggttacctcgaaaagcggggcggccgctatcacttaccccctgagcaccgtgaatttctggtgagcgatgagccgcagtggctgggctggctggggcgccatatcgataccttcctgtatccgctgtggggcgatttgaaacacgcggtgcaaaccgatacccatcagcgtcgcgccgtgttcggcgacgatcgcagctggttcgacattttgtaccagaacccgaacgacgtggctgattttcaggaatttttgggcaaattcgccatgccctttatcgaaggctttgtccgcgactatgactttgcacagcatcgcgcctttctcgatatcggcagcgggatcggcagtttgccgatggccgtcgctgacgcgtatccgcaggttcggctggcgatctgcgaactgccgcaggcgtcggcatttttgcgcgatcgtctggcgctgcaaggctacggcgaaaggatcgacgtggtggagggcgatgtgatcgccggcgatctgccgcttgaggattacgatctgatccatctgggatggatgctgcacgattatgcgccggaaacccaactggccattttgcgccatatctatcaggcgatgccggtcggcggccgctttatcgcttctgaaacgccgttgaatgcggacaagtcagggccggagtttaccgccttgctgtcgctgaacatgttggtttccaccgacggcggtattgaaagcagcccgcaagagtatctggaaagatttcaccgcgccggattcagcaatgcccgcattgtgacgatatccggtcctcgcacactgatcgtcggcgaaaaacgtgctggcgagtaa

SEQ ID NO: 443508 - DNA, 264 bp, Serratia marcescens
atgctagaaagcaaactgataaatcatattgccgatcaattcctggatggcgaacgggatggtctgaacgcgcaaacgccgttgtttgagctaaacgtcgtcgactcagccgcgattttcgacctggtggattttttacgccaggagtctgatgtgacgatcggcatgcaagagatccatccggctaattttgcctccgtacaggcgatggtggcattggtgcagcggctgcagacgccgtcgacattgggaggtgaagcatga

SEQ ID NO: 443509 - DNA, 1971 bp, Serratia marcescens
atgagcatgcaaggtgttgagaccgccgctgaacggcaggcgtttatccgccagtccgtcgtacagacttttgcccggctgaccgagtatgaacccgcggcgctggcgatgaacagccatctggagcatgacttgggcgttgattccattgcgctggcggagattgccgcgacgctgaatcgccagtttcagctgaacaccccgctgcaggtgcaggaaatcaaaaccattcaggacgcgctggacggtattttacagcgcgagcctacgctgcccgaagcgcagaaggcagcgccagatacagcgacgccgcagcagtggctgggcgctttattgcgccgcgtatttgccgcccatagcggctatgacgccgaagcgctgacgccggacgccgccattgaaggcgatctgggcatcgattcggtcgcggtggtgaccgcgcaaagcgagatcttaaaggcgctgcgcctcagcgatgacgtcgccctgcaacgttgcgcgacgctggcggagctgcaggcatgcctgacagcgcgcctgacgcaggaaaaaggcgaggactggttccgccagctggcgacgaaggaggccggcgcgtcgtctgatgagatgtctgatgatgcggagacgctgaccaccgcagcggcagccggtgcagaatcccggcttgcggagattggcgatgcgcgcaccatgcgcgactttgtcggcattgagcacccggatttgttccacaaggcgcgtgagttcagagatttttatcgcgacaaaaaagaccgccagctttattggtacggtatgcctctggaaactccgtgtaaaaaccgggcggttatgtttgacgatatcaccggtaaaagccgcgaattcctgatgtttggctccaacagctatctgggactgtcgaatcatccggaagtgatccaggccattcaggatgcggcggggttatacggcgcgaccaataccggctgccgcatcatcgccggcagcaacgtgctccacctggagttggagcgtaagctggccaaacttaaagggcgcgaggactgcatcgtgtatccttccggctattcggccaacctgggctgtatctccgccctgaccagccgccatgacctggtattcaccgacgccatcaaccatatgagtatccaggatggctgtaagctggcgggcgcgcagcgcaaaatttacgaccattcgctgaccagcctggaaaagtcgctggccaaatacgctgaccatcccggcggtaaactgattgtgaccgacggcgtctttagcatgcacggtgacatcgtcgacctgccacgcctgatgaatctggcggagcgttatggcgcacgggtgctggtggatgatgcgcactcgaccggcgtattgggcaagaccggttcggggacggcggagcactttaatatgaagggccgggtggatctggagctgggcaccatgagcaaagccctgtcagggctgggcggctttgtctgcgccgacggggaagtggttgagtttcttcgtttttattccaactcctatgtattcgccgccacgatccccgcgccggtcgccgccggcgtgattgcctccatcgacgtcatgctgcgggaaccggagcgcctgacgatgctctgggacaatatctattacttccgaacgctgttgctgaacgccggttttgaccttgagcattcggcatcggccatcgtgccgatcgtggtgggggatgacgcgaaaacgctgcttttcgggcgtgcggtgcgtgcgcgcggcctgttttgccagactgtggtgttccccggcgtcagcgtgggggatgcgcgcctgcggatcagcatcaccagcgaacatacccgggaagatttggacgaggcctacgccattctggtggcggcggctcaggaggtcggcgttcccgtcaacgcctcgtctgttcgggatgcgcgcccgcacgtcgcggaggcctag

SEQ ID NO: 443510 - DNA, 1473 bp, Serratia marcescens
atggcgatcttatcttcgtttattctggacggcctgttcaggcatgcgcgccagacgccggacaaaacggcgctgctgtgcggcgaacggcggtggagcttccgccagctggctgaacatgccggcgcgatggccgccgcgttgcggcaggccggcgttgccgatcagtcggtactaatcaatttgccgaaaagcccggaggcggtggccgccatctatgccacctggctgagcggcaatcattatatccctatcgattacagccagccggccgcgcggctggaacgtattatcgctgcggccgagccggcgctgattattgatgaggattggctgcacagtttcgccgaacgtgcggacggcgtcccggaatggccggcggagccggtcattctcaccgatcctatcgctgcaattctctatacctccggctcgacgggcaccccgaaaggggtgcaaatcagccacggcatgctggccttttttattcgctgggcgataggcgacacgcagctgacggcgcaggataccctggcgaaccacgcaagttttgcgttcgatctgagcacgttcgatctgtttgccggcgtcagcgttggcgccgtgatatggattatccgtgaagacgagcagaaggactgccgcgctattgcgcaggggctgcaaacccacggcgtcagcgtgtggtacagcgtgccctccatcctggcgatgctggaaaaaagcgggcagttaaccgctcccggctgtgcggcgttgcgccaggtcattttcgccggcgaaccgtaccccgttgccgcgttgcggcgcctgttgccgcatctgcccacgcagtgccgcatcagcaactggtatggcccgacggaaaccaacgtgtgcactgcttatccggtagcgcgggcaagcctggagcgactggagcacgtgccgatcggctatccgctgacgggcgtggatgcgcaactgattgatgagcagggccgacgccacccgctggagcaggcgttgggagtacgcggcgaattgctgatcggcgggccatgcgttacgcccggctatagcaacgtggcggtttcccgacagagcgaatggcatccccgacaattccacgcaacgggcgactgggtggaaatgacggcggatggtctggttttccgcggccgtctcgatgatatggtcaagattaatggctaccgggttgagctgggggaaattgaatcggcgatccatcaccatccggcggtgaatcaggctgcgctgtacgctgaattgggcgatctcaaacagaagctggtggcggtcatcagcctccgctctggtgtgacgccgccgaccttgctggaactcaaacagtttttacagtccaggctccctgcctacatgatccctaaccggttgattatcgccgacaccctgccggtgaatgccaatggcaaggtggatcggcagcgactggccgaggtaaatgtttaa

SEQ ID NO: 443511 - DNA, 2310 bp, Serratia marcescens
atgagtcaggaacaagagacacagtcgctggcggtggtcggcattggttgcgtgctgcccggtattgaacgtttcagccggctgaacagcccggcggactggcaggcgttgcttgatgcgccgccggtgctgatgacgcatgatgaggaggcggtggcgattcgtggccggcgggtggacgatgcggagtttgatttcaagaagttttctattccgccgttgttcaaaacggcggtcagccgggaaacccgtctggcgctgttggcggccgaagatgccatgcgcgatttggcgctgcctgcggcgctgcgcgatcgctgcgatcaattctgtgccacgcacttgggcagcgatgcggcctatcgcaatgcgaccaaagtgagcgcgctgcgggcgctggccgagcggctcagtgagcagggatacgcgccagcggaggtacagaggcggattgatgaatataaacagccgctggctcaggcgttagggagcacctcacacgaccgggtgggggaaatggcgtcgagcattccggcgcgcatcgcgcattttgcacaaacgcgcggcaagtgccagacccttgacggcgccgatttgggcggttttcgtttactgcaattggctcaggactgcttccgccatcaggacagccagctggcggtgctgaccagcgtgcagtgttttcaccattggccgcaggcggccatgctgctggcgcagagcgtctgcgcaacgcattgctggctggagggagcgatcagtctggtggtgtgtccgccgtcgctagcccggcagcatggttggccgatcctggcccggcttggcgcattgaccagtgacaaactcgaacgtcagcagcaggccaccggtcggcgtccggcttatttctccggtgccaatcaggttttttgtcaactcctcgagatgctgctgcaccagcgccgggagtgcggcggcgactcttttaccggccgtcgttggaacattgacactgcgccgacgcggtgtgatcagccgacggcgcagcgcatcgcgattgttgactatcagccggttaccgcccagggaggcgacaaagcgcgcttttggcagacgctgtctcagggagacgatgcattacgcgatcacggcatggatcagctgcatccgggggcgtttgtccggccagccccgcagaagctcagcgcatacacccgtcgggcgatggggtttcctacgcacgattccgcacagatccccctgaataaagcgatgatgccggccaaaaagaagcggctggatgtgacgcagctttatgcgcttaatgcttgcggtgaatgggctgaaaagctgcgtccgtttaaacgggtggcgatcgtcgtcgccagtaacctgtccctgagcgctgaccggttgcaggcgatgacggcgctgtggtctgccttgcctcagacggcagggccggttccgcagccgcctcagccagagatcaaccgttggagctggtacggcgccagcggcattggcaccgcgcaactgctggccgagcatcttggtatcgatgcggactgctatgcggtggaggccgcctgcgccagctcgctcgccgcgctgcataacgcggtcagggccttgcaggcggggcgttatgatgcggcgatcgtcggcggtatcgagacggcgacgctggagcgcgatattgtgctatgcagcgcgcagatgatgctttccgccacgcgtattcgcccctttgccgagaatgcggacggcttcacaccaggcgacggtggcggattttttatgctgagtcgtcatccgagcgaacagacgctggcctccattgaggcaatttccggctcttgcgatagctattccatgaccgcaccggatcctgcgggacaggcgttggcgattgaaaaaacgctgggcctgcaggcgatcgacccgcggcgcgtgcagtatatcgaagcgcacggtacggggacggtgcttggcgatcgggccgaggtgtcatcgctgcagcacagctatgcccgggcagggcacactccgctgtatctcggctcggtgaaatataacttcggccactgtttcgccggggcggctgcgcttagcctgtgcaaagtgttaagcgccttcgagcaggggaaaattccgcccacgccggtgtctgcgttaaatcttgagctgccgctggcaaccattcccgcagaaattccccaatgcacgctaccttggccactgccggaggaaggaggacgcagggcggcgatcaatgccttcggcaccggcggtattaactaccatttgctgctcaatcaattggtgtaa

SEQ ID NO: 443512 - DNA, 315 bp, Serratia marcescens
atgcataccatcatccataaaattcgtttgaaagatattgcccatcgcgccgcatttcgcgagtgggtggaaaccgtcgactatccggcctgcagccgtctggatgcggtacgcgcctttgaagtggttgaggtcagccaggaggcggatgcgccgtttcactttattgaaattattcatttaagcgcgatggatgcctttgagcgtgagatgcagactccgctgtttcagagcctggtcgctcgcttcgatcaaatggcggaagtggtggcagagattgcaggagaacggattgccgatggctaccagcaataa

SEQ ID NO: 443513 - DNA, 639 bp, Serratia marcescens
atggctaccagcaataatcaccgtgcgcaaacgcggattgtcgtaacggttggcaacgccgggcgccgcgccgccgagtcggcactgcagcaccggcagcgggtgaggaaccgcgcgcgtgaacaggccgtggctttactgaaccgggtgtggtgcggcgataagacgtcggtttatgccggtggtttcacgctgcgttcgcgacccggcggtcagccggtgggcgagcatccgcagcagggacagcgggccgtatcgctcagccattcgcagtcgtggtatgccggcaccaccggcgacggcgctatcggcatcgacctgcagcactaccgttcctttggtgcctctgcgcgtcgtcaggcttttactgccggcgaacgccggttggggctggttcagtcctgcgccgcctgggcgattcgcgaggcttttttaaaaagccacggccgcggtttaccccatcggctgaacgacattcgtatcgactggcgcaatcagcgggtgttgagcgtcgacggtggcctggcgcgccgacatttttggctgtggtacagcctagagtgggtctgtgcgctgtgctactcaggaatgccggctttgacgccgtgggtagaggtggaggtgcgtgatgatgcatga

SEQ ID NO: 443514 - DNA, 1068 bp, Serratia marcescens
atgatgcatgaatcgtttgttctggcgctgcagcacgcgctggatattgcgcgcctggcgccgtcgtcacataactgccagccctggtcggttcattacgatgttgtaacgcgctgcggaacgctggcaattgaccggcggcgtgcgttgtgcgggctgccgtcgctggaacgtgaaatgctgatgagctgcgggattttctttgaatacctcagtgcgttgctgggctatgccggtcggccgatcgagtggcgctgggtcggggatgggcacggcaccgcctcggacgtgttgatcgctttttcccctgcggcggaacggagggcggacgcggatgcgcatcgcctgctgacgcaggcgatagcgcagcggcatacggcccgttcgtgctatcagccaacgcgcatcaacgatgaacagtacatacggttgaaggagctatttgccggtacggcggccaccctcagcattgagcaagacgcgtcgctgcgtgctgatatcgcccagttgatcgcccgtcatgccgctctcgactttgccgaccggcgcgcctggcaagaaacttaccagtttattcggtttgatgagcggcgtcctgccgacgacggtttctgtctgcatcatctgttcgggccggtgtccggctcgttcaaatacgcctttcggctggcgtttcatccgcgcctgcatcgcttcaccaccggtttgcgtctgcccgagcggatggcgaaggggctggccgatctcgtggcgcagggaccgcaatatctggcgatcggtctgaaagaggaatgcaacgaagcgctgtttatgaccgggatgcgcctcggccggctgtggctggtgctgcaagactggggatggggactgcacccgctcagtgtcctggtgcagcatgctgcaccgcgccgtgagctggccgccgcattggcgcttgacgaacagccggtcttttttgcgcgtttcggccatctgcagcagccgggcagcgcgacgccaagacgcagttggcaaaacattttaaccgcgtcacgttcggcaccgccgacagggatcgacactttataa

SEQ ID NO: 443515 - DNA, 729 bp, Serratia marcescens
atgaacgtttggattgcattggcgattgtattactgattctctccgtactggcttttgtctccagccgcaacgctcaggacacccggccgatgtttttatggggattcaatgccatgggaccggttgctttggtgtattgctatttcggcgcgggcgatgtgtcccacaaggcattgattctgatcctggttggtttgtatctgctgcgcatgaacattgtgctgacgcgttggtacggcaataccgccgcgtccaaactcaaagaggtgatgccaacgcagcaggtgccctggctggcggtgatgatggttaatattttcggctggttgtattgcctgcccttttactggggcagccagttgcaggggccttgggggctgcagcagtggctggtcattggtttttatctggtcggcacctgttttcactttggcagcgactaccaaaaacggcgcttcaaacaggatcccaagaacaaagggcgtattctcgacgtcggcttctggtcgatagcgcgccatcccaattattttggtgactttttaattttcgtcagttttgggctgctggctggcaactggtttggcatcatcgcgccgctgactaacctggtgcaatactttgccgatgcaattcccaagagcgagaaaatggctgagaaacgctatggagaagcctggctggactataagcgtaaagtgaagtgctttattccatttattttttag

SEQ ID NO: 443516 - DNA, 933 bp, Serratia marcescens
atggatcgattcgatgcaatgcaggcctttgtccgcgtggtggacagcggcagctttaccaaagccgctgaaaccctccatatcagcagaacaacggtgacccagctggttcagcaactggaagcgcggctgcgcgtcaaattgctcaaccgcaccacccgtcgggtgcatctcaccgccgacggcgccgcctattatgaacgtgcggtacggctgctggccgacttggatgatgcagaaaccagcctgtccggcgcagccgccacgccgcgcggacggctgcggatcgatgtgcccagcccgctggcgcggatgattttggtgccggcgcttcccgactttcacgcacaatacccggatattcagattgatatgggcgtcagcgatcgcatcgtggatttaattggcgaacaggtagactgcgtagtgcgcggcggggaaatcagcgaccagtccatggtggcccgtcacgtggcggatctgcagcttggcgcctatgccacaccatcctatctggcgcaggccggcgtgcccgcgcatccgcgcgaactggaagatagccatcaccgcatcgtggggtttctctgggcgcgcagcggcaagccgctgccctacgccatgcgccgcggtgaggaacaggtgaaggttcacgggcgctatatcctcgccgttgatgacggcaatgcctatctgaccgccggcctggcggggctgggcatcctgtggctgcccgattatatggccgccccctcgctggcccgtggcgaactgactccgttgtttaccgactggcggtttgaaccgatgccgctctatatcgcctttcgccccaaccggcacgtcagtgccaaactgcgcgtatttattgattgggtagtggcgctgatggctcaacaggcgtcgccgggacgcgctttggccgcaccgtgctga

SEQ ID NO: 443517 - DNA, 405 bp, Serratia marcescens
atggcgaagcgagatgtggtattccccgcagggcgtcaggcactgtatgaacgtaaccattattccccggcgattcgcgccaatggcctgctgtttgtatcaggccaggttggcagccgcgaggacggctcaccggaacctgatctgacggcgcaggtgcatcgtgctttcggcaatctgaatgcggtgctgcaggccgccggttgctcttttgatgatgttatcgacgtcaccgtctttatggtggatccggaatccacctttcgcaccgtgtgggacgtggtgccgcagtattggggcagcgcgccgcacccgaccctgaccgccgtcggcgttacctggctttatggtttccagtttgaaatcaaggtgattgccaaactgccgcagaacggggaaggctga

SEQ ID NO: 443518 - DNA, 672 bp, Serratia marcescens
atgaaggaaggtaataacgtactgatattggatgatatctattatcaaatagatgactcggtcattctggattcggtctctttgacgctcaaatccggtgagttcaagctgatcaccggcccctccggctgcgggaaaagtacgctgttgaaaatagtttcttcactgattagcccaacccgcggcgctattatctttgacggcaagaatattaacgaactgtcgcccgaacattatcgtcagcaggtttcctactgcttccaaacgccggcgctgtttggcagctcggtgtttgacaacctggcactgccttaccagattcgccgcgtcaaaccggatgaggaaaaaatgaagcaggatttgcggcgctttatgctgccggagagcctgctgcaaaagagcattaacgaactgtccggcggtgagaaacagcggatttcgctgatccgcaacctgcagtttgttcctaaagtcctgctgttggatgaaatcaccagcgcgctggatgaagaaaataagcataacgttaacgaaataatccgccagctggtcgagcagcaggatatggccgtgctgtgggtaacacacgaccgggatgaaattgcgcatgccgacgatattatcgagctacaggcgcatcgggcacgggagacggccaatgaaccagcataa

SEQ ID NO: 443519 - DNA, 840 bp, Serratia marcescens
atggccattgcgctggatcgcttctgtatcaatcgaaaaatagccccgaatctcgatctggagcgttttttccaactggtaaaaaaatgcggccttaacaaggttgagttgcgcaacgatatgcccagcggcaaagtgaccgatgatttaagcaatgagcagctcaatgcgctggcggcgaaatacggcattgaaattatcaccatcaatgcgctcggcatgtttaacctgctggatgaccaagagacgctgcttggcaatgcgcaagcgctgctggcgcaggcgcaggccattcacagcaaggcgctggtactttgtccgcactgcagcaaagacgatcgccgcagcgatgagcaaaagcagcaggatacgctggctgcgctgcaactactggcgccgctgttccagcgctacggcgttgagggctatgtggagccgctcggcttcggcataagttccctgcgttcgtccctgctgagccaggcgattatccgcgatgccggcgcaccctataagatcgtactggacactttccaccattacctgagcgcgcctgctcagcaagaattcgatgcgcagatccaaatcgatcggatcggtctggtgcacctttccggcgtcgaggatcctcgcgccaaagagacgctgggcgatgaggagcgcattatgctgagcgaacgggatcgtctggagagtaaaaaacaggtgcagaatctggagcgcctgggctaccggggcatttactccttcgagccattctcttcgcagctgaacggctggacggaagcggatatcgaacgggaaattcgccaaagcatcgcgctgctgcaggcgccgtag

SEQ ID NO: 443520 - DNA, 1443 bp, Serratia marcescens
atgtcacatcagcgaaaacataatacagggtacgtactgcgtatatgcggcattgcggcgctcggcggtattttgttcggctatgacaccgccgtgatctccggcgccatcgaggcgctgaaagcctatttccacctcaccccggcagaaaccggctgggcggtgtccaacgtggtactcggctgcgtgctgggcgcattcggcgccggtccgctggccggccgctacggacgcaagaaagcgctggtgctggcggcgctgttgttcactatttccgccatcggcgccgcgctggccgagactttcacctggtttgtcatctaccgcatgatcggcggtctggcggtaggcatcgccgccaccgtctccccaatgtatatgtcggaggtctccccaaaagacatgcgcgggcgggcgctgagcatgcagcagtttgccatcgtgtttggccagatcctgatcttttacgtcaactttaaaatcgccagttatgcctcggaagcctggctgatcgatatgggctggcgttggatgattggttcggaagtggtgccctgcatcctgttctgcattctggtgtttatcatccctgaatcaccgcgctggaacgtgatggcaggccaggaagacaaggcactggcgacgctgactctcgtctccaacgaagcccacgcgcgcaacgtgctgaaagaaatcaaggaatccctgcggcaagacctgcaacaggccaagcaaaagctgagttaccgggacaaacgcgtgcgtttcatcctgttcgtcggctgcatggtcgccatgctgcagcaggtcaccggcgtcaacgtaatgatgtactacgcccccgtagtgctgaaaaccgtcaccagcaacgcgcaggaagccctgttccagaccatctggatcggcgtgctgcaactggtcggctcggcgatcggcgcgctgctgatggaccgcatcggccgcctgccgctgatgcgcttcggcactctgggtgccattattggtctgttgatcacctcctacgcactctatagtgaaaccaccggttacttcgccctgttcggcatgctgttctttatgttgttctacgcgctctcctggggtgtcggctgttgggtgctgatctccgaaatattcccgaaccggatgcgttcagagggcatgagcatcgccgtcggctgtatgtgggtcgccaacttcgccgtctcgcaaaccttcccgatgatcaacgacaacccttacctgttctccaccttccacggcgccttcccgatgtgggtattcgccgcctgctgtatgttcagctactggtttatctgccgtttcgtaccggaaaccaaaggcgtatcgctggaaaaaatggagcaagtggtgatggccaaacgctaccgccagcctgtagccacggccgaatccttatcgttacccaatgaaaaaccctaa

SEQ ID NO: 443521 - DNA, 819 bp, Serratia marcescens
atgtcttcattgcttgcgaaatgccagccgcccgatagccaggggcgtattcagcatgttacgccggaaaacgccgactggcgttttgtcggttttgacgtctatcgccttgaggcggggaaaacgctgacgctgagcagcgacgataaagagctgtgcctggtattggtggccggcattgcctccgttgcgacgcagcatgccgaatatccccatatcggcaaacgtatgagtccgtttgagcggacgccgccctatgcggtttatgtgccgcatcacgatcaggttatcgtgcgggccgaaagcgagctggaactggcggtatgcagcgcgccgggaagcgggcatttgccttcgcgcctgattacgccggcggacgtgggtgttgaacggcgtggcaaagggcgcaaccagcggctggtgcacaatatcttgccggacgataagccggcggacagcctgctggtggtggaggtatacaccgacgagggcaataccagctcctaccccagccataagcacgatcaggaagactctgcggatgaaacctatctggaagagacttattaccaccgcattgagccggaacagggattctgcatgcagcgtgtgtacacggacgaccgctcactggacgagagtatgccggtgtataaccgcgatgtggtgaaggtgccgcgtggttatcatccggtggcgaccctggccggttacgataactactaccttaacgtgatggccggtccaaagcgcctgtggaaatttacctgggaaaaagatcacgcctggattaacggtgatgactacccgcagaaatag

SEQ ID NO: 443522 - DNA, 1941 bp, Serratia marcescens
atggtttcacaacaaaaacagcttgatgtcatctgtctcggccgcatcgccgtcgatttctacgcgcagcaaatcggcgcacgcctggaagacgccagcacgtttgccaaatacctcggcggctcttccggcaacgttgcctacggcacggcgattcaggggctgaagtccggcatgctggcccgcgtcggcgatgaacatatggggcgtttcctacgtgaagagcttcagcgtgtgggggcggacacccgctgcctgatcaccgacaagcagcggctgaccgggctggtgatcctcggcatcaaggatcaggaaaccttcccgctgattttctaccgtgataactgcgccgatatggcgttaacgcctgacgacattgatgagtcctacatcgcctcgtcacgtgcgctggcaattaccggcacccatctgtcccaccccaacacgcgcgccgccgtgctgcaggctctggagtacgcgcatcgccacgggctgcgcaaggcgctggacattgactaccgtccggtgctgtggggcctgacgtcgctgggcgacggcgaaacgcgctttgtcgaatcggacaaggtcacgcgcgaactgcaggaggtattgcaccactttgacctgatcgtcggcacggaagaggaatttcatattgccggcggcagcaccgatacgctgaccgcgctggccaacgtacgcaaagtcagccaagcgacgctggtatgtaaacgcggcgcacaagggtgctcggtatttgaaggggctatcccgagcgattggcaggcggtaaaactgcactgcggcgtgcgggttgaagtgcttaacgtgctcggcgccggcgacgcctttatgtccggcctgctgcgcggctatttgaatgacgagggctgggatcaggcgtgccgctacgccaacgcctgcggtgcgctggtggtatcgcgccatggctgcgccccggcgatgccgaccaggcgcgaactggacgattacctggcacgcgagcagcaggtgccgcgccccgatcgcgatgcgcgcctgaaccacctgcaccgcgtcaccacgcgcaagcaacagtggccggaactgtgcgtcttcgcctttgaccaccgcaaacagctggcagatatggcgcgcgaagccggcgtaggtgaagaacgcattccacagttgaaatccctgctgctgaccgccgccaaagaggcggcagacgaggcgggcctgcagggcaacagcggtattctggccgacaccacttacggccaggccgcgctgaatgaaatcaccggtgagggatggtggattggccgtccgatcgagcagcccagctcacgtccgctgcgtctggaacatggcaacatcggctctcagctggtcgactggccgctggaacacgtggtgaaatgcctggtgttttatcatccccacgatcccgtcgaactgcgcaacgagcaggatgcgctgattaatgacgtctatcagggatgttgcaaaaccggccatgaactgctgcttgaagtgattttacccgaggacagcagcgataaagatgaaagttactacctggaaatcatggcgcacttctatcagttagggataaaacccgactggtggaaactgccgccgctgagcgcagcaagctggcgccaggtcggcgagctgatcgaagccgccgatcccgactgccgcggcgtggtcattctgggcctggacgcgccggaagacgcgctgaaggccggctttgccgccgccgccgatgagcgctgggtgaaagggtttgcggtaggccgtaccattttcggccagccgtcacgcctctggctgcagggtgagctagatgattcttctttaattgcgcaggttaaacagaaatatcttacgctgatcggtttctggcggttatatcgtccacaacgcgatggtgtaacccaccacccttaa

SEQ ID NO: 443523 - DNA, 1935 bp, Serratia marcescens
atgagtaagatcagattgaccatggcgcaggcgctcgtcaagttcctcgataaccagtatctgctggtggatggcgtcgaaatcaaatttgtgaagggcatatttgcgattttcggccatggcaatgtgctgggccttgggcaggcgctggagcaggatcgcgggcagttaaccgtgcttcaggggcgcaatgagcaggggatggcccatgcagcgaccggctttgccaagcagaaactgcgccagcagatttacgcctgcacctcttccgtcggccccggcgcggccaacatggtgaccgccgccgctacggcgagcgccaaccgcattcctttattgttgctgcccggcgacgtcttcgcctcgcgccagccggacccggtgctgcagcagatcgaacaatcctatgacctgagcatcagcaccaatgacgcgtttcgcgcagtcagcaaatactgggatcgcatcacgcgtccggagcagctgatgagcgcctgcatcaacgccatgcgcgtactgaccgatccggcggaaaccggtgcggtaacgctgtgcctgccgcaggatgtgcagggcgaagcctacgactatccagagtacttctttcagaaacggctgcatcggctggaacgccggccggcaacggccggagcgctcggcgatgcgctggcgctgctggccggcaagaaaaagccgttgctggtatgcggcggcggggtgaagtattcccaggcgggcaaggcgctgcagcagtttgccgagcgttttcgcattccctttgcggaaacccaggccggcaaaggggcggtcgtttccgaccatccttataacgtcggcggtatcggcgagaccggctgcctggccgccaatacgctggcgaagcaggccgatctggtgattggcgttggcacccgttataccgatttcaccacctcctccaaatggctgttccaaaacccggacgtcgaattcctgaacattaacgtcagcgcgtttgatgccggcaaactggacggcgtgcaactgctggccgacgcgcgtgaagccttgcaggcgttaggcgaactggcaacgcagcaggattatcgcgccgattggggcgatgccgttgaacaggccaaggcggcgcagcagaaagaaaccgagcgggtttactccgttgcttataccggcgccgatttcgtgccggaaatcgacgatcatctcaaccgtgagcaggtctttgccgagtttattgcccagacgggctcctcgctgactcaaagccgcgtgctgggggtgctgaatcagcagttgccgcaggacagcgtgattgtggcggcggccggcagcctgccgggggatttgcagcgggtgtggcgcaatcgcggtgagcatggctaccacgtggagtatggctactcctgcatggggtatgaagtgaacgccgcgctgggcgtcaaactggccgagccgcagcgggaagtgtacgtcatggtgggcgacggcgcatttatgatgctgcattccgaactggtcacctccattcaggaagggtgcaaaatcaacgtggtgctgttcgacaacatgaccaatggctgcatcaacaacctgcagatggagcacggcatggacagctacaccacggagttccgtttccgtcaggacggggaacttaacggcgggctggtgccggtgaatttcgccatgctggcggcggcttacggctgcaagacctacagcattaccaccgaacagcaactgattgaagcgctggccgatgcgcgccagcagacggtttccacgctgctggatatcaaggtgctgccgaaaaccatggtgcataagtatctcagctggtggcgcgtgggcggagcccaggtggcggacagcgacaagatcgttgcggtggcccgtcagctgcaggaaaacatcgacaaggcccgtgattactga

SEQ ID NO: 443524 - DNA, 498 bp, Serratia marcescens
atgggtgaaatcatcgtccgccacgttgaaacctccgatgcaccagcgctgcaacggctgtatgcccacccagaagtctaccgcgatacgctacaacttccgctgccctcactcacgcactggcaacagcgcctggctgatgccaagccagggttgcacaatctggtcgcctgcatagacgaacaagttgttggtcagattgtgatcaaacttaatcagtcgttacgtcggcgtcacgtcgctacctttggtatcggcgtcgatcctgcacaacagggaaaaggcatcggcggagcgctgatgagcgccatgatcgaactttgcgataactgggcggcaattcagcgtattgaattgacggtgttcaccgacaatcagggcgccattgcgttatacaagaagtttggtttcgagatagaaggcaccagccaacactttgccatgcgcgacggtaagctggtcgatgcctatcatatggcgcgatttcatggcgtctga

SEQ ID NO: 443525 - DNA, 696 bp, Serratia marcescens
atgatttatttacgtaaagcgaaagaccgcggccacgctaaccatggctggctggacagctggcataccttctcctttgccaattattacgatccgaactttatggggttctccgcgctgcgggtcatcaatgaagaccggattgacggcgggcaagggttcggtacccatccgcataaagatatggaaattctgacctacgtgctggacggtaccgtagagcatcaggacagcatgggtaataaagagcagatccaggctggggaatttcagattatgagcgccggcaccggggtacgccactccgagtacaatgctaacagcgacaagctgctgcatctgtaccagatctggattattccggataccaacggcctgccgccgcgttatgagcagcgtatgtttgatgcaccgcaggggcgtcagctggtgttgtcgccggatgcccgcgaaggttcgctgaaggtattccaggatatgacgctgtcgcgctgggcgctgaataaaggcgaacaggcggagtatacggtcgaagccggtcgtcgcgtctgggtacaggtggtgcgcggttccattaccattaatgacaaccgggcaggcgccagcgatgcgctcgctatctgggatgaaacggcgctgtcactccacgccgatgaagacagtgaaattctgctgtttgatttgccaccggtttaa

SEQ ID NO: 443526 - DNA, 531 bp, Serratia marcescens
atgaataattcacaacaccacgttttcatcctgatgggcgtctccggcagcgggaaatctgccgtagcaagcgccgtagcgcatgaactcaatgccgccatgctggatggcgattatctgcacccccgcagcaacatcaataaaatggccggcggtgatgcgctgaacgatgacgatcgggcgccgtggctggcggcactgaacgacgcgatttttgccatgcagcgtaccaatgacgttgcgctgctggtgtgttccgcgctgaaaaagcgctatcgcgatcgcttgcgcgcaggcaacaacaacctgcactttatctatctggaaggtgaaaaagacgtgattgaagcgcgtctgaagcagcgtaaagggcatttcttcaagccgcagatgctggtttcccaatttgaagcgttggaagtgccgcaggcggatgagtccgacgtgcaggcgattgacatcgaccagccgctggataacgtggtggccgacgtcgtctcctatattcaatccgtaacgaaccaagggtaa

SEQ ID NO: 443527 - DNA, 1338 bp, Serratia marcescens
atggatacattaacgctggtattgaccgccgtaggttcggtactgctgctgttgttcctggtgatgaaagcgcggatgcacgcgtttatcgccctgatgttggtgtcgatgggcgccggcctgttctccggtatgtcgctggagaagatcaccgataccatgcaaaaaggcatgggcggcacgctgggcttcctggcgatcgtggtggcgctgggcgcgatgttcggcaaaattctgcatgaaacgggcgcgctggatcagatcgccgtcaaaatgctgaaaggctttggcgaaaagcgcgcgcactacgcgctggggattgccggcctggtttgcgccttgccgctgttcttcgatgtggcgatcgtgctgctgattggtgtggccttcgccgtggcgcgtcgcaccggcggtaatctggtgaagcaggtgatcccgctgtttgccggcgtagccgcggcggcggccttcctgctgccggggccgaccccgatgctgctggcgtcgcagatgaatgcagattttggctggatgatcctgatcggcctggcggcggcgattccgggcatgctgctggccggcccgctgttcggttcgtttatcagcaagcacgtcacgctggaactgccgaaagatatcgaagagccaagcatcgacaagagcaagctgccttcgttcggctttagcctggcgctggtgctgttcccgttagtgctggtggggctgaaaaccatcggcgcgcgctttaccgaggaaggcagctcgctgtatcagtggctgcagtttatcggccatccgttcaccgcgattctgattgcctgcctggtggcgatttatggtctggctatccgccgtgggatgagtaaagacaaggtgatggaagtctgttcggcggcgatccagccggcggggattatcttgctggtaaccggcgcaggcggcgtattcaagcaggtgctggtcgattccggcgttggcccggcgttgggcaacgcgctgatcggcgccggcctgccgattgctgtcgcctgttttgtgctgtcggcggcggtgcgggtgattcagggttcggcgaccgtggcctgtctgaccgctgtcggcctggtgatgccggtgattggcgagctgggctactccggcgcgcagatggcggcgctgtcggtatgtattgccggcggttccatcgtactgagccacgtcaacgactccggcttctggctgttcggtaaatttaccggcgccaccgaagcgcagacgctgaaaacctggtcgataatggaaaccatcctcggcaccaccggtgcggtggtggggatgatcgcctttacgctgctgtaa

SEQ ID NO: 443528 - DNA, 849 bp, Serratia marcescens
atgtcggcattacaattcccctgcactatatttaaaaccaaaaatataatggatgattatggtgcatatgatatgcgctgcggagatttatccgcagcgcaattaaaaacatactttcatttaggtgatgtctccacgcgggttaatccctataccctgacgcagctcacgccgtttaaccagccgcattcgcgcttttatggcatgcgcgggcaggggactacgctcacccggcaggagtgcgccagaattctctttgatgaattccgccagttatcccgcctctttgcgctttatggcccctataaacacctgattgaacagatgatcagccatatgcagcacggcaacggcacgccgtttagcagcccgcatctgaatgccgcgttaaaggagcagattttgggggataaatcagaagaaaatagttcacgcttgctgttgaaaattgctttaaatagatatattgactggggtaatgaatgttatccgataagccaaaaaaatgagcttgagaaagccatacttagcggaaaacttcctaagtttgaccgatttcaggataattttaacggtatggggattaccgtacatgatacttgggcgactcatatcacggtaaaatcactgcaggttgataacgaaagctatcgtgctctggtgcactatcgggtgcaggaccactttggattggatgatgacgatatcagaaaggttaagtttaaccagttccgcttcttccgtatctggtttgttcttcagcgctacaatcagtttggctttcgaccgtttatgactaatatggaagcaatggtggaaatctcggggaaacggaatgagaaaaggtaa

SEQ ID NO: 443529 - DNA, 462 bp, Serratia marcescens
atgagaaaaggtaaaaaggtaatttatacgttagcattagcaggcatggccctactaggatatttttcttggtgctcgctgcagccggtagagattattgccattcaccagagggagaactatagcgatgtgttggtgaaaaactttccttttacagataaagggaaaataaattggtggttagataataaaaataacctaaaagaaaaatatggcatccctaaaccagattcggatggattctttactattatattttgggactttggtgagggttacaaagaggcggggaagtatgaccgaatgtgttttgaggacatgaagggaaaatcaaactgtatagataaaaacaaagaactaacggttgaaaatgacaggcatcacgatattttatttactgtaagtagtggtatgtatcgtatgaaaaagagtggtgatattacaaggtattatcttgattga

SEQ ID NO: 443530 - DNA, 447 bp, Serratia marcescens
atggacagatttttgtgcgcatctattttatttgtcagctatatattctggcgttctctacaaccggtggagatcgttgccgttcatcaaaggaacaacttcagcgatgtgctggtgaataattttccctttacagataaaggaaaaataaattggtggttggataataaagacaaattaaaaggaaaatatgatatccctaaacccgcttcctatggactttttactattgttatctggaaatttggcgagggttacaaagaggcggggaagtatgaccgaatgtgttttgaagatatgaaagaaaagagaaactgtattgataaaaatgtgttgttcatcatttctaatgacaggaataacgatatgttatttgtaggggataatggaacctatcgcctaaacaaaaacggtgaagtaaccaaactcaaacgcgagtcggattaa

SEQ ID NO: 443531 - DNA, 837 bp, Serratia marcescens
atgattagagtgatcgccgtatccaatccccgcctggcactggcgtttgtcgactatatggcgacgcagggcattacgctggaactgcgccacggccaggacagcgcagagatctggctggcggatgaaccgcggctggaacaggtacaacacgaactgcagcagtttatgcgcgacccgctcaaccgccgctatcaggccgccagctggcaaaccggcggcaccgccgccgagctgcactatccgcacgactcctacctgcagattatccgcagcaaggccggcccgctgaccctaagcgtgatggcgctgtgtattctggtgtatgtgctgatgcaggtagtgggcgacgacagcgtgatgtactggctctcctggccgcagaacagcgagcaatatacgcagctgtggcgctggatcagccatgcgtttcttcacttctcactgctgcacatcgcctttaacctgctctggtggtggtacctcggcgggccgatggaaaaacgcctcggcgccggtaaactgtttgtgctggccgtggtgtcggccttcttcagcggctgggcgcaatcgctgttcagcggggcgctgtttggcggcctgtccggcgtagtctatgcgctgatgggctatagctggctcagcggcgaacgggcgccggagcgcgggctgatgctgccgcgcggcctgatgatattttccgtactgtggctggtcgccggctacttcgatattttaggaatgtcgatcgccaacgcggcacacgtggccggtttagtgttagggttgctgatggcattttgggacacgcgtcatcgcgcgcacaacgaacaataa

SEQ ID NO: 443532 - DNA, 330 bp, Serratia marcescens
atggaacagtttgaagcgatcaatgttgagcaggcgcacggccgctggcaagacggcagcgcggcgttggtcgatatccgcgatccgcagagtttcgccgccgggcatacgccgggcgcatttcatctcaccaacgccacgctgcaaacctttatgcagcaaaacgatttcgatcgtccggtgatggtgatgtgctaccacggcaacagcagccgcggcgctgcgcagtatctgctgaatcagggttttgatgcggtgtacagcatcgacggcggctttgaggcctggctgcgtcaatacccgcaggatgtggaaacctccgctgaataa

SEQ ID NO: 443533 - DNA, 2406 bp, Serratia marcescens
atgtcacagcctacgcttaaaaaggacgtttttctggcggcactgacccgccagtggcagcacctcggactgcgttccgcccagcagatgacgccgcaccagtggtggcaggcggtcagcggcgcgctggccgaacagctggcggcgcagcctgcccccgtgcggcaggacagcgcgcagcgccatgtgaactatatttcgatggaatttctgattggccgcctgacggccaataacttgatcaatctgggctggtatgacacggtggcggcggcgctggaggagcaggggattcaactggcggacgtgctggagcaggaaaccgatccggcgctgggcaacggcgggctggggcggctggccgcctgtttcctcgattcgatggcgacggtagggcagccggcgaccggctacgggctgaactaccagtacgggctgttccgccagtcgttcagcggcgggcaacagcaggaagcgccggacgactggcagcgcgagagttacccgtggttccgtcacaatgccgcgctggcggtggatgtcggcatcggcggtgagctggaaaccctggcggacggccgcgaactgtggcgaccggcgcaggtgctgcgcggcgaagcctgggatctgccggtggtgggctaccgcaacggcgtcagccagccgctgcgcctgtggcaggccacgcatgcgcagccgtttgatctgggcgcgtttaacgacggtgacttcctgctggcggagcaacagggcgttgacgccgccagcctgaccaaggtgctgtacccgaatgataaccatcaggcgggcaaacgcctgcgcctgatgcagcagtacttccagtgcgcctgctcggtggcggatattctgcgtaaacaccatcaggccgggcgacgcattgaagatctggcggactatgaagtgattcagctcaatgacacccacccgaccatcgccatcccggaaatgctgcgcattctgctggatgaacaccagctggcctgggatgatgcctggcgcatcaccagccgcactttcgcctataccaaccatacgctgatgccggaggcgctggagtgctgggatgaagagctggtgcgcagcctgctgccgcgccacttctcgataatcaaacagattaacgccaacttccgccaacgggtggagcagcagtggccgcagaacgaggcggtatgggccaaactggcggtgcactatgacaagcaggtgcgcatggccaacctgtgcgtggtcagcggctttgcggtcaacggcgtggcgcagctgcattcggatctggtagtcaaggatctgttcccggagtatcaccagctgtggccgcagaaattccataacgtcaccaacggcattacgccgcgccgctggctgaagcagtgtaatccggcgctgtcggcgctgatcgacagccggctgcagagagagtgggcgagcgatctcgacgcgctgcaggggctggagcagtacgccgacgatgcctccttccgccagcagtaccggcagataaaacgcgacaacaaggtggcgctggccaactatgtgcacggcgtgatggggctgaaactggatccggacgcgattttcgacgtacagatcaagcgcctgcatgaatataagcgccagcatctgaacctgctgcatattctgtcgctgtatcgccagctgcgcgataacccgaacctggaaatggcgccgcgggtgttcctgttcggcgccaaggccgcgccgggctactacctggcgaagaacatcatctatgcgatcaatcaggcggcggagaagatcaataacgatccgcaggtgaaggatcgtttgaaagtggcgtttatcccggactatcgcgtctccgtggcggagctgatgatcccggcggcggatctgtccgaacagatctccaccgcgggcaaagaggcctccggcaccggcaatatgaagctggcgctgaatggcgcgctgaccatcggcacgctggacggcgccaacgtggagattgccgagcaggttggcgcggacaatatctttatcttcggtaacaccgtggaacaggtgaaggcgttgcaggccggcggttacgatccgctgcgttaccggcagcaagatgcgcagctggatgcgattctcaccgagctggaaagcggcgcattgagtcacggtgataagcaggcgtttgaaatgatgctgcacagcctgcaggccggcggcgatccttatctggtgctggcggactttgccgactattgccaggcgcagcagcgggccgaccggctgtatcgcgatacgcaggcgtggacgcgcagcgccattctcaatacggcgcgcgtcggtatgttcagttcggatcggtcgattcgcgattatcagcagcgcatctggcaaacccggcgttaa

SEQ ID NO: 443534 - DNA, 2088 bp, Serratia marcescens
atggatcgtaacagcatcgaccgggcggcggcgcaggcgggcattatggccgactatgtcaatgcccacggccagcagcaggccatcacgccggaaagcaagcgcgctttgctggcggcgatgaacagcaaagcggcgtcggccggcgaagcgccgctgccgccggtaaaagtgtttttccagcgtcagccgatcgtgctgccgctggcgggcagcggcgaatatggctgggagctgatccgcgaagacggcgtccggctgcaggggcgcgccggcgctggcaagacgtttaccctgcctgccggggaactgccgctcggctatcatcagctgcgtttaacgcagcaacagcagagctggcagtgccggctgattatcgcccccagacgctgttatgaaccggacgcgctgctgaccggtaaaaaactgtggggcgcctgtgtgcagctgtatacgctgcgttccgacagcaactggggtatcggcgatttcggcgatctgcggcggatggtgacggaggtgggtgagcgcggcggcgcgttcgtcgggctgaacccgattcatgccctctatccggcagatccaaacagcgccagcccgtacagtccgtcatcgcggcgttggctgaacgtggtgtatatcgacgtcaacgcggtggaggacttccagctcagcgctgcggcgcaacgctggtggcgtcaggcggcgactcgtaaacagctggtggcggcgcgtgacagcgaatgggtcgactatgcggcggtgaccgcgctgaagctgacggcgctgcggctggccttcagccagttccagacgcgggcggccgatgacccacagcgccaggcgctgcgtctgtttgtcgccgagggcggcgacagcctttatcagcaggcggtgttcgatgcactgcatgcccacctgtgcgcacaggatccgacgctgtggggctggccggtgtggccgtcggcgtaccgtcagagcaacggcgaggcgacggcggcgttttgccgcgacaatcaggaggaggtggcgttctacctgtggctgcagtggctggccgcggcgcagtttgccgactgtttcgcctgctgccggcagcagcagatgccgatcggcctgtatcgcgacctggcggtcggcgtggcgcagggcggagcggaaacctggtgcgaccgcgagctgtattgcctgcaggcgtcggtgggggcgccgccggatattctcggcccgctggggcaaaactggggtctgccgccgatggatccgcacgtgatggcggcgcgcggctatcagccgtttatcgacctgctgcgcgccaacatggccgactgcggcgcgttgcgcatcgaccacgtcatggcgctgctgcgcctgtggtggatacccgctggcgccaccgccgaccagggcgcctatgtcaaatatccgctggacgatttactggcggtgctggcgttggagagccagcgtcagcgctgtatggtgatcggtgaagatttggggacggtgccggtggaaattgtcggcaagctgcgcgacagcggcgtctattcctacaaggtgctgtatttcgagcgggacgacgaaaaccgcttccgcgcgccgcaggcctatccggtgcaggcgatggcgaccgtcaccacccatgacttaccgacgctgcgcggctactggcagggcgatgacctgcggctgggcgcttcgctcggcctgtacccggacgctggggtgctggcggggctgtacgccgaccgcgaacgggccaaacaaggattgctggacggcttgcaccactatggctgcgtgccgcagaaggtgggcggcaaggcggcgcggctggcgatgagcccgttgctgaaccgggggctgcagcgttatgtggcggacagcgccagcgcgttgctcggcctgcagccggaagactggctggatatggcggcgccggtgaatgtgccgggcaccagtacggagtatcctaactggcggcgtaagctgtcgcagacgctggaaacgatgtttgccgatcggcggattgcgttgctgctgaaagatgtagaccgccggcggcgcaacggttcggtggggtag

SEQ ID NO: 443535 - DNA, 684 bp, Serratia marcescens
atgctaacaatccgcagccgctgttggctatgccggcagcctttgcgcctggcgcaacacggtatctgcagctactgcctgcgccagctgcccatgccgccgccctgctgtccgtgctgtggcctgcctgccggcgacatccgttacccctgcggccgctgcctgcaaaaaacgccgccctggcagcggctggtgttcgtcgccgactatgtcagcccgctgagccgactgattaagcagctcaagtttcaacgccgtccggagctggcgccgctgctggccaggctgttgctactgcgctggctgcacctgcgccgagagcaatatctgaacagacccgatatgattttaacggtacccttacagaaaatgcgccgctggcgacgcggctataatcagagcgaactgttggcggcgccgctggcccgctggctgggctgtgaatatcgcccgcaggcgctgcggcgcatacgcgccaccgccgcacagcagcgcctgacggcacgacagcgcaaacgcaatctgcgcggcgcctttcgctgtgaggataatctggccgggcggcacgtcgtcctgctggatgatgtggtaaccaccggcagtacggcggcggaaatcgccgcgctgctgcaggcgcagggcgtcgcctcattacagatatggtgtatttgccgcacattgtag

SEQ ID NO: 443536 - DNA, 777 bp, Serratia marcescens
atgacagcgctgtactggcaaacaatgggtgaaggcgatcgcgatcttgtgctgttgcacggctgggggctgaacgccgaggtctggggttgcgcgctgacgcgactggcgccgcatttccggctgcacctggtggatctgcccggctatgggcgcagtcagggctttggggcgttgacgctggcgcagatggcggacgttgtgctggcgcaggcgccgcagcaggcctggtggctgggctggtcgctcggcgggctggttgccagccaggtcgccctgacgcagccgcagcgggtcaacggtctgattaccgtggcgtcgtcgccgtgtttctccgcccgcgacgactggccggggattcgtcccgaaatattaagtggtttccagcatcagctgagcgaggattttcagcgcacggtggagcgcttcctggcgctgcagacgctgggtaccgagagcgcccgccaggacgcccgtacgctgaaatcggtggtgctgaatcagccgatgccgagcgtggaggtattgaacggcgggctggatattctgcgcaccgccgatttgcgccgtcagttggccgatgtgcgctgcccgctgctgcgtatttacggctatctggacggtttggtgccgcgcaaagtggcggcgctggtggatgaactggcaccggactcccgctcggtggtggtcgccaaggcggcgcatgcgccgtttatctcgcatcccgatgagtttgccgacctgatcctgcgctttgtcggcgacggcgcactttga

SEQ ID NO: 443537 - DNA, 285 bp, Serratia marcescens
atgaaatcattgaagatgatcgttgctgctctggttgtgggttccgtgtctttcagcaccatggcggccacgctgctgacgcaagaagatctggataagaatccgggaaaatacgagaagatcggtacggtgagcaccacggcggaaaccacttcgccgatggacgcgaaagagaagctgtccaaactggccgatgagaagggcgggcagtattacgtggtgatcgcgggccgcgagcacggcaaattcagcgccatcgccgatgtgtataaagacaaacagtaa

SEQ ID NO: 443538 - DNA, 240 bp, Serratia marcescens
atggccagcctgctgcaggtgcgcgatgcgctggcgatctgcggcagcgctcaggcacagcagctcagccggcagttgaacgcgccgttgccgctggtgcaggccatgctcgatcgcttaattgcgttgggtaaagcagaatgccgcgttatggatgacggcggctgtctgagcggcgcctgcaaacattgtccggaagggaaagcctgtacgacgcgggtctatcggctgaaggcgtga

SEQ ID NO: 443539 - DNA, 2325 bp, Serratia marcescens
atgatgaaaacactcaccattggtttaatcggcaatccgaattcagggaaaaccacgctgttcaaccagctcaccggcgcccgtcaacgggtcggcaactgggcaggggtgacggtagaacgcaaagagggtcagttcactacgccacaatcgcgggtcacgctggttgatctgcccggcacctattcactgaccaccatctccgaacaaacctcgctggatgagcaaattgcctgccattacatcctcagcggcgacgccgacttactgatcaacgtggtcgacgcctccaaccttgaacgcaatctttatctgacgctgcagctgctggagctgggtatcccctgcattctggcgctgaacatgctggatatcgcccgcagccagcatatccatattgatgtcgccgccctgtcggcacggctcggctgcccggtggtgccgatgatttccaccaaggccgacggcatcggcgtgctcaaacagatcatcgataaccaccagttcaaccagctcaccgcgctggtcagctacccgccgctgctgttgcaggaagtcgacgccctcagcgccgccatgcccgagacgctgccgaacgggcagcgccgctggctggcgttgcagatgctcgaaggcgatatttacagtcaccagttggcgggcgacgccgccgcgctgctgccggcggcccgacggtcgctggagcaacagcaacaggaggatccggcgctggtgattgccgatgcgcgctaccagtccatcgccgccatctgcgacagcgtcagcgatgcacagcaggcgcggccgaaccggctgaccgacatgctggatagcgtgatcctcaaccgctggctgggcgtaccgatcttcctactggtgatgtacctgatgttcctgctggccatcaatatcggcggcgcgttgcagccgattttcgatcttggctcggccgccctgtttattcaggggattcaatggctcggttataccctgcatgccccggaatggctgacgatcttcctggcgcagggcgtcggcggcggcatcaacaccgtgctgccgctggtgccgcaaatcggcatgatgtacctattcctgtcattccttgaggattcaggctacatggcgcgcgccgcgttcgtgatggaccggctgatgcaggcgctgggcctgccgggcaaatcctttgtgccgctgattgtcggctttggctgcaacgtgccgtcaattatgggcacccgcacgttggatgcgcagcgcgaacggctgatcaccatcatgatggcgccgtttatgtcctgcggcgcccgactggcgattttcgccgtgttcgccgcagcctttttcggccagcacggcgccggcgtggtgttctcgctgtatctgctgggcattctggtggcgatcctgaccggtctggtgctgaaatacaccattatgcgcggcgaagcctcgccgtttgtgatggaactgccggtgtatcacgtgccgcacctgaaaagcctgctgctgcaaacctggcaacggctgaaaggcttcgtgctgcgcgccggcaaggtgatcgtcatcgccagcatttttatcggcggcctgaacagcttctccttcagcggcaagccggtggacagcatcaatgattccgcgctggcctcggtctccaaagtgctgacgccgctgctgcagccaatgggcgtgcacggcgataactggcaggctaccgtcgggttggtgaccggcgcgatggcgaaagaagtggtggtgggcacgctgaacacgctgtacaccgctgaacacatcactcacgaagcgtttgatgccgaaaacttcaacctgctggatgagctgcacgcggcgctgcaggaaacctggcaggggctgaaagacactttcagcctcagcgtcctgtccaacccgatcgaagccagtaaaggcgacggcgaaatgggcgtcagttcgatgggcaccatgagcagcaaattcggcacgccggtttccgcctacagctacctgatcttcgtgctgctgtacgtgccgtgcgtctcggttatgggggccatcgcccgcgaatccagccgcggctggatgaccttctccattctgtgggggctgaacatcgcctattcgctggcgacgctgttttaccagattgccaccttcagccagcatcctcagtacagcctgctctgtctggctgcggtggtggtggtcaacctgctggtgctgttcggcctgcgtaaagcccgcagccgcgtcaccgtcaggctgcgcagcgtcgccacaacgggcggcgactgctgccaatcctcacagaaggcgtgtcactga

SEQ ID NO: 443540 - DNA, 225 bp, Serratia marcescens
atgcatctacagcccaaacgctcttataagatcgccggtttttcgcctgaaatcagcccggcctatcgacaaaaacttttatcgctcggcatgttgcccggttcattattcgacgtgattcgcgttgccccgctcggtgacccgatagaaataaaaacccgacgcgtcagcctggtattacgtaaaaaagatctcgccctgctggcgcttgaagcgcaaccgtaa

SEQ ID NO: 443541 - DNA, 480 bp, Serratia marcescens
atgattattctcgacaccagcgtgatcgcagaaacgctgcgccccaatccgcattacaacgtgatcagctggctgaacgaaaaagataatagtgagctgtatttaagcgccatcgttgtcgctgagctattcagcagcgtgaccggcatgccggacggcaaacgccaacgggcgctcaggctccggctggcggaggcgattcagattaaatttgatgagcagattttgccgtttgatgccctatgcgccatgcagtatgcggagctgatggacagtaaccaaaggcagggcacgccgatgagcatgcccgatacacagatcgccgccacctgcctgcagcatggcgctacgcttgccacgcgcaacagcaaaagttttctccactgcggcattaagctgatcgacccctggcaggtgccggcggggcagcgcctgcatgaagacgccgccgaatactatgtgatgagccgtaaatcctga

SEQ ID NO: 443542 - DNA, 882 bp, Serratia marcescens
atgtctaatcatgaccaattacaccgttacctgttcgagaactacgcggtgcgcggtgagctggttaccctcagcgacacctatcggcacattctggaaaaccacgactaccctgccccggtgcaggcgctgctgggtgaaatgctggtggcaaccagcctgctgacggcaaccctgaaattcgacggcgatattaccgtacagctgcagggcgacggcccgctgaagctggcggtgatcaatggcaacaaccagcaggaaatgcgcggtgtggcgcgcctgcagggcgatatcgccgacggcagcacgctgcagcagatgatcggcaacggcgtgatggtcattaccattaccccggccgagggcgagcgctatcagggcgtagtggcgctggaaggcgaaaccctggccgagtgcctggagaactatttccgccagtcggaacagctgccgacccgtctgtttattcgcaccggcgaggctggcggccagccggccgccggcggcatgctgctgcaggttctgccggcgcaggacgaacaaaacgctgacgacttcgatcacctggtgcagctgaccgccaccatcaagaacgaagagctgttcactctgccggccaatgaggtgctgtaccgcctgtaccaccaggaagaggtgacgctgtatgaaccgcagccggtcatattccgctgcacctgctcgcgccagcgctgcgccgacgcgctgctgacgctgcccaccgatgaggtggccgatatgctggagcaggacggcaacatcgatatgcactgcgactattgcggcaaccattacgtgtttgatgcgatggacgtcgccgcgctatacgcaggtaacaccggcgaaagcgaccagttacactaa

SEQ ID NO: 443543 - DNA, 408 bp, Serratia marcescens
atgaaagcaaaaacgacgagcgatgacgccgtccgtttagacaagtggctgtgggccgcacggttttataaaacccgttcgctggcgcgcgagatgatcgacggcggcaaagtgcactataacggccagcgcagcaagcccagcaagaacgtcgagctgaacgcggagatcaagctgcgtcagggaaatgaggaacgcacggtaatcgtgctggcgctcaacggccagcggcgcggcgccggcgaagcgcagctgatgtatgaggaaaccgcagccagcatcgccaaccgggaaaagatggcgcaggcacgcaagctgaacgccctgagcatgccgcatccggaccgccgtccggacaagaaggaacggcgcaccctgattaaatttaaatttggcgagtcggaataa

SEQ ID NO: 443544 - DNA, 681 bp, Serratia marcescens
atggttcctgaatttgattggcgcaatatagataccgttttgctggacatggacggcaccctgctcgatctggagttcgacagccacttttggctgcagcgggtgccgcaggcgctgagcgcccagcgcgacatctcgtttgagcaggcccgtcaaatgattgacgccgagtatgccgcagtacagcacaccatgaactggtactgctttgattactggagctcgcgactggatctggatatttacgccatgaccagcgaagccggctcccgcgcccgcctgcgcgatgataccgcgccgtttctgcaggcgctgcgcgactccggccgccaggccattttgctgaccaatgcgcacccgcacagtctggcggtaaaaattgcgcataccggcctcgatcggcaccttgatttattactttccacccacacatttggatatccgaaggaagatcagcgcctgtggcaggcggtgcagcaacgcatcggcttcgacccgcagcgcacgctgttcgtggatgacggcgaaccgattctggacgccgcgcaccggtttggcattcgctattgtctcggcgtacaaaatccggattccagcatggcggaaaaaactttccagcgtcatccgtccatgcgcgattaccgtcagttgataccggcgctggcacgggagccaaaatga

SEQ ID NO: 443545 - DNA, 2136 bp, Serratia marcescens
atgagcacaatagtgttgatattagccttagtgcttgcctgtctgataattgctggcctgtatttttggtttaaagctcgcaaccggccggtattggcccgttcattgccctttctcaagccgacgcaccgcaagctgacgtcggaagagcgagcagcagtcgagcactacctcggtcagcaaaaccggctgggcaataaactgctgcccagcagctcgcccctgtccgccagtaagctggcgctgaccccgcaaagcgacaacgtctacccggttacccacgcgattacccgttacggcctcgccagcgatgagccgaacaaatggcgctactatctggactccgaagaggtgcatctgccgccgttctgggaacagtacatcagcgccgacaaccacgtggaaatcatcaaaacgcaaacgctgccgctggtgatctccctcaacggccactcgctcaccgaccatatcaacgatcgcccgctgccgccggtcgtcagcgccgaaccggcgcgcaacgcttccatccgcaaggaagaaagcgaacatgtcgagctgctgaatatccgtaaggaaacgccggaagaacatatgctcagcaggcccagcggcctgaaggaagccggcattatttccgccgccctgctgctgctgttcttcagcctgatcagccccgttctggtggtgccgtggatgattttcgtcgcggtgctgatgatcgcctgggggtgctggaacctgttccgccgcccggccgatcatgaactgaaagagattcattgcctgcgcggcacgccgaagcgctgggggctgttcggcgagtccggtcaggggcagatcagcaacatctcgctcggcaccgtcgacctggcgtatcccacgcactggcagtcgttcgtcagtgcagatctgggcaagcctaccgacgtcgatatctatctcaaccgccaggtggtgcgccaggggcgttacctgtcgctgcatgatgaaatgaagcacttcccgctgcagcactgggggaagaacgccgcgctgatcgccagctcgctgctggtgctgattttactgctgagttatatcccgctgggcctgccgctgaaactgagcgtcgcctggctgcagggtgcacagcgcaccgaagtcagcagcgtacaggcgctggaaaccatccctctgcacgtcggcgacagcctgaaaattcagggcagcggcatgtgctatgtaccgccgacgccggtcactgcctcggcggccggctttatgccgttcgactgctcgggcatttactggaacaccgccgcgccgctgccacagccggagtcggacattatcgataaggcctcggcgctgctcaccacggtcaacagccagctgcatcccagcggcagcgaccagaaaatcaacccgcagctggccagcgccatcgaaaaatccggcatgattctgctggatgatttttctgatattgtgctgaagacccgtgacctgtgcggggaaagcaacgactgcgtgcggctgaaaaacgctctggtgaaccttggcaacgccaaagactggaacagcctggtaaaacgcgcacgttccggctcgctggacggcgtcaacgtcctgctgcggccggtcagtgccgaatctctggaacggctgaccaaatcggccacctcctccttcgtgtatcaggaaacccgtcaggcggcagcggcgctgaacagcccgccgccgggcggtttcctgatctccagcgatgaaggcaaacagctggtgaaccatacgctgcagccggccgcatcgccgaatgaagacaatgcgctggagcagtggaatgcgctgaagcgaatgaccagcgttctgctgcatacgccgtttgaagcgcagggcgttatcaccagcctcagcaccgacgccaacggaactcgccatatcgcgctgcacagcgagccggatatcatcacgctgtggcgctacctcggcaccagcctgttgctgatcggagtgacgttcggcctcggttacaatacgttccgcttgatccagcgtcagcggatgaaccgccgccggctggctgacattcagagctattatgaaagctgctttaacccgcagctgacgcctgtctcactgcattccagggactaa

SEQ ID NO: 443546 - DNA, 837 bp, Serratia marcescens
atgttcccgaacacatggaatgtggggctcgacatacagagcaacagcctgcgtgcaatcgcggcacaacagcgtcgcggcggttggcagctgcggcactggtggcaacaaaacttgccgtatgccgtattgcgcgacggttatctggatcaatccgaaagtttaattccgctgttgcggcaatggcgaatccgcttgccgagacatatttccttacgcattgccttacctgtgcaacgggttttacaacatgtcataccggcgccggatgctcggctgcaggagccggcgcgcgatcgctatatcaccgcgcagggggcgaagcagttcccgctcgacagccagacgctggcgctggactaccgtccgccgcaggaacgggcggcgcaactgttgctcaccgccgcccgccagcaggaactgcagatgtggctgcgctgcctgcagcaggccgatctctcaccgcaggtggtggatatcacgccctgcgcgttgttggccatgggggaggcggccgggctgccggccgatgccgttttgctgcatcggctggacgatcactggctgtgggcggcgccgcgcagtgctgcttttgcctgcggcgtgctgcgcgagtcggagacggacggtgccgatcgggcgttagcggcggtgttggccgccaacgccggagcggagacgctgtattacagcagcgtactggacgaacccgcaccggagggggcacggctatggtcgccgcttgacgctttcccttaccggcaggcgccgctgccggcaaagccgggggcctttgtgctggccggcgggctggcgctgcgtcaggaggactgctga

SEQ ID NO: 443547 - DNA, 537 bp, Serratia marcescens
atgtatcaggtgaatttattgccctggcgccagcgggcgcagcgtcgacgcgcacgcttctggctacgtttgctgacgctgcagctggcattggcgctgacgatcgccgccgtgatgttggcaggcgtgcgccatcggcagcagcaacagcgcagcctgctgcagcaatacacgcagcagaacgaggcgttgcagcagcagtatcggctgattcaagcggcgacgggggaactaacgcggctgagtgaacgccaggcgcagcatcgccgcaatcaggcccataatctgcagtatgcgcggtttttgccgcagttggcggcggcgctgccggccaacgtatggctgctctcgctggatacacaggcgcataccctgcgggtgcgtgggctgagtcaggggtatccggcattggcccggctgacgcaccgtttgacgacgcaggcgttgttgcccggtcatcggttgacggacgtcgcgcaacgttcagacggcctgttctcttttaccctgacggcgccctggaggcatgatgagtag

SEQ ID NO: 443548 - DNA, 483 bp, Serratia marcescens
atgagtaggccgttgcctgatgggcttatcctttggctgcaacgaccagggtggcaagtgttggcctggcagtggctgctgcttggcgtcttgctggcgctacccggcatgttgctgatccgtggcgagtggcggcagtcggctcgcttaagtgatgacgtccgacagcaggcgcaacgcgtggagcagttgcagctgcagttggcatcgctgccgtcgctggcgacgttggagcaacagatagcgcagcagcgggaacggcggccggccgaaccggaactggcggaggtgctgcagcggaccggcgtcaggctgttgcgttggcagcggcaggaacagccggcgcagcaacggctgcggttacgcagcgactacttctctttgctgcagctgctggaaagtttgccgggcacggtgcgcatcagtcagttatccctggagatgcagccggaaggattgagtgcggaatggctgttgcaataa

SEQ ID NO: 443549 - DNA, 366 bp, Serratia marcescens
atggctgttgcaataaggcattgcggctggttggcgctggcgttggtgcctgcgctgtgggcggcgcagccgcgcgatcctttccaaccgcctgccgtatcctgtcccggcaccggcgcgtcgcccgaacgatggcggctgacgggcatcatcgggcaggcggatcgccgtatgggctgggtcatcacgccggaaaagcgctggttgcggctgcagctccggcaagaggtgctgaacgggcgctggcaggtgacgcatattggcgtacagacgctgaggctgcaggccgtggtgaccgatgcgctctgtccgccgacagccggcgatgtcacgctggttttggggagtaataaggaagcaatatga

SEQ ID NO: 443550 - DNA, 1212 bp, Serratia marcescens
atgaaaggatgcaaaagtttggcggggctgctgtgcgcgttatcgttcgccgttatggcggcacaacaggatgatgcgccggtttctctgacgtttcatgatgcgccgatcgttctggtgctgcaggcgctggcagattatcagcagctgaatctggtgacggcggagacggtgagcggcaccctgacgctgcggctggaagaggtgccgtggcggcaggcgctggcggtgattttgcggatggggaagctgaacatgacgctcgacggcaaggtgatgacggtctttccggccgagaagatgctgccgccgctgcagacgctgacgcagcggctgcatcacgcagaggtggcggcgatctcgcagagcttacaggcgcagcgcggcgcgctgttgagcgagcgcggcagtgtcgtggtggatcagcgtaccaacaccctgatgattcgcgacgaggcaccggcgctgaaggtgctggcagactggctgcagcagatggatcggccactggagcaggtgcagctggcggcgcatatcgttactatcggcagtgaggatttacgcgagctgggcgtcagttgggggctggcggacgaagaactgccggcgaaagcgctgcggctcgacaactttagcgttggtttgcccctggagcgcagtgcgataagcgcggggtttcacttggcgcgcatcagcggacgcatcctggatctggaactgacggcgctggaacaggaaaatgcgctggagattatcgccagcccgcgtctggtcaccgctaaccagcagaccgccagtatcaagcaagggacggaaattccgtatgaagtgtccagcggcgccagcggtgcgacgtcggttgaatttaaagaggcggtgctggggatggaggtcacgccgaagattttacctaacggccgtattgcgttgcagttgcagatcagccagaacatgcccggccgcgcgatcaagcagggggagggcgaagccctggcgatcgacaagcaggagataaaaacgcaggtcacggtaaaaaacggcgaaaccatcgttttgggcggcatattccagcggcaaagcagccgcagcgccgacaaggtgccgggattgggcgatgtaccgctgctgggttcgctgtttaaacgcagcggcacacagtataaaaagcgggaactggtgattttcatcacgccaaccctggtcaaaggttga

SEQ ID NO: 443551 - DNA, 1089 bp, Serratia marcescens
atggaaagagttaccgtaacgcttggggagcgtagctacccgattaccattgctgccggattgtttaacgatccggcttcttttatgccgctgcaggcgggcgatcaggtgatgctggtcactaaccagacgctggcgccgctgtatctggaacaggtgcgtaaggtgcttgaacagagcggcgtggtggttgatcaggtgattctgccggatggcgaacagtataaatcccttgcggtgctggaacaggtgttctcggcgttgctggccaagccccatggccgcgacaccaccctggtcgctcttggcggcggcgttatcggcgacctgaccgggtttgccgcggcgtgctaccagcgcggcgtccgttttattcaggtgccgaccacgctgctgtcgcaggtggactcctccgttggcgggaaaaccgccgtcaatcatccgctcggtaaaaacatgatcggcgcgttctatcagccggcttcggtcgtggttgatctggactgcctgaagacgttaccggcgcgcgagctttcatccggtctggcggaagtgatcaagtatgggattattcttgatgccgatttcttccgttggctggaaaataatatcgatgcgttggtcgcgctggatatgcaggcgctggcatactgcattcgtcgctgctgcgaactgaaagcgcaggtggttgccgccgatgagcgtgaaagcggcctgcgcgccctgctgaatctgggccatacctacggccacgcgattgaggcggagctgggttacggcgtctggctgcacggcgaagccgtggcggccggcatgatgatggcggcgcacactgcacgtcggctgggacagttttccgagcaggatattgcgcgcgtcagcaacttgctgcagcgtgcgggcctgccggtgaccgggccgcaggaaatggcgccggcggcgtacctgccgcatatgatgcgcgacaagaaggtgctggccggtgaactgcgcctggtgctgccgacggcgatcggcgcagcggaggttcgcagcggcgtagcgcatgatacggtattggcgtcgattgaagattgcctgccgcagtaa

SEQ ID NO: 443552 - DNA, 999 bp, Serratia marcescens
atggatgaatttaaaccggaagacgatctccgacccgatagcagcgatcgtccttcctcacggtcgcgtaaagcggcccccggcccgcgtttagccgtttcacgtcagcatctgatgatcggcatcggcatcctggtgctgttgctgctgattatcgggatcggctctgcgctgaaagcgccgaccaaacacgaatccgcgcagcagcagggcaatcagtccggttcggcgcgcgacatcaatctgtccggctcctcatcgttgaccacgacgaataatggcgttccgggcggcaccaccgatgccaatgacgccaacggcgtgaatacgacccagccgcagcagccgcaagagatcagcgtaccgccgatttccggcacgccgaccgaggcgcagccacagccgcaacagggcggcgcgcagcaacgcgtggatctgccgggcaatatgaacgatgcactctctgcgcagcaagggcaggtcgatgccgctacgcaaggcatgacgggcggcaattcaacgctgccgacggcgccggcgacggtgatgggcggttcgaatacgccgcgtgaaaccacgcgcccggtgcagagccataccgcgcagccgcataaaacgccggcgaagagcgccagcaagccgaccgcctcgacgcataaatcaagcagcagcaaagcctcagcctcctccgggaaatccgctgcggtcagcggcagcggcggcgctatccagtctgccccggccagccgcttcacgctgcagctgagcagcgcgtcccgctccgataccttgaacgcttttgccaaacagcagaagctgccgaactattccgtgtatcaaaccacgcgcaacggcaaaccgtggttcgtactggtgagcggcgtttacgcctcttccggtgaagcgaagcgcgccattgcgtcattgccggcggatgtgcaggcgaaaaaaccgtgggttcgttctgtacgtcaggtacagcaggaccagaaaaagtaa

SEQ ID NO: 443553 - DNA, 699 bp, Serratia marcescens
atggctgatttcaacgccatccgcgctctggcatttgacctggacggcacgctggttgacagtgcgccgggcctggccgcggcgatggaccaggcgctggcggagatgaacctgccgcagccgggtattgaacgggtcagcacctggatcggcaacggcgccgacgtgctggtgcagcgggcgctgcgctgggccgaggtcgaagagacgccggaacagtgccgacaactgcgtgaacgtttcgaccgctgctatgccgacacggttgccgacggcagccgcctgttcccgcaggtgcggcagacgctggcgcagctggcggagtacggcatgccgatggcgctggtgaccaacaagccgacgccgtttgtcgcgccgctgctgcgttcgctggggattgccgactacttttcgctgattatcggcggcgatgacgtaattgagaaaaagccgcatccggcgccgttgtacctggtgctcggcaagctggggctgcgggccggcgagctgctgttcgtcggcgactcgcgcaatgatattcaggcggcgcaggcggcggggtgcctgagcgtcggtctgacgtatggttataactacggtgaagcgatagccctgagccatcccgaccgcgtgttggaacgcttcgccgatctgttgcccgttcttgggcggtcatctttagagaatcaggaaatttaa

SEQ ID NO: 443554 - DNA, 1404 bp, Serratia marcescens
atggattacctacccattttctgccaactgcaacataaagcctgcctgctggtcggcggcggtgacgtcgccgagcgcaaggcgcggttgctgctggatgccggcgcacagctgacggtcaacgcaccggcgttcaacgaacagtttcagcgctgggccgaacaggggcaggtcacgctgatcggcggcgacttccgtgccgaactgctggcggaacagtggctggtgattgccgccaccgaccgggtggaggtcaacgcgctggtgtatcagtgcgccaatcagcaacgggtattttgcaacgtggtggacgatcctaaacgcgccagctttatcatgccgtcgattatcgaccgctcgccaatcatggtcgccgtttcgtccggcgggaaagcgccggtgctggcgcgtctgctgcgtgaaaaactggaggccacgctgccgcagcacctcggccgtctggcgcagtggggcggcacgctgcgccagcgcgtaaaacagcgctttgcacggcctgaagaccgccgtcgtttctgggagcggctgtttgcccacgaccggctggcgcagtcgctggccaataacgatgacgccatggtcaccagccagaccgaagcgctgttcgccagccagactcacgccggcggtgaagtggtgctggtgggcgccgggccgggcgatgccggtctgctgacgctgaaaggcctgcagcagatacagcaggccgatgtggtggtttacgaccgtctggtttctgatgacgtgatggcgctggtgcgccgcgacgccgaacgcatttttgtcggcaagcgcgccggcgatcactgtgtgccgcaggcgcagattaaccagattctgctggagcaggcgcaaagcggtaaacgcgtggtgcgtctgaaaggcggcgacccgtttatcttcggccgcggcggcgaagagctggagacgctggcggcgggcggcattccgttttccgtggtgccgggcatcaccgccgcctccggctgctcagcttacagcggtattcctctgacccaccgcgaccatgcgcaaagcgtccgtctggtcaccggccatgccaaaagcgacggcgatctcgactgggccacgctggccgccggccagcagacgctggtgttctatatgggtctgtcgcaggcgggagagattcagaggcagctgagcgcgcacggtatggccgccgatacgccggtagcactggtggaaaacggcaccagccgtcgccagcgagtgcttgaaggcgaactgcggcagttgccggcgctggcgcagcaggcggccagcccgagcctgattattgtcggcagcgtcgtcagcctgcgcagtcaactgaactggttcgccagccgcgaagccgcgccggagctggcgaaaatggcctga

SEQ ID NO: 443555 - DNA, 330 bp, Serratia marcescens
atgagcccgtggatcaccgtctgtcccgtcgccgatatcctgcccggcaccggcgtctgcgccctgattggcgaacagcaggtggcggtcttccgcccctacgccgatgaacaggtgttcgccatcagcaatatcgaccccttcgcccaggccagcgtgctgtcgcgcggcctgatcgccgaacatcagggcgagctgtgggtcgccagtccgctgaaaaaacagcgtttccgcctgcacgacggccgctgtatggaggatgaggcacattcagtggcgcacttcgccagccgggtggtcgacggcgtggtgcaggtggcggcggcataa

SEQ ID NO: 443556 - DNA, 990 bp, Serratia marcescens
atgatggtgacactggaagatgtagccgctgaagcgggcgtatcgcgcgccacggtgtcgcgcgtggtgaacggcgacagcaatgtcaaagcgcccacccgcgagaaagtggagcgggccatcgccctgctgggctatacccccaatccggcggcgcgcgcgctggcctccagccaaagcaacacgctgggcctggtgaccacctcataccgcggcggttttttcggcgcgttgatggattttgtgcagaccgaggcagagtcgcacggcaaacagctgctggtcacccaggggcgtaacagcgccgacaatgaactggcggcgatccagcggctgttcaacctgcgctgcgacggggtgatcctgcacgtccgctacctgagcgacgatcggctgcgtcaactggcggcggaacagcgccgctttgtgctgctcgatcgtctggtgccggggctggaggatcgctgtgtcaccttcgatcatccgcaggccagccgcctggcaacccaacagttgatcgacgccggccaccgccgcatcgcctgcatcagcgggccgcgccagcgcgcctccagccggctgcgcatccggggctttgaggacgccatgcgtgcagcgcgtctggaaccgttgggctgcctggaaggggcttacgacctggaaagcggctatcagtgtgccgaacgcctgctgcagcgccctatgctgcccagcgccatctattgttgtaacgaagagatggcgatcggcgctctgctggcgatcaacgaacgccgcctgcgcgtcccgcaggatatttcgctggtctgttacgacagcggcgaacgcgcgccgtttgtccgtccggcgctgaccagcgtgcacttcccgatcgtggagatggcccagcaggccgcacgcctgctgatcgatcctgcaacgccgcccgtgaccttcgcgccgcagatcatcaggcgcgattcgatcgccaaactagacacggatcactaa

SEQ ID NO: 443557 - DNA, 1311 bp, Serratia marcescens
atgaataccctgaaaatcgccattatcggcggcggcagcagctatacgccggaactggtcgaaggcctgattgaacgcattgaggagctgccggtcagcgaactggcattggtcgacgtcgaggccggccgcgagaaagtcgagattatcgccgcgctgacccaacgtatgttggcgcgacacgggctggaacgggtcacggtcagcgtgcattttgcactggacgacgccatccgcggcgcacagtttgtcctgacgcagctgcgggtcgggcaactgccggcccgcgccgccgacgaacgtctggggctgaagtatcgcctgattggccaggagaccaccggcgtcggcggttttgccaaggcgctgcgcaccattccggtgatgctggatatcgcgcgcaaggtcgaacggctggcgccggacgcctggatcatcaacttcaccaacccggccggcatcgtgaccgaagcgatctcccgctacaccaaggcgaaaattatcggcctgtgcaatgtgccgatcagcatgcaccatatgatcgccaacatgctggaagcgccgtttgacgctgtccggctgcgcttcgccgggctcaaccatatggtctgggtgcaccaggtgctgcacagcggccgggacgtcaccgccgaggtgatcgacaggctgtgcgacggcgcgacgctgaccatgaacaatatcaaggaagagccgtggccgccggcgttcctgcgcgccgtcggcgccatcccctgcccttatcaccgttacttctaccagacgcaggagatgctggcggaagagatggccgccgccgccgaacgcggcacccgcgccgaacaggtgatgcaggtggaaaaagagctgttcgagctgtatgccgacccgcatctggacagcaaaccgcagcagctcagcttccgcggcggctcgttctattcgcaggtggcgctggagctgatccgggcaattcacaacgatctcggcacgcaattagtggtaaacaccgcaaaccgcggcgctattcatggcctcgccgacgatgctgtgatagaaaccaactgtatcgtcgatgcgcagggcgcccatccgctggctttcggccggttgccggaatccatgcatgcgctgacccaacaggtgaaggcctatgagcgcctgaccatcgaggccgccgtacacggcgatcgccgcagcgcgctgctggcgctggttaccaacccgctggtcgccagcgcgaaaattgccgggccgctgctggaagacgtactgcaggccaatagcgcatacttaccgcagtttacgctctga

SEQ ID NO: 443558 - DNA, 351 bp, Serratia marcescens
gtgagtgaattagccactgacgtcagtcaggatttcgaaagcaccattatggaactgctggtgttcgccggcagcgcccgcagcagcgcgctgatggcgttgcagcaggcgcgggcgggcgactttgatgcctccgccacccatatggccgaatcaaagcaggccgtgacgcaggcgcaccagattcaaacccggctgatcggcctggacgaaggctgcggcaagctggccatcaacctgatcactgtccacgcccaggaccacctgatgaacgcgatggtgattcaggatctggcagacgacatgattgaactttatcgccggcaggcacaaacggaggcgcgcggatga

SEQ ID NO: 443559 - DNA, 1323 bp, Serratia marcescens
atgagcctgcacgcttctctgatgcgcgtcgtggaaaaccacatcgcgccactggccggtcgtatcggcagccaacgccacattattgccatccgcgacggctttatctgcgccatgccgtttttaatcgtcggcagtatcatgctgatcgtcgccaatccgccgttcgatgccgacaccacctccggctttggccgcgcctggctgagcttcgccaaaacgcactggaacaccatcaccatgccgttctttatgaccatggggctgatgagcgtgttcgtggctatcggcaccgcctacagcctggccaagcactatggtctggacgcgctgaccgccggactgctgtcgctgatggcatttctgctggcggccgcgccgcaggccgataacaaaatgtcgctcgattttctcgggggtcagggggtgttcaccgcgctgatctgcgccatctggtcggtggagctgatccgcctgctgaaaaagtacaacatcacgctgcgtctgcccgagcaggtgccgcccgctatcgcccgctcatttgagctgctgtatccggtcatcggcattttactgacggtctatccgctcagcattctgctgcagagcgagtttcacctgctgctgccggccgccattatgcacctgttccagccgctgatcggcgtcggcgataccctgcccgccattctgctgatggtgctgatcgccaacctgctgtggtttgccggtattcacggcgacaatatcgttaccggcctgctcaacccgatttttatgaccaatctggcggccaacgccgcgctggtggcgcagggcgcggccacgacccagacgctgaccgcgccgttctggtcgttctatgtctgcatcggcggctccggctccacgctggtgctggcgctgttatacctgcgcagccgctcggtccatctgcgcaccatcggcaggctgagcgtggtgccctcggtgttcaacatcaacgaaccactgttgttcggctcgcctgtagtgatgaacccaacgctgtttatcccgctgctgctggtgccgatggtcaatgccgtactggcctatttcgccctgcactgggattttgtggaaaagatggtcgccatggcgccctggaccgcaccggccccgctcggcgcgctgatctccgcttcctgggatattcgcgccgcggtactggtcttgctgctgatggcgcttgatttcgccatctggctgccgttcttcaaagtgtatgaaaaacaattaatcacgcaggaaatgcagcaggccgacgccgaacgcgctgcatctgcggcgacaggagcgtaa

SEQ ID NO: 443560 - DNA, 306 bp, Serratia marcescens
atgaaaaagatcgtactgtgctgcgccgccggcatgtccaccagcatgctggtcaaacggatgcaggctgaaacggaaaaacgggcgctgatgctggagattgtcgccgtacccaccgctgaatttgaaagcgcgctggctgatgccgacgtcgtgctgctggggccgcaggtgaaatatgaactggcgcgctttagccgcatcgccgcgccgctcggcaagcccgtcgcggtcatcgacatgatggattacggcacgctgcgcggcgataaggtgctggatcacgccctcgccctgatggcctga

SEQ ID NO: 443561 - DNA, 1221 bp, Serratia marcescens
atgacggaaaaatacgcggtgaaccgcagcacattcgataaggtgattttgccggtttatgcaccggcgcagtttgtaccggtcaaaggattgggcagccgcgtgtgggacagcgaagggaaggagtatatcgacttctccggcggcatcgccgtgaccgcgctgggtcactgccacccggcgttggtggcggcgctgcagcagcagagtgaaaccctgtggcataccagcaatgtgttcaccaatgagccggcgctgcgtctggccagcaaactgattgacgccacctttgccgatcgggtctttttcgccaactccggcgcggaggccaacgaagcggccttcaaactggcgcgccactatgccattacccgtcacagcccgtacaaaaccaaaattatcgccttctataacgccttccacgggcggacgctgtttaccgtctcggtcggcgggcaggcaaagtattctgacggcttcgggccaaaaccggccgatatcgtgcatgtgccgtacaacgatctggcggcggtcaaggcggtgatggatgacagcacttgcgcggtagtgatggagccgattcagggcgagggcggcattacgccggtggacgccgagttcctacagggcgtgcgcgcgctgtgcgataagcaccaggcgctgctggtgtttgatgaggtgcagagcggcatggggcgtaccggcaagctgttcgcctatatgcattacggcgtgacgccggatattctgaccaccgctaaagcgctgggcggcggcttcccggtcagcgcgatgctaaccagcgaggaaattgcctctgccatgcaggtcggcacgcacggcaccacctacggcggcaacccgctggcctgcgcggtggccgaggcggcgctggacgtgatcaacacgccgcaggtactggacggtatcgcgcagcgtcatgcgctctacgtggcgaaattgcagcaactggccgacaagtacggtattttcagcgatattcgcggtatggggctgttgatcggcgctgagctgagtgcggcttaccagaataaggcgcgggatttcctggccgccgccgccgcgcatggcgtgatgattctgaacgccgggcctaacgttatccgctttgcgccgtcattggtggtagagctgcaggatattgaagaggggatggcgcgttttgaacgtgcggtgcaggatgtggtgaatgcggtataa

SEQ ID NO: 443562 - DNA, 576 bp, Serratia marcescens
atgaaaggacttcaggaagtcagagagaaacgagaaggtacgctccgtctgctgacccaaggggagattaccctcgctcatgaaatgttcggcggagctatcgcttataacagggtatgggttcattgcgatagctacctccccttcggtttacaggcgcaaaattacggtatggcccctaacggtgaactgtattttagaaaaaatctttatgaagaagacttctcagaaatcgccgtgccaacagaatcaaaacatctctatatccatgaaatggttcatgtctggcagcatcaacgggggatgtgggtcagaacaagagggttatttagctgggccagcgactacacatacactctgcacgccaataagaaactcaaagattatgcaatggaacaacaggcctgcatcattgcggactattggctttggcgtaaacacggttacaacatgtggctataccagcgtcaggctgtaccgggccgtatcgtgaactatcgtggtaaggacaacagcagaaatattttccttgtatatcaaaagatggtttctcgtgcgcttgccggaaggggataa

SEQ ID NO: 443563 - DNA, 234 bp, Serratia marcescens
gtgattattccctggaaagaactggatggcggcacgctgaataacctgattgaagccttcgtactgcgcgaaggcaccgactacggcgaacatgaacgttcgctggagcagaaagtggccgacgtgcgccgccagctgcaaagcggcgaggtggtgctggtgtggtctgagctgcacgagaccgtcaatatcatgccgcgcgggcagttgcgtgccggttatcaggagaggtaa

SEQ ID NO: 443564 - DNA, 975 bp, Serratia marcescens
atgcatgaaacctttcgtcccctgagcggtgccggtaacccgcatctgcaaaccttattgccgcggctggtgcgccgccgcgtactgctgcaaccgcactggcagcggctggaactgcccgacggcgatttcgtcgatctggcctggagcgaagaccccgctagcgcaggcgataagccccgggtggtgctgttccacggcctggaaggcagcttctacagcccctacgcccatggcctgctgcacgcctggcgggaaaaaggctggctgggcgtggtgatgcactttcgcggctgcagcggcgtgcccaaccgcaaacagcgcatttatcactccggtgaaacggaagacgcgcgctttttcctgcgctggctgcgggatacccatggcgcagcgcctaccgctgcggtcggcatttccctcggcggcaatatgctggcctgctatctggcgcagcagcggcgggagagcctgctggacgccgccgtggtggtcagcgcgccgctgatgctggagccttgctcgttacgcatggaacaggggttctcgcgcgtttatcagcattacctgctcggccagctcaagcagaacgccacccgcaagctgctgcgcgacccggcgtcactgccgctgaagctgccgcagctcaaagggctgcgccgcatgcgcgactttgacgacgccattaccgcacgcattcacggcttccgcgacgccaccgactactatcggcgctgcagcgcgctgccgctgctgcccgagattcaaacgccgctgctgatcatccacgccaaagacgatccgtttatgaccgacgcggtgatccccgatctgagcgctctgccgcccaacatcgagtatcagctgaccgagcgcggcggccacgtcggctttgtcggcggcacgctgcacaaaccgcaaatgtggctggaacagcggattcccgcctggcttaccccttatctggataaataa

SEQ ID NO: 443565 - DNA, 783 bp, Serratia marcescens
atgagcgaaaactattttcacgttgacgcctttaccggcgccgggctgcgcggtaacccggcgggggtgtatctgttgaaacagccattggagacggcgcagctgcaggcgatcgccaatgagctgaatctgccggagaccagctttgtctgggacgacggcgatgtgctgagcatccgctggtttacgccgcagcgcgaggtggacttgtgcggtcacggcacgctggcggcggcgcacgtgatgtttaacgtggtgaatccggggctgaacgatgtgcgtttccgctccgccagcggtgaactgtacgtcagacgcgacagtgaagacggcgaacgactgattctggattttcccagccgggcgccgcagcgcattgcgccggtggaagcggtggcgcagttgctgggcgttacgccacaggagagctggcaggctacggcgctgctgatggtgctggagaatgaggcgcaggtgagggcgttgcagccggatatcccggcgctgattgccgccgccggccgggcggtgatcgtcaccgcgccgggtgaggaggtggattttgtttcccgttacttcacgctggatggcggagaagacccggtgaccggctccgcccactgtacgctgatgccgtattgggtcgcgcgtctgggccgtcatacgctgcaggcccggcagatttccgcccgcggcggcgagctgttttgccggcagcagggtgaacgcaccctgctcggcggctacgcccggatctttttacgtggggaagttctggagtga

SEQ ID NO: 443566 - DNA, 1038 bp, Serratia marcescens
atgaccctgattaacgtttccggtttccgcacgcgctacgaaaacggccgctggtataaattcggcatacagtttgctctgacgatcgtcgcaggcttttatctacaaattgccaccgcgataggctcgcctgacctcgcggcccttcaggccggcatgacccccgaggacgttgagcaaaacagcgcctcccttctctgttggctaagcttggctctgcttttccgcggattcctgtacgatcaacgcagcctggcctgggggctgctggccggtcttgcctggatgttcatcggggatactgtcgctgcgggcgtttgggcctcatccatgtttttcatgctgcatctgctatcgcaacgcagcgcactgggctggatacacctgtggtacctgctactctggctgctgatgctgtttgattacaatacgacgtatgaaggcattcatcactacggctatctcagcctcttcaccgcgctgtttctgttttccgcctaccgcagcctgccgctgtcgaaaaggattgccaaaacgatcgacgacgcggccaaccctgaaccacgtcgggctgccagcgctgagaataacgcagccgcagcaaacgccggcaatgaagcaaaaacaggagaagtgagctggctcaacacggagggggagcaaatcattgccacattggagaactaccccacgctagccaaaccgatgcaaaccgagctggacggcatcatcaaatatgcccgcctgatacaacagtgcatactgctggaccctaatgacgttaaaccgggcagcgagttcctcgagcgctacctgccctacgcgcagaaattactggatgagggctataaactgtccagccagttggatattcacggcaccgccaacagtatcaacaatcaggggcttgaaagcctgcgctcgctacactcggccttcaagcaaaaacacgctcagctgctggaaaacgacacgctggcgtataaatctgacctgaacctgctggacagcctgctcaaaaccgacggtctgaaataa

SEQ ID NO: 443567 - DNA, 1152 bp, Serratia marcescens
atggaaaatacccctgatttatccatacctacgcagaccggcaaccctatttctgcgtcacagccttcagatttaccccaacttgctgacgaacagctgactttacaggagcagggcgaagtccagcgcctggtcgagcagatcgatatcaccgatccggtattgtccatctcctatgcggccaaaaccatgaacagtatttcacgcttttccgaagcgttgatgcaagaggtcagagccaaagatgccggcgcgataggcgaacagctcaccgacctgctgggcaaggtgaaaaccgtcgatctgaacgcgtttggtgaaaagagaagcctgctcgcctccctgccgctgctggggcatttcttcaataaaatcgagcgcaccatggcggaatatcagacgctggcgcaacaggtagacaaaatcggcaaaaagctcgaacagacgatggtcgagctgctgcgtaatatcgccacgctggaacagctgtttacccacaaccgcgagttcttccaacagattaacctgcacatcatcgccggtaagcagaagctggcgctgatacaaaacggagaactgcgtcaggcgcaagaaaaagcggcccattccagcgacgccatggatgcccagtacgtgcgcgatctggtggaaggcgttcagcgttttgaacgtcggctgcatgatctgatgatgtcgcgtaccattgccgtccagaccgcaccacagattcgcctgatgcaaagcaacagccaatcgctggcagaaaaaattcaaagcagcattctcaccaccatcccgatctggaaaagccaaatcgtgctggcgctgtcgctcaattcccagcggcaggcggccaaactgcaaaaagacgtggcggataccaccaacgacatgctgcgccgcaacgccgaactgctgcaaacgggcacgctggaaaccgcccgcgaagtagaacgctctctggtggatgtggaaacgctgcgcgacgtgcagggccgtttactcagcaccattgaggacacagtgaccatagccagcgaagcacggctacgccgcgccgaggtggaaaaagagctggcgggcatggagcaggagctgcgcagccgtctcgcggccattgcagcaaaccagcgtccggcggccaacgcctaa

SEQ ID NO: 443568 - DNA, 996 bp, Serratia marcescens
atggcgggcaaactcttttctctacgcggcgcggcgttgctggcgttgtcgctgacggcggccagcgcacaggcggtcgacgtgaccgtcgcctaccaaacctcagcggagcccgccaaaatagcgcaggcggaaaacagttttgccaaacagtccggcgccaaggtcgactggcgtaagtttgacagcggttccggcgtgctgcgcgcgctggcctccggcgatgtgcaaatcggtaatatcggctccagcccgctggcggtggccgccagccaaaaactgccgattgaggtgtttctgatcgcctcgcagctgggcagctcggaagcgctggtggtgaagaacaccatcacgtcgcctaaagatctgatcggcaaacgcattgcggtgccgtttatctcaaccacccattacagcctgctggcctcgctgaagcactggggcatcaagcccgaacaggtaaaaatcctcaatctgcagccgccggccattgccgccgcctggcagcgcggtgatatcgacggcgcatacgtctgggcgccggtggtgaacgagctggcgaaagaaggcaaggtgctggccgattcggcgcaggtgggcgagtggggcgcgccgacgctggacgtctgggtggtgcgtaaggatttcgcccagcagcatccggaggtggtgaccgcgtttgccgccagttcgctggcggcgcaaaaggcctacctgaacgatcctgccgcctggctgggagataacaatcacctcgctacgctggcgcggctgagcggggtgccggaagcgcaggtgccggcattggtgcagggcaaccgctatctgccggcggcggagcaggtgagccaactgggccagccggtcagcaaggcgattcacgataccgcggagttcctgaaacagcagggcaaaattccgcaggttgatgcggattacagcgcctatgtcaccgaccgtttcgtcaagcagctgcaggctgcgccacagccgtaa

SEQ ID NO: 443569 - DNA, 831 bp, Serratia marcescens
atgagcctgcactccaccttaaaagccaccgcgacgtcggcatcgccgcgccgttttacactgccgcgccgcgtctggctcagcgcttcaacgctgctggcactactggcgctgtggtgggcggtgacggcgctggggcttatcagcccgctgtttctgccggcgccgcagcaggtgctgcgccagttgatcaccatcgccagcccgcaagggtttatggacgccacgctgtggcagcatctggccgccagtctggggcgcattctgctggcgttgttggcggcggtgctgatcggtgttccggtcggtattgcgatggggctgaacgatacggtgcgcggtattctcgacccgttgattgaaatctaccgtccggtgccgccgctggcctatttgccgctgatggtgatttggttcggcattggcgaaacgtcgaaaatcctgctgatttacctggcgattttcgccccggtcgcgctatcgaccgtggccggcgtgcgcagcgtggcgcaggtgcgggtgcgggcggctcgcgcactgggcgccaaccgttggcaggtgctgcgttttgtggtgctgccgagcgcgttgccggaaattctgaccggcatccgcatcgggctgggcgtaggctggtcgacgctggtggcggcggagctgatcgccgcaacgcgcggtttaggttttatggtgcaatccgccggtgaatttctggcgaccgatgtggtgctggccggcatcggcgtgattgcgataattgcattcggcttagagctgggactgcgtgccctgcagcgccgtctgaccccgtggcatggagtacaacaatga

SEQ ID NO: 443570 - DNA, 720 bp, Serratia marcescens
atgtccacggaaaccgactatctacaacactacgacgccagccgtttcccttccccgattgttacagtggacagcgtgctgtttaccgttcatcagggagagctgtgcgtcctgatggtcaaacgcgccaaccacccgtatcagggattatggggattgccgggcggttttatcgatctgcagcgcgatgcttccaccggcgccaccgcccagcgcaaactgatggagaaaaccggcgtcgccccgccgtatctggcgcagttggagagcttttccggccctgggcgcgacccgcgcggctggagcctgaccacggtctattttgccctgatcgcccacgccgactgccaggcccatattgccgacgtggatgacgccgcctggctgccgctgacaacgctgcgtaaacagacgttggcgttcgaccatctggcgattatcgatgcggcgctgcagcgcctgcgccagaaaaccgcctactccatgctgccggtctactgcctgccggcggagtttacgctgtcgcaattacaggaagtgatggaaatcattttggcgcagccggtacagcgcaagagcctgatgcggcgctttgacgccgcggagatgtttgaggataccggcaagatgatggcgacaggcgcgcgcaaggcgcgcctgtatcgtaaaaaggcgggggtcgatatgcacaatttttcccgcaatctgatggtggattaa

SEQ ID NO: 443571 - DNA, 861 bp, Serratia marcescens
atgcatacaacactgcagttatttctggatggagaggaagttcaggtcatcagcggtcagtttcctgatggcgccgtgtatgcccgcttcgctgtgccggcggcggcgggcgtcgcgcaaatgcgtatccgggccgccgcgatgcgcagcatggatgattttatggcgctggcgcagttggtggatgcggtgcgtcaccactaccccatccgcgagagcctgcttgagctgccttatctgccgttcgcccgtcaggatcgccatatgggcgccggcgacagctttgcgctgaaggtgttcggccaactgctgaatacgctgaagtttgatcgggtgacggtgctggacccgcacagcgacgtggcggcggcggcgattgaccgtttccacgcggttgctcagcagcactgtatgcagcacagcgccaggctgacgcagctgctgtcgcagcaggttttactgcctatcgcgccggacgccggggcgctgaaaaaaatccacgccgttgcagaacattttgcgcttaacgagtacggcatcatgaccaaacaccgtgacgtgcagagcggccaactgaccgggtttgcgctgctggccggtgacgtgcgcggcagagacgtgctgatcgtggacgatttgtgcgatgccggcggcaccttcatcggcgcggcgcaggtgctgcgccagcacggcgcgcgcagcgtcagcctgtacgtcacgcacggcatcttttccaaaggcgttgagcatctgctggctcagggcatcaacaacatttataccaccacctcatatgcgccggcggatatcgccggagcccgcgttgaactgattgatattgcgcgtatctacgcccattaa

SEQ ID NO: 443572 - DNA, 1497 bp, Serratia marcescens
atgctgactaaccctattctggcgattgacgggtataaagtctcccaccgtgagcagtacccgcaggggacgacgcgggtctattccaactttacgccgcgcagcgatcgcttcttcagttcgccgctgcctgacgggcaactggtattctttggcctgcagggattcctgcagtggtttatggtggatttgttcaaccagcagtttttcgcccagccggaagagcaggtgatcggggaatataaagcgctgatggacagttacatcggccaggatcgggtgtccgtcgagcatatccgtgcgctgcatcggttgggctatctgccgctgcatatcaaagggctagatgaaggcagcaaggtcaatatgaaggtgccggtgctgaccatcaccaacacgcgggatgagttcttctggctggtgaactacctggagacggtcatttccgcagagctgtggaagtcctccaccaacgccaccatcgcccatcactaccgcaaaatttgccagatgtgggcggcgcgcacctgtgacgatacggcgcacctggatttccagtgccacgacttctcattccgcggtatgtcgggcatgcatgatgtggcgcaggccggcgccggccatctgctcagttttaaaggcaccgataatatcccgtccattctgtacgcgcagcgctactatccgaccgctgccgactactttgtggccggtagcatcccggcgaccgagcacagcgtgatgtgcatgggggagcaggatgcggaaattgaaaccttccgccgcctgattgaagaactgtacccgcaagggctggtgtccatcgtgtcggatacctgggattactggcgggtgctgaccgaattcacccgcgagctgaaagcaaaaatcatggcgcgcgacggccgggtggtgtttcgtccggacagcggcgacccggtcgccatcctgtgcggcagcggtgcggatgacgatcgccgcccgacgcgcagcgcggaagaaaaaggctcggtggaagtgctgtgggagatttttggcggtacggtaaacagtaagggttacaaggtgctggatcctcacgtcgggctgatttacggcgactccattacgctggatcgcgcgcaagaaattctgcgtcgtctggaggctaaagggttcgccagttccaacgtggtgtttggcgtgggttcttttacctatcaataccatacccgcgacaccttcggctttgcgatgaaggcgacctatggcgaggtgcagggcgtcggtcggccgattttcaagcagccgaaaaccgacggcggtttgaagcagtcggcgcgcggcctgctgcgggtgatcagggatgagcatggcgactaccaactgcgggataaccaaagctggcagcaggagcagcagggggaactgaaaacccgtttcctggacggtaagctgttccaccaggagtcgttggagcagatccgccagcggctgagtgcgacgctggcggagtga

SEQ ID NO: 443573 - DNA, 228 bp, Serratia marcescens
atgcacaacgccggcaatgaaagcctgttacaacggctggaagagttggaaagccgtcaggcttttcaggaagtcaccatcgaagaattgaaccagacggttgttcaacagcagttggagctgctgaaaatgcgtgagcacctgcatctgctcaccgataaactgcgcgccgcgcagccttccatgatcgcctcgcaatcggaagaaacgccgcctccccactattaa

SEQ ID NO: 443574 - DNA, 390 bp, Serratia marcescens
atgctgaattactgcctgttagtcaccgggccggcctacggtacgcaacaggccagcagcgcctatcagttcgcgctggcgctgattgaggccggacaccggctgaacagcgtgtttttctaccgcgaaggggtgctgaatgccaaccggctgacgtcgccggccagtgatgagttcgatctggtgcgcgcctgggccgagctggcgcagcagcataacgtcgtgctgaacgtctgcgtggcggcggcgttgcgccgtggcgttaccgacgaacatgaggcgcgtgagcagggactggcggcggcgaatctgcagcctggctttacgctcagcgggctgggcgcgctggcggaagccgcgcttggctgcgaccgcatggtacagttttaa

SEQ ID NO: 443575 - DNA, 360 bp, Serratia marcescens
atgaaacgagtggcctttgtttttacccaggccccgcacggtagtgcctccgggcgggaagggcttgatgccttgctcgccacgtcggcgctgagcgaagatctgggcgtgttttttatcggcgacggcgtgctgcagctgctgccgggccagcagccggaaacggtgctggggcgcaactacatcgcaacgttcggcgttttgccgttgtatgacgttgagcaatgttatctgtgtgaggcgtcactgcaggcgcgcggtctggcacaggtggaaaattgggtgctggaggctgaagtgctggcgcctgaagccctgcgacaaaaactggccgccttcgacgtggtgatgactttttag

SEQ ID NO: 443576 - DNA, 285 bp, Serratia marcescens
atgctgtttaccctgagccgttcccctgcgcagtgcgatctgccgacgctgctgcgtcaggcgtcgcccggcgatgcgctgctgctgctgcaggacggcgtgctggccgcgctggccggcgctcaccttgatttactgcttgccgcccccatctctctttatgcgctgcgcaatgacctggaggcgcgggggctgggtggtcatatttcacacaaagtcaccgtcattgactataatcacttcgttgaattaaccacaatgcatcgcagccaaatggcgtggtaa

SEQ ID NO: 443577 - DNA, 690 bp, Serratia marcescens
atgaaaaaaattgaaccggaagaatactttacgggccaacagctggttttggccaaggccattgaggcgggcgacctgaacagggtaaaacaactggcgccggaaacggatctgaatactccgggcgaacaggacttaaccatactgtactttgccctgaatgaaacttactacaacaataaccccaagccacgtttgcaaattgtgaccgcgctggttaaagcaggggctgatcctttgcaaccactccccagagggatggccagcccggcggaaatggtctcaatgggggataaggatatctggttaaaggcactattggatggtggtttggatccgaatgccagagaccgaaatcataatgaagcgattatttataatacgttacaagccaagaatacggatacgctagcattattgatcatgcgcggggttgatgtcgatgcgcgagactctttaggtgaaacaccgttaatggcagcctttctcagcaatagctttgaacatgtaaattacctgctggatcacggtgcggatcctaatccggtaaataaactgggctgggtatttgcgtcgctggtgcaagacgagatcaaggacagccggccggaaacggaataccaccagaactgtctgcggctgcgcgacaagatgattacgctgggggtgaagtggccgccggaggcgtaa

SEQ ID NO: 443578 - DNA, 471 bp, Serratia marcescens
atgggcataagtttgctgtgggcgctggtgcaggacatgctgttggccgccgtaccggcgctggggttcgcgatggtgtttaacgtgccgcgccgcgcgctgcgttattgtgcgctgctggggggcgtcgggcacggcgcgcgcatgttgctgatgtggctggggatgaatattgagtgggcctcttttttggcggcgatgctgatcggcatgctcggcatctcctggtcgcgttggctgctggcgcatcccaaagtctttaccgtggcggcggttattccgatgttccccggcattccggcctataccgcgatgatctcggtggtggagctgtctcatcagggctacagcgaggtgctgatgggggtagttgtcagccattttcttaaggcctgctttatcgtcggggcgctgtcgattggcctgtcgctaccggggctgtggttatatcgtaaacggcccggcgtttag

SEQ ID NO: 443579 - DNA, 993 bp, Serratia marcescens
atgcacaataaacgtatcgtgataacccccggcgaacctgccggggtggggccggatttggtcgtagcactggcgcaacaggcgtggcccgttgaactggttgtctgcgccgatccggccctgttgattgaacgcgcgcggcagctacggctgccgctgacgttacgcgactatcagccggacgcgccggcgcagccgcaggctgccgcgacgctgacggtgctgccggttacgctggcagagacgacggtctgcggccagctcaacgtcgccaacagcgcttatgtggtggataccctggcgcgcgcctgcgacggctgcctgaacggcgaattcgccgcgctgattaccgggccggtacacaagggcgtcatcaacgacgccggcgtgccgttcagcggccacacagaattttttgccgatcgcagccactgcgatcgggtggtgatgatgctggcgaccgaagagctgcgcgtcgcactggcgaccacccacctgccgctgctggcggtgccgggcgccatcagcgagcagagcctgcacgaagtcatcaccattctcgaccatgatttaaaaaccaaattcggcatcgcgcagccgcacatctacgtctgcgggctgaacccgcatgcgggagaaggcggccatatgggccgtgaagagctggacgtcattattccagcgcttgaaacgctgcgcgaacgcggtattaacctgatcgggccgttaccggccgatacgctgttccagcccaaatatctgcaacatgccgatgcggtgctggcgatgtatcacgatcaggggctgccggtgctaaaataccaagggtttggccgcgcggtgaatatcaccctcggcctgccgtttattcgtacctcggtggatcacggcaccgcgctggaactggccggcaccggtaccgccgatgtgggcagttttaaaaccgccttaaatctcgccattaaaatgataaataactgtaatgaacaatag

SEQ ID NO: 443580 - DNA, 2364 bp, Serratia marcescens
atgaaaaaaagtttcccaacactgctggccacaatgatttggacggcactttacagtcagcacgcgctggccgatctcgccgagcagtgcatgctcggcgtaccgacttatgataaaccgcttgtcagcggcgatcccaattccctgccggtcaccatcaactctgatgattcccgtgccgatcaaggcaacgccgtcttcagcggcaacgtcaagatcgaacagggcaacagcacgctgaccgccaaacaggtagaacttaaccaggtgcaggccgccggtaagaacgatccggtacgcaccgtcaccgccaccggcgacgtgcactatgacgataaccagatcaaactgaaagggccgaaggcctggtcaaacctgaataccaaagacaccgacgtctatcagggcgactatcagatggtcggccgtcaggggcgcggcgacgcagacaaaatgaagatgcgcggccagaaccgttacaccattctggaaaacggctctttcacctcctgtctgccgggcgacaacagctggagcgtggtcggttccgaagtcattcacgaccgcgaagaacaggtggcggaaatctggaacgcgcgctttaaaatcgccggcgttccggtgttctacagcccgtatctgcagctgccggtgggcgacaagcgccgctccggcttcctgatcccgaatgcgaaatacggcagtaacaacggcttcgaatttatgctgccgtattactggaatattgcgcctaacttcgacgccaccatcacgccgcactatatgaccaaacgcggcctgcagtggcagaacgaattccgctacctgacccagccgggcatgggcaccatcgaactggactggctgccgagcgataacgagtacaacaaggatcatccgcaggatgacgacacccgttggctgttctactggaaccacaacggcgtgatggatcaggtgtggcgtttcaacgttgactacaccaaagtcagcgactcgcagtatttcaacgatctggactcccaatacggttccaccaccgacggctacgccacgcagaaattcagcgccggttacgccgatgaaaacttcgacgccaccatcgcttccaagcagttccagatctatgacgacgtcaaccgtaccagcaccgagtcctacaaggtgctgccgcagatcgatctgaactactacaaaaacgatctggggccgttcgatctgcgcgtgtacggtcaggcggccaagttcgtcaatatcaacccgtacagcccggacgccacccgtctgcacctggagccgacgctgagcctgccgatgaccaacggctggggctcgctgaacagcgaagtcaaactgctggcgacccactatcagcaggatatcccggacggcttcaaggccaactataaaagccgtaacggccgcgacgcgccggaactggacgactccgtcaaccgtgtaatgccgcagttcaaggtcgacggtaaaatggtgttcgaccgcaatatggactgggcgcaaggctatacccagacgctggagccgcgcatgcagtacctgtatgtgccataccgcgaccagagcaacatctattcctacgactcaacgctgctgcagaccgactactccggcctgttccgcgaccgtagctacagcggcctggaccgtatcgcttcgcagaaccgtctggcgaccggtttgacctcgcgcatttatgatgacgcgctggttgaacgtttcaacgtttccgtgggtcaaatctattacttcagccgttcgcgtaccggagacagcaactccgattacgacaagaatgatgacaccggcagcgtggtatgggccggcgacacctattggaagatcgacgatcgctggggcctgcgcggcggcgtacagtacgatacgcgcctcgacagcgtagccttgggcgacgcggtgctggagtaccgtcaggacggcgaacgcatggtgcagctgaactaccgctacgccagcccggaatatattcaggccactctgccgcaggtcaccagccctggctatcaggacggtatctcgcaggtgggcgtcaccgccagctggccgattgccgaccgttgggccgtggttggcgcgtattactatgatacccgtgcgcaacagtccgccgatcagttggtcggcctgcgttataacacctgttgctgggcggttaacatcggttatgagcgcaagatcaccgactgggatcgcggcaaccagaccagcaaatatgacaacaaagtttcattcaacatcgaacttcgcggtctgagcagcgaccacagccttggcaccagcgaaatgctgcgctcaggcattctgccttaccagcgcgcgttctga

SEQ ID NO: 443581 - DNA, 2415 bp, Serratia marcescens
atgccttcctattcggctacgcagataaataccgccttgaacgataacgccgcatccccgatgcagggtttcctgctcacccgccactggcgcgatacgccagccggcaccgaagtcgaattctggctggcgacggatcgcggcccgcaacggctgcgcctgccgccgcagacctcggtagcgtttattcccgcagagcagcgccagcgggcggaactgctgctgcgcggcgaacggcactgggagctgaaagcgttgccgctgcaggattttcacgcccgaccggtgctggggctgtattgccgccagcatcgtcagctgatcaagctggaaaaagtgctgaaggagaacggcgtcagcgtctatgaggccgatatccgtccgccggagcgctatctgatggagcgctttatcaccgcgccggtctggttcagcgggcgctccggcggcgacggcgtatggcttaacggccagatgaagccggcgccggactaccgtccgcagctgaaactggcatcgctggatattgagaccaccgcccacggcgaactgtactccattgcgctggaaggctgcggccagcggcaggtatatatgctcgggccgcccaacggcggcagcgagccgctggatttcgcgctggagtactgcaccagccggccgcagctgctggagcgcctgaaccagtggctggagcgccacgacccggatgccatcatcggctggaacctgatccagtttgatttgcgcgtgctgcaaaaacacgccgaacgctaccagatcccgctgcttttcggccgcggcggcagcccgctggagtggcgcgagcacggctttaaacaaaaccacttcttttgctccgccgccggccggctgattatcgacggcattgaggcgctgaagtccgccacctggaacttcccctccttcagtctggaatacgtctcccagaccctgctgggggaaggcaagtccatcgataatccctatcagcgcatggcggaaatcgaccggcagtttgccgaagataaaccggcgctggcgcgctataacctgaaagactgcgagctggtgacgcggattttcgccgccaccgaactgctgcccttcttactggagcgcgccaccgtcaccgggctggcggcggaccgcagcggcggttcggtagcggccttcagccatctgtatatgccgcgcatgcatcgccagggctatgtggcacccaacctcggcgaactgccggaagagcacagccccggcggcttcgtgatggattcacagcccggcctgtatgactcggtgctggtgctggattacaaaagcctgtacccctcgatcatccgtactttcctgattgatccggtcgggctggtggagggcatgcagcacccggacgatgccgattcggtgcccggctttcgcaacgcgcgcttctcacgtagcaaacacagcctgccggcgatcgtcagccagatctggcaggggcgcgaacaggcgaaacaacagcacaacaagccgctgtcgcaggcgttgaaaatcattatgaacgccttctacggcgtgcttggcgccagcggctgccgcttcttcgatccccggctggcgtcatcgatcaccctgcgtggccatgagatcatgcggcaaacccgggaactgatcgaagcccgcggctatcaggtaatttacggcgataccgactccaccttcgtctggctgaaacaggcgcacgacgaacagcaggcgacgcagatcggccgcgagctggtgcaatatgtcaatcagtggtggcaacagcatctgcagcagaactaccggctgaccagcgcgctggagctggagtttgaaacccactacagccgttttctgatgcccaccatccgcggcgcggaacagggcagtaaaaaacgctatgccggcctgatcgccaggcccggcgccgaaccgcagatggtgtataaagggctggaaacggtgcgcaccgactggacgccgctggcgcagcagttccagcagcagctgtatcagcgtattttcctgcgccagccgtatcaggactttgtgcgcgactacgtcgccaaaacgctggccggcgaatttgacgatcagctggtataccgcaaacgcctgcggcgccagttggacgactatcagcgcaacgtgccgccgcacgtccgggcggcgcgcatcgccgacgactataaccgccggcagggccgcccgctgcagtaccaaaacggcggctggatcagctatgtgatcaccctggccgggccggagccgctggaaacgcaaagttcgccgctcgactaccaacattacctggagcgccagctgcaaccggtggcagacgctatacttcccttcctgcacgatgattttactaccctggttaccgggcagatgggattgttttga

SEQ ID NO: 443582 - DNA, 768 bp, Serratia marcescens
atggaagcctatttacaacatttgctcgctcaatcattggctttcactctgatggtcatttttttggtgaccttcctggaatcgctggcgctggtggggttgctgctgccgggcaccgtgatgatggccagcgttggcgcactgatcggcagcggccaggtggatctgtatctggcctgggcggccggcggcatcggctgtttcctcggcgattggatctcctattttatcggccgggcgtttaaagagccgctgcaccgctggtcgttcctgcagaagcataaggcgatgcttgaccgcaccgaacatgcgctgcatcagcacagcatctttaccgtgctgctggggcgtttcgtcgggccgacgcggccgctggtaccgatggtggccggcatgctcgatttaccgccgtataaatttgcgttgccgaatattatcggctgcattacctggccgccggtctacttcttccccggcattctggcgggggtggcgattgatattccgtcctcggacaacagcgcgctgtttaagtggctgctgtttggttcgatagtcctgctgtggctggccgcctggctcagctggcgctggtggcgggaagacaaacgcggcagcgaccgactgagccgctggctgacgccgctgcggctgcgtatggcctgcgtggtcggctggatcgccgccgccgcctgctgttacctgatgagccagcagccgctgatgccggtataccgccatctgctgtggcaggtgctggccgggtaa

SEQ ID NO: 443583 - DNA, 1695 bp, Serratia marcescens
atggcaattacgggcacgcctcacgcaggcaaacgctttaccggcgcgcagctgatcgttcatctgctggagcgtcagggcatcaccaccgtcgccggcattcccggcggcgctgcgctgccgctgtatgacgcgttaagccaaagcgccaccatccgtcacgtgctggcgcgtcacgaacagggcgccggttttatggcgcagggcatggcgcgcgccaacggtaaagcggcggtctgcatcgcctccagcggcccgggcgccaccaacctggtcaccgccatcgccgacgccaagctcgactccattccgctggtgtgcattaccggccaggtgccctcctcaatgatcggcaccgacgcctttcaggaagtggacacctacggcatgtccatcccgatcaccaaacacaaccatctggtacgcgacatccgtgagctgccgcaggtaatctgcgatgcgttccgcattgccgaatccggccgccccggcccggtgtggatcgacgtgccgaaggatattcaaaccgccgagattgagctggaccagttgccgccgctggcgcagccggacgccgcgccggccttcaaccccgccgacgtggcccgggcggcggcgatgatcaatcaggcccagcggccgattctctatctgggcggcggcattatctgcgccgacgcgcaccgcgccgcgctgcagctggccgagcgcgccagcctgccgaccaccatgacgctgatggcgctgggcgccatgccggtcgaccatccgttatcgctggggatgctgggcatgcacgccgcgcgcagcaccaactttatcctgcaggaggccgatctgctggtggtgctgggcgcgcgctttgacgaccgcgctatcggcaaaaccgagcagttctgcccgaacgccaaaatcatccacgtagatatcgaccgggcggagctgggcaaggtaaaacagccgcaggtggcgatccacggcgatgtcggacaggtgctgcaacagctgctgccgcagatcgacgcccagccgcgcagcgcctggctgaataccgtcaacgacctcaagcgcgaatttccgttcagcatgccgcacgccgacgaaccgctcagccattacgggctggtgctggccgccgcgcgctgcgtggatgaaaacgccatcgtcaccaccgacgtcggccagcatcagatgtgggtggcgcaggcctatccgctgcgccgtccgcgccagtggctgacctccggcgggctgggcaccatgggcttcggtctgccggcggcgatcggcgcggcgctggccgaaccgcagcgtaaagtgctgtgtttttccggcgacggcagcctgatgatgaacattcaggagatggccaccgcggccgagcaccatctggacgtcaaaatcatcctgatgaacaaccaggcattgggactggtgcatcagcagcaaaccctgttctatcagcagcgcatctttgccgccgcttatccgcagcgtaccgatttcctgaccatcgccgccggcttcgggctggacacctgcgacctgaacgccgccgccgatccgcaggccgcattggcggaggccattgcgcgccccggcccgtgcctgatccacgcgctgatcgacactaacgaaaaagtcttcccgatggtgccgccgggcgccgccaacatcgacatgattggagaataa

SEQ ID NO: 443584 - DNA, 705 bp, Serratia marcescens
atgatagaacttaaccaactgacctacctgtatgagcacctgccgatgcgctttgatctccgcatccgcccgggcgaacgcgtggcggtgctcgggccgagcggcgcggggaaaagcaccctgctcagcctgattgccggctttctgagcgcggacggcggcagcctgcgtcttgacggcgacgaccatacccgcacgccgccggcgcagcggccggtgtcgatgctgtttcaggaaaacaatctgttcgcccacctgacggtggaacaaaacatcgggctggggctggatcccggtctcaggctgaacgccgggcaaaaacggcagctggcgcagatagccgatcaggtcggcctgacggaacacctgccgcgcctgccgtcgcagctctccggcggccagcgccagcgcgccgcgctggcccgctgtctgatccgccagcggccgattctgctgctggacgaacctttctctgcgctcgacccggcgctgcgcggcgagatgctgcaattgctggatacggtgtgccgacagcgcgaactgacgctgctgatggtgtcgcacaacctggacgacgccgcgcgcatcgccccgcgcacgctgctggtggtggacggccgcatctattatgacggcccgacgcagccgctgctggacggcagcgcccccgcagcgcatatcttgggcatcaacggaaaagcgtga

SEQ ID NO: 443585 - DNA, 1608 bp, Serratia marcescens
atggcaaagcgccgtcagccgttaatcccccactggctgtggccggggctgctggccgccggcctgattctgctggtggccgcgctggccttcggttcgctgctgaaccatgcgccgcacagcgacgccctgtcgatatggcaggatgactacctgtggcacgtggtgcgcttcaccttctggcaggcgctgctgtcggcgctgatctcggtgctgcccgccatcctgctggcgcgggcgctgtaccgccgccgcttccccggccgcgcgttgctgctgcgtttgtgcgccatgacgctggtgctgccggtgctggtggcggtgttcggcctgctcagcgtctacggccggcagggctggctggcggcgctgtgcgcctggctggggctcgactatcagttctcgccttacggcctgcaggggattctgctggcgcatatgttcttcaacctgccgctggcgacccgcctgctgctgcaggcgctggaaaacgtgccggttgaacagcgccagcttgccgcacagctgggcatgaacggctggcagcagttccgctttgtcgaatggccggcgctgcgccggcagatcctgccgggcggcgcgctgatcttcatgctctgcttcgccagtttcgccaccgtactctcgctgggcggcgggccgcaggccaccaccatcgagctggccatctaccaggcgctgagctacgactatgaccttagccacgccgcgctgctggcgctgatccagctggcctgctgtctggggctggtgatgctcagccagcgtctcagccaggcgctgccggtgggcgcaacgcaggcgatgcaatggcgcaacccgcaggacagccgccgccggcgtctgaccgatgcgctactgatcgtcgccgctctgctattactgctgccgccgctgctggcggtggtggtcgacggcgccaatcaggcaatcgccagcgtgctgcagcagccggcgctgtggcaggcgctgttcacctcgttgcgcatcgccgtcggcgccggcctgctatgtctgctgctgaccatgatgctgttgtggagcagtcgcgagctgaaactgcgccaacagcgacgctggggccaggcgctggaactgagcggcatgctgattctggcgatgcccggcatcgtgctggctaccggctttttcctgctgctgaacgacaccgtcgggctgccgcagtcgccctatgcgctggtgatcctgaccaacgcgctgatggcggtgccctatgcgctgaaagtgctggaaaacccgatgcgcgacgtggcggagcgctacaacccgctgtgcctgtcgctgggcatgcagggctggcggcggctgcgctggatcgaactgcgcgccctgcgtcgcccgctggcacaggcgctggccttcgcctgcgtgctgtcgatcggcgatttcggcgtggtggcgctgttcggcaacgagcagttccgcaccctgccgttctatctttaccagcagatcggcgcctatcgcagcaatgacggtgcggtcaccgccctgttattgttattactgtgcttcctgctttttaccctgattgaacgtttaccgggccgcgatgatagaacttaa

SEQ ID NO: 443586 - DNA, 987 bp, Serratia marcescens
gtgatcaagaaattcctgccttgcctgttgctgctggccgccgcgccggcgctggcgaaagacacactgacggtttacacctacgactccttcgccgccgactggggccctggcccggcaatcaaaaaagcctttgaggccgactgcaactgcgaattgaaattcgtggcgctggaagacggcgtctcactgcttaatcgtctgcggatggaaggcaaaaacagcaaagcggacgtggtgctggggctggataacaacctgctgcaggcggcgcgccagaccagactgttcgccgccagcacggtggaccactcgcggctgaacgtgcccggcggctggcaggacagcacctttatcccctatgactacggctacttcgcctttgtctacaacaaagaccggctgaaaaacccgccgaagagcctgaaagagctggtggaaagcgaccagccatggaaagtgatctatcaggatccgcgcaccagcaccccgggtctcggcctgctgctgtggatgcagaaagtctatggcgacgccgcgccgcaggcctggcagaagctggcgaagaaaaccgtcaccgtcaccaaaggctggagcgaagcctacggtctgttcctgaaaggagaaggcgatctggtgctgagctataccacttcgccggcctaccatctgcttgaagagaaaaaagacgcttacgccgccgccaacttcagcgaagggcactacctgcaggtcgaggtcgccgctaaattgcaggccagccgccatccgcagctggcggagcgctttatgcagtttatgctgacgccggcgttccagaacgccatcccgaccggcaactggatgtatccggcgatcaaaacccctctgccggccggctttgcgcaactgccggtgccgcagaccgcgctgcaatatggcgcggatgaggtggcaaaacagcgaggcaactggatccgttcatggcaaagcgccgtcagccgttaa

SEQ ID NO: 443587 - DNA, 1662 bp, Serratia marcescens
atgtccacgccacgcctgcaacagcagtttattcgtctctggcaacgctgccagggcgaagcccgcgataccacgctgcaggagctggccgacgagctcagctgttcgcgccgtcatgtacgctcgctgcttggcgccatgcagcaacaggggtggctgacctggcaggcagaggccgggcgcggcaagcgttcgcggctggagtttcactacaccggcctggcgctgcagcaacagcgggcggaaacgctgctggaacaggatcgcatcgaccagctggtgcagctggtcggcgataaaaaagtggtgcgacagatgctcctgtcccaactgggacgcagtttccgccagggtaaacatatcctgcgcgtgctctactaccggccgctgtccaatctgctgcccggttcggcactgcgccgttcggagacgcacctggcccggcagatttacagcggcctgacgcggataaatgaggaaaacggggaactggagtccgacctttcccatcactggcaggcgctgaccccgctgcactggcgcttctatctgcgccccgctatccactttcatcatggacgcgagctggagatggaagacgttatccagacgctgacgcgcctgacgtcgcagccgctgttcgcccatatcgcacgcgtcgactcgccgacgccccatgtgatcgatgtgcatctgcacagccccgattactggctgccctggctgcttggcagcgtgccggccatgattctgccgcaggaatggcgcactctgccggattttgcccgccatccgatcggcaccggcccgtacagcgtggtgcataaccagcagagccagctgaagatccaggcgtttgacgattacttcggctatcgcgccctgatcgatgaagtgaatatctgggtcctgccggatatcaccgaagagctgatgcactccggcgtgcagctgcaggccgacgataccggcaaaaatgagctggaaagccggctggaggaaggctgctactttctgctgttcgaccggcgttcgcccgtcggcgacgatccggccatccgcagctggctgtgcgaactgctcaatcctattgccctgctgaacctctccgggccggtcagccagcgttactggtcgccggcctacggcattttgccgcgctggcaccataaccgcgaactgacccagaggctgaaacccgccgctctgcgccggctgacgctgacctactacggcgaacactcggagttcaacgccatcggcgacgccctgcagccgctgctggcgcagcacggtgtagaactgacggtcaatatcgtcaattacgacgtctggcaccggggagaggcgcagagcgatctgtggctcggcagcgccaatttcaccctgccgctggaattctcactgttcgccaccctgtatgagctgccgctgctgcaacactgcatgagcgaagatctggcgcaggacgccgcgctgtggcgcgataaccgcctgccgctggcggaattttgtcgccggctggtcagccagcatcagttgcatccgctgttccatcactggctgcagctgcacggccagcgcagcatgcgcggcgtacggatgaatacgctgggctggttcgacttcaaatccgcctggttcgcgccgccggagacataa

SEQ ID NO: 443588 - DNA, 177 bp, Serratia marcescens
atgaacgttttattgtcgaaacagttttatcagcgctatttcgccgccgttcgccgccagcacgccgactggctgacccggctggtgccggagcaggccaggctggaaatattgtcccatttaacccagtgggatatgccgacgctgagcgacgaagcctatcgcaagcgcctctga

SEQ ID NO: 443589 - DNA, 1185 bp, Serratia marcescens
atgaataaccgttggtcgctacgccgttttaaccccgttttcgccgcattccttgccgtcgcttttctggccggtatcgccggggcgttgcagacgccgacgctcagcctgtttctgacttcggaagtcaaagtgcggccgctgtgggtcgggctgttttataccgtcaacgcggtggccggcatcgtggtgagcttcctgctggccaaacgctcggacacccgcggcgacaggcgtaagctgattttaggctgctgtctgatggcggtaggcaactgcctgctgttcgcctttaaccgcgactatctgacgctgattactgccggcgtgctgatggcggcgctggccaataccgcgatgccgcagattttcgccctggcgcgggaatatgccgacagcagcggccgtgaagtggtgatgttcagctcggtgatgcgtgcccagctgtcgttggcctgggtcatcggcccgccgctgtcgtttatgctggcgctcaattacggttttaccaccatgttcctgatcgccgcggggatctttgttgtcagcgcgctgctggtggggttttgcctgccttcggtgccgcgcgaggcgcaaaccggcagcctgaatgtgacgccggtcgcgccgcccagcgcctggcgcaaccgcgacgtgcgccggctgtttgtcgcctcgatgctgatgtggacctgcaacaccatgtatatcatcgatatgccgctgtatatcacccgcgatctcgggctgccggagcggctggccggcattctgatgggcatcgccgccgggctggaaatcccggctatgctgctggcgggctatgtggtcaagcgtttcggcaagcgccggatgatgctgttcgccgtggcggcgggcctgctgttttatcttggactgacgctgttcaccgctaaactggcgctgattggcctgcagctgttcaacgcgatctttatcggcattattgccggcatcggcatgctctattttcaggatttgatgccggggcgtcccggcgcggcgaccaccatgtttaccaacagtatctccaccggcgtcattttagccggggtgctgcagggggcgctggtggagaatctgggacactacgcggtgtattggctggcggtggcgttggcggcgctctcctggtggctgtgcgcccgcgtgcgggaggtttaa

SEQ ID NO: 443590 - DNA, 948 bp, Serratia marcescens
atgtctggatatgaatcgggaaatgtcttagggaaggggggcggcgatattcatctgcgcagcgtcgatcttaatctgctcaccgtgtttgatgctgtgatgcaaatgcaaaatattacgcgtgcggcgaatgtacttggtatgtcacagcctgcggtaagcaatgcggtcgcccggttgaaagtgatgtttaacgatgagctgttcgtgcgttttgggcgcggcatccagccgacaatgcgtgccagacagctgttcgggccgattcgccaggcgctacagctggtgcaaaatgaactgccgggggccgggtttgatgccttgaccagcgagcgtattttcccaatctccatttgtagcccgctggatttgcgcctgacggcgaaagtcatcaacagcgttaaggaaatggcgcctcatgtccgcctgcaaataaaatcgtacctcaataataatattgagcatcagttgcgttatcaggagatggagtttgttattggctatacgtattttgagcatggcgagtttaagcgttatgcgctgtttgacgatgagctggtgattgttgccgcggaaacccatccgcggataatgaacggcattacgcgtgaacagctgatgcaggagcagcatgcggtggtttctctggaaagattctgttctttcagccgtccgtattatatcgacgacacaatgcaacgtgttgtctctcagcagtgtacggatttatatagcgtgatgaatctggtttcccgtaccgacatgctggccattgctccccgttggtttgcccagcagtatgcggcgaaccttcagctgaaattactccctttaccgctggataaaaaacaggtgacctgctatctctcttggcacgagtctgccgaacgggataaaggacatcagtggatgaagtctgtacttagcgaatctgaagcgctgcgttaa

SEQ ID NO: 443591 - DNA, 1800 bp, Serratia marcescens
atgaccagacatttacagcactaccatctgatccagcgtatccagcagcaacgcagccagcgcgccgaatgcattgcttttcgccaatggacgccagaaggggaaacccgcctgagctggcggcaggtcggcacgcatatggatcatatcgccagcgctttgctggcgttaggcgttgaagtgcaggagcgcgtggcaatttttgccaacaacagcatggcctggtcattaaccgatttggctattttgcagctgcgtgcggtcagcgtgccgctgtatgcgacgcataccgccgcgcaggcggcgtttatcctgaatgatgctgacatccgcattctgtttgtcggcgatcaggcgcaaatggatgccgcgattgcgctgcgtggggtttgcccgcagctgacgcagattattgcctttaacgacgcggtggagctgcacggctgcgagattgcctgttacctgaaccaactggagcgagacgcggacgtcgagcgttatcaggcgcagctggatgagcgcatcaacggtcgtgaactgcaggatctattcacgctgatttacacctcgggcactaccggtgaaccaaaaggcgtgatgctggactatcgcaatatggcggctcagctgtatcagcatgatgagcgcctgacggtgggcgaggcagatgtttccctcagtttcctgccgctgtcgcacgtgtttgaacgtgcctggagcttctttatcatgcattccgacgcacagaatgtttttctgccgaataccgactgggtgcgtgaggcgatgacggcggtgcagccaaccgtaatgtgcgccgtgccgcgcttctatgagaagatctttagcgcggtgcatgagaaagtcgcccgcgcgccgtggtggcgtcgtctgttgttccgctgggcgattggctgcggtgagcgtaaattcttgcaggagcgtgccggcacgtctggcggccggctgtttgctcatacgcatcgctgggccgataagctggtactcagcaaactgcggggtctgctgggaggacgggtgcgctttctgccggcggccggggccaagctggacgataatgtgatcctgttcttccaggcgctgggcgtaaatatcaagtatggctacggtatgacggaaacctgcgccaccgtttcttgctgggaagaacacgacttccgcttcggttctatcggcaaaccgctgtctgacgttgaggtacgcatcgccgaagagaacgagattcaggtgcgcggcccgattgtcatgcgcggttacttcaataaaccgctggaaaccgcgcaggcgtttaccgccgacggctggctgaagaccggtgacgccggggcggtagacgatcacggcaatctgtttatcaccgagcggctgaaggatctgatgaagacctccggcggtaaatatattgcgccacagatgctggaaggcacgctggcgcaggatcgttttatcgaacaggtggcggtgatcgccgatgcgcgcaagtttgtttccgcgctgatcgtgccgtgcttcgaatcgcttgaagagtatgccaaatcgctcaatatcaaatatcacgaccgtctggaactgctgcgccatagccagattatcgagatgtttgagacgcgtctgcgcgagatgcaaagagagctggcccgtttcgagcaggtaaagaaattcactctgttgccggcggcattctcgatggaactgggggagcttacgccgacgctgaagctgcggcgtaaggtgatctctcagcgttatcagaatgaaatcgaggccatgtatcagtaa

SEQ ID NO: 443592 - DNA, 1362 bp, Serratia marcescens
atgattcccgtttcccttcaggccctgtccgatgtattgcgcgccgagttaatcggcgtcgattgccaaattgatgaagtgacgacggatacccgccaagtgaccgcaggctgtctgtttgtggcgctgaaaggcgagcgttttgacgcacatgattttgccgtagatgcggttgccgccggcgcaggtgctttgctggtaagcaagcgcttaccggtggaggtgccgcagttggtggtggcggatacccggctggcgctgggcgcgctggcgggctgggttcgtcagcaggtgccggccaaagtggtggcgctgaccggctcatcgggtaaaacctcggtgaaagagatgaccgccacgatcctgcgcgagtgcggggacgtgctgtataccgccggcaactttaacaacgatatcggcgtgccgttgacgctgctgcgtctgcagccgcagcatgattttgcggtgattgagctgggcgctaaccacattggtgaaattgcctacaccaccgcgctgacgcgcccgcaaagcgcgctggtcaacaacctggcggcggcgcacctggaagggttcggttcgctggcaggggtggcgcaggcgaaaggtgaaatttttcaaggtttgccagcggatggcgtcgccattatcaacgcggacaacaacgactggccgcgctggcaaaacctgctgacggatcaaaccgtctggcgcttctcgccgcaggcggcggaaggcgtggacttcttcgccagcgatatcacggttaacggcaacggcacgcagtttaccctgcataccccgtttggccgcacggatatcgcactgccgctgcctgggcgccataacgtagccaacgcgctggcggccaccgccctggcgatgtcggtaggcgcgtcgctggaagcggtgcgctgcggtttgcagcagctgcaggcggtgccggggcgtctgttcccgattgcgctggcggaaggcaagctgctgctggacgacagctataacgccaacgtcggttcaatgaccgccgccgcacaggtgctggcggagatgccgggttaccgggtgatggtggcgggcgatatggcggaactgggcgatgacgcggaagagtgccatcgtcaggtcggcgaagcggcccggcaggcgggcgtagataaagtgctgagcgtgggggttctgagtcaggcgctcagcgacgcggccggcaacggcgagcattttcaggatcaagcggcagcaatcgcgcgcgtagcggaattactgcaggaacatgcggtcattaccgtgttaatcaaagggtcacgtagtgccgcgatggagcaggtagtacgcgcgttacaggagaaagcagcatgttag

SEQ ID NO: 443593 - DNA, 1320 bp, Serratia marcescens
atggcggattatcagggtaaaaaagtggtcatcatcggactgggcctgaccggcctgtcctgtgttgatttctttataacgcacggcgtgacgccgcgcgttatggatacccgcatgtctccgccagggctggagcaactgccggagagcgtggaacgtcatctgggcaatctgcgtgaagactggctgctgtcggcggacctgatcgtcgccagcccgggcgtggcgctgtctacaccggccctcctcagcgcggcggaagccggcgtggaaatcgtcggcgacatcgaactgttctgccgtgaggcacaggcgccgattgtggcgattaccggctccaacggcaaaagcaccgtcaccaccctggtgggtgagatggcgaaggctgccggctgggcggtcggcgtcggcggcaatatcgggttaccggcgctgagcctgctgcgccaggcgtgcgatctgtacgtgctggagctgtcgagcttccagttggaaaccaccagcagcctgcgcgccgctgccgccaccgtgctcaatatcagcgaagatcatatggatcgctatccgctggggttgcagcagtaccgggcggcgaaattgcgcatttacgaacaggccaagacctgcgtggtgaacgcggatgatgggctgaccatgccggtgcgcggcgccgacgagcgctgcatcagtttcggcgtcgacgtgggggattaccacctcaaccgtcagcagggagagacctggctgcgggtgcgcggcgaaaaagtgctgaacacccgcgagatgaaactgagcggccagcacaacctgaccaatgcgctggcggcgctggcgctggccgacgcggtgaaaattccgcgctcctccagtctgaaggcgctgaccacctacgccgggctggcgcaccgcttccaactggtgttagagcataacggcgtgcgctggattaatgactccaaagcaaccaacgtcggcagcaccgaagcggcgctgaacggcctgcaggtcgacagcacgctgcatctgctgctgggtggtgacggtaaatcggccgatttctcgccgctggcgcgttatctgcagggcgacaatatccgtctgtactgctttggccgcgacggcgcccagctggcgcagctgcgtcccgatgtggcgctgcagactgaaaccatggaacaggcaatgcggacgatagccggcgtggtgcgctccggcgatatggtgctgctgtcacccgcctgcgccagcctggaccagttccgtaattttgaagtacgcggcgatgagttcgcccgtctggcacaggagcttggcggatga

SEQ ID NO: 443594 - DNA, 921 bp, Serratia marcescens
atgactgagaaagtcgccgtcctgctgggtggcacctctgctgaacgtgatgtttccctgcagtccggcgcggcggtgctggccggtctgcgcgaagccggcattgacgctcacggcgtcgatacccgcgacttcccggtgtcgcagctcaaggcgcagggctttagcaaagtatttatcgcgctgcacgggcgcggcggcgaggacggcaccctgcaggggatgctggagttcctggaattgccgtataccggtagcggcgtgatggcctcggcgctgaccatggacaaatggcgcaccaagctggtatggcagtcgctgggcctgccgatcgccccttacgtggcgctgcatcgtgcgggttttagcggcgatgacaagcatcaggcgctggcgaacatcgaagctctggggctgccgctgatcgtcaagccaagccgcgaaggctccagcgtcggcatgagcaaggttgagtcattcggcgcgcttgaagcggcgctggaagaggccttccgccacgatgacgacgtgctggtggagaaatggctgagcggcccggagtacaccgtggcgtttatcggcgacagcgtgatgccgtcgattcgcattcagccggccggtgtgttttacgactatcaggcgaaatacattgcggacgatacgcagtatttctgcccgagcggtttgtcggccgagcaggaggctgaactggccgcgctggcggtacgcgcctaccgtgcgctggactgcagcggctggggccgcgttgatgtaatgcaggataacgatggcagcttctatctgctcgaggtgaacacctcgccgggcatgaccagtcatagcctggtgccgatggcagcacgccagtttggattaagcttctcgcaactggtggcgagaattttggaattggccgactga

SEQ ID NO: 443595 - DNA, 525 bp, Serratia marcescens
atgcgcgatagccgtccacaattattagatgtcctgttttctgagtcgtcatccgcagacaaagggccgttgcacaacgttcagcaacgcgctgccgccctgctgaaactcaaccgcgcagtcaagggcctattgccggctcaactgcatccctggtgccgtgtcgcaaacttcagacagggtgtattagtgctggaaacggccaatgccagctggatgatgcgcctgcgctacgaacagccgagcttattatccgcactacgagcgcaaattctaccatcattgtcatcgatcgacatcaggattaatccggcgttgatggcaaaaggcggcaatcagcagcagaattcgctgcaaaaaacaacagatgaacccgccgcggcgccgatgcgtcgtctgagcgaggaaagtgcggaacaattacggggaatagccagccgcagtccggaaaaactgcgcaagacattagaacgactggcagccctggccggagagggtgccaacactaccagtcgtgagaaataa

SEQ ID NO: 443596 - DNA, 465 bp, Serratia marcescens
atggtagcggctacgcttggcgtaccgcaaaatctgacgggcggccccgatcaagccgcgttgccgagcacctcgtccagccttaatcggcaaaattccatcagccatgccttcagcggcctggctttgctgcaagaggttcaccgccggccgaacttcagcgtcgactattggcagcagcatgcgctgcgcaccgtcatccgtcacctctctttcgccctggcgccgcaggttgtttatgcgcgcgtgcaggaaagcgacgctgaaccggtcgagccgccgctaaaagcggcgcagctggcgctgctgtttacgctcaatacgctgttgacccatgagcctaagccgccgaccatcatccgcgacacgcaccattccgttcatccgccgctggcgcagcatcaggtcgggctgtggctggcgcaggtgcagggcattcgagccggccctgcggctgcagtctga

SEQ ID NO: 443597 - DNA, 405 bp, Serratia marcescens
atgaaacatctgaacatcgccgtgggcattattcgtaattcccggcaggagatctttcttacccgccgcggtgcggattcccatatggcaggtttttgggagtttcctggcggcaagattgaagcgggtgaaacggcggagcaggcgctgtaccgtgagctgcaggaagaaaccggcattgaggccgggcaggccgtgctgttggaggtgctggagcaccgttttaccgaccgtattgtgacgttgaatttctatctggtggagcactggcagggcgaaccgtttggccgtgaaggccagccgatgcgctgggtaaaacaggcggagctgcgtgaagatgaattcccgccggccaacgccgcgattgtccggcaactggttgcacaggccggcgcggcgcagtga

SEQ ID NO: 443598 - DNA, 192 bp, Serratia marcescens
atgactaccgtagtaaattgcccgacctgtggcaaagacgttgtttggggggaagtcagctcgtatcgtccgttctgcagcaagcgctgccagatgatcgatctgggtgaatgggcggccgaagaaaagcgcatcccaagcaatggcgacttatccgacagcgacgagtggagtgaaaaggaagactactag

SEQ ID NO: 443599 - DNA, 753 bp, Serratia marcescens
atgagtgacgcttctccaaccgttctctttgaacacccgttgaatgaaaaaatgcgtacctggctgcgaattgaatttttgctgcaacagttacatggccaccgggcattgagcgataccgccatcgccctgacctttttccgtaccgtttccgatctgctggacgtgctggaacgcggtgaagtccgcaccgaactggcgaaagaactggaacgccagcagcaaaaactgctgcagtgggccgacgtgcccggcgttgatatgtcgctggtcgaacagttacgcagccagttgaaagacctttcttcacgtcttatcgccgcgccgcgtatgggccaaccactgcgtgaagataaactcatcagcctggtgcgccaacgtttgggcattcccggtggctgctgcagtttcgatctgccgacgctgcacatgtggatgcacgtgcctcaatcagagcgcgatgccgacgtcgcccagtggctggaaaccctggatccgttacatcaggcgctgacgatgatcctgagtctgatccgccagtccgggccgttccgcaatcaaatcagtctgaacgggttttatcaggataatgcggaagatgccgatctgctgcgcctgcgtatcgacctgtcgcatcagctgtatccgcaaatttccggtcacaagacgcgttacgccattcgcttcttgtcgctggacggcgaccatactcaggtgccggaacgcctgacgttcgatctggcctgctgttag

SEQ ID NO: 443600 - DNA, 615 bp, Serratia marcescens
atgacttacattgttgcgttgaccggcggcatcggcagcggtaaatcaaccgtcgccaatgcttttgcgcgtcatggcatcgtgattgtcgatgccgacatcatcgcccgccaggttgtagagcccggcacgccatcattggcggccatcagcgcgcattttggccatgggatactccagccggatggcgctttggatcgggcggcgctgcgtcagcgtatcttcagccagccggatgaaaaacgctggctgaatcagctgctgcacccggtgatacagcaggaaacacagcgccagctggcgctggccgacagcccctatgcgctctgggtggtgccgctgctggtggaaaaccagctacagtcacgtgccgaccgggtcgtggtggtcgatgtcgacagcgatacccagttgctcagaaccatcgcccgcgacggcgtcagccgccagcaggcactcaatattttatctgcccaggcaacgcgcgagcagcgactggcagtggcggacgacgtgatcgacaactgcggcgccgcacaagagatagaatcacacgtagccgccttgcatcgccgctatctggaccttgcggcatcagcaaaacgacaggattaa

SEQ ID NO: 443601 - DNA, 1200 bp, Serratia marcescens
atgacgtcgcggcggctttttctctggcaggccattaatagtcagggtgaaatagttccaggagagtcgctggctgaacgcaaagagcaggtttatcaactgctgattgaacagaacctgcagccctatcaggtcgcacgcggcaagccggttggccagcggcaatggcgtggcgaggcattgatcctgttcacccgccagctggctacgctgctgcaggccgggctgccgctgatgaacgcactgcagctgctggcgcagcagcatcagtccgctccctggcgctgtctgctacaggagatcggcgagcgggtggctcagggccagccgctgtctgaagtgacggccggctaccactacgtgtttccgcctatttatcgccagctaatcaccttgggcgaactgaccggcaacctcgatcgctgttgccagcagctggcgcaacagcaggaagagcagcagaagctgcgcaaaaaagtgctgaaggccatccgctatccgctgtttatctgcgcggtggccatactggtcagcctactgatgctgttgatggtgctgccggaattcgccaaagtgtatcagtcgttcgacgctccgctgccctggtttactcaggggttaatgaatctgtcggcgctgttggtcagcgccggcccctatgtgttgctggccggcgccctgctggcgggcggctactggcgctactgccatccgcattcccgctggcggcggcgggagcagcggctctgcctgcgtctgccgctgattgctcagctgattaaaggcgcctgcctgagccagatcttccgtacgctgcatatgacccaacgggcggggctgacgctgctcgaagggttggatgcggcgctgctgtcgatggagaatctgtttttccatcaggcactggagaatattcggcagcggctgaaccaggggctgccgctgtatcaggcgctggcggaacagccgctgtttccaccgttgtgccagcagttggcgcgcgtcggggaagagtccggtactctggacactctgctgggcaaactggcgttatggcatgaacagcagacgcatgagctggcggacgctttggcgcaaacgctggaaccgttgctgatgctgaccatcggcatcatcgtcggcggcctggtgatcgccatgtatttaccgattttccaattgggaacggtgctgggataa

SEQ ID NO: 443602 - DNA, 1431 bp, Serratia marcescens
atgagccaggctatcaacgctgaaatacagaccctgtgccggcgctaccaggcgctggcgctgagcgaagatgagcaatgcctgactatcgccctgcacggcgaaccaccggcgccgctgctcaatgcgctgcgcttcgccagcgggaaacagatcgcgctggaacagtggccgctggcgcggctggagcaggcgctgtttcagtcgccggcgcttcagccggctcagacagagaccgccgaggcacacagctccacgctggatgacgatgccgatacgcctgcggtcaactttatcaaccaaacgctgcgcagcgcgatccagcgacgcgcctccgacattcactttgagccttaccagcaacagctcagcatccgcctgcgcatcgatggcgtactgcagacgatctctccgccgccgctggccctgggcctgcgcattatcgcccggttgaagatcatggctcagttggacattgccgaacggcggctaccgcaggacggccagctcggcgttcagctggatcgcagccgctactcgatgcgcatctccaccctgccgacgctatacggcgaaaaggtggtgctgcggatcctgcaaaccgaccggcaggatctgccgctggagcagttgggcatgacggaggcggatcgcgcgcagtttgccgccgccctcgccggcccacagggcatgattctggtcaccggccccaccggcagtggaaaaaccgtcacgctgtacagcggcctgcaccagttgaacgatcggcagcgcaatctgtgcagcgtcgaggatcccgtcgagatcccgctgtttggcgtcaaccagacgcaggtcaacggaaaaatcgacctgagtttttcccgcgtgctgcgggcgctgctgcgccaggatccggacgtgatcatgatcggcgagatccgcgacggggaaaccgccgaaattgcggtgaaggccgcccagaccggccacctggtgctatcgaccctgcataccaactccaccagcgaaaccctgacccgcctgaccaatatgggcatccccggttatctgctggcggccagcctcaagctggtgatcgcccagcggctggtgcgtcgactgtgcctgcactgccgccgcccgcaaacggaagcgctgcactttcccgccgcgctgtggccccgcccgttgacgccatggcgcgccgaaggctgcgaacactgtttcggcggctattacggccgcatcggcatctacgaattactgcacatcaccagtgagatacagcacgggttactgcaccagttaacggcggagcagttaaacgagatcgcacagcggcaggggcagacttcgctgctgcaggccgggctggcgctggtggcggaaggtatcacgtcgctgcaggaagtgtatcgcgtgataggccacacggagctgcagccatga

SEQ ID NO: 443603 - DNA, 447 bp, Serratia marcescens
atggaaacacaacgtggatttaccctgatcgaactgatggtggtgatcgccatcatcgccaccctgagcgccatcggcgtgcccgcctatcagcgctatatccagaaagccgcaatgaccgacatgctgcaggcgatgaccccctataaaatggcggtggagctgtgcgtgctggacagcggcaccgccgacgaatgcaacgccggcagcaaaggcatcccgacaggcgccgcctcgcgctatgtcagcgccgtcagcgtcagccggggagttatcacactcacaggcgcccagacgctacaggggttaacggtcacaatgacgccgacgccggacagcaacggcctgatgcgctgggcgcgcagttgcagcgccgcagaaagcagcgcgctgcaggatacctgccgggaagtgttccgctttgacgatacggcggaaccatcctga

SEQ ID NO: 443604 - DNA, 855 bp, Serratia marcescens
atgacgctgttttcgctgttactggttctggcgtgggaacgtttattcaagctgggcgagcattggcagctggatcaccggcttgaagtggttttccggcgtctgcgccgtttttcgctgctgcagacgctggcgctggcctgcggctggatggtggtggtctggggcattttatggctggcgcaggggctgtttttcggtctgctgacgctgctgctgtggattgtcgtggcgctgctgtgcgtcggggcgggcattaagcgcaagcattaccgcgcctacctgaaggcggcgcgtcagggcgacagccatgcggttgatgccatggcggaagagctggcgctgatccacggcctgccggtggactgcagcgaagaagagcgtctgcgcgaactgcaaaatgcgctgctgtggattaactaccgctattatctggcgccgctgttctggtttgtggcgtgcggtccttatgggccgatagcgttggccggctatgctttcctgcgtgcttaccaaacctggctggcgcggcacaatacgccgctggagcgttcgcaatcggggattgatgcattgctgcactggctggactggatcccggtgcggctggcgggcgtggcctacgcgctgatcggccacggagaaagggcgttgccggcctggttcgcctcgctgggcgatcgccgtacttcacagtaccaggtgctgacgcgtctggcgcagtttgcgctggctcgggacccgcatgacgatccggtacaaacgccgcgtgccgcggtggtgttggcgcgtaaggtgacgatgattctggtggtggtggtggcggtgctgacgatttacggcaccttgctgtaa

SEQ ID NO: 443605 - DNA, 1422 bp, Serratia marcescens
atgagtgagcagcaaccacaaccctcgttagtacttactccgcgtgtgaagcgcgttgacagtgtgcgtcagtttattcgccgtgataaaacgccggtggcgatcttgttgatggcggccctggtgggcgcgctggccgggctgttgggcgtggcgtttgaaaagtcggtggactgggtgcagcaacagcgtttctccgcgctgtcgtacgtcgccgatgcctggtatctggtgtggcctctggcttttctgttgtccgccgggttggcgatgctgggctattatctggtgcggcgttttgcgccggaggccggcgggtcgggcattccggagatagaaggcgcgttggaagagctgcgtccggtgcgctggtggcgggttctgccggtaaaatttgtcggcggcatgggcacgctgggcgccggcatggtgctggggcgcgaagggccgacggtgcagatggggggcaatgtcgggcgcatggtgctggatatcttccgtatccgcggcgccgaggcgcgccactcgctgctggcgaccggggcggcggcggggctgtccgccgcgtttaacgcgccgctggcggggattctgtttattatcgaagagatgcgcccgcagtttcgctacaacctgatctcgattaaagcggtatttatcggcgtgattatgtcgaccgtggtctaccagctgtgcaatggtcagcatgcggtgatcgaggtgggtaaactctcatcggcaccgaccaacactctgtggctgtatctggtgctgggcgcggtgttcggcggcgtcggcgtgatgtttaaccggctgatcttccgtacccaggatatgtttgcccgcctgcacggcggcgaaatgcgcaaaattgtgctgatgggcggcgggctgggcggcctgtgcggcgtactggcgctgattcagccggaggccgccggcggcggtttcggcctgattccgattgcggcggcgggcaactataccgtcggcatgctgatgtttatctttatcgcccggattgtcaccacgctgctgtgctttggctccggcgcaccgggcgggatttttgcgccgatgctggcattgggtacgctgttcggcactgcatttggtctggcgagcagccaccttttcccgcagtatggcatcgagccggggacgttcgccattgccggcatgggggcgctgtttgccgcgacggtgcgcgcgccgctgaccggcatcgtgctggtgttggaaatgacggacaattatcagctgattttgccgatgatcattacgtgccttggcgcgacgctggtggcccagttcctcggcggtcagccgctgtattcgtcgctgctggcgcgcacgctggagaagcagcgggcggcggagaaaacaagcaaagaaaatgcaacaaatgcggtgaatacttga

SEQ ID NO: 443606 - DNA, 807 bp, Serratia marcescens
gtgaaacgacgcttttgctgcctgttgtggctgctggcactggcggtctccctgcccgcagctgctgcacagcgggtgatcagcctggcgcccaataccaccgaactggcctacaccgccggcatgggggataccctgctggcggccagcgccttttccgattacccgccgcaggccaagaagctcgaacaggtggcgtcgtggcaaggggttaatctggagcggatcctggcgttaaagccggatctgatcctggcctggcgcggcggcaatccgcagcgggtcctggatcagctcgccgcattcggcattccgatcttttacgccgacgccaaaacgccggaagagatcgcccgtttgctggacgatctggccgcttacagtccgcacccggagcaggcgcatcagtcagcagcgcaggtacgccagcagctcgcccgtctgaaggcccgctatgccgataacccacagcgccgcgtgctgctgcagttcggcacccagccgctgttcaccagctccgccgcgacgctgcaaagccgactgctgagcctgtgcggcggcgaaaacatctttgccgacagccgcgtaccctggccgcaaatcggccgcgagcaggtgctggctcgtcagccgcaggcgatcgtcatcagcggcggcgccaaagaggttgccaacgtcaaagcattctggtcgcctcagctgcaggtgccgatcatcgcgctgaatgaagactggttcaaccgcgcagggccgcgcattatgctggcggcgcagcagctgtgcagccagctggcggagattcgctga

SEQ ID NO: 443607 - DNA, 1428 bp, Serratia marcescens
atgaaaaaaaccgcattagttctgagcgccctggctttcagcatgggtatggcccttggcccggcaagcgccgccgccgcagaaacggcttccgccagcacgccgtcgtcacagttgccgagcctggcgccgatgctggaaaaggtgatgccgtcggtggtcagcatcaacgttgaaggcagcgccgccgtcaatacgccgcgtatgccgcagcagttccagcaatttttcggcgaagactcgccgttctgtcaggacggttcgccgttccatggctcgccgatgtgtcagggcgggccgggtggccagggcgccaaagagagctttaaggcgctgggcgccggggtggtgatcgatgcggcgaagggctacgtggtgaccaataaccatgtggtggacaacgccagcaagatccaggtgcagttgagcgacggccgccgctttgacgccaagatcatcggcaaggatccgcgctctgatattgcgctgatccagctgaaaaacttcaagaacctcaccgcgatcaaaatggcggattccgatcggctgcgggtcggcgactacacggtggcgatcggcaacccttatggcctgggtgaaaccgccacctccggtatagtttcggcgctggggcgcagcggcctgaacctggaaaactacgaaaactttatccagaccgatgcggcgatcaaccgcggcaactctggcggcgcgctggttaatctgaacggcgagctgatcggtatcaacaccgcgatcctggcgccggacggcggcaatatcggtatcggcttcgccattccgagcaatatggtgaaaagcctgacggcgcagatggtgcaatatggccaggtcaaacgcggtgagctgggcattatgggcaccgagctgaattccgagctggcgcaggcgatgaaggtcgacgcccagcgcggcgccttcgtcagccaggtgatgccgaaatcctccgccgccaaagcgggcatcaaggcgggcgatgtgatcgtcaccatgaacggcaaagccatttccagcttcgcctcgttccgcgcgcagatcggcacgctgccggccggcagcaaaatgtcgctggggattatccgcgagggcaaaccggtcaccgtggatgtgacgctggagcaaagcaagcagacgcaggttgattccggcaatatcaatgccggcatcgagggggccgaactgagcaacgcgcaggccggcaaccataaaggggtcagggtcgacagcgtgaaggccggcagcgccgccgccagcattggcctgaagaaaggcgacgtgatcctgggggtcaaccaacagccggtgcagaacctgagcgaactgcgcaaaattctcgacagcaagccgccggtactggcgctgaacatcctgcgcggcgacagcacgctgtacctgctgatgcagtaa

SEQ ID NO: 443608 - DNA, 1152 bp, Serratia marcescens
atggcggaataccatcttgacggcaagctggcgcaggaaatcgtggcgcgcaccatgcaaatcattgacggcaatgtcaatgtgatggacgcgcgcggcaggatcatcggcagcggcgaccgcgagcgggtcggtgaactgcacgaaggggcgctgctggtgctgtcgcaggcccgcgtggtggatattgatgaagccgtcgcccgccatctgcacggcgtgcggccgggcatcaatctgccgctgcgcatcgacggcagcatcgtcggggtgatcggcctgaccggcaatccggcgcagctgcgccaatacggcgagctggtgtgcatggcggctgaaatgatgctggagcaggcgcggctgatgcacctgctggcgcaggacagccgttttcgtgaagagctggtgctgaacctgatccgtgcggaggcgctgtcgccggcgctgatggagtgggcgcagcggctgggtatcgaccctgaagagccgcgcgtggcggcggtggtcgaggtggacagcggacagctcggcgtcgacagcgcaatggcggaactgcagcagctgcaggcgctgctgacgctgccggagcgcgacaatctgatcgccatcgtctcgctcagcgaaatggtggtgctgaagccggcgctcaacggccacggccgctgggacgccgaagatcatcgtcgccgggtagagaacctgctgtcgcgcatgaaagagagcagccggctgcgggtgcgggtggcgctgggcaattactttaccggaccgggcagcatcgcccgctcctaccgcaccgcgcgcaccaccatggcggtgggcaagcagcggatgttcgagcagcgcgcctactactaccaggacctgatgctgccggtgctgctggacagcctgcgcggcggctggcaggcggacgagctggtcaggccgctggcgcgcctgaaggcgatggacggcaacggcctgctgcggcgtactctcagcgcctggtttttgaataacgtacagccgagcgccaccgccaaggcgctgtatattcaccgcaacaccctggaataccgcctgaaccgcatctccgaactgaccggcctgaacctgtccagcttcgacgcacgtttactgctgtatatcggcctgcagctggacgaatag

SEQ ID NO: 443609 - DNA, 1566 bp, Serratia marcescens
atgtctgaaataaatatccgccacgacgcgccgctatatattaaggtgcacgccgatgataatgtcgctatcgtggtcaataagcagggattagccaaaggcacgctgtttccctgcggtttacagttaattgaacatgtgccgcaggggcataaggtggcgttgaatcatatcgccgccggcgaagcgattattcgctacggggaaaccatcggctatgcacagcgcgatatcttacgcggcggctggattgatgagtcgctggtgacgctgccggaagcgccggcgctggacagcctgccgctggccaatcgcgtgccgccgccgttgccgccgctggagggctacaccttcgagggctaccgcaacgccgacggcagcgtcggcactaaaaacctgctggggattaccaccagcgtgcactgcgtcgccggcgtggtcgacttcgtggtgaaaatcatcgagcgcgatctgctgccgaactaccccaacgtagacggcgtggtggcgctgaaccatctctacggctgcggcgtcgccatcaacgcgccggccgccgtggtgccgatccgcactatccataatctggcgcttaaccccaatttcggcggcgaagtgatggtggtcggccttggctgcgagaaactgcagccggaacggctgctgcagggcacccccgatgtgcagccgatctcgctggacgccgggcagatcgtgcgtctgcaggatgagaagcatatcgggtttaaatcaatggtggacgatattctggcgctggcggaacggcatctgcgcaaactcaatcaacgccggcgcgaaccctgcccggcgtcagagttggtggtcggcatgcagtgcggcggcagcgacgctttctccggcgtgaccgccaacccggcggtgggctatgcctccgatctgctggtgcgctgcggcgctacggtgatgttctcggaagtgacggaagtgcgcgacgccattcatctgctgacgccgcgcgtcgccgaccaggaagtaggccggcgcctgctggaggagatgcgctggtacgacgattatctcagccaggggcagaccgaccgcagcgccaacccgtcgcccggcaataaaaaaggcgggctggccaacgtggtggaaaaggcgctgggatcgatcgccaagtccggcgccagcgcgattgtcgaagtgctctcccccggccagcgcccgagtaaacgcggcctgatcttcgccgccacgcccgccagcgacttcgtctgcggtacgcagcagctggcctccggcattaccctgcaggtgttcaccaccggacgcggcacgccttacggcctgaccgccgttccggtgatcaaaatggcgacgcacagcgcgctggccgaacgctggcacgatctgatggatatcgacgccggcagcatcgccagcggcgaagccaccattgagcaggtgggctggcagctgtttgaactgattttggccatcgccagcgggcgcaagaaaacctggtcggatcaatggggactgcacaatgcgctggcggtgttcaacccggcgccggtcacctga

SEQ ID NO: 443610 - DNA, 1353 bp, Serratia marcescens
atgtcaacaatcagttccgcaaccggcgcaataaaaagaaccaatacgcgctactggattgtggtgatgctgtttatcgtcacgtcatttaactacggcgaccgcgccacgctgtcgatcgccggttcgtcaatggctcaggatatcgggctggatccggtcgggatgggctacatcttctccgccttttcctgggcgtacgtcatcggccagatccccggcggctggctgctggaccgttttggatcgaagcgcgtctatttctggagcatctttatctggtcgctgttcaccctgctgcaggggtttgtcgatatcttcagcggcttcggcattgtggtggcgctgtttgccctgcgttttctggtcggactggcggaagcgccgtcgttcccgggcaacagccgcatcgtcgccgcctggttccccgctcatgagcgcggcacggcggtgtcgattttcaactcggcgcagtatttcgccacggtgatcttcgcgccgatcatgggttggctgacgcacgccgtcggctggtcgcacgtgttcttctttatgggcggcctggggattgtgctgagctttatctggctgaaggtggtgcataacccgaaagatcacccgcgcattaaccaggccgaaatggactatatcgaagccggcggcgcgctgaccaatatggatcagaagcagccgcaggcgcagccggtgaaaggcgagaaatggcggcagatcaaacagctgcttcagtcgcgcatgatggtcggcgtctatatcggccagtactgcatcaacgcgctgacctacttctttattacctggtttccggtctatctggtgcaggcgcgcggtatgtcgattctgaaagccggctttgtcgcctcggtgccggccatctgcggcttcgtcggcggcgtgctgggcggggtgatctctgactatctgatgcgccgcaccaactcgctgaccttctcgcgcaaggcgccgatcgtgatcggcatgctgctgtcgatgtcgatgatcttctgtaactacgtagacaccgagtggatggtggtcggcattatggcgatggcgttcttcggcaaggggctgggggcgttgggctgggcggtgatggccgataccgcgccgaaagagatcagcggcctgagcggcgggctgttcaatatgttcggcaatatctccggcatcgtgacgccgatcgccatcggctacatcatcggcaccaccggctcattcaacggcgcgctgctgtacgtcggcatccatgcgctgctggcggtggtcagctatctgtttatcgtcggtgaaatcaaacgcatcgaactgaaacctgtcgcacggggggcatga

SEQ ID NO: 443611 - DNA, 1341 bp, Serratia marcescens
atgatgagcgatacgcagagcacgccaaccatcaccgccatgcgcgtgatcccggtcgccggctacgacagcatgctgctgaatatcggcggcgcccacggcgcctgtttcacccgcaatatcgtggtgctgaccgacagcgccggccataccggcgtgggcgaagcgccgggcggcgaggtgatttaccagacgctgacggcggcgatgccgcaggtggtggggcagcaggttgcgcggatgaacagtctggtgcacgcgctgcacggcggcagccagccggcagatttcgacgccttcgccagcggcgcctggacgtttgaactgcgggtcaacgcggtggcggcgctggaggccgcgctgctggatctgctggggcagtgtcttggcgtaccggtggcggagctgcttggccccggcaaacagcgcgatgcggtgacggtgctgggctatctgttttacatcggcgaccgccggcgcaccgatttgccgtatcaggccggtgagcagggcggccacccgtggtatcacctgcgccatcaggaagcgatggatacggcagccatcgtcgagctggcggcggcggcacaggatcgctacggctttaaggattttaaactcaagggcggcgtgctgccgggcgagcaggagatcgaggcggtgtgcgccctggcgcagcgcttcccgcaggcgcgcatcaccgtcgatcccaacggcgcctggcggctggatgaggctatcgcgctgtgccgcggcatgaacggcatcctgacctatgcggaagacccgtgcggcgcagagcagggcttttccggccgtgaagtgatggccgagttccgccgggcaaccggcttgccggtggcgaccaatatgattgccaccaactggcgggaaatgcgccacgccacacagctgcaggcggtggatattccgctggcggatccgcacttctggacgatgtccggcgcggtgcgggtggcgcagctgtgcgacgtgtgggggctgacctggggctgccactccaataaccacttcgatatttctctggcgatgtttacccacgtcggcgcggcggcgccggggaaaccgaccgccatcgatacccactggatctggcaggaaggccagcatctgacgaaaaaaccattgcaaatcgtcgacggaaaaattgcgctgcccgacgcgccgggtctcggcatcgagctggactggcaggcgctggaacaggcgcaccggttgcatcagacgctgccgagcggggcgcgcaacgatgcccaggcgatgcagtatctggtgcccggttggcgttttgaccgccggcgcccggcgttcggccgttga

SEQ ID NO: 443612 - DNA, 1341 bp, Serratia marcescens
atgaccacgtttcacagtgctccaaaaattatcgccatgcaggtggtgccggtcgccggccatgacagcatgctgctgaacctgagcggtgcccacgcgccgtttttcacccgcaatattgtgattctgcaggataacgccggcaataccggcgtcggagaagtgccgggcggcgaaaagatccgccagacgctggaggatgcgcagccgctggtggtggggaaaacgctcggcgaatataaaaacgtgatgacggcggtgcgccagcgcttcgccgatcgcgatgcggcggggcgcggccagcagacgttcgatctgcgcaccaccatccacgtggtaaccggcattgaagcggcgatgctcgatctgctggggcagttcctggaggtgccggtggcggcgctgctgggggacgggcagcagcgcgagtcggtggagatgctcggctatctgttctatatcggcgaccgcaataaaaccccgctgccgtatcagagccagccggacgatgcctgcgactggtaccggctgcgccatgaggaggcgctgacgccgcaggcggtggtgcgcctggcggaagccgcctatgagaaatacggttttaacgacttcaagctgaaaggcggggtgctggccggcgaagaagaagccgatgcggtcaccgcgctggcggagcgtttcccgcaggcgcgcatcacgctcgatccgaacggcgcctggtcgctggaagaagcgatccgtctgggcaggcggctgcgcaacgtgctggcttacgccgaggatccgtgcggcgccgagcagggcttctccggtcgcgaagtgatggcggagttccgccgcgccaccggcttgccgaccgccaccaatatgatcgctaccgactggcgccagatgcaccatacgctgcagctgcagtcggtggatatcccgctggcggacccgcacttctggacgatgcagggatcggtgcgggtggcgcagctgtgccacgaattcggtctgacctggggatcgcactccaataaccatttcgatatctcgctggcgatgttcacccacgtggccgccgccgcgccgggcaacatcgccgccattgatacccactggatctggcaggaaggcaaccagcgcctgacgcgcgaaccgctgaccatcgccggcggccgcgtggcggtgccgcagaagccggggctggggatcgagctggatcgcgatcgcctgatgaaggcgcatgagctgtataaaacccacggcctcggcgcgcgcgatgacgcgatgggtatgcagttcctggtgccggattgggccttcgataataaacgcccttgcctggtgcgctaa

SEQ ID NO: 443613 - DNA, 774 bp, Serratia marcescens
atgaacagttgtcacaaccgctttcgtcagtctctgcagcagggggaaacccttatcggctgttggtcggcgctgggcaacccgatctcgaccgaagtgctggggctggccggtttcgactggctggtgctggacggcgagcatgcgccgaatgatatcaccacctttgtgccgcaactgatggcgctgaagggcagcagcagtgcggcggtggtgcggccgccctgtaacgagccggtgattatcaaacgcctgctggatatcggtttttttaacttcctgatcccgtttgtggagagtgaagagcaggcgctgcaggcggtggcggccacgcgctatccgccggccggcattcgcggcgtgtcggtctcccaccgcagcaacggctacggcacggtcagcgattacttcagcagcgttaacgacaatatcagcgtgctggtgcagatcgaaacgcaggcgggcatcgaccatctggatgccattgccgcggtggagggcgttgacggtatcttcgtcggccccggggatctgtccgccgcgctggggtatctcggccagccgaatcatccgcaggtgcaggcggctattcgacacatctttgagcgtgcggcggcggcggggaaaccgagcggcattctggcgccggccgaagccgatgcgcgccgctatctggagtggggggcgaaatttgtcgccgtcggcagtgatttaggcgtgctgcgcggtgcgacgcaggcgctgtgcgaccgttttaaacctggtgtgaaataa

SEQ ID NO: 443614 - DNA, 885 bp, Serratia marcescens
atgaaaattggatttatcggcctgggcattatgggcaaaccgatgagcaaaaacctgttgaaagccggctatgcgctggtggtgctgaatcatcgggcggaaaccaccgccgagctgagcgagctgggtgcggagagcgccgatacgcctaaagcggtggcggcgcagtgcgacatcgtgatcaccatgctgcccaactcaccgcaggtgcaggaggtggtgctgggggagaacggcgttattgagggggcgaagccgggcacggtggtgattgatatgagttcgatcgcaccgttggccagtcgggaaatcagcgccagactggcggaaaagcaggttgccatgctggatgcgccggtcagcggcggcgagccgaaggcgattgacggcacgctgtcggtgatggtcggcggcgagaaggcggtgttcgaccgctgctatgaggtgatgaaggcgatggccggatcggtggtgcataccggcgagatcggcgccggcaacgtgacgaaactggcgaaccaggtgatcgtcgcgctgaatatcgccgcgatgtcggaagcgctggtgttggccaccaaggccggcgtcgatcctgagcgggtctatcaggcgattcgcggcgggctggcgggcagcacggtgctggacgccaaagcgccgatggtgctggcgcgtaatttcaaaccggggttccgcatcgaattgcacatcaaggatctggctaacgcgctggacacttcgcacggtatcggtgcgcagctaccgctgacctcggcggtgatggagatgatgcaggcgctgcgggtcgacgatctgggcggtgcggaccacagcgctttggcctgttattacgagaagttggccaaagtccaagtcacgagttag

SEQ ID NO: 443615 - DNA, 1140 bp, Serratia marcescens
atgaaaatagtgatcgcgccggattcatataaagagagtttatccgcgctggcggtggccacctgcattgaggacgggttccgcgaggttttccccgctgcggagttcgtcaaactgccgctggccgacggcggagaaggaacggtggaagccatggtggcggcgaccggcgggcggattatcaaggtggacgttaccgggccgttaggcgagacgacgccggcgtttttcggcctgtccggcgacgggcgcagcgcgtttatcgagatggcggcggccagcgggctggagcgactgcccaccgggcggcgcaacccgctgaaaaccacctcctacggtaccggagagctgatccgctgcgcgctggagcacggcgtcaggcactgcattatcggcattggcggcagcgcgaccaatgacggcggtgccggcatggtacaggcgctgggcgcgcggctgctggacgagcgcggcgaggagatcggttttggcggcgccgcgctggcgacgctggcgcagattgacctcagccggctggatgcgcgtatcggccagtgccggtttgaggtggcctgcgatgtgaccaacccgctgaccgggccggagggcgcttccgccattttcggcccgcagaaaggggcgacaccgcagatggtggcggaactggacggcgcgctggcgcactatgcacaggtgatcaagcgtacgctgggcgtggatgtccagcaggtgcccggcgccggcgcggccggcggcatgggcgccggactgctggcgttttgtcgggcagaactgcgccaggggattgagatcgtcaccgaggcgttggggctggacgcgctggtgcgtgatgcgacgctggtgatcaccggcgaaggacgcatcgatagccagagcatcaaaggcaaggtgccgattggcgtggcgcgggtcgccaaacgttacggcaaaccggtgatcggtattgccggcagcctgagcgacgatgtcggcgtggtgcatcagcacggagtggatgcggtgttcagcgtgctgtatcgcgtctgtacgctggaagaggcgttgcacgacgctgctgaaaacgtacgggcgacggcgcgcaatattgcggcgacgctgaaggtggcgcaggggcagtaa

SEQ ID NO: 443616 - DNA, 1329 bp, Serratia marcescens
atggcgcaattctactctcccaaacgccgcgtgacgacccggcagaacacacaaatcttcaccgtgacggtgagcgacctcgatcccttcggtcagggtgtggcgcgccacaacggtaaagcggtgtttatcccggacgtactgccgggcgaaaaggcggaaattcagctgacggaagacaagcgtcagttcgccaaaggcaagctgaaacgcctgctgagccgcagcccgcagcgggtggagccgcgctgtccgcactttggcgtctgcggcggctgtcagcagcagcatgcggatgaaagcctgcagcagcagagcaaggcagcggcgctggaacggatgatcgcccgcgaaaccggcgtcagcgtgccgcaggaggcggtgatcgccgggccgcaatacggctatcgccggcgcgcgcgtctggggctgatgtggcagccgaagcggcaaaccctgcaaatgggctttcgtcaggctggctccagcgagctggtgtcggtgactcagtgcccggtgctggcgccggagctggagcgactgctgacgccgctgcgcgcctgcctgagcgggctgcaggcggtgaagcgcctggggcatgccgaactggtgctggcggacaacgggccgctgctggtgttgcggcacctggatgcgctcaggccggccgaccgcgaggcgctgctgaccttcgcccggcaaaatgccgtaacgatttatttggcgtcggacagcgaacaactggagaaactgtgcggtgatacgccgtattatcaggttgacgggctacgcttagacttcagtccgcgcgactttattcaggtgaacgatgcggtcaaccagcagatggtggcgcaggcgctggagtggctggagattcagcccgacgatcgggtgctggatctgttctgcggtatgggcaatttcaccctgccgctggctcggcgggcgaaagcggtggtcggcatcgaaggtgttgccacgctggtagcgaatgggcaatataatgcacataagaatttactgagtaatgcgtcgttttttcatcagaacctggaagaagacgtggagcggcagccttgggctcaacagggatttgataaggttatgttggatcctgcccgggcgggcgcggctggagtgatgtcacatattgtaaaactggcgccggagcgggtggtgtacgtttcctgtaaccccaccacgctggcgcgcgacagcaaaacgttgctgtccgccggttatcgtcttgcgcgtgtgcgtatgctggatatgttcccgcacacggggcatcttgaatcaatggcgctgtttattcgtcaggaatag

SEQ ID NO: 443617 - DNA, 795 bp, Serratia marcescens
atgaccccatctactccgctgcagcgtctgctcaatatcatgaaaacgctgcgcgacccgcaggcgggctgcccgtgggaccgcaagcagaccttcgccaccatcgcgccgtatacgctggaagaaacctatgaggtgctggatgccattgagcgccaggactacgccgacctgcgcgatgagctgggcgatctgctgtttcaggtggtgttctacgcccagatggggcaggagcaggggctgtttgattttgacgaggtgtgcaccgccatcagcgacaagctggaacgccgccacccgcacatcttcggcgacgctgacgctgcggacaacgcgacgattgcggcgcgctgggagcagttgaaggccggtgagcgggcagagaaggcgctgcactcggcgttggacgatattcccaatgcactgccggcgctgatgaaggcgcataaaattcagaagcgctgcgccgcggtaggctttgactggcatacgctcggcccggtgctcgacaaggtgcatgaagagattgacgaagtgatgcacgaagcgcagcaggcggtggtggaccaacagaagctggaagaggaaatcggcgacctgctgttcgccacggtgaatctgtcgcgccatctgggccacaaggcggaaaacgcactgcaggccgccaaccgcaagttcgaacgacgcttccgtcaggtggaaagcatcatcgcgcagcaggggctgacgatggcggaggcgacgttggaacagatggaagacgcctggcagcaggttaagcagcaggaaaactaa

SEQ ID NO: 443618 - DNA, 1191 bp, Serratia marcescens
atgcggaaaagaatcgtgattgtcggtggcggcaccggcggcaccatgctggccaacattctggcgcgcaaactacatcgtgaaattattaataataaagttgagttattaatgatttctcaaacggcggcgcattatttcaaaccggcatttatgtatgtcgcgtttaacgcattttttaaatatgaattaatgcgtgcgcagcaaagtctgttacgtccggaaattaaatttattgtcgataaagcggagggcgttgattttcagcagcgccggttatttaccgccagcggcaataattatgactatgactttctggtctttgccaccggatgcctgccctggacggaaagaattcccgggctggccgaaggcggcgatcacttttatcagtatcaggcggcacgccggctggcggataaactggcgacgattgaaaaagggcgcatctttatcaccgtctctttcccgcagacgcccaacgttccgcatcagtgcggcatcgcgccgattgaaaccactctgatgctggatgagtacctgcgccagcgcggcgtgcgtaatcagatagagataatttatacctacccgaccatttcccagctgctgcgtaactgtctgtttttacagcgtcctaccggcgaagcgctgccggaaatttttgccgcgcgcggcattaagcaccagcgcggctttaccctgaatcaggtggatgccgggcggcgcatcgcctattccgccgagggagatgaacaaccgttcgacatcctgatggcgacaccgccgattcgcgcggtggaaatggtgcgcaataccggcctgagcgatatcgataacggcgaaggatggctgccgactgacccgcagacgctgcaggtttacgaccagcggggggtatatgtgatcggcgatacggtcgacctgccgatcagcaaggcgggcggctcctgccacaatcaggcgccggtgatcgccgacaatatcgtggcggagatgcagctgggccatccggtgcgccattacgacggcaaggtgcaggcggtggcgcagttcggcctgagcagcggtatgccgctggtgtatgactatcgtcatgacgtcgtgccaaccccggccaccaaactgggcggtatgttacgcaacggcgtgaaccgcggtctgtactgggctgcggtgcgcggtctgatataa

SEQ ID NO: 443619 - DNA, 381 bp, Serratia marcescens
atggaaaacacgcagactgaggcgctggcggcgctgatggaaaaactgtccccgttgctggcgagcggccggctgaataacgtggtcgacgcgctctcgcttacctcggatttgattgacatggcggatagcgcgctggtcgagaagctggccgcagtatttgaagacctgaccagcgccggctgggaaggggggacggcgctgaaaatggcctatagcgaactgcagcagaatgagcagccggcgactttgcgcgggctgtacgcactgttgcgtcagccggaaacgctgctcgggctgatgttggtattgcgcactctgaatattatcggcggacgcatgcgcgccgcgagcctaccggcggatgtcacaccggaataa

SEQ ID NO: 443620 - DNA, 1191 bp, Serratia marcescens
atgtcgtcagcaagcaagcaggctttcgccacgcgggccatccaccatggttatgacccgcagcagtatcatggcgcactgtgtccgccggtgtttatgagctccacctttactttcccgtcggcggaatacggcggcgcctgttttgccggcaccgaacccggctatttctactcgcgcatcgccaatccgacgcttaacctgctggaacagcgtatcgccaatctggagggcggtgaagcggcggtggcgttttcatccggcatgggggcggtgacggcctgctgctggactctgctcgggccgggcgatgagctgattgtggatgaaacgctgtacggctgcaccttcagctacttccatcacgggctggagcgtttcggcgtcaaggtgacccacgtcgatatgacgcagccagaggcgctggcggcggcgatcgggccgcgcacccggctggtgtattgtgaaacgccggccaaccccaatatgcggttggtggacattgcggcggtggcggcgattacccaccggcatgcggcgctgctgctggtggataacacttactgtacgccttatctgcagcggccgctggcgctgggggcggatatcgtcctgcactcggcgaccaagtaccttggcgggcacggcgatttgctggccggggtggtggtgacccgcgccgagctggcgcaggatatccgcctgatcggcctgaaggatatgaacggcgcggtgctgtcggcgcaggatgcggcgctgctgctgcgcgggctgaaaaccctgccgctgcgtatggagcgccactgcgacaccgcgcaacgcctcgcagaaatgctggcgcggcatccggcggtcgagcgggtttattatccggggctgccggccttccggcagtaccaactggcgcagcggcagatggcgcgcccgggcggcatgattgcctttgagctgaagggcggcatggcggcgggcatccgtttcctcaatgcgctgcagctgattctgcgggcggtcagcctgggagattgtgaatcattggcggagcatccggccagtatgacgcattcggcctatagcgaagaggagcgccaccgtcaccatatcagcgacgggctgattcggctttccgccgggctggaagacgccgacgatctgctggcggatattgagcaggcgctggcacaggcgtaa

SEQ ID NO: 443621 - DNA, 1341 bp, Serratia marcescens
atggctcattccaccaagttgaacatccagcaggcgatcgacgacagtaagttctcgctgttccactggacgctgattattctcggttttctggttctggctatcgacggcttcgacaccgccgccatgggctatatcgcgccggcgctggccgaggactgggggatcgtcaagcaggatctggggccggtgctgagcgccgccctgctcgggctgtcgctgggcgcgctggtggccgggccgctctccgaccgcatcggccgtaagcgggtgctggtgttttcctgcctgttcttcggcttgtccagcctggcgaccgcctacgccggttcgctcgacagcctgacgctgtggcgctttcttaccggtctcggccttggcgccgccatgcctaacgccattacgctgatttccgagtatgcgccgcagcgctgccgttcactggcgatcaacaccatgtactgcggttttccgctgggcgccgccgccggcggcgccatctcctcctggctgataccgggctacggctggcacagcgtgctgctgctcggcgcgatcgcaccgctgatgctgacggtgctgctgattctgctgctgccggaatcggtcaaatacctggtcaaccgcggcaaggatatgcaaaagatcaaacgcattacccagcgcttcagcggaaaaaacctcgacggcgtcgaacatttttatctgtacgaagcgccgctggcggcgtcaaaaagcagcgtcggcctgctattcagccgcccctatctgctcggcaccctgatgctgtgggtcacctactgcatggggctggtgatctactacatgctgctgagctggatgccgattctgatgcagggcctgggttatcagctggagcagtccgccatgctgacctcgctgttcacctttggcggcaccgccggcatcctgatggccggctggatgatggaccgctggaacgcgcataaggtggtcgccgccggcttcatcgtcaccgcgctgttgatcgtcggcatggccaccgaagatcgccatatcgttctgctgggcggcttgattttcctgatgggtattaccatgaacggcgcacagtcggggctgcaaacgctggccgccaccttttacccgacccacagccgcgccaccggcatcgcctggatgcagggcatcggccgtttcggcggcgtggccggcacgatgattggcgcacagctgatggcgctgcagtgggaagtgcacagcattctgctgttcctgtgcctgccggcggtcgttgccgccgtcgccacgctggttaaaatggcgcgccgcaagacgctgcagacggccaatccttga

SEQ ID NO: 443622 - DNA, 672 bp, Serratia marcescens
atgcagtacccgattaatgagatgttccagactttacagggcgaaggttatttcaccggcgttccggctatttttatccgcctgcaggggtgtccggtaggatgcagctggtgcgataccaaacacacctgggaaaaggatgctcatcgggaagtggacatgcagcgcattttggtgaaaaccgaggaaagcgacgcctggggcagcgccagcgccgaacagctgctggcggtaatacgccagcagggctatagcgcgcgccatatcgtcattaccggcggcgaaccgtgcatttacgatttaaccccgctgacccgcctgtttgaagagcacggctacggctgtcagatcgaaaccagcggcacccacgaggtgcagtgcacggcggatacctgggtgacggtttccccgaaggtgaatatgcgcggcggcatgaaagtattggatcaggcgctaacgcgtgcggatgaaatcaaacatccggtcgggcgtcagcgcgatattgacgcgctggatgcgctgttggagacgctgcacgatgagaaacggcgggtgatcgccctgcagccgatcagtcagaaagatgaagcgacgaagctttgtatcgccacctgcatcgagcgcaactggcgcttgtcgatgcagacgcacaagtatctgaatattgcttaa

SEQ ID NO: 443623 - DNA, 1074 bp, Serratia marcescens
atgttttcccgccagtgtctgaaagccggcctgttggccgcggcattcagcagcgttttttgcgcctcagccgcgacgcatcccggccaggatgcgccaataggcaaattcgccgccgaaaaaatgcggtatatcgccacctactttccggggcgtatggccggcagcccggctgaacagctgaccgccgactacctgaaacagcaattcacccagatgggttatcagagcaatattcgcagtattaacagccgctatctctataccaacaaaaacggcagcgagaactggcgcaatattcgcgtcaattccgtgatcgccgccaaaagcggcgatcggccgcagcagatcgtcatcatggcgcatttcgatacctatacgccgcgcagcgatgccgacgtcgacaacaacctgggcggcctgacgctgcaaggggtcgacgataacgcctccggcgtcggcgtgatgctggagctggcgcagcggatgaaggatatccccacccgctacagcctgcgctttatcgccaccagcggcgaggagcttggctcgctgggcgcgaaaaattatctgcagcgcatgagtgcggaagagcgggcgaacacgctgctggtgattaatctcgacagcctgatcaccggcgacaaactctatttccacgccggccgcaacacgccgccgaaggtcgccaaacagagccgcgatcgggcgctggatatcgcccaccgctacggcatcgccgcctcgctcaaccccggcagcgaccactatccgaaaggcactggctgctgctccgatcagcaggtatttgacgacgcgcgtattccggtcatggcggtcgaggccaccaactgggcgctgggcaaaaaagacggctatcagcagcgtgcggtcagcccgcacttcccgcagggcgtctcctggcaccggccgcagtacgacaacgtacaatatctggaccgctacctgccgggacggattgataagcgcagccgggatagcgttcaggtgctgctgccgctgttaaaagagctggcgcaggcgcacccggcgccaaaagcgaaaaaaccataa

SEQ ID NO: 443624 - DNA, 402 bp, Serratia marcescens
atgatgctggataaactggaaaaccgtctgggtgtcgttgagcaaaagattgagcgcatggatcagcgagttgaacggctggagcagcgcattgaggggatggatctgcgcattgaggggatggatctgcgcattgaagggatggggcagcgcattgagggagtggaaaagcgcgtcgaacgggtggaggtggacgttaaccaggtcaaactggatttggccgcgctgaacatgcgttcgctggaatttgtcaccaagggcgatctgcataaggaggtggccctgctgcaccgggaaattggtttggtgaataaagaggttgtcaaccaaaccaaatggatggtcagctgtatattcggcgttgccgcactgtgcatgaccgccgccaagctgtggttctga

SEQ ID NO: 443625 - DNA, 1431 bp, Serratia marcescens
gtggactatctaccaatatttgccgatctgaaacaacgtccggtactggtcgttggcggcggtgaagttgctgcgcgtaaagttgaactgcttgcgcgcgccggggctgaaatacggatagttgcgcagtcgctctcaccggaacttgaacagcatcgccagtctggacgcatcaactggctggggcaggcgtttgcgccgcaccagttggatgaggtgtttctggtgatcgccgcaaccgacgacgccgcgttgaacgcccaggtttatgccgaggcggataagcgccgcttgctggccaacgtggtggacgatcagccgcgttgctcatttatctttccgtcgattgttgaccgttcaccgctgatggtggcggtgtcatccggcggcaaggcgccggtgctggcgcggatgctgcgtgaaaagctggaagcgctgctgccggccagccttggcaccatggcgcaactggctggcggttttcgcgctcgggtaaaacagcagctgagttcgatcggcgcacgccgccgtttctgggaaaaatcccttaacggccgctttgccacgctggcggccaatgagcagccgcagcaggcgcagcaacagctggaacaagacctggccgcgtttgccgccggcgatgaggcagcgcagggcgagattgcgctggtcggcgccgggccgggcgatgttggtctgctgaccttacgcggcctgcaggtgatgcagcaggccgacgtggtgctgtacgaccacctggtgagcgacgagatcctcgatctggtgcgtcgcgacgcggaacgcatctgcgtaggcaaacgcgccggcgcgcatctggtgatccaggaagagaccaaccgcctgctggtggaactggcgcagcagggcaagcgcgtggtgcgcctgaagggcggcgacccgtttatctttggccgcggtggcgaagagctgcaggttgcggcggcggcggggattccgttccaggtggtgccgggcgtcacggcggcggccggtgcgacggcctatgccggcatcccgctgacccaccgtgaccatgcgcagagcgtgacctttatcaccggccactgccgtcccgacggcgacgggctggactgggccgacctggcgcgtgcgcgccagacgctggcgatttacatgggcaccatgaaggcggcggatatcagccagcgcctgatcgcccatggccgcgaggcgcagaccccggtggcggtgatcagccgtggcacgcgtgccgagcagcaggtgctgaccggtacgctgcagcagttggaacaattagcccgacaggcgccgttgccggcgctgttggtgattggcgaagtggtggaactgcaccatcaaatcgcctggtttgggcatcaacctcagacggacggggccgcgcgtcccgccgtagtgaatttggcttaa

SEQ ID NO: 443626 - DNA, 318 bp, Serratia marcescens
atgcaaaatgtctcgcccgtcgtgattgattcaacatcagagaaagaagaaccttcttactcgtttctcggtggcgtcagcggtttcgttttctattggctggcgtttacgctgccgttcttggtctatggctccaacacgctgtttttcctgctgtatacctggcctttcttcctggctttaatgccggtgtcggtcctgatcggcatcacgctcagtatgctgctgcgcgggcgtctgattttgacgctgctgctgaccggcgtcgtggtgctttgtctgttctggctggtgttcagtctgttgagcggttggtaa

SEQ ID NO: 443627 - DNA, 723 bp, Serratia marcescens
gtgattcgcgtacataatctgcaaaaacagtttggcgccacccatgtgctgcgcggcattgactgccagattgccgccaacgaagtggtgtgcgtcatcggcccgtccggctccggcaaaagcaccttcctgcgctgcctaaacgcgctggaaagcctgtccggcggcgaaatcgaggttaacggcttcgcgattcacgatcggaagaccgatctcaataaaatgcgcgccagcgtcggcatggtattccaacgctttaacctgttcccgcatatgaccgtgctggaaaatattattatggcgccgatggacgtgaaacgactctcccgcgccgacgccacgcggcaggccgaaacgttactgcgcaaggtcggtctgctggataaaatcgacgcctatcccggcagcctgtccggcggccagcagcagcgggtagcgattgcccgtgcgctggccatggagccgaaagtcatgctgttcgacgagccgacctccgcgctcgacccggagctggtcggcgaagtgctggcggtgatcaaggcactggcccatgaaggcatgaccatggtggtagtgacgcacgaaatggcgtttgcccgcgaggtggcggatcgggtgctgtttatcgatcagggcgtcattcaggaggaagggacgccgcagcagattttcggccagccggccaatccgcgtactcaggcgtttttaagcaaagttttgtaa

SEQ ID NO: 443628 - DNA, 687 bp, Serratia marcescens
ttgccgcaggtggttgccgtactgccggcggcaggcatcggcagccgtatgcaaacagattgcccaaagcagtacctcaccatcggcaaccaaactatccttgaacatgcgatccacgctttgctgcgtcatccgcgtgtccgtcaggcgatcgtcgccatcggcccggacgatggccactttgcccgtttaccgattgcccgcgatccgcgggtggtggtgacggtcggcggccagcagcgcgccgattcggtgatggccggcctgcagctggcgggcgacgccgaatgggtgctggtgcacgacgccgcgcgtccgtgtctgcatgctgacgatcttgagcgtctgctggcgattaccgaacacagtaaagtgggtggcattcttgccgcgccggtgcgcgacaccatgaaacgtgcggaaagcggggttgcggccatcgcccatacggtggagcgccaggacttatggcacgcgctgacgccgcagctcttcccgcaggcgctgttgaaacagtgcctgcagcgggcgatggatgaaggggcgaacgtcaccgatgaagcctcggcgctggagcattgcggctaccatccgctgctggtggcgggacgcgccgataatattaaagtgacgcggccggaagatttacggctggcggcgttttatttaacccagttgaaccaatag

SEQ ID NO: 443629 - DNA, 1047 bp, Serratia marcescens
atggatatggcaaacctgacctggttgcacggtcagccgtcgtccagcggcgtactgaaggccaacccggaagatttcgtggtggtggaagacctgggctttacgccggacggtgagggcgagcatctgctggtcaatatccgcaaaaacggctgcaatacgcagtttgtcgccgactatctggcgcgttttgccggcgttcacggacgcgcggtcagctatgccggcctgaaagaccgccacgcggtgaccgagcagtggttctgcctgcacctgccgggcaaggaaacgcccgatctcgcccgttttgagctggaaggctgcgaagtgctcgccgccgctcgtcatcgccgtaaactgcgcattggcacgctgaaaggcaacggttttacgctggtgctgcgccatatcagcgatcgtgacgacgtagagcgtcgtctgcaggcgattgccgcagacggcgtgccgaactatttcggcagccagcgctttggccacggcggtaataatctgacgatggcgcgccgctgggccaatgacgagatccgcgttaaagaacgcaacaagcgcagcttttacctttccgccagccgcagcgccctgtttaatctggtgacgtcgacgcggctggccaatcagcagcagcacagcgtgctggaaggtgatgcgttgcaactgagcggacgcggcagctggtttgtcgccaaggcggatgagctggagaatgtgcagcagcgtgtgaatgacggtgaactgctgattaccgcgccgctgccgggagatggcgagcccggcaccgccggcgccgcgctggattttgaacaacagtgcttggcgcagcagccacaattgcttagtctcttaaagcgtgagcgcgtagaccctgccagacgcgctttgctgttgcagccgcagaatatgcaatggaactggtgggatgatgtcaccgttgaactgcgtttttggctgccggccggcagtttcgccaccagcgtagttcgcgagattatgcagcaggataaccgtgatgcggatattactgagtaa

SEQ ID NO: 443630 - DNA, 1002 bp, Serratia marcescens
atgattacttttcgccgggttgcggtgtgtacgatgatcggtgtgtggttggcgggttgtacgaacagcggttcgtcttctgctcctatcagcagcgtcaacggcggtggcggtagcccgatgacggctggcagcgttgcagctccgtctgcgcaggccacgtcgcaagagcgtatcgtttataatcgcagttatgactcaattcaaaagggcagctacaacggcagcacctatacggtaaagcgcggcgacacgctgttctatatcgcctggatcaccggcaatgatttccgtgatctggcgcagcgcaacaatatccctgaaccctatagcctgaatgttggccaaaccattcaacttggtaatggttctgccaatgccggcggcggcgtagtagcggccacggacgctaccggtggcggtattcctaaaccaccatccagcagtcagatccaaacggcaacggttgattctcaaccaactaacgcgtattctgacaattcgggtaaacagaatgtaggtaagatgttacctgcagcaggagccgccgcggcgggaagcgccactgctcctgttaccgcgccagttgctacgcctccggcgagcagcgccgccagtaataattcgccggtcagtacctggcgttggccgactgacggtaaggttattgataacttttcctcatcagacggtgggaataaaggggtcgatatcgctggcactcgtgggcaagccatttttgcgaccgctgatggtcgcgttgtgtacgccggcaatgctttacgaggttacggtaatctaatcatcatcaaacataatgatgattacctgagcgcctacgctcataacgacacaatgctggtccgggaacaacaagaagtgaaggcgggtcaaaaaatagccaccatgggtagcaccggaaccagttcagtacgtttgcattttgaaattcgttacaaggggaaatccgtaaacccgctgcgttatcttccgcagcgatag

SEQ ID NO: 443631 - DNA, 1092 bp, Serratia marcescens
atgcgtcaatttgcccctctcattcctctggttgttttgctttccgcctgcagcagcaagccggaaaataccacccagccgccgcagagccgcacggtgcaaggcggtttcctgctggaggccgatcacgttaatccgatgctgtccggcgattatgcctataacgcggcggcccagcgctttatcgacaaaatggtgcgcgagcacggctttgatcgccaacagctgcacgatgttttcgcgcagaccaaacgcctggactgggtaattcgtctgatggaccgtcaggcgccaaggccgaccggccagccgccttccgggccgaatggggcctggctgcggtatcgtaataagtttattacgtcggacaatattcccaacggcgtggccttctggaatcagtatgccgacgcgctggagcgcgctcaccgggtatatggcgtaccgccggaaattatcgtcggcatcatcggggtggaaacacgttgggggcgggtgatggggaaaacgcgcattatcgatgcgctggcgacgctgtcctttgattatccccgtcgtgcgacgtactttaccggcgagctggaaactttcctgctgatggcgcgtaaagaacagcgcgatccgctggagctgcgcggttcttatgccggcgcgatgggatacggccagtttatgccgtcctcctttaaggattatgcggtcgactttaacggcgacggacacattaacctgtgggaccctgaggacgcgatcggcagcgtggcgaactatttccgcgcgcacggctggcagcgcgatgcgccggtagcggtgccggccagcggccaggcgccatatatggagcacggcttcaagacccgctatacggtcggcgccctgcaggccgcggggctgacgccgcagggcgggctgggccatgaccaggaggtgagcctgctgcgtctggatatgggcagcgattatcagtattggttcggtttgcctaacttttacaccatcacccgctataaccacagcacgcactatgcgatggcggtatggcagttgggtgaggcggtcgggcgcgagcggcgcggtggcagcgtattctga

SEQ ID NO: 443632 - DNA, 1404 bp, Serratia marcescens
gtgaaaaaaacgtttggcgtattctttccgttatataccacaacgctgctgatgctgctgggctccgggctgctgaccacttatatctctttgcgcctgacctcgattcacgtcaccggcggcctgatcggtgccatcaccgccgccaactatatcgggctggtgatcggcggcaaggtcggtcattttttgattgcgcgcgtcgggcatatccgcgcctacgtctcctgtgcgggcattattaccgccgcggtgctggggcacggtttgaccgaattcatcccgatttgggtggtgctgcggatgattatcggcctgtgcatgatgtgccagtttatggtgctggaaagctggcttaacgatcaggccgaatccaatcagcgcggcgtggttttcggcttctatatggccgccacctatctgggcctgtctctgggccaggtggtgctgatgctgcaaaccgatctgggcatcaccaccctgctgattatcgccctgtgcttcgcgctctgcctggtgcccatcgcccttaccacccgcaccaatgtccgccatatgtcgccggcgccgctggagctgctctactttattcgcaacatccccagcgtgctgaccaatacgttggttatcggcatggtggtaggctcgttttacggcctggccccggtgtataccagccagcaggacctcagcacccagcataccggcctgtttatggcgctggcgattttcgccggcctggtggcgcagttccccttgagctggctgtccgatcgttacaaccgtacgctgttgatgcgccttaacgctattctgctggtgttagcggcgctgccgctggcgattttgccgcacatcactttcccgctgctgctggctatcggttttgtcgtcagcatgctgcagtttacgctgtatccgctggcggtggcgctggccaacgacctggtcgagccggagcgccgtgtgtcactggcggcctgtctgctgatggccttcggcgtgggcgccagcatcgggccgctgacggtcggcatgctgatccagccgctgggcggcaatattctgtatgtatttttcgccctgtgcggcgtgctgattgtcggctttagccgcacggtgaaagaggatgaatcgcagtttgtcgacgatgcgccgctgccgcacattccgatgccggacagcctggtcagttcgccgctgtcgccggcgttgaacccgaccttcgatgaacaaacgattcatgacaccatgccgccgccggaagccgcaccagatccggtcgaaccggaacccgccgcagagaatacggaagcgacggatgaggaaacggcagaagcgcctgcccaaggagcggacccagatgaggacaccgggctgaaaaaagcctacaccatgctgtag

SEQ ID NO: 443633 - DNA, 489 bp, Serratia marcescens
atgagcgaagagagcctgcataaacttagcgtggccgtcggcgaaaaattaaaggcaggcggacgctggatcacggcggcggagtcctgcaccggcggcggcattgccaaggcgattaccgatatcgccggcagctccgcctatttcgaccgcggtttcgtgacctacagcaaccgggcgaagcaccaactgctgggcgtatccgaggggacgctgcaggtgcatggcgcggtcagcgaagcggtagtgcgtgagatggcgcagggcgcgctgcatgcggcggacgccgatatcgcgctgtcggtcagcggcatcgccggaccggatggcggcagcgcggcgaaaccggtcggcaccgtatggtttggctttgccgagcgttcggggcgggtgttggcgtgcgaaaggcatttcagcggcgatcgtgacgccgtccggctgcaggcgacggttttcgcgctgcaaaccgtgctcgatgaatttttgtaa

SEQ ID NO: 443634 - DNA, 1053 bp, Serratia marcescens
atggctattgatgagaacaagcaaaaggcgttagctgcggcactgggccagattgaaaaacaattcggcaaaggctccatcatgcgtctgggtgaagaccgttccatggacgtggaaacgatctctaccggctcactgtcacttgatatcgcactgggcgctggcggcctgccgatgggccgtatcgtagaaatctacgggccggaatcttccggtaaaaccaccctgacgctgcaggttatcgccgccgcgcaacgtgaaggcaaaacctgcgcctttatcgatgccgaacatgcgctggatccggtgtatgcgaaaaagctgggcgtagatattgataatctgctgtgttctcagccagacaccggcgagcaggcgctggaaatctgtgacgcgctgacccgctccggcgcggttgacgtgatcatcgtcgactccgttgcggcgctgacgccaaaagcggaaatcgaaggagaaatcggtgattcgcacatgggcctggcggcgcgtatgatgagccaggcgatgcgtaagctggccggtaacctgaaaaacgccaacacgctgttgatcttcatcaaccagatccgtatgaaaattggtgtgatgttcggcaacccggaaaccaccactggcggtaacgcactgaagttctatgcctctgttcgtctggatatccgccgtatcggcgcgattaaagagggcgatgaagtggtcggcagcgaaacccgcgtcaaagtggtgaagaacaaggttgccgcgccgttcaaacaggccgagttccagatcatgtacggcgaaggcatcaacagccgtggtgaattgattgacctgggcgtgaagcacaagatgattgaaaaagctggcgcctggtacagctacaacggtgataaaatcggccagggtaaggcgaatgcctgtaacttcctgaaggaaaacccggcgatcgctgccgagttggacaagaagttgcgcgatctgctgctacacagcagcaccgttgaagctgatgaaggctttgatggcgaagccgaaaccagcgaagagttttaa

SEQ ID NO: 443635 - DNA, 531 bp, Serratia marcescens
atgaacgaacgggtttcccaaaagcctggaaacacgcagaatgacctgctaagccgcgcgatgcgcttactgtcacaacgcgatcatagtgaagatgaactgcgccgcaagctgacggcgcagccgtttttctcccgtgctaaattctccgacaaagcctcttccccatcttgcgatgaacccattgacccagccgttgtcgaacaagtcattgattattgctatcagcataattggttggacgatcggcgttttgcgacgcgttatatcggcagccgcagccgtaaaggctacggtgcccagcgtattcgttccgagctgatgcaaaagggtgtagataaagaggtggtgcagacggcgttggccgaatgtgacatcgactggtgtgaacaggccaaagaggttgcgcagcgtaagtttggcgacccgttgccgaaagagtggaaagacaaagccaaagtgcagcgttatctgctttatcgcggcttttttcaggaagaaattcagtcgatttaccgtgattttgcgtaa

SEQ ID NO: 443636 - DNA, 567 bp, Serratia marcescens
atgtacgatcgctaccaaggtctgatctttgacatggacggcacgattctggataccgaacctacacaccggcaagcgtggcgtgacgtgctggggcgctatggcatgacatttgacgagtctgccgtggtggcactgaacggttcgccgtcctggcgcatcgccgaggcgattcttgccgctcagcaggccgatctcgatcctcatcagctcgccgcggagaaaactcgtgcggtagaagcgatgttgctcgatagcgtgcgtccgttgccgttggttgaggtggtgaagtcttatcacgggcgccgcccaatggcggtgggcaccggcagtgaacaccgtatggcggagagactgctgcgtcatctggggctgtatcagtgctttgacgcgattgtcggtgccgatgacgtccagcgtcacaagccggagccggacaccttcctgcgctgtgcggagttgatcggcgtagcgccggaacagtgcgtagtgtttgaagacgccgacttcggcattcaggcggcacgcagcgccaatatggcggtggtagacgtccgtacgttgtga

SEQ ID NO: 443637 - DNA, 429 bp, Serratia marcescens
gtgagtagtacgctaacgctattttcattattcggcagcagttttctcagtgcgacgctgctgccgggaaattcagaaattcttttggtcgccttgctgactaaaagccgtgttgcaccggaatggctggtgctggcggctgctttgggcaatacgcttggcggactgacgaatgtgattatcgggcgcctgttaccggcgttgaagccgcaacgcgggctggaaacggcactgcgctggttacaacgctttggcccggctgcgctgttgctcagttggttgccggtagtgggcgatttgttgtgcgtgttggcaggctggctgcgcatgccatggggatctgttgtgctgtttctggcgatcggaaaggcgctgcgttacgtcattttgactatgataacgctacaggggatttcctggtggcactaa

SEQ ID NO: 443638 - DNA, 1581 bp, Serratia marcescens
ttggagcgggaggtcaatttgatcccggacgtatcacaggcgctttcttggttggaagcccaccctcaggcattaaaaggcatccgccgcggtattgagcgtgaaacgctacgcgtgacggcggatggcaagctggcgacaaccggacatccggaacatctgggggcggcattaacgcaccattggattaccacggactttgccgaagcgctgttagagtttattacgccggttgatgacaatatcgatcacctgctgacgtttttacgcgacatccaccgctatgtggcgcgcaatattggcgaagagcgtatgtggccgctgagtatgccgtgttttatcggcgctgagcaggatattgaactggcgcagttcggttcatcaaatatcggccggatgaaaacgctgtaccgcgaagggctgaagaatcgctatggcgccttgatgcagaccatctccggcgttcactataacttctcgctgccgatggagttctggcaggcctgggcgggggttgaggatgcggaaagtggcaaagagcaaatctccgccggttatttccgtctgatccgcaactattaccggttcggctgggtgatcccttatctgtttggtgcatcgccggctatttgctcctcgttcctgaaagggcgggaaacctcgctgccgtttgaaagcaacggacgcggcatgctgtatctgccgtatgcaacctcgctgcgtctgagcgacctgggttataccaacaagtcgcaaagcaatctgggtattaccttcaatgacctgcacagctatgtccaggggttgaaaaaggcgattgcgacgccgtcggaagagtttgctcagttaggcgtgaaacaaggcgaccattatctgcagctgaacaccaatgtgctgcagattgaaaatgagctgtatgcgccgattcgtcccaagcgcgtgacccgcagcggcgaaacgccgtccgatgccttgctgcgcggcggtattgaatatattgaagtgcgttcgctggatattaacccattctcgccgattggcgttgatgcggtacaggcacgtttccttgacctgttcctgatctggtgcaccctggcggatgcgccggaaatgagcagcgatgaactgctgtgtacgcgtaaaaactggaaccgggtgattctggaaggccgtaaaccggggcaaaccatcggcatcggttgtaacgatacgcgtaagccgctggtgcaggtggggaaagcattgtttgccgatctgcggcgcgtggcggaagtgctggacagcgaagccggcgaccgggcgtaccagcaggtgtgcgatcaactggttgccgcttttgacgatccggagcagacgttttccgcccgtattttaaaggcgatgctggaagacggaaccggtaaggtgggtcttgaactggcggaacattatcgccagatgctgcagtctgaaccgctggaaattcttagcgacgagctgtttacacaagaatcacgtgagtcatggcagcgacagcgcgacgtagaagcggcggatacgctaagctttgaacagttcctgaaggcaaacggcgggggctga

SEQ ID NO: 443639 - DNA, 579 bp, Serratia marcescens
atgtcgtttgaattacctgcattaccgtacgcaaaagacgctctcgaaccgcacatttccactgaaacgctggaataccactacggcaagcaccacaacacctacgtggtgaacctgaacaacctggtgaaaggcagcgagttcgaaggtaaaaccctggaagagatcgtgaaaacctctaccggcggcgtattcaacaacgcggcgcaggtgtggaaccacaccttctactggcactgcctgtcacctcagggcggcggcgaaccaaccggcgcggtggcggacgccatcaatcaggctttcgggtctttcgccgcgtttaaagaagcgttcaccaaatccgctgtcggcaacttcggcgcaggctggacctggctggtgaaaaaagcagacggctcactggcgatcgtcaacacctccaacgcagctaccccgctgaccggtgaagacaaaccgctgctgaccgtggacgtgtgggaacacgcttactacattgattaccgcaatgcgcgtcctaactacctggaaaacttctgggcgttggtaaactgggcgttcgtggcggaaaatctggcataa

SEQ ID NO: 443640 - DNA, 825 bp, Serratia marcescens
atgcgtctaatagttacgctttttgtgctgctgtttacccagctgttcttcaatctggcgcacgctgcgccacagtcgcgcgttgccgctgagccgcgtaaaagccacgtcagcgatgcgcgcccggacgagcgtcgaaaaaagaaaacgctgaagagcagtaaaaaagcccgcaccgccacggcgccaaaaaccaccaaggtaaaagcgcataaaagcacgacgattaaaaccgccaaaaaaacgacccgcattaaatctacgcgtaaagtgacgcacctggcgaaaaataaagtcaccccgccgaagaaaggttataaaaaaggctacggtcgtcaccgcacccacggcctggcaaccagcaaactgctgagcgacgataaaccgctcaagctcagcgcggcgcataaaaagcgctatcagcgggcgaagcaaaccgcaatgaccaagctgatgaatcaaatgggcaagccctatcgctggggtggcgcctcgccgcgtaccggctttgactgcagcggtttaatttattacgcctataaagacgtgatgaaaattaaaatgccgcgtacggcgaatgagatgtatcacctgcgtgatgccgcgccgattaagaaaagcgaattgcaaaaaggcgacctggtattcttccgcattaataaccgcggcgtggccgaccacgttggcgtttacctcggcgacggcaagtttattcagtcgccgcgtaccggcaaagatatccgcatcagtcagctggacaataactactggcaaaaccattacatcggcgcccgccgcgtgatgacgccgaaaaccgttcgctaa

SEQ ID NO: 443641 - DNA, 621 bp, Serratia marcescens
atgctcagcctcatgacgacgaaacatacgcactgcaacacagatacacgcgaacacctgctcgccaccggcgagtcactcagcctgcgcctggggtttaccggcatgggcctgagcgaactgctggctaccgccggggtgcccaagggctcgttttatcactacttccgctcgaaggaagccttcggcgaagccatgctgcaacgctatttcgcgcattatgacgtcgccatgctggcgttgttcaacgacagcggcagcgatgcccgccaccagttgctgagctattatgcgcaggccatcagttttcactgccgcagcgaatgtcacaattcgtgcctggcggtaaaactgtccgccgaggtcagcgatctgtcggaaccgatgcgtcatgcgctggaaaccggcagcgcgcaggtgatcggccggttgcaggacgcgattgaacgcggtatccgcgaagggtcgctggcgataactatgagcccggcggccaccgccgaaacgctgtacgcgctgtggctcggcgcttcactgcgcgccaaaattcgtcgttcggttgcgccgctcaccagcgcgctggaaagtattgaactgctgctgcgccctgcgcagccttaa

SEQ ID NO: 443642 - DNA, 1641 bp, Serratia marcescens
atgcggttactaccaaaattttcatgcggcagcctgagctttatcctaggctgcgcgctgttctttacgctatttcaaaatgcgctgtttttgcatacggcgtggtcatatatccgtttcggcagtttcaacaacctgctgttcgccgccaccatgccggtggtgatcttctgcgcgctgaacatcattttcagcatgctgaccatcccctatctgcgcaaaccgttaatgattgttttcctgctgggcagcgctgcggccaactactttatgtatagctatggcgtcgtgatcgacggcgatatgatgcaaaacgccgttgaaaccaatgcgcaggagatcggcgcgctgctgacgccgcaaatggggctgtggctgctgctgcttggcgtgctgccggcagcggcggtgtctatcgtcaggattcgccagacccgcccgtggtggtacacgctcggcctgcgcgccgccaacatgatgctgtcgctggtggtgattctgctgatcgccgcattattctataaagactacgcgtcgctgattcgcaacaacaaaagcgtggtgaaaatgctgacgccgtcgaattttatcgccggcgccatcaagctcaccgaacagcgcgaactcacccgcagcctgcctctggtgaaaatcggcgaggacgcccataaggggccgttgctccgcgccgagcagaaaaagacgctggtgatactggtggtcggcgaaaccgcgcgcgcggaaaacttctcgctgggcggctacgggcgcgtcaccaacccgcgcctgcaacaggacagcgtgatctattttaaaaacgccgcctcctgcggtaccgaaaccgcggtatcggtcccctgtatgttttcgaatatgacgcgcagcaggtataacgccaccctggccgagcatcaggagggactgatggacgttttggcccatgccggaatcaacgtgctgtggcgcgataacgataacggctgtaaaggcgcctgtgaccggatccctcacgtcgatatgaccaaactgcaactgccgcaggattgtgaaggtgacgtctgtatggacagtgtgctgctgtatcacctgcgggactatattgatagcctgaaagacgacggcgtgattgtgctgcaccagatgggcagccacggcccggcctactaccgccgcagcacgcctgagttccgccgttttaccccgacctgcgacagcaatcagatccaggactgtagccaccagcaactgatcaatacctatgacaattcgctgctgtacagcgacgccatgctcgacagcaccatcaaactgctgcagcagtacagcgaccgtttcaataccgcgctggtatacctgtcggatcacggcgaatcgttaggggaaaatggtatgtacctgcacggcacgccgtatctgttcgcaccgagccaacagacgcacgtaccgttcctgatgtggatgtcggcagactatcagcgcagcttcggcattaaccgccagtgcctgcaaaatatcgcgcagcgggatgccgtctcgcaggataatctgttccataccctgcttggcatgctgaacgtgcagacccggcagtatcagcctcaattggatattctgcagcgctgccgcagcgacagcgcttaa

SEQ ID NO: 443643 - DNA, 642 bp, Serratia marcescens
atgaaaattgccattattggagccaccggttttgtaggccgtcgcgtagtggatgaagccctgtcgcgcggactggacgtcaccgccatcgcccggcagaaaaaagatttaccggacaacgcccgcctgcatatcgcactcggcgacgtggccgataccgactggctgaccacgcagctgcgcgggcaggatgcggtgatcagcgcctttaaccccggctggggggaagataacctgtatgacaaaaccgtggccggcatgcagcaaattctcagcgcggtgaacgccgccggcgtcacgcgttttctggtggtcggcggcgccggcagcctgcaggtcgcacccggcgtagaactggtcgatacgccggaattcccggaaaatattcgccccggcgcccgcgcggtgcgtgatttgcgcaaccagctgttgcagaaccacagcctggagtggacctatctgtctccggccgccatgctggagccgggcaaacgcaccggccaattccgcctcggcaccaccagcctgctgatggacggcgatgcgccggcgcatatttcggtggaagacctggcggtggcgatcgtcgacgaaatcgaaaaaccgcagtttatccgggcgcagtttaccgccgcctactga

SEQ ID NO: 443644 - DNA, 912 bp, Serratia marcescens
atggcggtgtttgccgtggtggtggccgaaggatcgctggcggcggcggcacggcggctgggcatgtcgtcatcggcggtcagccagcacctgcgcgcgttggaaagttcgcttggcgtgccgctgctgcaccgctccacgcgcaaactggcgctgaccgaggccggcgcggcgttttatcccggctgcgaagccatgctgcagcaggcgcaacaggcgcagcagcggctggcggaattgcgggacacgctggtgggggagctgcgcatcgccaccaccgtcggtatcggcggcgggccgctggccgaggcgctggcgccgctgttgcaggcgcatccgcagctgacgctgcgcgtgctggcggatgaccgggtggtggatatgattgagcagcgggtggatatttcgctgcgggtcagccggcagctggcggacacctcgatgatcgcgcacgctctgagcgagtggccgatggtattgtgcgctgcgccgcgctatctgagccagcacggcgtgccggaaacgccgcaggcgctgcagcagcaccgctggatcagcggcaacaacgccgcttttccgctggatttgcaccatgcctcgggggagaccttcaggctgcggcaggcgcagggccagatcgtcagcgacagtatgcacgtgatgcgcgcctttacccgtatggggcttggcatctccggtcagccgctgtatgagattggcgatgaactgcggcgcggcgagctgattgcgctgttgcccgcctggcggccgacgccgctgcggttgcatgcgctgacgctggaacgcgcaatgccggagaaaacccgccaggcgctgcgctatctacgcgattattttcgccgtctggcggaaaagtcgcttgccatcaacgccgatgacgtcttcaattaa

SEQ ID NO: 443645 - DNA, 240 bp, Serratia marcescens
gtgccgcagcaacttgagttcttcgacattcccagcccgtgtcgcggcatttgtcaggccgacgagcgcggatactgccgtggctgcctgcgcagccgcgaggagcgcttcggctggatgaacatgagcgatgcgcaaaagcgcgacgtgctgcgcctgtgccgccagcggctgctgcgtctgcagcgcgccaataaggcgacggaagaacaaaaccccgatcagccttcgctattctga

SEQ ID NO: 443646 - DNA, 897 bp, Serratia marcescens
atgggtcatcgtattcaactggcgccgcaggggccggaattttcccgtatggtctgcggttactggcggctgatggagtggggcatgtcgccgcaacagctgctggggtttatcgagcagcaccttgagctggggatcaccaccgccgaccacgcggatatctatggcggctatgcgtgcgagcaggcatttggtgacgcgctgcggctgcagccggcgctgcgtcagcggctggaactggtgagcaaatgcggcattgccaccaccgccaagccgggcaacccgatcggtcattacatcaccgaccgcagtcatgtcgtcagcagcgccgagcattcgctgcaaaagctgcataccgactatctcgatctgctgctgattcaccgtcccgatccgctgatggacgccgacgaggtggccgaagcctttgtcgatctgcacaaaagcggtaaggtgcgccactttggcgtgtctaacttcaccccggcgcagtttacgctgctgcagtcccgtctgccgttttcgctggtcaccaatcaggtcgagatctcgccgctacatcagccggcgctgctggatggcacgctcgaccagtgccagcagttgcgcatcaagccgatggcctggtcctgtctggggggcggacggctgttcagcggcgcggagagccagccgttgcgcaacgaactgcacagtgtggcgcaggagatcggcgccgacacgattgaacaggtggtttacgcctgggtgatgcgtctgccgtccgcgccgctgccgattattggttcgggtaaaatcgaacgcgtcacatcggcgttgcgggcgctggagctgacgatgagccgcgagcagtggttccgcatccgcaaggcggcgctggggtatgacgttccctga

SEQ ID NO: 443647 - DNA, 1827 bp, Serratia marcescens
atgggcatttttgattatcgtgagacggacgccgctgcgtccaaaacgctgtttgccgacgcgatggcgatctcccactatgcataccataacatcgataacggctttgccgtcggctatcagaataacggctatggcctggggctgccgctgacgctggttggcggtatcctcggcagtaccgactcgcagggcgcgctgcccggcattccctggaacccggatgcggaaaaggccgcgctggaggcggtcaccgaggccggctggacacgggtcgatgctcagcagttgggctaccagggtaaaaccgacgcccgtggcacctatttcggcgaaaccaggggctatgaaaccgcacaggctgaagtgctggcgaagtatgacgatgccggcaagctgaccgagatcggcatcgccttccgcggcaccagcggaccgcgcgaatcggtcatcagcgacagtatcggcgatgtgattaacgatctgctggccggcttcggcccggcgggttatgccgaccattacacgcttaacgcctttaatacgctgctgggcgacgtggcgcgctttgcgcaacaaaacggtctgacgggcgaagacgtggtggtcagcggccacagcctgggcggcatggccgtcaacagtatggccagcatgagcgacgctaactgggacggtttctacgcacacgccaactatgtggcattcgcctcacccactcagcaccaaggcgacgatcgggtgctgaatatcggttacgaaaacgacccggtgttccgcgccctcgacggcagtacgctgaccgccggttcgctgggggtgcacgacggcgtaaaagagaacgccaccaataatatcgtcaattttaacgatcactacgcctccgccgcctggaacgcgctgccgttttccatcctgaatattcccacctggctgtcgcacctgcccagtgcctatcaggacggtctgacgcgcgtgctggactcggcgttttacgatcttaccgggcaaaattcgacggtggttgtcgccaatctgtccaacgtgacccgcggctcgacctgggtggaagatctcaaccgcaatgccgagacgcacagcggaccgacctttatcatcggcagcgatggcaatgatctcatcaaaggcggtcaaggcaacaattacctcgaagggcgcgccggcgacgataccttccgcgacggcggcggctataactggatcctcggcggtgacggccgcaatacgctggatatccagcagccgctgcaggatcgcgaagtggcgtacgacggcgtaaacctgtatctgcgcgacgccgacggcgggattacccttgccgagaatatctctacgctgcgcagcaaagagtcgcagctcgtcgtgctgaataaaaacgtcgatcatcaggtcaccgccgatggcctgctctctgcgtcggggctgaccgcttacgccgactcgctcaacggcggcgacggcggcgacagcctgacggcaacgcaggccggcggctggctgttcgggctggaaggcgacgatacgctgaacggccagctcggcaaccatacgtttgtcggcggagccggcaacgaccaactgcaggccggcggcggcggcaatacgtttctgttcagcggcagcttcggccacgatcggctggaggggttgcaggcaagcgataagctggtgtttatcggcgccggcagccgggtcgaataccatgaagcggataacaatctgactatcgggctgggcgacagcagcgtgacgctggtcggcgtcagcccgcagtcgctgcaggacggccagctgattgtggcctga

SEQ ID NO: 443648 - DNA, 522 bp, Serratia marcescens
atgaaacatttttggtgtgcggcaatcggcctgctggcctgcggcgttgcccaggcggcaacggaagaggtggatattcatttggtgaccgcgcagggcatcggtcaggatattggtaagatcgccatcagcgaaacgccgtacgggctgcagtttacaccgcagctcaaagcgttgcccgccggcatccacggttttcacgtacatgagaacggcagctgcgagccggcgatgaaagagggcaaggcggtggcggcgctggcggccggcggccactttgacccggaaaaaaccggcaaacacctggggccgtatgccgatggccacctgggagacttaccggctatctacgttgccgaagatggcaccgccagctatccggtgctggcgccaaggctgaaaaaaatcagcgacattgaaggcaaggcgctgatggtgcacgtcggcggcgataaccatgccgatcggccgaaaccgctgggcggcggcggcgaccgcttcgcctgcggggtgatcaaataa

SEQ ID NO: 443649 - DNA, 2040 bp, Serratia marcescens
atgaatctgccgtttctggaatggaaacgcacgccgtgggggcgcgccaccggcggccagtggcgctatgcgctgcgtaattcgttggcaatgtgtctggcgctctgggtagcgttcgcccttgatctggacgagccctactgggcgctcacctcggcggcggtggtcagtttccccacggtgggcggcgttatcagcaagagtatcggccggattatcggcagcctgatcggcgccgccgcgtcggtcgccatcgccggccactgcctgaacgatccctggctgttcacgctgtttatcgccgcctggatcgggctgtgcacctatatttccaaccactatcagaacaatgtctcctatgccttcgccctgtcgggctacaccgccgccattatcgccttcagtacggtgaacgtgacggacacgctggatattttcaaccttgcccaggcgcgcgtctgcgaggtgattaccggcatcctgtgcggcgcgctgatgatgatgatcctgcccagcacctctgacggcgaaacgctgctgacctccctgcgccgcatgcatctgcgcctgctggagcacgccgccatgctgtggcaaccggaggtgacgccgcagatccgcacctcccacgaaggggtcatcagccagatcctcaccatgaatctgctgcgtattcaggcgttctggagccactaccggctgcgccggcaaaaccatgtgctcaactacatgctgcacctgcagctgcgcctgaccagcgtaatttccagcctgcggcgtatgctgctcaactggccggatccgccggccaatctggagccggtactgacacagctgcttgacgaactgcgcaatgcgcataccgacaaataccggctggcgaaaatcctgcagcagatcgcgccgctggatgaaacggactatcgccaccatgcttttttcctgcggctgcgcgacttctgctggctgtatctgcaggctaaccgctggctgctgcagctggaaaacgccacgccggtcagcaatattcagcctccggcggtcagcgcgctggcgcgccataccgacagttatgaagcggcctacaacgggctgcgcacttttttaagcatcgtgctcggctgcgcctactggatcaacacgcagtgggaggccggcagcgccgctctgacgctgaccgccatcagttgcgtgctctactccgccacgccgtcgccgatcaaaagcatcaccacgctgttaaaagcgctggtgctgctgtccgtcggctgctttgtggtgaaattcggtctgatggtgcaaatcgatgatttctggctgttctgcgcctttctgttcccggtgctggtcaccatgcaaatgctcaagctgcagaatcccccctacgccgcgctgtggggacagctgattgtctttatgggctcttttcttaccatcaccaacccgccgagttacgactatcagtcattcctcaatgacaatatcggcaagatcgtcggcgttctgttggccgggctggccttccagatcctgcgccccagttcggacaagcgcaaaagccggcgcatcatccgcgccctgcggcgcgattttattgaccaactgagccacaagccgcagctgcgccaaagccggttcgaatcgctgatttaccaccgtatcagccagttgaatcagagccaggaccaggaggcgcgcacctggctgctacgctggggcgtggtgctgctgaactgcagccatatcgtctggcagctgcgtgactggcagacgcgctccgatccgctctcggcggtgcgcgatcgctgtattcactgcctgcgcggcattatgacggaaagaggcgttcagcaccgttcgctggatgcgacactgcgggagttactgcggataggcgatgcgctggcgcagcatcatgacgcggcggcgcgggaattggccgggctggtgtggcggctatactgctcgctgcaacagctgcggcaggctatcgcgccgccgcaggacgatggggccgccgtcatgacggccccatcctga

SEQ ID NO: 443650 - DNA, 864 bp, Serratia marcescens
atgaagtataaaacattaaaatatttttccacggtcattgtctgcgccatcgccatttgcgccggttggtggctgtggaattattatatgcagtctccctggacccgcgacggcaaagtacgcgcggaactggtcaatatcaccccggaagtctcaggccggctgaccaaaataaccgtacacgataaccaatatgtttccgctggcagtctgatatttagcctggacgccgagccttaccgcatcgcgctggcgaatgccgaggcggcgcttgccaaagcgcagtccgacctggcgaaggccgaacatgaagccgcccgccgccgcggactgccgcgcgatgttatttccagcgaagcgctggacgctgcaaatttaaccgcacaggcaatgaaagcggcttataaagccgctcaggcaaatcttgaacaggcaaaatggaatttaagtaaaacgcaaatttatgcgccgacggacggttatatcactaatttacaggcgcgggtgggtaactatgccagcaccggcaccccgctggtggcgctggtcgatgtgcactctttttatgtgctcggttattttgaagagaccaagctcaagcatattaaagagggaaacaaagcggatatcactttatataatggcaatgtgcctttacagggacaggtcgagagcatcggtcgcgctatttatgaccaaagcgtcgaaaacggcggcaatttattaatggatgtgaaacccaatgtgccctgggtacgtttggcgcagcgcgtgccggtacggataaaattgctcaatgtgcccgccgacctgccgctggtcgccggcaccacctgcaccatttcgatacatcagaaaggttaa

SEQ ID NO: 443651 - DNA, 468 bp, Serratia marcescens
atgatcaaacgtcttatcgttgttgctctagccgggctgacgctggccggttgcgccaatgattccatgtccggcgacgtttatacgtcggcacaggcgaagcaggtgcagcaggccagctacggcactctggtatccgtgcgtccggtgaaaatccagggcgaaggcggttctaacatgctcggcaccatcggcggcgcagtgatcggcggcttcctcggcaacacgatcggcggcggcaccggccgtagcctggccaccgcagcaggcgccgtcgccggcggcgtggcgggcgaccagatcggcgacgttgccggccgtacttccggcgtcgagctggaaatccgtccggacaccaaaggcgacaacattgtcgtggtgcagaaagcaggcgccaccaagttcagcccgggccagcgcgtgcgtatggcgcgctccggcaatacggttaccgtatctccgctgtaa

SEQ ID NO: 443652 - DNA, 1131 bp, Serratia marcescens
atgaagtcaggccgctatatcggcgttatgtcaggcaccagtctggacggggtagacgtggtgctggccgccattgatgaacgtatggtggcgcagcaggccagctacagccatccgctgccgattgcgcttaagcatgaaatcctcggcatgtgccagggccagccgaccacggtctccgctgtcgggcagttggacgccaggctgggcacgctgttcggcgaagcggtgctggggctgctggggcaaaccggcgtgccggcgcatgagattaccgctatcggctgccacggacagaccatctggcatgagccggaaggggacacgcgcttttcgatgcagctgggtgacaataaccgcatcgccgcgttgaccaacattaccaccgtcggcgattttcgccgccgcgacatggcctacggcgggcagggcgcaccgctggtgccggcgttccatcaggcgctgctgtcgcatccggcggagcggcgcatggtgctgaatatcggcggtatcgccaacctgtctatgctgctgccggggatgccggtgcgcggctttgacaccgggccgggcaatatgctgatggacgcctgggtatggcgccatcgccagcagccgtatgacaaagatgccgcctgggcgatgagcgggcgggtttgcctgccgctgttgcagcagatgctggccgatccttattttgcgctgccggcgccgaaaagcaccggacgggaatatttcaatatcggctggctggagcagcagttggcgcggctgccgggcgtcagcgcggcggacgtgatgaccaccctggtagaactgaccgccgtcactatctgcgaacaggtgatgctggccggcggcagtgaacggctgctggtgtgcggcggcggggcgcgcaatccgctactgatggcgcgcatggcggcattgctgcccggcaccgaggtcagtaccaccgacagcttcggcatcagcggtgacgatatggaagcgctggcgtttgcctggctggcgttccgtaccctgtccggccagccgggcaacctgccgtcggtgaccggcgccagccgcgaaacgctgctcggtgggatttatccggttttcccatcgcaccggcgtccgctctgttag

SEQ ID NO: 443653 - DNA, 303 bp, Serratia marcescens
atgaaaaaacttcttcttgccggcctgacgctggcgctcggcgggtgcagctatttcctgccgcagcagagccaggtgctgcactaccagtgcggcaccacgccgctgaccgtggcgcttaacggtgaagacagcacggtcaacctgttgctggatggccagcagctgacgctgaagcagcagttggccgcctccggcgccaaatacggcgatggcaaatatacgttttggtccaaggggcagagcgcgttcgtcgaacgtgacgataaagtgattatgagcgactgcacgctggtgaactga

SEQ ID NO: 443654 - DNA, 654 bp, Serratia marcescens
atgtctgataactctcagtttgatgtcgcggacctgcgccgcgaatacacccgtggcggcctgcgtcgtcaggaccttacggcaaaccctctggatctgtttgagcgctggctgcagcaggcctgcgaagcgcgcctggccgatcccaccgccatgtgcgtggcgacggtggatgagcaggggcagccgtatcagcgtattgtcctgctgaagcactatgacgacaaagggctggtgttttacaccaaccttggcagccgcaaggcgcaacagctggcgcacaacccgaaaatcagcctgcattttccctggcatacgctggaccggcaggtcagtttcctcggcacggcggagcgcctgtcgacgctggaagtcatgaaatatttcagcagccggccaaaagacagccagatcggcgcctgggtgtcgcagcagtcaacgcgcatctcggcgcgtggcgtgctggagagcaagttcctcgagctgaagcagaaattccagtccggcgaggtgccgctgcctagtttctggggcggtttccgcgtcagattcgactccgttgagttctggcagggcggcgaacaccgtttacatgaccgtttcctgtaccagcgcgacgggaatgactggaaaattgaccgactggcgccctga

SEQ ID NO: 443655 - DNA, 795 bp, Serratia marcescens
atgcgccgcatgggcgtcaacgtctggccgctgaataccgtgcagttttccaaccatacgcagtacggccgctggaccggctgcgtgatgcccgccagccacctgagcgagatcgcccagggcatcgcggatatcgaccagctgcagcgctgcgacgcggtgctgagcggctatatcggttctcccgaacagggcagccatattctggatatcgtgcgccaggtgaaacaggcgaatcccgacgtctggtatttttgcgatccggtgatgggtcacccggaaaagggctgcatcgtggcgtcgggcgtggcggagtttctgtgtcagcaggcgttgccgtgcagcgatatggtggcgccgaacgtgctggaactggaacagctcagccagcgtgagatcgcctccgtcgatcaggcggttgacgccgcgcgcgcgttgattgcgcgcgggccgaaagtggtgctagtgaaacacctgagccgcgccgggtatcgccacgacgcgtttgagatgctgctggtgacggcggaggaagcctggcatatcagccgtccgctggtggacttcggcagccgtcagccggtgggcgtgggcgatttgaccagcggcctgctgttggtggatctgctgcagggcaaggcgctggaccaggcgctggagcacgtgacggcggcggtgtatgaagtgatgctgaccaccaaggagatgggcgagtatgaactgcaggtggttgccgcgcaggattatatcgtcaacccgcgctgccattttgcggcggtgaagctcggggcataa

SEQ ID NO: 443656 - DNA, 894 bp, Serratia marcescens
atggcctctttttccggtatttgggtagcgttagtcaccccgtttaatcaacacaacgtcgattttcccgcgctaaaacgtctggcgcagcatctgctggccaccggcgtcgacgggttggtggtgtgcggcaccaccggcgaagccgccgcgctcgataaagaggagcaactggcggtgctggacgcggtgctggaagtggcgccggcgcaccaggtcgtcatggggctggccggcaacaatctgaccgccaccctgcagatgcagcaggcgattgcacagcgcgacattgccggcgtgctggttcccgcaccttattacatccgtccgtcgcagtccgggctggttgagtacttcaccacgctggccgacgcgtcgcacgtgccggtgatcctgtacaacgtgccttatcgcaccggcgtcacccttgagctggacacgctgcgtcagattgcccgccacccgcaggtgaaagccatcaaagagtgcggcggcaatccggacgtcaccatggcgctgatcgacgacggcgagattgacgtgctgaccggcgaggacaacctgattctctccacgctgtgcctcggcggcaccggggcgatctccgcgtcggcacatctgtacccggagcgctttgtgcagctggtgcaacaggtcgccgacggcgatctgcccgccgcgcgcgccaacttctacgcactgctgccgatgatccgtcagatgttcagtttcgccaacccggcgccggtgaaagccgcgctggcgcagcagggactgctgcgcaacgagctgcgcgcgccgatgcaaaccgcgccgctggcgctgcagcagcaaattgccgccacgctggcgcaactgcagccgcaggatgaagccgtcagtgaaatttgttag

SEQ ID NO: 443657 - DNA, 270 bp, Serratia marcescens
atgcagaaaaaaccggtgctcgacgaagccagacagttgaaacgcctgaacgcggcaacgcggcggcagtcccacgtctataaatggtttgcgctgatcgccgcattggataccctgctggtgtactgttatgaccaggatatgcgtaatatggtgttttccggcgcagtggcgctggtgtgcggctatctgtggatccgcgatcgcaacaaggcgcgcgcctaccggcgcgagtttgaccgtaaattcggcgtccgggacgatgtctga

SEQ ID NO: 443658 - DNA, 312 bp, Serratia marcescens
atgatcgttcgtacctggcacgggtgcgtgccgcaacaacatcggcagggttttgccgatcatctggctgtcacaggcgtgcagcatgctaaggcaacggctggaaactgtggcgcttttgtccggcaggaactgcagggcgactacgtgcacttttttctggctacgtattgggagtcgctggaggccatcaggcaatttgccggcgagcattatcaacaggcggtcacttatccggatgatgaggcatatggtttgatttcagacccctatgtttttcagcatcgggtgacggagatagccgcactgtaa

SEQ ID NO: 443659 - DNA, 381 bp, Serratia marcescens
atgaaccatcgaacgttacgaccggaagagttggtgcaacagcagcttgaggctcacaacgcgcgggatatcgacgcttttctcgcctgctgggccgaggatgcgcagtactatcaacatcctgacaagctgttggccagcggcaaggcggagctgcgcgaataccatatcgcgctgtttcgcgagccgagcctgtttgccgagcgcgtgaagcggattgtggttgccaatcaagtggtcgaccagctacgggtaacgcgtaatttcccgaacgggcgcggcagtatggatgtgctggtgagctatgagattagccagggaaaaatcgcccgcgcctggatgaccgtcggcccctgcgtggtggacgaaggggcgctgtga

SEQ ID NO: 443660 - DNA, 378 bp, Serratia marcescens
atgtctgaactaaaacgcattaattacccatttttaaccgcgcccggcggcccgtatgtgcatgcggtgcgccatggcgatctgttgtacgtttccgggctgacggcattcggcggcgaggcgcagggagagacggccgcacggcaaacgcaggccgttttgcaacagctggacgccattgcccgttatgagggcggcagcctggcaacgctgattaaactgacggtgtttctgaccgatatcgccgacctgccgtcggtgcgtccggtgctggcagaggcattggcagatgcgctgccggcctgctccctgctggccgtcagcgcgctgttttctgcggacgtaaacgttgagattgaagccgttatcgcgctgtaa

SEQ ID NO: 443661 - DNA, 852 bp, Serratia marcescens
atgaatcaggcttttactccctacctgcagcgctgggcgctgacgccggacggtaaggcatttgaaacccatagtagcctattgatgccggtgcgccaccagggggcgccggcgatgttgaaaattgcccgtgagccggaggaaaaattcggtgcacggctgatgtgctggtggcagggcgacggcgcggcgcaggtgctggcctgtcacggcgacgcgctgttgctggagcgtgcgcagggggcgcagtcgctgacccagctggtgcgtaccggtgatgacgagcgggcaacggcaatcctgtgtcaggtggtcgcccgactgcacaaaccgcgcgcgcagccgctgccgacgctgatagcgctggaccagtggtttggttcgctgtggccggcggcgcaggcgcacggcggcatgctgcggctgagcgccagcgtggcggcggaactgctgggtagcccgcgcgagcagtgcgtgttgcatggcgatatccaccatgacaacgtgctggatttcggcgaacgcggctggctggccatcgatcccaagcgcctgtatggcgaacgcggttttgattacgccaatatcttctgcaatcccaattacggcatcgccaccgatccgcagcgctttcagcggcgcgttgagcaggtctgcgcgctggccggctttgagaggcgacgtctgctgcagtggatcctggcctgggccgggctgtccgccgcctggtttatggaggacggcgatacggcggatatcgatttccgcgtggctgaactggcggcgaccgcgctggggctgtcgccaccggacgactcagggttcatcctgccagtaatcgagcgacgctga

SEQ ID NO: 443662 - DNA, 501 bp, Serratia marcescens
atgtctgaacatgccgcacagctacgccagaaactgatccgcaattaccatcagatcgccaaacgccacgacagccgtccgccgctgtacgacagcctgtcagcacggctgggtaccggcaccgccgccagcaagctcggtgcctccatcgataccgtcgcccccggcaaacgctcctgcccttatcatttccactacgggcaggaagagatgtttatcattctggaaggctgcggcaccctgcgcgtggccggcgaaatgctgccggtcagcgccggcgataccatttttatcccgccggggccggactatcctcaccagctcatcaatagctccgacgcgccgctgacctatctttccatcagtacccgcgaacagccggagctggtggagtacccggattccggcaagtatcaggccatggcgtttaccggcgattatcaggcgcgctatctgcagcggccttcagcgtcgctcgattactggcaggatgaaccctga

SEQ ID NO: 443663 - DNA, 1176 bp, Serratia marcescens
atgaaacgggcaagcggcatattcctgccggcattgatcgccggctttgtcgccgtactggtaggctataccagttcggcggcgattatctttcaggcggccgcggcggccggcgccagcgcgcagcaaatcggcggctggctgagtatgctcgggctggcgatgggcgtcagttcactagggctgtcatggtattaccgcacgccgattctcaccgcctggtcaacccccggcgcggcgctgctggtgaccagcctgcccggcacctcgctgccggaagccatcggcgtgtttatcttcgcctccgggctgattctgttgtgtggcgtcaccggactgttcgcccggctgatgcatattattccgccgtcgatctgcgccgcgatgctggcgggcattctgctgcgcttcgggctggacgccttcggcgcgctgcagagcaacctgccgctggccggcgccatgtgtctgacttatctgctggcgcgccgtctgctgccgcgttacgccattgtgctgacgctactggccgggctggcggtcgccgcgctgcggggcacgatcgcgccgataccgttacacggcgccatcgcaccgcccgagtttatcgcgccgcagttcagtctctctacactgctagggatcggcgttccgttctttatcgtcaccatggcgtcgcagaatgcaccggggattgccacgctcagcgccgccggctatcaggttcccacctcgccgctgattagctggaccgcgcttaccgcgttgctgctggcgccgttcggcggcttttccgtctgcatcgccgcaattaccgccgccatctgtatggggccggacgcgcacccggatccgaaacgacgctatctggccgcaatggcggccggcggcttttacctgctggccgggctattcggcggcgctatcggcctgctgctcagcgcgctgcctgtagcgctgatccacactatcgccgggctggcgctgctgggcgccatcggcggcagtctgcagcgtgctctgcacgatgaacggcagcgcgacgctgcgctgattacttttcttatcaccgcctccggcattacgctgtttggcgtcggcgcggcgttctgggggctggttggcggcgtattcgcccatctgctgctggcgtggccggcacgggcaatgcgctga

SEQ ID NO: 443664 - DNA, 561 bp, Serratia marcescens
atgcaaccaatgagcggccatctggcgcaaaccctgaaagcactgcgtcatcagcgcggttggagcctgagccagactgccgatcaaaccggcgtcagcaaggcaatgctgggacaaattgagcgtgaggagtccagcccgacggtggcaacgctgtggaaaatcgccaccggttttaacgtggcgttttccgcttttctggcgccgtcatcgccgcctacgccgacgctgcaccgtcagggagcgctgccggcctttatgcaggagaacgccgccatgcgtgtgacgccgctgttcccgtttgacgcgcaactgggctttgatatgttcgccatcgagctggcgcccggcgccttcagcgaatcgacgccccacgagccgggggtgatcgaacatgtggtggtgctgagcggcgagctggagctggcgatcgacgatcgctggcaccgtctggcggccggcgaggcgatgcgctttcaggccgaccgtccccatgcctaccgcaatagcagtgcgcaggcggtgcatattcacgatctgatccattacccgcgtacttaa

SEQ ID NO: 443665 - DNA, 2151 bp, Serratia marcescens
atggtgccgttcgctaatcgacgtcaatttcttaaactcggtgcacaaaccgcaggagccgttatcgccatgacttcactgcctaacagtatccgccttgccatggcgggcgcacagccgcccgcggacgatcagctgtggctggaacccttgcaggggagcgaagcgctcaactgggtcaaacagcagaatcagcgcacgctgcagcagtttgcgcagggcagcgcctttccgcagttggaaaaacaggtgctggatattctgaataaagagacgcagatcccctgggtcaccaaatttggcgactattactacaacttctggcaggaccagaaaaatccgcgcggcctgctgcggcgcgccacgctggacgagtaccgcaagccgcagccagcctgggaaacggtgctggatatcgatgcgctgggcaaagcggaagggaaagagtgggtgtatcacggttcgcagtcgctggagccagaacatcgctattgcctgattaatctgtcgccggacggcggcgatgcggtggaagtgcgcgagttcgatttacacaacaaacgctttgtcgagcaggggttccgcctgccggcggcgaaaagcgtggtgtcctgggccagcgccgacgaactgttcgtcgccaccgatttcggcagcggctcactgacccagtccggctacccgcgtacggtgaagcgctggcggcggggtacgtcgctggacagtgcggaaacgctgtatcaggcgcagccggaggatatgcgcgcctatgcgtatcacgacgatacgcctggttttgagcgcgactatatcgtgcgcatgatcgacttctatcggcaggaaaccttcttgctacatgccaacggcgaacagcagcgtattgaggtgccgtctgatgcggagatcaacagccaccgcgactggctgctgattaaaccgagaagcgactggcaactggaggggcggacttatccggccggcgcactgctggcagccaaattcgacgactatctggccggcaggcggaagctggaagtcctgtttacccccagcgccaaccaggcgctgagcggttatagtacgacgcgcgaccacctgatcgtcggcattatgcaggatgtggccaaccgcctggaggtgctgacgccgcagggcgacagttggcactcccggccgctgggcgtaccggtcgaattgagcaccgtcgccgccggcggcattgacaataagaccaatgattatttcctgacggtcagcggattcctgcagccgacgtcgctgtatctgggcagtctggacgatgaggacgaacctgaactgctgaagcaggcgccgcaggactttgccgccgataagtatcaggtcagccagcactttgcgacgtcgcaagacggcacgcgagtgccgtatttccaggtggcgcgtaaagggctgcggctggacggcgataacccgacgctgctgtatggttacggcggcttcgacgtttccctgttgccgagctatctgggggcgcgcgcgccgacctggctggagcggggcggcgtgtatgttatcgccaatattcgcggcggcggcgagtacggcccggcctggcaccgggcggcgctgaagcagaaccgccatcgcgcctatgaggattttgccgccgtggcgcaggatttgatggacagaaaagtgacatcgtcacgcagactggcggcgcgcggcggcagtaacggcggcctgctggtcggcaatatgctgacgcactatccgcagctgttcggttgtatcgtctgtgaggtgccgctgctggatatgcggcgctacaccaagctatcggccggtgcgtcgtggattgccgaatacggcgacccggataaggcgcaggagtgggaatatatccgcaccttctcgccgtaccataacctgaaggcggacgttgcctatccaccggtgctgttcctgaccgccaccagcgacgaccgggtcaatccggcccatgcgcgtaaaatggcggcgcgtatgcagcagatgggctatcagcaggcgtacttttatgaaaataccgccggcggccacagcgccgcggcggataagcaacagtcggcgtttaacgccgcgctggtcagcgagttcctctggcacagcctgaacggcgcaggctag

SEQ ID NO: 443666 - DNA, 699 bp, Serratia marcescens
atgagtgaagcaaaagagttaatgattcaggggttgtggaagaacaactccgcgctggtgcagctgctggggctgtgcccactgctggcggtgacctccaccgccaccaacgccctcggcctcgggctggcgaccacgctggtgctgatgatcaccaacggctccatctccgccctgcggcggctggtgccgagtgaagtgcgtatcccgatctatgtgatgattatcgccgccgcggtcagcatcgtgcagatgttgatcaacgcctatgccttcggcctgtaccagtcgctggggatttttattccgctgatcgtcaccaactgcatcgtggtcggccgcgccgaagcggtcgccgccagaaagccggtcaacctggcgctgatcgacggcctgtttatcggcctgggcgccaccggcgcgatgttcgtgctcggttcaatgcgtgagctgatcggcaacgggacgctgtttgacggcgccgatatgctgctgggcaactgggccaaggtgctgcgtattgaagtggtgcatttcgacagcccgctgctgctggcgatgctgccgccgggcgcctttatcggcctcgggttgatgctggcggcgaaatatgtgattgatgagaaaatgaaagcgcgcaaggcgcaggcaatcgccgacgcggcgccggagcacggagagccagagaaagcctcatga

SEQ ID NO: 443667 - DNA, 633 bp, Serratia marcescens
atgctaaaatcaatgcgcaagcatggcaccacgctggccttgttcgccgcagccaccaccggtatgaccgcggtggtcaatgcgttaacccagaaaaccatcgcccatcaggcggcgctgcagcaaaaaacgctgctcgatcaggtgctgccgcctgaacattacgataatgatatgcagacggagtgctatctggtcagcgatccggcgctgggtgacacggccgcacaccggctgtatctggcgcgcaaacagggcaaaccggtgggcgccgcgctggaaaccaccgcgccggacggctactccggtgcgataaaactgctggtcggcgctgatttcagcggcaccgtcttcggcagccgggtggttgaacaccatgaaacgccgggcctgggtgataaaatcgagctgcgcctcagcaactggatcaccttcttcagcaaccagaagatcgaagggccggatgataagcgctgggcggtgaaaaaggacggcggtatgtttgaccagttcaccggcgccaccatcacgccgcgcgcggtagtcaacgccgtgcgccgcaccgcgctgtatatggagacgctgccgcctaaacttgaccacttacctgcctgtggagcagccaatgagtga

SEQ ID NO: 443668 - DNA, 1086 bp, Serratia marcescens
atgaagtttaggccggtaaaacagtctgccaccaaaggcttacatatcgccagttccccttttacccacaatcagcagagtaccagccgcattatgctctgggtgatgctggcgtgcattccggggctgggcgcgcaaatctggttcttcggctatggttctctcgtacagacggcgctggcaatggccaccgccctgctggcggaaggcaccgtgctggcattgcgcaaacagccggtgcgcgcccgactggccgacaactctgccctgctcaccgccctgctgctcggcatcagcctgccgccgctggcgccgtggtggatggccgttatcggcacgctgttcgccatcgtgatcgccaagcagctgtacggcggcctgggacaaaacccgttcaacccggcgatggtcggctacgtggtactgttgatctccttcccggtacagatgaccagttggctgccgccggaagcgctgcgcgccgaagggttaccgtttcacgatgtgctgctgagtattttcagcggccagaccagccagggactctccctacaccagctgcaactgggcgttgacggcgtcagccaggccacgccgctggacggcttcaaaaccggcctgcgcagcggccattcggtagaacaggtgctgcagacgacgatattcggcggcgcgctggccggcatcggctggcagtgggtgaacctcggtttcctcgccggcgggctgtttatgctgggacgcaagctgatccactggcagattccgttcagcatgctggccgccatcgcgctgtgctctgccctcgcctggcagcttgacccggcgcatcaggcgtcaccgctgatccatctgttctccggtgccaccatgctcggcgcgttctttatcgccaccgatccggtcagcgcctccaccacgccgaaaggccgcctgatctacggcgcgctgatcggcgtgctggtctggctgatccgcgtttacggcggctatccggacggcgtggccttcgcggtactgctggccaatatcaccgtgccgctgatcgatcactacacgcagccgcgtgtttacggccatcgctaa

SEQ ID NO: 443669 - DNA, 2499 bp, Serratia marcescens
atgtttaatctgttcaccgcctttaaaaaagatcgcatttgggatttcgacggcgggatccatccacctgaaatgaagacgcagtccagcggcgcgccgctgcgcacggcaccgctgcccgacacctttatcatcccgctgcagcagcacctggggccggaaggcgaactgctggtgcaggccggcgacagcgtactgaaaggccagccgctgaccatgggccgcggccgtaccctgccggtacatgcccccacctccggcacggtgatcgccatcaaaccgcatatcaccgcccacccgtccgggctggccgaactgtgcgtgattatccgtcctgacggcgaagaccgctggtgtgaacgtcagccggcggccgactatcgccagttggacgccgacgagctgctccggcgcatccatcaggccggtattgccggcctgggcggcgccggtttcccgaccgccagcaaactgcagggtggcgcccacggcgtcgaaacgctgatcctcaacgccgccgagtgcgagccttatatcaccgccgacgaccgcctgatgcgcgagtgcgcggaagaaattctgcagggcaccgatatcctgcgtcatctgctgcagcctaaaaccacgctgatcggcatcgaagacaataaaccggaggccatcgccgcccttaaagaagcgctgcgcgcgcatccgggcattggtctgcgggtgatcccgaccaaatacccttccggcggcgccaagcagctgaccaagattctgaccggcaaagaagtgccgcatggcaaacactcttccgccatcggcgtgctgatgcagaacgtcggcaccgccttcgccattaaacgcgccatcgtcgacggcgaaccgttaatcgaacgcgttgtgacgctgaccggcgaggcgctgagtcagccgggtaacctgtgggcgcgcatcggcaccccggtggagcatctgctgaaattcgccggtttccggccgcaaagccagcagatggtggtgatgggcggcccgctgatgggattcaccctgcccgcgctcaacgtgccgatcgtgaaaatcagcaactgcctgctggcgccgaccgtggatgagatggcgccgcaggagccggaacagtcctgtatccgctgcgggctgtgcgttgacgcctgcccggccgggctgctgccacagcagctgtactggttcagccgcggccaggagcacgacaaggcgcgccagcataatctgtttgactgtatcgagtgcggggcctgcgcctatgtgtgcccgagcaatatcccgctggtgcagtattaccgccaggaaaaggcggaaatcaaggcgatcgatcaggaagcggcgcgcgccgccgaagccaaagcgcgctacgaagccaaacaggcgcgtatggaacgtgagaaactggcgcgtgaagagcgccacaagaaggcggcggtcaagttgaccgataacgaccaaagcgccgttcaggcggcgctggcgcgcgtacgcagtaaaaacgatgcggcgaccggtgaagtacaaccgggcgctacgccggataacagcgccgccatcgccgcccgcgaggcgcgcaaagcgcaggcgcgggaacgcaaagcgcagcagccgacggttgacgtgcctgcggttgacgccgctgagactgacgatccgcgtaaagctgccgttgccgccgcgttggcgcgggtaaaagccaagaaagccgcccagcaggccgacgatgcaccggctgaaaacccggcgcctgccgcagcggacagcgatgccgatccgcgcaaggccgccgttgctgccgctatcgcccgcgccaaagccaagaaagccgcccagcaggccgacgatgcaccggctgaaaccccggcgcctgccgcagcggacagcgatgccgatccgcgcaaggccgccgttgccgccgctatcgcccgcgccaaagccaagaaggctgcacagcaggccgacagcgcgccggctgaaaccacggcgcctgccgcagcggacagcgatgccgatccgcgcaaggccgccgtcgccgccgccatcgcccgcgccaaagccaagaaggctgcacagcaggccgacagcgcgccggctgaaaccccggcgcctgccgcagcggacagcgatgccgatccgcgcaaggccgccgttgccgccgccatcgcccgcgccaaagccaagaaggctgcacagcaggccgacagcgcgccggctgaaaccccggcgcctgccgcagcggacagcgatgccgatccgcgcaaagccgctgttgctgccgctatcgcccgcgtgaaggccaagaaggctgcacagcaggccgacgatacaccggttgaaaccccggcgcctgtcgcaccggctgaaacgccggcccctgccgcagcggatagcgatgccgatccgcgcaaggccgccgtcgctgccgccatcgcccgtgtgaaggccaaaaaagccgctcagcaggcagaaacggaaaaacagtcctga

SEQ ID NO: 443670 - DNA, 438 bp, Serratia marcescens
atgtcccacgctgaatacaatcgcatcggcggttggctgttggcccccatggcctatctgatcgtcaccctgctcagcgccaccctgatgctggcgctgtacgcgatggcgattatcaccccggagtcgcgcgaatatctgctgaccaacgcgcaggccttcacgctgcagtggtacttttccgtgctgacaacgctggcaatgtgggtctttaccctgtggctgctgtggctgttctgccaccgttcgcaccgctttcccaaactgtttctggtgtggctgctgatcaccgtgctgctggcgatcaaatccttcgccttcgcgccgattcccgacgaagtggcggtgcgcagcctgggctggccgctgctgatggcggcgatttttgtcccttatctgcgtcgctcgcagcgggtgaaacagacttttaccgaataa

SEQ ID NO: 443671 - DNA, 528 bp, Serratia marcescens
atgcctctgaacgagttattaaacctgccgggcgtcgccgaccagccggaaagcgttaccgatggttatgtgtttaaccacaccatgatccgcgtaaaagatctgagcaaggcgctggacttctatacccgcgtgctgggctttacgccggtatataaagaagacttcgccgaggcggcgtttaccatcgtgtatctggcccgcgtcccgcgcgaccagatcccgcaggatgacgagcagcgcaagcagtgggcgctgagccagccgggcatcctggagctgacgcacaaccacggcacggaaaatcagccggatttccagtaccataacggcaacagcgaaccgcgcggcttcggccacctgtgcgtcaccgtgccggacgtacgcgccgcctgtgaacgctttgaacagatgggcgtcaccttccagaagcgcctgcacgaagggcgtatgaactacgtggcgttcatcaaggatccggacgattactggattgagatcctgcaaccgacgccgctgcaggcgtaa

SEQ ID NO: 443672 - DNA, 1416 bp, Serratia marcescens
gtggcgggcggcaacatccggcaacgtctgataacaaccggaatggattttaaagccggcgcgccgtttttttcgccaaaacgtgacggcgcggcttgcgggcggcaaggtttattaccggatcggcataacacatacaaatggttgcactctgttatctgctgtaaaagactggtgattccgctgccgcgccgtttggtgcagtctagcccgcctaaaacagagaaatatgaagaggatatcgtcgtgaagcctagtgtattggccgttgtatgtggaatgttactgccgctggcagcccaggcggcagcaacgccggcgcaggttcctgcgctgaccccgccgccaatcgatgcggcttcgtacgtattgatggattataccaccggccagattttggcgcaggatcatgctgacgagcggcgcaatcccgccagcctgactaaactgatgaccggcctggtggtcgaccacgccctcgatcagcacaaaattgggctggatgacgtggtgacggtgggccaggacgcctggggcgccggcaacccggtatttaaagggtcctcgctgatgttcttaaagccaggtgacagggtcacggtgcgcgatctcagccgtggcattatcattgactccggcaatgacgcctgcgtggcgatggccgattacgtggccggcagtcaggcggctttcgtacagttgatgaaccagaaagcggcgcagctcgggctgaaaaacacccactttgaaacggtgcacggcctggatgcgccgggtcagttcactaccgccggggatttggcgcagatatcgcgggcgatcatcatgagcgaaccggcggaatatcatatgtacagcgaaaaatcgctgacctggaacggcatcacgcagcagaaccgcaacggcctgctgtgggataaaacgctgcacgttgacggcctgaaaaccggccatacggcgtcggcgggctttaacattattgcctccgccaccgaaggcaaccgccgtatgattgccgtggtgatgggcggtaaaagctcgaaagggcgtgaagagcaggcgcgtaaactgctgacctgggggctgcgcgactttgacaccgtgcaggtgttcaaggccggcgccgcactgggcaatgagacggtctggtacggcgataagtcgcaggtgcaggtcggcgtccagcaggatcacgcgctcagtctgccgaagggcgaggtgcagaagcttaaggcgcagtacgtgctgaacggcaaacggctggaagcgccgctgaaggcgggccagaccgtcggcgaagtgcgcatcagcgacgacggtaaactgctggaaacgctgccgctggtggcgctgcagccggttaatcagggcgggatcttctcgcggctggtggactacataaaactcaaagtataa

SEQ ID NO: 443673 - DNA, 897 bp, Serratia marcescens
atggatattaagcaactgatttatctgtgtaatcttgagcgcgaacgccatttcggccgggcggcggaagccagtttcgtcagccagccgacgctatctatgcggttgaaaaacctggagaaagaattgggcgtggcgttgatcaaccgcggcaataattttgaaggctttaccgcagagggcgaacgcgtgctggcctgggcgcgggaaatcgtctcggtgtatcaggggctgaagctggaggtggaatcgctcaagcacgggctgaacggaacgctggtgattggtgcggtgccgcagtgcagcatcatgctggcgcagttgctgaagtcggtcagcgccaaatttccccggctggatttccgcgtttcggtactcagcgccgatcagctgctggaggccctgaccgcccatacggtagacatcggcatcggttttttcgagctgcagacgctgcacgagctgcatttccagtcgcagccgctggaggacagcggcgtcgatctgctgtttcatccgcagcactttccgcagctggtcggcgatacgccgctgacgctgcgtgaggtcgctgacttgccgctgtgcctggcggaaccgtcgcgctatttccgccgctatatcgatcagaacttccgcgacgccgggttaacgctgcatacgcggctggaaaccagctcgctgctgcaactgctgcaggggattttcgtcggtttaggctgtggcatcttcccgcgcggcaatttactgccggaaatgacgccgcagctgcagcgccgttcgatcgcgatagcgccgatgacgcgccacgcggcggtggtggtggccgagccgggccgggcgacgccgctggcccagcatttctttgacgcggcccaaagttggctgctgcagtaa

SEQ ID NO: 443674 - DNA, 1206 bp, Serratia marcescens
atgacgagtccacgcctcagggaacaacagcgccaatatcatagccagtggtatcatgaaacccagtgcagcgtacgcggcgatatgccgttagagccgcaggccgccctgatccgcgaccgctttttgctgggactgggcgagtttgccgacccggcattgaatcaggcgctgatcgcccgggcgccgctcttcagcgcctcgctggcgtgctgcagcatactgtttcccgagcaggtcgcgctgtcgcgccacgtgacgttgtcaccatacgatcgcctctgtaccgcgctgacggtggcgcaggttaccggcgtgcagtcgctgtgtagccactacgccgcccgcctcgccccgctcgacagccccgacgcctcccgtgaaagtaatatccgcttagcgcaaatcacccaatacgcccgccagcttgccacccagcccacgctgatctgtcgtaaggcgctccagcagttgagtgatgtcggcctgagcgtagcggatatcgtctccttcgtgcagattatcggttttgtcagctatcaggcgcgggtagtcgccggcatcgccgcgctggcgggccggcccgctgcggtagcaccaggcttcaccacccagcaggacgccgaggcgctgcgccttgacgaacggccgccgctctggcggtcacgcctgacgctgctgcagcccgaagaggcggcggccgaacagctggacgtgctggatcagagccatccggacgcgcggagtgaggattactacctgctgctggcccatgatgccgctgccctgcgtgaacgcaacggcgtatttaacggtattcatggcagtaatgatgaaacgagccgtcgactgatggcgctggcggcgctctgcacctcacgcatcaacggcagccgctattgcgccgccagcgtcgccgccgatctgcacaacccgccgctggtgcacgccctgtgcgacagcatcgacgccggctatcagcttgcggcggatccccggcaaaaggcggtgattcagatcggcagcgcgctaacccgcagcccggaaaagtttacgccgcacagcgtacaaccgctgtttcagcagggcgcaacgcaggcgcaggcgctggatctgatactgaccagcgcgctgtatgcctgggagaaccgtctgcgctatagcctgggcgatacgctcagcatcggcacggaagacgaagagtaa

SEQ ID NO: 443675 - DNA, 1656 bp, Serratia marcescens
atgcgtggtttacccatttggatcctgtcgttatgcctgggcaattcgctgatggccgccgctgcggctgcgcccgcggctgatgctccggcgcccctgccggacgtacatcagagcggttttgtctattgcgtcaacggcatcctgaacacctttaatccacagatggccagcagcggcctgacggtcgatacgctggcggcgcagctgtacgatcgcctgctggatgttgacccctatacctaccggctgattccagagctggcgcagcgctgggaggtgctggacaacggcgctacctatcgtttccacctgcgtaaagacgtgccgttccagcacaccgcctggtttacgccaacgcgtaaaatgaacgccgacgatgtggtattcagctttgagcgggtgtttaaccacaagcatccgtatcacgacgtcaacggtggcgagtatccttacttcgacagcctgcagttttctgattcggtgcaaagcgtgaaaaagctcgacaactacaccgtcgagatccgcctgcaggcgccggacgcctcgttcctgtggcatctggctacccactatgcaccggtgctgtcggcagagtatgccgacaacctgagcaaggccggcgaccagcagatgatagaccgcgagccggtaggcaccgggcctttcctgctcaatgaataccgctccgggcaatatatccgcctggcgcgcaaccaggcctactggaaaggcgaaccgcgtatggcgcaggtggtgattgacctgggcgccggcggcaccggtcgcctgtcgaaactgctgaccggcgaatgcgacgtactggcctatccggccgccagccagctttccattctgcgcgacgatccgcgcctgcgtctgacgctgcggccggggatgaacatcgcctatctggccttcaacacccgcaaaccgccgttcaataacctgaaggtgcgtcaggccatctcgctggcgatcaacaaccagcgtctgatgcagtcgatttactacggcaccgccgagaccgccgcgtcgattctgccgcgcgcctcctgggcgtatgacaatgacgcgcacgtcaccgcctacgacccgcagcaggcgcgccgcatgctgaaagaggccggcatcgacaatctgcagctgaagctgtgggtgccgaccgcctcgcagtcctataaccccagcccgctgaaaaccgccgaactgatccaggccgatctgggccagatcggcgtgcacgtcaccatcgtgccggtggagggccgcttccaggaggcgcggctgatggagatgaatcacgacctcaccctgaccggctgggccaccgacagtaacgacccggacagcttcttccggccgctgctgagctgcgcggcaattcgctcgcaaaccaactatgctcactggtgcgaccccggttttgatgaaacgctgcaaaacgccctgctgtcgcagcagctggcgcagcgcattgacagctaccgtcaggcgcaaaaaattctggagcagcagctgccggtgctgccgctggcgtcatcgctgcgtctgcaggcctaccgttatgacatcaagggactggtgctcagccccttcggcaacgcatcattcgccggcgtgtatcgtgaaacggcggagggagaaaaaccgtga

SEQ ID NO: 443676 - DNA, 930 bp, Serratia marcescens
atgggaaatacggctatggctcaccgtcagccgctgccggatgtgcagagcggacacggggagatgagcgatatcgcccttgactgggtgggaatgcagggcatcgcgatgccgctggaggtggcggggcgtccgctaaatgccgaagtaagcgtcggcgttaacgtctgcgccaaccgtgacggcgcgcgcggcattcatatgtcgcgcctgtatctgacgctggatgcgctgacgcagggggaactgacgccgcgacgcattatcaacacgctggctgaatgtctgcagtcgcagagtacggacagcgatcgggtgcagttggagatcggcggggaactgctgctgtcgcgtccggcgctgatcagcccgcagcgcggctggaaaagttacccgctgcgcattaccgcagcgctggagctgctgccaacgctgacgctgcaggtcggcgtgccttattcatccacctgcccggcgtcggcggctctcagccgtcaggcggcgcagcagcagtttctggtcgatatcgaggcggatgatgaaacggtcggcacgcagcaggtggctgactggctggggacgcacggcatgccggcgacgccgcacagccagcgcagctgggcgtgggtgacggtcaccttgtccggcgatgaaaaagtactgccggtgatttcgctgatcgaccgcatcgagcatgcgctggggacgccggtgcagacgctggtcaaacgtcaggacgagcaggcgtttgcattggctaacggtcgcaacctgatgttttgtgaagatgccgcgcgccggttgtatgacgccctgcgccgctcatgctgttaccgcgccttcagcgtgcgggtggatcatcaggaaagcctgcatgcgcataacgcggtggcccggctgagctggcgggaggacgctgatgctgcgtaa

SEQ ID NO: 443677 - DNA, 561 bp, Serratia marcescens
atgctgcgtaaaaatcccagcggccatctgccgcaggtctccgcccaagcctatatcgatcccactgcgattatctgcgggcgggtgattatcggcgactatgtgtacgtcggaccttacgcggtgattcgcgccgatgaagttaacgccgacggcgatatggcgccgattgtgatcggcgcccactccaatattcaggacggcgtggtgatccattccaaaagcggcgcggcggtaaccatcggcagctacagctccatcgcccaccgtgccattgtgcacgggccgtgccgcatcgatgaccgggtgttcgtcggttttaacagcgtgctgttcaactgccatctgcgcagcggctgcgtggtgcgttataacgcggtggtggacggcgtgacgctgccggagcagtgctatatcccgtccaccgaacgggtcggtgcagacagcgatctgtcgcgctatggccaggtggaacccgacgcgctgcaattttcagaggaggtggccgccaccaacgtcgatctggtgcgcggctatcaggcattacgcaacgaattttag

SEQ ID NO: 443678 - DNA, 360 bp, Serratia marcescens
atgggcaatttgctgggcagtaaaaaactgtatcgcgtacctgaagagggtatggtgaagggcgtttgtgccggcctggcgcactactttgacgtaccggtgcgcctgatccgcgtgatggtggtgctgtcgatgatcttcggcctgtttttctttaccgtcgtcgcctatttcgccatgggctacctgctggaagcggcgccggcgagccgtttcgacggcgaacatcagcgtacgccgcgccagctgttggatcagttggagtatgaactgggcagcggcgagcgccagctgcgccaggttgaacgctacgtgacctcggataccttcggcgtacagagccgtttccgtcagctgtaa

SEQ ID NO: 443679 - DNA, 180 bp, Serratia marcescens
atgttgaagagattgtctaaagtcatcatcatagcgttactcagttacggcccggcgggggccacctcatggctgctgagaaccgtcagccgtaaaccgctgcgcctgctgctggcgatggtgctggagccgatgttccgcaaggggctgaataaggcattcgggcgttatacccgctaa

SEQ ID NO: 443680 - DNA, 975 bp, Serratia marcescens
atgagaagcatgcgtttttacccacaggcctggccgctgcgcgccgcgtttgtgatttcacgcggcagccgcagcgtggccaacgtggtagtggtggaaatcgaacagcagggcgtctgtggcgtgggggaatgcacgccgtacccgcgctatggcgaaagcgaagactcggtgctggctcagttggaggcggtcaggccggccattgaacgcggcctgtcgcgcgacgcgctgcagcagctgatgccggccggcgcggcgcgcaatgcgctggactgcgccttatgggatctggcgtgtcgccaacaggcgcaaacgctgtggcagcacgcgggggtgaacccgccgccgcaggtcacgacggcgcaaaccgtcggcatcgatacgccggaggcgatggcccgggccgcgttggagcttaaccgccgtggggcgacgctgctgaaaatcaagctggacgaccggctcatcagcgagcggctggtggcggtccgcggcgcggtgccggaggcgacgctgatcgtcgacgccaacgaatcctggcaggctgaaggtttggcggcgcgctgccagctgctggcggatttacaggtggcgatgctggagcagccgctgccggccgataacgatgaggcattggcgaactttatccatccgctgccgatctgcgccgatgaaagctgccatacccgcgccgatttggcccggcttgccggccgttatcagatggtcaatattaaactggataaaaccggcggcctgaccgaagcgctggcgctggccgagcaggccgtcagccaaggctttacgctgatgctcggctgcatgctgtgcacctcacgggcggtgacggcggcgctgccgctggcgccggcggcccgttttatcgatctggacgggccgacctggctggcgcaggatgttgagccggggctggattttgcctgcggcgtcatccggctgggcgacgtataa

SEQ ID NO: 443681 - DNA, 708 bp, Serratia marcescens
atgactcaacaacgaccgcgtagcgaacgcggccagctggccgtggctggagaaagttacggaaaatcgttattaggcgcaccgctgctttatttccccgccgtagcacgtggcccggacgccgggctgatcatcgccggcacgcacggtgatgaaaatgccgccgtcgtcaccctgtcctgcgcattgcgcagcctgtctcccgccgcgcggcgccaccatgtggtgctggcggtcaacccggacggctgccagttaggattgcgcgccaacgccaacggtgtggatttgaaccgcaacttcccctcggccaactggcgttccggcgatacggtctaccgctggaacagcgccgcgccaacgcgggaggtcaagctgtcaaccggcggccggccgggttccgaaccggaaacccaggcgctctgccatctgatccaccggctgaagccggcctgggtggtctcttttcatgaaccgctggcgtgtattgaagatccggccagctcgcaccttggcgtctggctgtcgcacaaattcgccctgccgctggtcagcagcgtcggctatgaaacgccgggttcgttcggcagctggtgcgccgatctgtcgctgccgtgcatcaccgccgaactgccggccatctccgccgatgccgccagcgaacagtatctggatgcgatgattgagctgctgacctacccgcagtaa

SEQ ID NO: 443682 - DNA, 351 bp, Serratia marcescens
atgccagtcgccagaatagtcgccagttatacggaacacgagcaggacacgctcacgctgttgtgcggcgtggatgatgagaatcaaatccgccagggggagtggttcggcgtggtgaaaaatgatgatgggcgcggagatgaatccaactacccgtttaccctgcatgtggactaccagaaaaacagtttctacctcgattacggttatgacgacgttaacgaccgccagctgcaaaccaccgatattcagctaaaaccgctggaagagaacgctcagttcaccatctttgatgaagaagagggtgaagagtttacctaccgcatccgcaccgttcatctctacgattaa

SEQ ID NO: 443683 - DNA, 1632 bp, Serratia marcescens
atggcgagaaaaaaaattcaacggggtttccgtttggcaggctgcgcagcggccgtctgcctgagctttggcgtcagtgcggcgcaggtgccggccggtacggccctggccgataagcaggaaatcgtgcgccatattaaagatgagcccgcgtcgctcgatccgattaaagcggttggcctgccggaggcgcaggtggcgcgcgatctgtttgaagggttggtgaatcaggatgcgcagggcaatattatccccggcgtcgccagccgttggcagacgtcggataaccagaccttcctctttaccctgcgcaaagacgcacgctggtcaaacggtgaccctgtcacggcgaacgatttcgtctacagctggcagcggctggtggacccgaaaagcctgtcgccttttgcctggtttgcccagctggcggggatccagaacgccgaggcgatcatcgccggtaagctgcctgccgaaaagctgggggtgacggcggtggacgcccataccctgaaggtacagctgaataagccggtgccgtactttgtcagcctgaccgccaacttcagcctgttcccggcgccgaaagcggtggtggagaaatacggcagcgactggactaaggtaggcaacctggtcggcaacggcgcctttaaactgcagcagcgggtggtgaatgagaagctggtgctggtgccgaatgaacactattgggatcataaacacaccgtgctgaccaaggtgacgtttgtgccgatcaatcaggaatccaacgccaccaaacgctatctggcgggggatatcgatatcaccgaatccttcccgaaaaatatgtaccgcaaactgctgaaggatattccggatcaggtctatacccccgatcagttgggcacctattactatgcgtttaacacccagcgtgcgccaaccaacgatgtgcgggtgcgtaaggcgctgtcttacgccatcgatcgcaagattatcgctgaaaaagtgctgggcaccggtgaaaagccggcataccactttacgccggacgtgaccgccggcttcaaagccaaagatagcctgctgcagcagcagtcgcaggcggagctggatgcgcaggccaaggcgctgatccagtctgccggctatggcccggataacccgctgaaattgacgctgctgtataacacctcggaaagccatcagaagatcgccattgccgtggcctcgatgtggaagaaaaagctgggggtgaatgttaagctgcagaatcaggagtggaaaacctatatcgacagccgtaataccggcaacttcgacgtgatccgcgcctcctgggtgggggattacaatgaggcgtccaccttcctgtcgctgctgggttcttcgcatgccggcaatatcgccaagttccgcaacgcagactatgaccgcgtgctggcggaagccagccggcgcaccagcccggcggcgctgaacgccgactacaacaaggcggagcagatcctggccgatcaggcgccgatcgcgccgatttatcagtacaccaatggccgcctgatcaaaccctgggtaaaaggttatccgattaccaacccggaagacgtggcctatagccagacgatgtatatcgtcaagcattga

SEQ ID NO: 443684 - DNA, 930 bp, Serratia marcescens
atgcaacaacatgacgtgaacgcagataaacgagtattggtgctgggagcgggacaactgggagatgcggtactggatgcgctgctgccggcggtcacacagcacaacggggctgtttccgttattgtttcgcccgcttcccgcgataaacacggtaaactgcagtcggcaacgcatcaaaaacatgctgatgccggcgcaacctttatcggcgtagacctggccgcctgttcgactgaacagttaagcaggatatttaagccgtttgataccgttattaactgtatggggttcgttgccggggccggtacgcaactcaagatcacgcgcgcggtgttgcatgcccgggtgcggcgatacttcccctggcaattcggcgttaattacgatgtggtcggtaaaggaagcggccagcccgtctgggatgaacagtatgatgtccggacgctattacgggcgcagagcaccacggagtgggtgattatttcaaccggcatattcaccagcttcctcttcgaaccggcattcgacgtcgtcaatttatcggccaacaccatcaacgcgctgggaggatgggacactcaggtcaccgtcacctcgccggccgatatcggccgactgaccagcgccatctatttacatcagccgcggatcgtcaacgacgtcatctttgtcgcgggggaaacaacatcataccggcaactggcctcaacgattgaacacgttacgcaacggcgctttaccaaaaacgtgctcaccctgccggcgctgctggaggccctgcgtttacgcccggatgaccagatgctacgctatcgagccgcgtttgcccggggtgacggcatgtggtggccaatgcgcgacacctacaatgcgcaaaatgcgattcagacccaggatattgcctcctggcttacggcatctatttag

SEQ ID NO: 443685 - DNA, 954 bp, Serratia marcescens
gtgcgcagtcagggggagaaggtggatagactggaatcaatgcgggtatatgcgcatgtcgttgagacacagagttttgccaaggcggcggaagtgctggggatgccgcgctcaacggtatcccgggtgattaaggaactggaagcttaccttgggctgcagttgttacagcgaaccacacgcaagctcagcgtgacgtccgacggagagggatactacacggaatgtaaaaggctgcttgctgatattgccgccatggagtcctcattccccggtaaatctggccaacccaaagggcgttttaaagtcggtatgccgcaatccctggcccggcactgcatcatccccaaaattcagacgttcttgcagcattatcccgagctggagctaatgctttgctcaagcgatcatgtggaggacctcatacgggagggctacgactgtgcgatccgggcgggcagaattgaggactccaccacgctggtggcccgtccgctggcgaattttaaatgggtggtgctggcagcaccacaataccttgatacctatggcgagccgaagtgtctggacgatctgaacggccatcgcgcggtgggataccttaaccaccggaccgggcgcacgacagagtggttttttgcgcatgataccgccgtgcgggcgatccgtatgccggaaacgctggtggtagacgatacggatgcctacatacaggccggcgtacaggggctggggttaattcgcgtggccagctatctggcgactccctatttgcgtagcggagcgcttattgcgtgcctgcacgacgacgcttttgatttacccttatccctggtgtatccgcagaacagataccttcctcccgcagtgcgcgctttttacgcatggagtcagggagtgctgagttcagcgaacgattgttgcatggcggaaacagaaaacccgctgaaatag

SEQ ID NO: 443686 - DNA, 249 bp, Serratia marcescens
atgttaagagaccatttgaaaatagatgaaagccatacgctggagaaggttaatcacatccagctgcgtcaccaaggtcaggaagagattagcgaatttatcgttaaggacgccggcggaaaccccatcggcaaggtttccgtgtatgaccacctgagtacccgccgttcctacccaacctcctaccgtgtgactcagaccgacatggctggccgcgttgtcgttgataccctgagagaagttctttaa

SEQ ID NO: 443687 - DNA, 984 bp, Serratia marcescens
atggacgtcattgacggcagccagctacaaattgccgatgcggtgtatgcgtttcggctggatggcaagggcggcgtaacgccgattggcccgcaggatagcatcaccagtcagcagccttgctggctgcatctggattatgctcatccggcaagtttgcaatggctgagcgaaacgccgctgctgccggattctgtacgcgatgcgctggccggcgacagctcccggccgcgggtgacgcggcagggggacggcacgatgattacgctgcgcggcatcaactttaatgttaattcccgtcctgaccagctggtgacttttcgcgtgtttatcaccgataagatgattgtctccacgcgtcaccgtaaagtgtattccattgatgaggtggtcaacgaactgcaaaacggcgtggggccgaccgactgtggcaactggctggtggaaatcagcgatgcgctgaccgaccatgccagcgagtttatcgaggagttgcacgataaaattatcgatctggaagatgcgctgctggatcagcaggtccccgaacgcggccagttggcgctgattcgcaagcagctgattgtgttgcgccgctatatggctccgcagcgggatgtcttttctcgcctggccagcgaccgcctgagctggatgagcgatgacgaccgccggcgtatgcaggatattgccgaccgactggggcgcggtctggacgatctggacggcagcatcgcgcgtacggcgatactcgccgatgaaatcaccaccgtgatggcggatgccatgaaccggcgtacctacacgatgtcgctgctggcgatggtgtttctgccagccaccttcctgacggggctgttcggcgtcaacctgggcggtattcccggcggtgacaaacccttcggctttgcgctgttttgcctgcttttggtggcgttgggagcgggcgtagcctggtggctgaaacgtcgccgctggctgtag

SEQ ID NO: 443688 - DNA, 399 bp, Serratia marcescens
atgaatatcaccccttgtctgtcccacgtctccatcggaaccaaccatttcgaccaggcggcggatttttacgatcgggtactgtccgccttgggctgtcgccgcgtgctggagcaccatggcgccatcggttatggccgcgactaccccgaattctggctgcaaaccccgctcgacggcaaactcgccagcatcggcaacggcgtccatatcggttttttcgccaccagcaaacagcaggttgatgaattctatcgtcaggcactgcaggccggcgcaacggatgagggcgcccccggctccaggccgcactacggcgagcaatattacggctgttttgtccgcgatctggacgggcataaaattgaagccagcttctgggatgaagcggcggcctag

SEQ ID NO: 443689 - DNA, 939 bp, Serratia marcescens
atgtcagaaaaacaaacagtgagccagaaagaacagtacaacctcaataagctgcaaaagcgcctgcgccgcaacgtaggcgaggccatcgccgatttcaatatgattgaggaaggcgaccgcatcatggtgtgtctgtccggcggcaaagacagctacaccatgttggaaattctgcgcaacctgcagcagagcgcgccggttaacttctcgctgatagcggtcaacctggaccaaaagcagccgggcttcccggaacacatcctgccagcctatctggacggactgggagtggactatcagatcgtagaagaaaatacctacggcatcgttaaagagaaaattccagaaggcaaaaccacctgctcactgtgctcgcgcctgcgccgcggcattctctaccgcaccgccagcgaactgggtgccaccaaaatcgcgctgggccaccaccgcgacgatattctgcagacgctgttcctcaatatgttctacggcggcaagatgaaaggcatgccgcccaagctgatgagcgacgacggcaaacacgtggtgatccgtccgctggcctactgccgtgagaaagatatcgagcgctttgcccaggcgaaagccttcccgatcattccctgcaacctgtgcggttcacagccgaacctgcagcgccaggtgatcggcgatatgctgcgcgactgggataaacgctaccccggccgtattgaaaccatgttcagcgcaatgcaaaacgtggtgccttcgcacctgtgtgataccgaactgtttgacttcaaaggcattcagcacggcgacgaagtggtaaacggcggcgatctggcgttcgatcgcgaagagctgccgctgcagccggccggctggcaagccgcagaggctgacgagatcgtcgccgcacctgaacggctgaacgtattggaaatcaagtaa

SEQ ID NO: 443690 - DNA, 528 bp, Serratia marcescens
atggcactatatggaaaatttataattaacgattcggactattctccgttaacgatttatggcatcggtacatttatggcattctctggaaaaggcgcgtacaggaatgctcaaggatgcggcatggttcccaatgcaggcccgatccccgctggcaaatactggatagttgataggccgtcaggtggcagcatgtggcacgttaaaacatttccctatgatgcatggaacagatttgcacggaatataccaacgcccagctgggactggtttgggctatatcgagacgatggagcgatagacgactatacatggataaatggagtaaggcgcgggaatttcagattgcaccccggtgcagtttccctcggctgtattacactaaaacaccattccgattttgccgtaatacgcaatgcgctacgaagaacgagaggaacaaaattaaaagaaaacattaaatcatacggggttatagacgtgataagcaatggcgaatgtggggttagtcatggtgacgtggtttaa

SEQ ID NO: 443691 - DNA, 3534 bp, Serratia marcescens
atgattacgacagatggcaaccatgccgttgcgtcggtggcttaccgcaccagcgaagtcatcgcaatttatcctattacgcccagctccaccatggccgagcacgcggacgcctggtccggtgacggccgccagaatatttggggggatacaccacgggtggtagaaatgcagtcggaaggcggcgcgatcgccaccgtgcacggcgccctgcagaccggcgcgctgtcgacatcgtttacctcctcgcagggattattattgatgatcccgacgctgtataaactggccggcgaactgacgccgtttgtgctgcacgtcgccgcgcgtacggtggccacccatgccctgtcgatcttcggcgaccattcggacgtgatggctgtacgccagaccggctgcgccatgctgtgcgccagcaatgtgcaggaggcgcaggattttgccttaatctcgcagacggcaaccctcaacagccgtattccgtttatttatttcttcgacggcttccgcacctcgcacgagatcaacaaaatcgtgccgctcagcgacgataccctgcggcagatgatgccgcaggcggcgatcgccgcccaccgcgcccgggcgctgtcgccggaacgcccggtggtacgcggcacctccgccaatccggatacttacttccagtcccgcgaggccgccaacccgtggtacgcgcaaacctatcgccacgtcagcgaggcgatgacgcagttcgccgcgctgaccggtcggcagtatcagccgtttgaatactacggccaccccgatgcgcagcgggtggtgatactgatggggtcggcaatcggcacctgtgaagaagtgattgatgcgctgctggcgcgcggtgaaaaggtcggtatggtgaaggtgcgtctgttccgcccgttctcggcggcccacctgctggagacgctgccggccagcgtgcggaaaatcgccgtgctggaccgcaccaaagaaccgggtgcgccggccgaaccgctgtatctggatgtgatgagcgcgctggccgaagccttcagccgcggtgagcgcgataccctgccgctgacgatcggcggccgctacggcctgtcatccaaagagttcggccccaactgtgcgctggcggtgtttgccgaactggaacaggaacggccacgcccgcgtttcaccgtcggcatctttgatgacgtcagcgggctgtcgctgccgctgcatgataatccgctcccctctcacgccacgctggaggcgctgttttacggcctcggcagtgacggctccgtctcagcgaccaagaacaatatcaaaatcatcggcaacggaacgccgctgtttgcccagggctactttgtctacgattcgaaaaaggccggcggcctgacggtgtcgcacctgcgcgtcagcgaacggccgatcaattccgcctatctggtcagccgcgccgattttatcggctgccaccaggcgcagtttatcgataaataccagatggtcgaacgtctgaaagacggcgggatttttctgctcaataccccttacggcgctgacgaagtgtgggaccggctgccgcaggaagtgcaggcgctgcttcagcaacgccaggcgcgcttctatattatcaacgcggccaaactggcgcgcgaatgccagcttggcgcgcgcatcaacaccgtgatgcagatggcatttttccatctgacgcaggttctgccggatgacgtcgctctgcaacagctgcaggacgccattgcccgcagctacagcagcaaaggccaggagatcgtcgagcgcaactggcaggcgctgggggcaacgcgccaggcgctgaccgccattccgctgcgctccgtcaaccccgccagcccgcaacgcccgccggtggtggccgacgccgcgccggacttcgtcaaaaccgtcacggcggcgatgctggccgggctgggagatgcactgccggtatccgccttcccgccggacggcacctggccggtgggcaccacgcagtgggaaaaacgcaatatcgccgaagaggtgccgatctggcggccggatctctgtacccagtgcaaccactgcgtcgccgcctgcccgcactcggccattcgcgccaaagtcgtgccgccggcggccatggagcacgcgccggccagcttgcagtcgctggatgtcaaagcgcgcgatatgcgcgggcagaaatacgtgctgcaggtggcgccggaagactgcaccggctgtaacctgtgcgtggaagtctgcccggccaaagatcgccagcagccggagatcaaggcgatcaatatggcctcgcgcctggaacatctggcggaagagaaagcccattacgacttcttcctgcagctgccggaaatcgatccggcgcagcttgaacgcatcgatatccgcacctcacagctgattacgccgctgttcgaatactccggcgcctgttccggctgcggcgaaacgccttatatcaagctgctgacccagctatacggcgatcgcttgctgatcgccaacgccaccggctgttcgtccatctacggcggcaacctgcccaccacgccgtacaccaccaatgccgccggccgcggccctgcctgggccaattcactgttcgaggacaacgccgaatttggactgggcttccgcctgacggtcgatcagcatcggcagcgcgccttgcgtctgctggcgtcgcaggccgatcgtctgccggcggagctggtcaacgggctgcggatggatgacatcgcacccgccctgcggctgaagcaaatcgccgagctgcgcacccagctggcgcagttcgatgacggtaacgcccgccagctggccgacgatgccgatcatctgctggataaatccatctggctgatcggcggcgacggctgggcctatgatatcggttttggcgggctggaccacgtgctgagcctgacggagaacgtcaacgtgctggtgctggatacccagtgttactccaacaccggcggccagcagtcgaaggccacgccgcttggcgcggtgaccaaattcggcgaacacggtaaacgcaaggcgcgtaaggacctcggcgtcagcatgatgatgtacggccacgtgtatgtggcgcagatttcgttaggtgcgcagctgaatcagacggtaaaagcgattcaggaggcggaagcctaccccggcccgtcgctgattatcgcctacagcccgtgtgaagagcacggctacgatctggcgctgagtcacgaccagatgaaacagctgaccgccagcggtttctggccgctgtaccgcttcgatccgcgccgcacgcaggaaggcaaagcggcgctggcgctggattcacggccgccgaacagcgatcttgccgccaccttgctgaaggagcagcgtttccgccgcctgaacagcctgcagcctgaggccgccagcgcgttgtatcaggaggccgcgcaggagttgcagcagaaatacgacttcctcagtctgctggccggcaaggcggagaaatcggccaacgagtaa

SEQ ID NO: 443692 - DNA, 333 bp, Serratia marcescens
atgacgggattaatgtatttaaccatggcgattatcgccgaggtggttgccaccactatgctgaaggcgtcggaagggttcacccgcctgtggccctcgctggtggtggtgctgggctatggcgtggccttttggggcctgtcgatggtggtgaaaagcatgccgctgggcattgtgtatgcgatctggtccggcatgggcgtcgttttggtgtctatcgctgcggtatttatttataaccagaaactcgactggccggcaattatcggcatgggattaatcgtcgccggagtattggtgattaacctattgtcaaaaaccagcgctcactaa

SEQ ID NO: 443693 - DNA, 267 bp, Serratia marcescens
atggcaatgcaaatacacaaatggtcgctggccggcgccgttttgctgctggccgcgtgcagcagcaataatgatgaaccgcagcagcagggcaccagcgccagaattgaccacttaccgaccagcgcacactgcgccaacgtcggcggcaccaccaccattgcccatacgctgaatggcgaggcggtcagaatgtgtcagatgccggacggcaagcagtgcgaggagtgggcattaggtcagggggcctgcgccagcgccggctaa

SEQ ID NO: 443694 - DNA, 432 bp, Serratia marcescens
atgaaatcatggatcccgctggcgctggccagtacgctgctggccggctgcgccggcggtacgcctgccggcaagccggtacaggaaagcgatctgctgcatcacaactttgtgctgcagagcgtggacggcgtcgccgccaatgcacaacaggggcgcgggccaagcattgaattcggcgagaagatgcatatctccggttcaatgtgcaaccgcttcttcggcaacggccagttggacaacggcgtgctgacggttaaaaacctggcctcgacgcgaatgatgtgtgccgacccgctgcgtaaccagtgggatcaggtcatcggcagcgtgctgaataacggcgcgcgcgtcacgctggatgcccagcagctgacgctgagcgacggtaaacacacgctggtctataccctgaaagactgggtgcaataa

SEQ ID NO: 443695 - DNA, 2577 bp, Serratia marcescens
gtggctatcctgatcctgctgttggtgctgtggcaaacggtgccgcgctggctgccgcgcgtggcggcgtactggctaccggcaggcagccaactgacgctgcaggggccgctgcgctggcaaaacggtggcctatcgttgccgggggcgcaatataaagtgcagcagtgcctgctggccgatttgggcgcgacgcgtctgcattatcgcggcggtcgctggctgctggacagcgacaaacttagcgttgacagcgcctgcctgagccagttgcccgccggcgaagacgacggcgcgccgctgaccctggatgcgctgcagcgccagttgccggcgctcgatctgagcatcaaccaactctctatcctgccctggcagcactatgccggcaaactgcagctgcataataccgctgcgggccaacggctgttttatcagggtaaaaatctcaaggcggaagcgctgctgaataaccagcagcagctggcaatctcttcgctgaatgtactgccgcccaatagcccacatccgctgcggttcagcggcgatatcaccatagcgcgcgatttcgccgcactgccgccgcagggcaaactgcggggcgaggtgcaaaccgcctacctgcagcagccgctgctgatggacattaactggcatcaggggcaaggggtggtgacgctgatggaaaaaggtgataagcaaccgctggcaaccttgccctggtcggtcacgccgcagcaaatccgcatcgacaaaggcgaatggcgctggccgtatattgaccagccgctaagcggcggcgtcaacattgcgctgcatgactggagcaaaggactggatgaaacgcaaatcagcgctcggctgaatgtgatcaccgccgggcacaacggcaagggcaatgcggtgttgacgctggggccgggcagcgttggcctgacgcgcagcaatctcgacttccaactgaccgggcaggccaacctggccgatttttccctgacggcgtcgattcccggcgtggtcagcggttctattctcaacccgacgctggagctgcggcccggttcgctgctgcgcgcctggggcaacgcctcgccggaaatgaagctggaagaggcgcgtctgccgctggccggggtaaaagtcaccgccaatggcattaccggccgtctgcagtcgattattcgcgccagcgacagctattggggacgtttcagactgcatctggacggtctggcgcaagatttctggccggacaaagggcgctggcagtggcgctattggggcaacggccagctgccgccgctacaggcgaagtgggacgtggcgggcagcggcgactggcaggacagcctcctgacgctcgatcgcctctccaccggctttgatcggctgaaatatggcatggtcacggtggccgcgccgcgcctgacgctgaacaagccgctgcgctggcagcgcgatgacgcactcccgtcgctgaacggtgaactgcagctggtggcggataaggtcagtttcaacggcggcggtcatctgccggcgtcgacgctggcgctgcggctgcaggggcgcgatccgcagaacttccagtggcagggtaagttgcaggcgcaggatatcgggccgattgcgctgcgcggccgctgggacggtgagcgcctgcgcggggaaggctggtggccgaagcagcgcctggcggtgttccagccgttgttggcgccggatctgaatattacgctgcgcgacggcgagttttacgcccaggcggcattctccgccgcgcgtgaacagggcttcgccgccggcggccactgggtggtgaaaaacggcggcatgtggatgaaggacggcgaaatgagcggtctggatttcgtcatgtcttaccggctgcagaaccaccagtggctgctgggtgccaagcagccggtgacgctgcgcattaaatcgctgagtaacctgtttgagatgcagaacatcaccgcgaatctgcagggttactacccctacagtgaacgccagccgctgacgctgagcaatgtcggcgtggatatgctgaacggccacatcggcctgtcggcgctgcgcctgccgcagcatgacgctgcggtgctgaagctggatcgcatcgacctcagcgcgctgtttaccgcgctgaagccgaaacagttcgccatgtccggccgagtgaacggcgagctgccgctgtacctgaataactcgcaatggctggtgcgcaacggctggatcgccaacgccggcctgctgacgctgcggctggataaggatatggccgacgccatcgccagcaacaatatggcgaccggcgcggccatcgactggctgcgctatatggaaattcatcgctcacaggccagggtcgatctcgacaacctgggcgtactgacgttaacggccagaatcgacggggttaacccgcagaaaaacgccaaacgagaggttattttgaactatagccatcaggaaaacgtgtttcagctgtggcgcagcctgcgctttggcgacaacctgcaggagtggctggaacaggccctcgcacaaccaggggaacaaccatga

SEQ ID NO: 443696 - DNA, 198 bp, Serratia marcescens
atgaagatcatcaccgggccggctctggcggccgttgtcggcagcgtgctgctcagcggttgcgtgccgcgtattgaggtggcgacgccgaaagagccgatcaccatcaatatgaacgtcaagatcgaacatgaaatccatatcaaagtggataaagacgttgaaaatatgctgaaaaaccgcagcgatctgttctag

SEQ ID NO: 443697 - DNA, 324 bp, Serratia marcescens
atgaaaaagcgatatttatggctgattggcgccggctggctgctgagcggcagcgtgatggcgttgacgctggacgaggcgaaacagcaggggcgcgtcggcgaaacgctgagcggctatgtcgcaccgctgaaacaggataacgatacgctggcgctggtgaaacgcatcaacgatggtcgaacggaacagtatcagaagattgccgagggcaaccatattgcgctggacgatgtggcgcgcatgaccgggcagaagctggtggcgcgtgcggcgtcgggggaatacgtgcgcggcattaacggccagtggttgaagaaataa

SEQ ID NO: 443698 - DNA, 606 bp, Serratia marcescens
atgagcaaattactggttctgaaatcgagcatcctggcaaactactcacagtctaaccaactgagcgacttcttcgttgagcagtggagcaaaaaccacggcggcgacaccatcaccgtacgtgacctggcggctaacccggtgccggtgctggatggcgaactggtcggcgccatgcgcccttccgacgcgccgctgaccccgcgtcagcaagaagcgctggcgctgtccgatgagctgatcgccgagctgcaggccaacgacaccatcgtcatcgccgcgccgatgtacaacttcaatatttcaacccagttgaaaaactacttcgacctgattgcccgcgccggcgtgaccttccgctacaccgaaaacggtccggaaggcctggtgaaaggcaaacgtgcgattatcctgaccagccgcggcggcgttcacaaaggtacgccaaccgacctggttgaaccttacctgcgcctgttcctgggcttcatcggcatcaccgacgtggaattcgtgtttgtcgaaggcgtggcctatggcccggacgttgccggcaaagcacaggatgacgccaaagctgtgctgactcaggtgctcaccgcctga

SEQ ID NO: 443699 - DNA, 813 bp, Serratia marcescens
atgcgcatatccgctttgctgttgttgtgctcatttccactgattagcgccggcccggcccgggccggcggtccctcccatgcggagaaaacccgcctgttttttggtaaagacgaccggataaaagtgagtgaaacccgcggctggccctggcaggctatcggccagatcgagaccgtcagcggcaatttatgcaccgccaccctgatttcaccacatctggcgctgaccgccggccactgcgtgctggcaccgcccggcgtgctggataaagcggtagcgctgcgttttatcgcccagtccaaaggctgggcttaccaaacggataatattgaaacgctggttgatcggaagctggggaagaaactgaaaccggacggcgacggctggatcgtgccgccgggcgcggcggcctatgactttgcgctgatacggctcaaggatgcgacgccgctgccgctacggccgctgccgctgtggcaaggcgatacgccgaccctgacgcaggcgatgaaacaggccagaaggctgattacccaggccggctaccccgaggaccatctggacagtctgtacagtcatcagaactgcacggtgaccggctgggcgcagcaaggcgtgctgtcgcatcagtgcgataccctgcccggcgacagcggttcaccgctgctgctgaaaacggcagacggctggcgcctgatcgccattcaaagctccgcgccggcggccaaagaccgctaccgtgccgacaaccgggcgctggcggtcaccgctatttatgcccagttgcaggcacttgaacagcaagaatag

SEQ ID NO: 443700 - DNA, 909 bp, Serratia marcescens
atgcagcagattgcggagcggagcggggttgcgccaaacggcgacataccgattgcgtatgaagactggggtgacgaaagcgcgccgcccttattgctgataatgggcattggcgcacagatgctgctgtggccggatgagttttgccgggcgctggttgaacagggttaccgggtgattcgctttgacaaccgcgatgccggcctgtccggcaaaacccacgggcatcgccggcagccgctgtggctgctgatactgcgcgctcagcttggctggcaaagtgcggtaccttatacgctggcggacatggcggccgatgctgttcagcttctggatcatctgcacattcggcaggcgcatgtgttgggcggctcaatgggcggcatgattgcccaggtgttggcggcggagtatccgcagcgagtgcgcagcctgatcgtgctgttttccagcaccaatcaaccgctgttgccgccgccggcgccgtcgctgttattccagctgctgcggccgtttcccgttaaggcgtcgcgcgcacagcagcaccattactgtaaaactcgtttgcgtctgctggccagtaaacgttacccgatgcaggaagcggagctggatgcgctggtcagccggctattgcagcgcggcggcgacagcgaagggctgcagcgtcagttttccgccttactgggcagcggcgatctgcggcgttacagccggaacattcaggcgccgacgctggtgatccacggcagtgccgaccgtatggtgcgcaaggccggaggagctgccgtggcgcaggcggttccccatgccaggctgcatattgtgccggatatggggcatgacctgccgcaacctttgcgtttaccactggcgacgctgattgcgcagcatatggcgccgcactga

SEQ ID NO: 443701 - DNA, 417 bp, Serratia marcescens
atgattaaatcagaacttatccacccgcctctgctcggcgcgctggcggcatgcggccacaaaagtcagctgttaatcgccgatgccaattacgcggtaaccagcaacgcccgtaaagacgcgaccgtggtgtatctcaatctgtcgccggggatgatccccgccgcgctggtgctggagaaaatcctgacctgtatcaatgtggaacatgccgccctgatgacggcgccggcggattttccccatactgcggccgacgactaccgacgcttgctgcctaccgattgccccatcagctatctggagcgggagcagttttacgccgaggtcaaatccgaacgtacggcgttgattatcgcctccggcgagcagcggcgcttcgccaatctgctgctgacggtcgccccggtcttttga

SEQ ID NO: 443702 - DNA, 765 bp, Serratia marcescens
atgggcaaccttaccggcaagaaagtctttatcactggcgcggagcaaggcatcggccgggccacggcagaacagctgatccaggccggctgcgatatttatttgcattaccacagcggcgaagaaggccccaaggcgctggtagagctggcgcattcgctggggcagcgcgcggcctatggctacgcggatttaatcgagaccgcagacgccgaacgctgcgtgcgcgccggggcggagtttctcggcggcatcgatattttgatcaataacgtcggcggcatcgtcggccgtaagtggctgggagaaatcgaccgccagttctggcaaacggtgctggatgtcaatatgaccaccatgctgaacgtgacgcaaagcgcgctgccattcttgaaggcggcagcagacggcgccagcgtcgtcaatctggcctcgctggccggccgcgccggcggacattccggctcgctggtctactcgtcctgcaagggcgcggtgctgacctggacacgctcgctggcggcggaactgggtgaacacggcgtccgggtgaacgcggtggctcccgggttgatcctcggcacgcgttttcacgatcgccacaccacccaagcctcggcggaagaaaccgtccgcgcaatcccgctgggcagagccggcacgccgcaggatgtggcgcgcgtgatcgccttcctggcggcggaatatgacggattcgtctccggtgccaccattgatatcaacggcggcatttaccgcatgtaa

SEQ ID NO: 443703 - DNA, 1308 bp, Serratia marcescens
atgaacaaaagaacgccgcaggatattgaacgcagcgcaataagaaagctgacgctgcatatcgtccccttaatgattctgttatattttctggcctttcttgatcgtaacaatatggcttatgccgccatagcgttggaagacagcctggggctcatggcctctgcattcggttttgcctccggtattttctttatcggctattttatgtttgaaatccccagcaatgccggcacgatcaagttcggcccgcgtatctggttcgcccgcatcctgatctcatggggcatcttcgccaccctgatgggctttgcacgcacgccgatggaactgtatatctgccgttttatgctgggtgtctgtgaggctggcttcttcccctccgtggtctactattttaccgtatttttcccggaaaaataccgcaccaaaattctgggcatgtttattatcgtccagcctttatccaacgccatcggctcaccgatttccggttttatccttaatattgacaacggctggtttggccttgaaccctggcaactgctgtttattattgaaggcgtgccgccgattattatcggcctgattattccgtttatcataaagaactcaccaaaagacgtcggttaccttgacgtggaggagaaagcctggttaatgaataataaccagcgtaccaaatccggatcacaaataacgctgggtgatttctttaacggtattaaaaacaaaaaatatctgatctacgccctgctgaatttcggcatggtctgcggcatttacggttttggcatgtggctgccctccatccttaccgccatttccggcaacgatattttccacgtcagcctgctggcgctgatcccctatggcctgggggcgctgctggtttatccgtggagcctgtgggccagtaaaacccggcaaatcggcatttttgccggcatcagcatggtgatggccgccatcggtctggccggcgcggtagtcttcttccaatacaacctgttcgtctcgctctctttcttatgtctcgccgccgtcggtatctacaccgccgttccgccgtttttatccatgcccgccaatatttcgtcgggcgcgtcggccgccgccggcctggcggtggtgagctgcattggcaacatcggtggctttgtcgccccctatgtggtgggcgtgcttaacgaatttacccacagcagcattccggggctggttttcctggcgctgtgtctgctggtcaccggcctgatttgcattttctactgcgccaaacagcgcgaaggcgtcatcagggcgtaa

SEQ ID NO: 443704 - DNA, 1035 bp, Serratia marcescens
atggccaatattcgcgacgttgcccggcgagccggcgtttccatcagcagcgtgtcaaacctgcttaatcatcgcgcccatcagatgagtgaagagacgcggttgcgcattgagcgagcgatggacgagctgcattaccggccgcagagaatgccgccgcgcactagcgggcagccgacgattatcggtttactggtgccgtcgattgtcaatcccagcttttcggcgctggcgcatcaggtcgacctgtccgcccgggcataccgctaccgcgtgctgctcggtaattcataccgtcaggaagaagaggaacgcgcctttatcaccgatatgttcgcccacggcgtgcgcggcattatcgtcgcggcgagcgatatccgccaaacgcactttgtccgctgtgccgaacaggggatgagaattgtcagctacgacaaccgttttagcggcagtatggccgccgatacccggctggtcgacagcgtctctatggacaacgttgaagccggccgcctggcggcgaaccacctgattgagcgtggctgccggcagattgtttttgccaccgaggcggccctcaccctgagccgcagcaataaaatcgacggttttctggcggcgttgcgcagccatcagctaccggcgtatgaacgggtgatagaaggcaacgccagcagtgaatatggcgatacggagatgtttgaactcggccgggcgctggtaagccgtatactcgccatgacgccccgtccggacggtattgtggcaatcaacgatgcgctgggcattggcctgatgacggggctgcgcgccgccggggtgcgcataccgcagcagatatccatcgttggcatcgacaatatttcgctggccggattttccgaaccgggactgacctcggtaatgccgccgctggccgctatggcgcagctgatggtcgaacgcttaattaaacgcatcaacgatcctctgctgccgcccggtgaatttctttttccgccgaccttgatcggccgtcagtcagtaaaagattag

SEQ ID NO: 443705 - DNA, 747 bp, Serratia marcescens
atgacagacaatattaaagataaagtaattgtaataaccggtgcttcaagcggtatgggtgaagctgcagctcgtcaccttgccaaaaaaggtgccaaattggtacttgcagcccgccgctccgatcgtatagatatgctggccaaggaaatcaatgatcaaggcggaactgcaattgctgtagcaaccgatgtaacccgtgaagatgacgttaaaaagctcgttgatactgccgttaaccaactgggtcgcattgatgtactgattaataatgccggtgttatgccgctatcgccgctcgatcaggttaaagtgaatgagtggaatcagatgatcgatgtgaacctccgtggtgttctgcatggcatcgccgccgccctgccatatatgaaaacccaaaagtcgggacacatcatcaatacggcatccgttgccggccacctggtcttcccggcatccgccgtttactctgccacaaaatatgcggtacgcgcactcaccgaggggctgagaaaagaagcctgcgcttataacgtccgtgcaaccattatctctccaggggcggtatctacagagttgctcgagcatatcagcgataaagacgttcaggctgtcaatcaggagtacgtaggaaaagttggcgttccgccggaaacctatgcccgcatggttgcttttgccattagcgaacccgaagatgtgggtgttaacgagattattttccgaccaacagcccaggatttgtaa

SEQ ID NO: 443706 - DNA, 906 bp, Serratia marcescens
atggccactgaaaatccgaattccgaccaaaaaaatattgcggatatgattgtagagattgcccaaaacgatggtgattattctacggccatctcttcactcaccattcatcgccgtagtgtgcccacggcgcccgtgcactgtatttatcagatgggactgggcgttgtggtgcagggagcgaaagaggtcatgctggcggggaaactaacccggtacagcgcaggtgagtctatgctgaccacgatagatctaccagtggtctcccatgttactcaggcaagccaggatgagccctttctggggttggtgctgacatttgatccccggactgtggtacagactgctgcgcttatgccttcggcgaagcctgtaagagaaacattgcttaatccgctgtctgttgagcctctggatgaaggggtaacgggcgctttgcaacgtctgataaagctcttggccgagccggatttaatcggcccgatcgcgccgctcatcgtacaggaaattattatccgcttattggccagtaatcatggcccccagctccggcatctggcaacggcaggctctccggggcagaatattgccagggtggttggctggcttaaacagaatttcacgcgttctgtctgcatagatgaattggccgcgagtgcctatatgagtccatccacgtttcggcaacattttcgggcggtgacgggggtgagcccgctacagtaccagaagaagctccggctacaggaggccagacaacagatgcttagcaagcatctggacgccggcagcgctgctttaatcgttggttatgaaagtgcttcgcagtttagtcgcgaataccgccgggaatttggtgaatctccgcagcgtgacattaaacgtatgcgtttacatggcgagtga

SEQ ID NO: 443707 - DNA, 720 bp, Serratia marcescens
atgcacaaaattgtttttgtagaagacgacgccgacgtcggtaaattaatcgccgcctatctgggcaagcatgatattgacgtcctggtcgaaccgcgcggcgacaccgccctggagcgcattgcgcaggagcagccggatctggtgctgctggatattatgctgcccggcaaagacggcatgacgctgtgccgcgatttgcggccgcagtttcacggcccgattgtgctgctgacgtcgcttgacagcgatatgaaccatattctgtcgctggaaatgggcgccaacgactatattttgaaaaccacgccgccggcggtgctgctggcgcgcctgcgcctgcatctgcgtcagggcgccgcagggcatgaagatcccgccgccctgacgccgcacaacgcgctgcatttcggcctgctgtgcattgacccggtcaaccgccaggtgacgctggcggacgagaccatcactctttccacctcggactttgacctgctgtgggaactggcgacccacgccgggcagattatggaccgggaggcgctgctgcaaaacctgcgcggcgtcagctatgacggactggatcgcagcatcgacgtcgcgatttcccgcctgcgccgcaagctgtacgacaatgcgctggaccccttccgcatcaaaaccgtacgcaacaaaggctacctgttcgcccccaacgcctgggaacaggcgcagccatga

SEQ ID NO: 443708 - DNA, 723 bp, Serratia marcescens
atggaaccctatgactctgcgccggtagtgatcaccggcggcgcccgccgcatcggcctggcgctggccaaatcgctgctgcagcgccaggtgccggtaatcgtcgcctaccgcagtgactatccggcgctcgccgaactcaaatcgctgggcgccacctgcattcaagccgacttttccacccatgacggcatctaccagtttgccgcgcaggtgcgggaaaccacgcctaaactgcgggcgctggtgcataacgccagcgcctggcaggccgaatcgccacagacgccgccggagcaggtgatggcgtcgatgctgcaaatccacgtttacaccccttatctgctgaatcagctgctggagccctgcctgcgcggtcagggacaggccggcgccgatattatccacctgacggattacgtggtggagaaaggcagcgataagcatatcgcctacgccgccagcaaggcggcgctggataatatgacccgctcgttcgcccgcaagctggcgccggaggtgaaggtcaacgccattgcgccggcgctgattatctttaaccccggcgacgatgaagcctatcgccagcaggcgctgcaaaaatcgctgatgaaagtcgcccccggcgaaagcgaagtggtcgatctggtgcattacctgctcggcagccgctatgtaaccggccgcacccacggcgtcgacggcggccgtccgctgcgctga

SEQ ID NO: 443709 - DNA, 408 bp, Serratia marcescens
atgagtaacggtcaccttgcatccgtcgcgcgcagtgaaacaatctgctttgactacatggagtttctgtctgcatcgtgcaagaagcactggcgctttattgatgcaatttacggcgttatgcctatttttggcatggtgctgaaatcacgcgtggtatccacgcaaacgcgtacagaacagttaaaagagttggctttgcaggtggtgtccacccaggtcagcgatgaaaccaatattgtgcgtctgatcgatcttgggcaacagcaggggttggcggtatttgatattctgctgccttatgcgctggataaagctcaactggcggcgattcagcaggagtgtgcgacaaacgtggtattaacgcaggtgggtgagcgcatcaccatcagcacgcaggaaaaatga

SEQ ID NO: 443710 - DNA, 1392 bp, Serratia marcescens
ttggaaaaaaaattaggtctactcgcattaaccgctctggtgctcagttccatgctcggcgccggcgtgttcagcctgccgcaaaatatggcggaagtcgccagcccggcggccctgctgatcggctggggcattaccggcgtcggcattctgttcctggccttcgccatgctgctgctgacccggctgcgtcccgatctggatggcggtatctttacgtatgccaaagaaggattcggcgagctggtcggcttctgctccgcctggggctattggctgtgcgcggtgattgccaatgtctcttatctggtgatcgtcttcgccgcgctgagcattttcaccgaccgcggcggcgcggtgatcttcggcgacggcaacacctggcaggcgctggtgggggaatccattctgctgtgggtggtgcatgcgctggtgctgcgcggcgtgcagaccgccgccagcatcaacctggccgccacgctggctaagctgctgccgctcgggttgtttgccgtgctggcggtgatcgcctttaaaatggacgtattcaccctcgactttaccggcgtggcgctcggcaagccggtgtgggagcaggtaaaaaacaccatgctgatcactctttgggtgtttatcggcgtggaaggcgcggtggtagtgtcggcacgggcgcgcaacaagaaggatgtcgggctggccaccatgctggcagtggtgtccgcgctggcggtatacctgctggtgacgctgctggcgctcggcgtggtgccgcgcagcgaactggcgcagatgcgcaacccgtccatggcggtgatgatggtcgatctgctcggcccgtggggcgatgtgattatcgccgtcggcctgattatctcggtgtgcggcgcctacttgagttggaccattatggcggccgaagtaccgctgctggccgcgcagcacggcgcctttccgaaagtgttccgccggcagaataaaaaccacgccccgtccgcctcgctgtggctgaccaacggcgcggtgcagattgcgctggtgctgatctggtttaccagcagcaactataactcgctgctgaccatcgcctcggaaatgattctggtgccctatttcctggtcggcgccttcctgttcaaagtggcgcggcagcgcaatgacaaacgcctgatcgtggcggcaagcggcgcctgcctgtatggcatctggctgctgtatgcctcagggctgatgcatctgctgatgtcggtgctgctgtacgcgccggggttgctggtgtttatctatgcccgtcgcggccatgatgacgtgaaattgctgaacaagctggaaagaagcagcattctgctgctgctgttggccaccgtgccggccggctggtttatgctgcagtaa

SEQ ID NO: 443711 - DNA, 948 bp, Serratia marcescens
atgaagctgaagaacacgatcatcgcatcagccttgttatcacttaccgcgctgtccgctcatgctgcgcaagagttaacgcctgagaaagcggcggctatcaagccatttgatcgcatcaccatcaccggccgtttcaacgccatcaacgaagccgccaccgccgtctctcgccgcgccgataaactgggcgcagacgctttctatattcaagatattaataatagtaacaatggcggcaactggcgcgtaacggcggacatctaccacagcgacgcgccggaagtagagaagagcaactatcgcgtattcaacggcgtgaaagagctgccgaaagacaaggcctaccagttagagccgtatgataccgtcagcgtcagcggtttcttccgcagccagccggacgtcaacgacgccatctccaagcaggcgaagaaaaaaggcgccgattccttctttatcgtccgtcaggttgacgctaacaagggcggcaaccaatacgtcaccgcttacgtctataaagccgatgcgccaaaacgcatcgtgcagagcccgaacgcgatcccggccgactccgaagccggtaaagccgcgctggccgccggcggtgccgccgcggcgaaggtagagatcccgggcgtcgcctcttccggctcaccaagccgtgaagtcggccgcttcttcgaaacgcagtcgtcaaccggcaagcgttacactgtcaccctggccgacggcaccaaaatccaggaagtaaacaatgtgaccgccgcgcaaatgcagccgtttgactccgtgacctttaccggccacttcaacagcatgaccgacgtctccaccgaagtggcgaagcgtgcggccgccaaaggcgccaagtactatcacgtcacccgccagtggcagaacaagagcggcggcaacctgaccgtcagcgccgatctgttcaaataa

SEQ ID NO: 443712 - DNA, 426 bp, Serratia marcescens
atgaaagcgagaatttccgtgctgacgctggccgtcgccgatctggaaaaatccctggccttttatcgtgacggtctgggcctgccgaccgacggtattatcggccgtgagtttgaacacggcgcggtggcgttcttcgagctatccggcggggtcaaacttgccatctgggcgcaggacgacctggcgcacgacaccggactggcgaaaacgcccattagttcgaccgccttttccatcgggcacaacgtcgccagccgggcggaggttgatgccatcatgacggcggcgcagcgcgccggggccgggatcgtcaaatctgcgcaggggacgttctatggcggctatgccggctactttcgcgacccggacgggcatctgtgggaagtggtgtggaacccgcactgggccttgccggacgactga

SEQ ID NO: 443713 - DNA, 1194 bp, Serratia marcescens
atgattatcaaacctaaggttcgcggctttatctgcaccaccactcatccggtgggttgtgaagccaatgttcgtcgtcagattgcctataccaaacagcagggcgctatcgctgatggcccgaaacgcgtattggttatcggcgcctccaccggttatggtctggcctcccgtatcgctgcggctttcggtagcggcgcggccactatcggcgtgttcttcgaaaaagccggcaccgaaaccaagcccgcaactgccggctggtataactccgccgcgttcgacaaggctgccaaagaagaaggcctgtacgcgaaaagcatcaatggcgatgcgttttccaacgaatgccgcgagaaagtgatcgaactgatcaaacaggacctcggccagatcgatctggtggtttactcgctggcttctccggtgcgtaaaatgccggaaaccggcgaagtggtgcgttctgcgctgaagccaatcggcgaggtgtacaccaccacggcgattgacaccaacaaggatcagatcgtctccgccaccgttgaaccggcgacggaagaagaaattgaaaacaccatcaccgtgatgggcggtcaggactgggaactgtggatgtccgcgctggaaggcgccggcgttctggcggaaggcgcgaaatccgtggcttactcctatatcggcaccgacctgacctggccaatctattggcacggtacgctcggccgggcaaaagaagatctggaccgcgcagcgactgctatccgcggcgatctgtccgctaaaggcggcactgcgcacgtagcggtgctgaagtccgtggtgacccaggcttcctccgccattccggtgatgccgctgtatatctccatggctttcaaaatcatgaaagagaaaggcatccacgaaggctgcatggagcaggtctaccgcctgatgcgcacccgtctgtacggcgacgacaaggcgctggacgaccatcagcgcatccgtatggacgactgggaactgcgtgacgacgtgcagcaggcctgtcgcgacctgtggccgtccatcacttcggaaaacctgagcgagctgaccgactacaccggttacaagcaggagttcctgcgcctgttcggcttcggtctggaaggcgtggactacgatgcggacgtcaacccggacgtgcgcttcgacgttatcgagctgtaa

SEQ ID NO: 443714 - DNA, 723 bp, Serratia marcescens
gtggagcagctcaataacggactgtttatcaagcaagagcgttttgaagttctggccattttgcgagatatctacaagcagcgcacgccgatgcgcatcgctaatcaacagcaacaattcttttacagccagctattaagcgtgggcgccggcaatatcgtctttgactgcagcgattgtcagcagtgcaccggcggtcagctgcaggtggtgattgaaggctatgacgccaaaatcgagtttttggtcgatagcgccgagcggatacgtcatcaggaaaacgaggcattttctgcccaactgccgaaagaactgaagtacattcaacgtcgccgccagccgcggattactacgccttactggcgcgatttctattgtcacggcgattgccccgacggttcgcctctgcaattgcgcatccatgatatttccgtgggcggcgtcggcctgcgcctggacggcgaggttccgtcgtttctgcaccccggctttatgttccacaaagtccagttgaacctggacagttacggcaccttcaaagtgaatatggaactgctggcgatctccgacgatcacgacgtcagcccggaagatgaagaggataaccggcatttttcccgcctttcctgccgttttaccgatgtcagtcctgccacaatgcgcaaattacaaagcgcggtgtatgcattcgatctggacttcaacaaaaagaaaaaacgttga

SEQ ID NO: 443715 - DNA, 840 bp, Serratia marcescens
atgccacagttttcctctttgtcgcctgcgccgatcgatgtgatcagcattcagtcacaggtcatttacggcagcgtcggcaacggcattgcctaccgcactctgctggccaaggggttacaggcgctgcaggtgccgacggtgttattcggctgtccgccctattatggcccgccgcacggcggcgtgatccccgacgactggttcggcggctttctcgacgatctgctggcgcgcggtgtggcccagcgggcgcgtgcggtcattgtcggctatctgggtaatgacagccaatgtcaactgctggcgaactggctgcggcgcgtcagagaactcaatccgcaggtgttgatcgtgattgacccggtaatgggcgattacggcgaaggggtttacgtcaaccagcggctggtcgacagctaccggtcaccattcctgcaactggccgacgggctgacgcccaacggctttgagctggagcagatctgcggtgaaacgctgaccagcccggaacagaccatacgcgccgcgcgggcgctgctgaatgatgtcacccgctgggtgctggtaaccagcgtccccgaccagcgggccgatccacaggagatcggtctgctgtgggttaccgccgaggaagccagatccatcagccatcgcaaaattgacgccaacgtcaaaggcaccggcgatatgtttaccgcgctgctggtcagccggctgctggccggcgaaccggcggagaacgccgtttatcacgcgattgaagaggtatgtgccgctctgacggaggcggctcgttacggttggggagaaattggccgtctgtcggcgtcagaataa

SEQ ID NO: 443716 - DNA, 825 bp, Serratia marcescens
atgtcattgtttaattctctttcccgccggctgatagccgtcgcagccgcctgcgtcatgctgtccacagtctctattgcacaggcttccgccccgctcgctctgcactcccgcgccgctctggtggtcaatgccaagaccggcaagacgctgtatcagaaacaggccaaccgacgtatgccgattgcctcactgagtaaactgatgaccgccatggtggtgctggataataaacgcccgctgggcaataaaataaaggtgacccgcgccgaccgtgatttactgaagaaaacccactcgcgtctgaccgtcggatccgtcctcagccgacgcgatatgctgcatattgcgctgatgtcgtcggaaaaccgcgcggcggcggcgctgagccgttactatcccggcgggcgtccggcattcgtcgcccggatgaaccgcaaggcgcgccagatcggtatgaaaaacacccgtttccgcgatccgaccgggctgacgccgcgcaatgtctccaccgcgcgcgatctgctgaaaatggtgaagcacgcctaccgctatcagaccattcgcgccttcagcaccgataagcagcagattgtgcaccccggccacggccaactggtgtaccgcagttccaacggtctgattaacaatcatgcctgggatatccggctgcaaaaaaccggctacaccaacgaggccggccactgtctggtggtgcgcacggtcattaagggccagccgatcgtgatgattttgctgggttcacagcagcgctatggccactacagtgacgccatccgcctgaagaactggctggaatcctga

SEQ ID NO: 443717 - DNA, 909 bp, Serratia marcescens
atgattgaactgcgccggctgaaagcctttgtcaccgtggttgaggaaggcaatattacccgcgccgccgaacggctgtgcattcagcaaccgccgctcagccgcctgctgcagggattggaggaggaactgggcgtgcaactgctgcagcgcctgccgcgcggcgtgcgcgccaccgacgccggcgatgtgttgctccgtgaggcgcgggcgctgctggcacgcgccgcaacgctgggggatgcggtacgccgcgccgcccgcggtgaacaggggcatatcgccatcggctttaccagctcggcggcgctgcacccgttcgtgcccaacctgctgcgccgctaccgcgaaatcctgccggacgtcgccacacagttggaagaggccggcagcggggagttgatggatgcgttggttgacgagcggcttgacgcggcctttgtgcgttcgccggtcagtgaaattcccggtttaagtattgaaccggtgctgcgcgaaagtatgctgatcgccctgccggtcggccaccggctggctgacaatgcccagacgccgctgccgctgacggcgctggcccatgaagcatttattctttaccgccgcccggcgggacaagggctgtacgacgccatcctcgccgcctgttaccgcgccggcttcagcccgcgcatcgtgcaggaggccccgcgcctgccggcgacgctcagcctggtcggtgccggcctggggctgtcaatcgtgccggcgtcgatgcgccgccttggcggcgacggcatcgtttatcgcgccatccgcgatgccgatgatctggccgcgccgctgtatctggcgctgcgcggcaaccgacactcgcccatcgtcagccgttttcgcgaactggtcagcgaagcggtggccgcagaaaagtag

SEQ ID NO: 443718 - DNA, 570 bp, Serratia marcescens
atggctgagacgaacatggtgaaggtatcaacagaaacggtggttcccggcaactgggcgctgtttcaggggtttttaatgctggggttgatcggcttcggcggcgtgctgccgctggcgcggcggatgctggttgaagagcggcgctggttgagcggcgagcagtttaccgatctgctcggcctgtgccagtttttgcccggcggcaatgtgattaacctgtcggtggcggttggtatggagtttcgcggcctgcgcggcgcctgcagcgcgctgctggggctgatttgcgcgccgacggcaattgtggttgtcctgggcgcggtctatgcgcgttttcagaacgacgctcatattcagcatctgttcgccgggctggccgccgccgccgccgggctgctgttggcgaccgcgttaaaaatgttgcagccgctgcgtggccgctggctggcgctggcggtcgccgcgctgtgtctgctggcgatcgcctggctgcgtctgccgctgttgccgaccatgttgacgctggcgccgctcagcattttgctggcctggagaaaatggttatga

SEQ ID NO: 443719 - DNA, 522 bp, Serratia marcescens
atgattccagtgcttatcgcgttagcggtcatctttagcgagctttctctgatggcgttcggcggcggcatcaccattctgccggagatgcagcgacaggtggttgaggtgcatcagtggatgagcgcgcaggagttcagtgcgttgttcgctatggcacaggcggcgccggggccgaatatgatggtggtgccgctgatcggctggcacgtcgccggctgggcagggttgctggtgtcctcgctggccaagtttgtgccgtcgtcgctggtcaccttactggtgatgcaggtgtggaagcgtttcaaggatcggccgtggcggcgctacgtgcaggccgggctggtgccggtaacggtggggctggtcgccgccagcggcgcgttgatcgccgaggcatcggccagcaactggcgtctggcgttgctgattggcgtcgccacgctgctgagtatgcacaaacggctgcatccgctgtgggtactggccggcggcgcgctgctggggctgttgattgcctga

SEQ ID NO: 443720 - DNA, 672 bp, Serratia marcescens
atgcgacggattatcgttggcgcctttctcagcctggacggggtgatgcaggcgccgggcgcgccggaagaagatcgcgccggcgggtttcgctacggcggctggacggtgccctactgggacgaccagatcgccgccgccatgggcgatctgttctcccgcccgttcgacctgctgctggggcgcagaacctatgacattttcgccgcgcactggccctatgtggaaagcgaccctgcggccggcagtttcgatcaaatcagttacgatgcggcgcgcttgttcaatcaggcgaccaaatacgttgctacccatcacagcgacacgctctgctggcagaacagccactctctgggccagaatgtgccggcggcgctgaatgcgctgaaggccgaagacgggccggatttaatcgtgcagggcagcggcgaactggtacagcagctgttgtcctacgatttggtggatgaactgcggctgctgatttatccggtactgctgggagacggtaaacggttgttcgccgaggggctgacggcgatggcctttacgctggaaaaagcgctcagtacccccagcggcgtggtaattgcgcactatcagcgcggcggggaaatcgagctgggcaccttcgcactggaacatgcccgcgagccggaacacccctggtaa

SEQ ID NO: 443721 - DNA, 1011 bp, Serratia marcescens
atgttaaaactttcccgttgcgccctgctggcgggcgtgctgttgccctgcgccgtcggcgccgctgaaaacccgcaatatggcgtcgaactgcaaggttttcactacccttatccgctgcaaaaattcagcttccgctcgcagggtcagaccttaaacatgggttatatggacgtcgtgcccgacggcgacgccaacgggcagaccgtggtgctgatgcacggtaaaaacttctgcggcgccacctgggaagataccatcaaggcgctgagcaaggccggttaccgggtgatcgccccggatcaaatcggtttctgcagctccagcaagccgccgcattaccaatacagcttccagcagctggcgcaaaacacccacgatctgctgaaaaaactcaagatctcctcagcgacgctggtcggccactcgaccggcggtatgctggccacgcgctatgcgctgatgtatccgcagcaaacgcggcaactggtgatggtcaacccgatcggccttgaggactggaaggcgaaaggcgtgccctggcgcagcgtcgatcaatggtttgagcgcgagctgaaaaccagcgccgccggcattaaacagtatgaacagaaaacctactacggcggccgctggcagccgcagtatgaccgctgggtcgatatgctggccgggctgaacaacggccccggcaaacggctggtggcttggaactcggcgctgatctacgacatgatctatacccagccggtctattacgaatttaaaaacctgcagatgccgaccaccctgctgatcggcaccgacgataccacggcgatcggcagcgacatcgccccgccggcggtcaaggcgcagattggcgactatcaccaattgggcaagcaggtggcgaagctgatcccacaggcgacgctggtcgagttcccgggtctgggccatgcgccgcaaatggaacagccggagaaattccaccaggcgctgctgaaggcgctgcgctcacgggggtga

SEQ ID NO: 443722 - DNA, 1173 bp, Serratia marcescens
atgcaagacagccatacattgaatgtaaaacgcagacagttattaaaactttcgggcgctctggccggcggcgtcgcgctggcgggactgagccgcagcgccctggccgatgcgcagccgtcgtcctcggccggctttaccacaccgacggccgaacatcctatccgcatcaatttcaatgaaaatgcgctcggcatgtcgccgcgggcgcaggcggcggcgcgcgacgccgtggtcaaggccaaccgctacgccaaagaggaaattatcgcgctgcgcagccaactggccggccgttatcaactgccagacgagtccattctgctgaccgccggctcttcggagggcattcgcgccgctatcgaggcttacgccacattggatacacagctggtgatcccggcgctgacctacggcgacggcgagcacttcgccgccatcgccgggatgaaaatcaccaaagtgccaatgctggacggctggcagttcgatatcaacggactgaaacaggcggttgccaaccacgccggcccgtcgctggtgtatctggtcaacccgaacaatcccaccgccaccatcacgccggccgacctgatcgaaccctggatcgccagcaaaccggccaatacggtgtttattgttgatgaagcctatgccgaattcgtcaacgacccgcgcttccgctcggtcggcccgctgctgaaacagggcgccgacaacgtaatcctgctgaaaaccttctccaaaatctacgccatggccggcatgcgcgtggggtacgccgtggcgcaaccggcgctgatcgcccgcctggccaatcaagtggccggcgaaaagatcaatttttgcggcgtggacgccgctctggcttcgctgcacgatgaggccttcgtcacctacagcaagaaaagcaatgatacttcgcggcagatattgctgaagacgctggacgaattaggcctcgactatttaccgtcggaagccaatttcgtgttctttaagctcaccacgccactcaccgccttccagcagcaaatgaaacaggcaggcattctggtgggacgtgctttcccgccggccgatgactggtgccgcatctcgctgggaacgccgcaggaaatgacctttgtcgcccacacgctgaagcagttccgcagccagaagcagctgtag

SEQ ID NO: 443723 - DNA, 906 bp, Serratia marcescens
atgaatgcgttgttatacctggcggtggtgctgatctggggcaccacctggattgcgattaatctgcagcaacagggaccggtcgccattccggtctccatcagctaccgtttcgctatcgccgcgctggtgatgtggctggcgctgctgctgacccgcaggctgcgccgcatcagcctgcgcgaccatctgttctgcctcctgcagggctgctgtgtgttcggcttcaacttttactgtttctatctggccgcggccgccgtcagcagcggcctggagtcggttattttctccatggcggtgctgtttaacgcgcttaatggcctgatattcttcggtcaacgccccggcccgaacctgctgcccgccgcgttgctcggcgtcagcggcattgtcgcgctgttctggcacgagctgcgggccgcacagccggcaccggagctgctgcacggcgtggggctgtgcctgctcggcacgctgggtttttcgctcggcaatatgatcggcagccgccaccagcgccacgggctggatattctgtcgaccaatacttacgccatgagctacggcgcgttgttgatggggctgctggcctgggcgcagggggcgtcgtttcagattgagtggaacagccgctatctggggtcgctgttatatctggcaattttcggttcggtgatcgcgtttgccgcctatttcagcctgctgggacgcatcggcgccagcgccgccgcttacagcaccctgctgtttcctctggtggcgctgaccatttcgacgctgtatgaggggtatatctggcatggcaacgcggtgatcggcctgtgcctgatcctgctcggcaacctggttatgttcagcaatccccgctggttcagacggttagtgcaacgccgcatcgcataa

SEQ ID NO: 443724 - DNA, 564 bp, Serratia marcescens
atgcgttgccgggccgtggagcgcttgcagacgcctgcggcgagttgcatattcttgcgctttttttaccggcgcagtggtgccgcggcgcgcgactccttacactggaagcctgtttatcatcctcggagccaggcatgtcagcgtacaaggcgtttaccacactgcaggagcataaggcccggctgcatcatcacctgcatctcgcgtccggcgtggagctggcggcctggtccaactgtgacgatcgcattactcaggaaagcgccgaccaccataccctcagcctgtacgtcgccgacggctacgagtgctaccaaaaggtgccggacggctggcgcaacggcggcgggccggaccatttttgcattatgccgcgtcagtatgagtcaacctgggacgtgcgcagcaatctgtcgttcgctcatctgtattgcaccgatcgtcatctgcggcagctggtcgagcagacctgggaccgcagcccggcgtctatcaacgttgaggcgcgctctttcggcgaagatacgcagattacgcggctctaccgtcagtttttgctga

SEQ ID NO: 443725 - DNA, 795 bp, Serratia marcescens
atgaagaaaatcatgatgattggctacggcgcgatggcgaaggaagtgttgtcccgcctgccggaaggtgtggaacccggctggatcgtggcgcgcgagccgcatcatgcggcgattgccgccgcctttgacggccgggtgcaggcgctgagcgatccgcgccagtgcgacggctgtcccgatctggtgctggagtgcgccagtcagcaggcggtcgccgagtttggcgaagcggtagtgcggcgcggctggacgctggcggtgatttccaccggcgcgctggcggacgccgggctgcagcagcgtatccagcaggccagccgcgagcatcacgggcgggtttgggtgctgtccggcgcggtggcgggcatggacgggctggcgtcggcgcgcgaaggcggactgaccagcgtcacctatcaggccagcaaaagcccggccagctggcgcggcagcccggcggaaagcctgatcgacctcgatgcggtcagcgaagcgcaggtgtttttcgagggcagcgcgcgtgaagcggcacggcagttcccggccaacgccaacgtggcggctaccattgcgctgcacgggctgggtatggaccagacgcgggtgcgcctgcaggtggatccgcatacgcggcgcaatacgcaccggctgcaggcgcagggcgcgtttggcgaatttcagattgagttaagcggcaatccgctggccagtaacccgaagacatcgacgctggcggcgctgagcgcggtacaggcctgccgtcgactgcttgacggcgaactgacggcataa

SEQ ID NO: 443726 - DNA, 795 bp, Serratia marcescens
atgaatttccagattgaaaaccgggtcgcggtggttaccggcggctcgtcgggcatcggttttgagactctgcgcctgctgctggcggagggggccagggtggcgttctgcggccgcagtcaggacaaacttgacggtgcgctggcgcaactgcaggccgagtttccgcaggcgcagattttggcgcagcgctgtgacgtgctggtgccggagcaggtggcgcagtttgccgggcaggtcgaggcgcgcttcggcggcgtggatatgctgatcaataacgccgggcagggcttcgtttcccactttgaccagacgccgcgcgcggcctggctgcacgaggccgagctgaaactgttcggcgtgattaacccgctgcaggcatttttgccggcgttggagcgctcggatatcgcctcgatcacctgcgtcaattcgttgctggcgctgcagccggaagaacacatgatcgccacctcggcggcgcgcgccgcgctgctcaatatgacgctgacgctgtcgaaagagctggtgacaaagggcatccgcgtgaactccattctgctggggatggtggaatcgggccagtggcgccgccgctttgaagagcgcagcgaccgcgagcagagctgggaatcctggacggcggcgattgccgaacggcgcggcattccgatgaaacggctgggaaaaccgcaggagccggcgagtgcgctgctgtttttggcgtcgccgatggcgtcgtttaccaccggcgcggcgctggacgtctccggcggcttcaaccgccatctgtag

SEQ ID NO: 443727 - DNA, 819 bp, Serratia marcescens
atgaacgcgctgccggaacgtcaacaggcgcagtgcggcgactaccggctgagctggcgcgaggcaggtcagggacggccggtgctgttgctgcacggcatcagctccggctccgcctcatggctgaagcagtttgccgatgcggccctgctggacggccaccggctgatcgcctgggacgcgccgggttacggcgacagcgccgcgctggcgaacgccgagccgcaggccgccgattatgccaacgcattagcggcgctggtcagccacctggccctgcgccagccgctgctggtggggcattcgctgggcgcgctgatgggcagcgcctatggcgccgcctatcccgatggcctctgcggcctggcgctggccgacccggcgcagggctatgcgtcggccgatgcagagaaacgccggcaggtgttcgcgcagcgccggcagatgatggacacgctggggccgcagggttacggcgaacagcgcgccgcggcgctgctgcgtgccgatgccgatccgcaggatatcgcctgggtgcgccgcggtatgcagcagctgcagccggacggtttcctcagcgccgcctggatgctggccaacgacgatatcaacacctatctggcgcgctatagcggcccgctgcaggtgtggtgcggcgagcaggacaccattacgccgccggcggcggcagaggcgctggcggcgcggcaggatgtgccgctgcgtctgatcgccgccgccgggcacgccagctatctggacgcgccggcgtgctttaaccgctacgtgcgggactttacgggagcgattcaaccatga

SEQ ID NO: 443728 - DNA, 1257 bp, Serratia marcescens
atgactctgcaacagattgacgcccgcgacggccgggtgggggaggccgttgtcgaaaatcagccgcaacaggtgcgctggtcggtgcctattgcgctgtttgcctgcgtactgctggcgtttttcgacaagataagcattgcggcgctgttctccgacgccgacttccagcaggcgctgggcatcagcttcgatccgacgcgtctcgggctgctgatgagcgcctttctgttttcttacggcttctcctcgatgctgctgagcggcatcggcgaccggctgaacccggtgcgggtgctgatcggcatgatggtggtctgggcgctgctgatggtgatgatgggctttacccgctcctatcacaccatgatgacgctgcgcattctgctcggcattgcggaagggccgctattgccgatggcctacgccattatccgccaggcgttcccgcagcgcctgcaggcgcgggccaccatgctgtggctgctgggcacgccgctcggcgcggcgctgggctttccggttacgctgtttatcctcaacacctttcactggcaggcgactttcttctttatggcgttgctgacgctgccggtgatgctgctggtgctgttcggcctgcgccatctgaaggtgcagcgggtggcgcagaaccaacagagcacgccggccgagcgtaagcagcatcggcacgagctgctgcgcagcccgcatttctggatgatctgcctgtttaatatcgcgtttctgacctacctgtggggcatgaacggctggctgccgagctatctgattaagggtaaagacatccatctggaacatgccggctacctctcctcgctgccgtttatcgccatgctgctgggagaggtgctgggcgcctggctgtcggacaaactcgaccgccgcgcgctggcctgtttcctgtcgctggcgggcgccggcgtggggctggcggcggtgctgcagctgtcgggcacctacagcgtgattgccgccatggcgctcagcacctttatgtggggcgccggggcgcccaacatcttcgccctgctggcgaaggccaccagcagcaaggtcagcgccaccgccggcgggattttcaacgggatggggaattttgccggcgcgctggcgccggtgctgatgggggcgctgatcgccgccagcggcaatatggatagcggtctgctgtttttggtggtgaccgcctttgtcggctgcatcattttgctgccgctgctgaagaagtattga

SEQ ID NO: 443729 - DNA, 1215 bp, Serratia marcescens
atgagtcagccgatttccgcaggcatcgtcatcgtcggcggcggtcaggccggcggctgggcggcgaaaacgctgcgcgaccgcggctatagcggcacgctgtcggtggtgagcgatgaaccctacgacttttatgagcgtccgccgctgtccaaggcggcgctgctggacgacgaagcgccgctcagccgcctgttcagcgccgagacggtggcggcgctgaatattgactggtatcgcccgctgcgcgccgaaggcattaatgccgacgaccagacgctgcagctcagcgacggacggcagctgcattttacacagctgctgctggcgaccggcggtcggccgcgcctgccggacgcccgctgggccgattgcccgcaggtgatgaccctgcgctcctgggacgacgccgcgcgcctgcggcaagggctgctgcacagtcgccgtctggcgatcgtcggcggcggctggatcgggctggaaattgccgcctcggcgcgcaaactcggcgtcgaggtgacggtgtttgagcgtcagcccgcgctgtgcatgcgcagcgtcggcgctgacgtctcgcaggcgctgctggcgctgcatcagcagcagggcgtgacgctgcactgcgactgtggcgatattcagctcgaacagcgcggcggcgaggcgtggatcgccagcgcggtcagtgaggcgcagccgttcgatctggtggtggtcggcatcggcgtggaactgaacctggcgctggcgcacggcgccgggctgcaggtggacggcggcggcatcgtggttgacggccagggacgcaccagccatccggcgattttcgccgccggcgatgtggcgcgtcatccgacgctggggctgtgcctgcaatcctgggcctacgcgcagaatcaggccatcagcaccgccggcgcgatgcttgacgccgatgccccggcctacgacgacgtcgcctggctatggtcggatcaatatgacgtcaatatccagatccttggcgtgccgatgggcggcgtacatcaggtgacgcggcgcacgccgcagtcgcaggtgttttttaccctgaatgccgaccggcagctggtgcagatggtggcgtttaacgacgcgcgcgccatcaaactgggcaagcgctggctggccagcggacgggtactggatccggcgcagctggcggatgcggaattttctctgatggcgttgaagtaa

SEQ ID NO: 443730 - DNA, 930 bp, Serratia marcescens
atgagcgtaattggcatcgaacagctggaatttggcgtagaagatctgccaaagtgcgagaaattcatgcgggacttcggcctgcaggcgacggcgggccagccgtcggcatttaccaccctgagcggcgctggcgtgcagctgcgtccgctggacgacgacgacctgccgccggctttcgaaagcggttcaacgctgcgccgcatgacctggggcgtcgccggcccggcggagctggcggcgttggaagcacggctggcgcaggcaccgggttttcaacgccagggcgagatgctggagtgccgcgatcccaacggcatgacgctgcgttttgtcgtcagtcgtcagcgcgaggtgtcgctgccggtgacgccgattaatcagtggggcgacgtgcgtcgtatcgaccagcccagcccggtctatgagcaggcgcagccgattaatatcggccacgtggtgttctttgtcgacgatctggcggccaccgagcgcttttaccgcgaggcgctgggttttcaggtgtccgatcgctatatcgaccgcgcggtcttcctgcgcactcaggcgcgcggcggccaccacaacctgtttctgctgaaactgccgaaccgtgcgcgagggctgaaccacgtggcgtttaccgtacgcgatattcatgaagtgatcggcggcggtctggcgatgaataaagagcagtggagcacctttatcggccccggacgtcacccgatctcttcggcctacttctggtacgtcaacagcccgaccggcggcgcgtttgaatactacaccaacgacgatttcctgacggagaactggcagccgcgcgagctggagcattcgctggtgtcgttcaccgaatgggcggtggagggcggcatcgatcacgatacccgccgccaacataaaccggcggaggcgctatga

SEQ ID NO: 443731 - DNA, 309 bp, Serratia marcescens
atgcaacacattaccgatttcaacccgtggctgccggacacccagcaggtgatcccggcgcgcgagggcggcaacggccagatccatcagccgggcagctaccagaatgtgatctggcagacgcgcgcccgcgtaccggacggttttgaaacggcgttggtcgccgcgctggaagagatcttcgagggcggggcgagcgagctggatcagatcgtcagcgcgctgaatcagcgtcgtctgttcgatcgcaacggtcagccgtggaatgaagcggcgttccgcgaattccttcacgttaacggtttctga

SEQ ID NO: 443732 - DNA, 318 bp, Serratia marcescens
atgagctggaagaacgtgtgcgaagtgtctcaggtaaaagaagatttcccttactcggcgacggtagacggcaaagaggtcggggtgtatctgatcgacgggcaatactacgcgctggaagatgtttgcccgcacgcctacgccttgctcagccaggggtttgttgacgacggcaaagtggagtgcccgctgcacgaagcgctgtttgacgtacgcaccggccagtgcctgcgtgaaccgggcggccgcgacctgcaaacctttcccacccgcgtgatcgacaatcagatccagatcaccgtcatcgaggaggagtaa

SEQ ID NO: 443733 - DNA, 1239 bp, Serratia marcescens
gtgaatgctcgtcagcgctggtacggcgtgttcgccctgctgttcctgatcgtcatcgcctatgtcgatcgggtaaatatcgccgtgatggtggtcaatccggattttctgcatcacttcggcctgggggataaccgggtgcatcagggcacgctgatgaccgcctttctgctcggttacggcctggcggcgctgctgctgacgccgtttctggaaacgctgatgggctaccgccgtgcgctgacgctcagcgtgctgctgtgggcgctgctgaccgccgcctcgccgctggcgggcagcgtcctgtggctgctgctggtgcgcgccctgctgggcatcagcgaagggccgctgttttcgctgaaaaccatgtatatcagcgaccacttcgcgcccgatgagttaggcaaacccaacgccgtcagcgcgctcggcgtgtcgctcgggctggcgctcggctttccgctggtcggctttctgatggcccatttcggctgggcgatgtcgttttacctactggcggcgtttaatctgctggccggactggggctgatccgcgcgtttatccgcccagcgcaaagcgcgccgccgccgcgtgccgccacgccggtgctggcacgcgtctggcgcacctttagcgacgcctggcatacgccgatgctcggctggattatgctggtggagatcgccaccctcagctatctgtggggctccagcgcctggctgccggcctacctgatcgacgaaaaaggcttttcgattaaacagatgggggcgatggcgtcgctgccgtttatcgtcagcatcggcgcgaaatatctcggcggcgcgctgctcgaccggatgcagcggcaccaggcgccgctgatttttgccatcggcggcggcgccaccgcgctgtgcgtggccggactgatgaacagcgctcagaccggctggatcgcctttttcctgctggcggccaacgcctgctggggcctgcagggcgcggcgatcccgacgctgctgcagcactacgccaagccgcaggcggtcggcagcgcctacggcattatcaacggcatcggcaatctgttttccgcctttattccgctgatcatggggctggttatggccgctcagggcacggtgtcatccggctttgcggtgctgatcgcctcgcagctggtcacgctgctggcgggcggcgtgctgtttggcaaaatgcgcccggcccggccgctggcacagcgcccgtaa

SEQ ID NO: 443734 - DNA, 846 bp, Serratia marcescens
atgctggccaaaccatctgtacggctgaacaaatatattagcgaaagcgggatctgctcgcgtcgcgatgccgatcgttatatcgaacaaggcaatgtttttattaatggcaagcgcgtggcgctgggcgatcgggtatttccgggagatgtggtcaaggttaacggccagctcatcgagccgcgtagtgaagacaacctggtcttcattgcgctgaacaaaccggtaggcattgtcagcaccacggaaagcggcgaaaaagacaacattgtcgatttcgtgaatcatagtacgcgtattttcccgatcgggcggttagataaagactcgcaggggctgatcttcctgactaaccacggcgatctggtgaacaagatcctgcgggccggtaacgatcacgaaaaagagtatctggtgacggtcaataaaccggtcaccgatgaatttatccgcggtttagcggcgggcgtaccgatgctgggcacggtgaccaaaaaatgcaaggtgaagaaagtctccgcctcggtgtttcgcatcgtgctggtgcaggggcttaaccgccagatccgccgcatgtgtgaacattttggctatgaggtcaccaagctggagcggacccgcattatgaatgtcgggctggccggcttaccgctgggagactggcgggaattaacggatgacgaactgatcgcgttgtttaaactgattgaggattcctcgtcggaagcaaaaccggcgacccgaaaaccggtggtcaacaaggccaaaaaagccagtaaacccgccgcgcttcccgccgggcgcaagcggttcacccagccaggccgtaaaaagaaagggcgttag

SEQ ID NO: 443735 - DNA, 453 bp, Serratia marcescens
atgacgatattgatgattttactggcggtggttggcggtgcaatgctgagcattcaggcggcgatcaacggccaactgggcagcaaagtgggcgtgttccgcagcgcctttctgaccttttccgtcggcgcgctggtgaccgcgctgctgattttcttctttgaacccaaacaggcggtcagcctgctggatgtgccgaaatggcagctggtgggggcgctgttcggcgtgccttacattgtcattatggtgctggcggtgcagcgtatcggcacggcggtggcgacggtggcggtgattttcggccagttgacgatgagcatgctgatcgacaactttggctggctgggcaacgccgccatcggcttctccgccagccggctgggcgcgattgtctgtctggcgattgcgctgggctttatctactccagcagccggacatcggcgaagtag

SEQ ID NO: 443736 - DNA, 933 bp, Serratia marcescens
atgctggataccgacgcgattaatgtcagcgcgttaaagatttttattgatgtctttgacgcacagaacttctccgttgtcgcgcgacagcgcggcatttcagcctccaaggtctcgcgcattattcaccagttggaagatgcgctggggcagcagctgttttaccgcaatacgcgcgcagtgataccgaccgagtccgggcggctgtttatcgactatgcgcgcagcatggccgaacagctggacgaggcgcgcaaggaactgcaggagcgggcgctggagccgtccgggctggtgcgcatcaatacgccggtgttcttcggccagcgccacgtggcgcccgccctgcccgcgctggccgcccgctacccccgcctgctgatcgatctggtgcagaccgatgactttatcgatccgcatcgcgatgccgcagacgttatcttccgcatcggcacgctgacggactcctccttccacgcccgggtgtttggcgagctgcgctactacctcgccgcctcgccggcctatctgcgccgttacggcgcgccgcaaagcccggcggatctcagccgccaccgctgtctggtgtaccgcggctcgtccgggccgaaccgctggctgtttcgcgcccccggcgacgcctgggtgcactatccgctctccccgctgttaacgtccaataatgcggaaacgctgctggtcgccgcgctgggcggcatggggctggtgctgtttcccgactggctgatgggcgagcgtctgcaaaacggcgagctggtcaggctgctgccggagtttgagacggcgataaagaccgagccgcagcagatcgccgccatctatccgcacgcccgccgcccgccgctgaacgtcagggcggtgatcgatcactatgtggaggcgtttggcgagccgctttactggcagttttga

SEQ ID NO: 443737 - DNA, 303 bp, Serratia marcescens
atggcatctcaaacacctaaccttggtactctggtccgtgtttttttcggacaagattgcgatttattcggggagtccgtagaggagattcttgagtcttacagggacaccgaaaatgttatgactgtgcaaaaaacagtgaatgaagcccaaatgtttctgggtttatacccggatgatacgcaacttgagtttgcctttataaacctagctgaaggggaattttctccaacagcatggggatactccacccggaggttcctcgaaaaagtcattcatactttgagtaaaggtcatgggtaa

SEQ ID NO: 443738 - DNA, 897 bp, Serratia marcescens
atgcatgatatgtcttttgatcccttccgccgccgcctgctggcggcgctggcgctgtcgccgctgctgacctcgctgccgggccgcgctgccgcgccgcctgatctggggcgcattgtggcgctggaatggctgccggccgaactgctgctggcgctgggcgtaacgccgcaggcggtggccgatattcataactacaacctgtgggtgcgtgagccggccctgccggcgacggtggttgacgccggccagcgcaccgaacccaatctggagctgctgcaacagctgcagccgtcgctggtgctgctgtcgcagggctatggcccgtcgccgcagctgttggcgccgattgcgccgaccatggaattcgcctttaacgacggcagcggcaaaccgctgaccgtcgccaaaaactcactgcgtcagctggcgcagcggctggggctggaaagccgcgccgagcggcatctgcagcactttgacgccttcatcagcgacgcgcgccggcggctgcaggattacacccgccagccgctgctgctgttctcgctgatcgataaccgccacgcgctggtgatcggccatcagagcctgttccaggaggtaatggaccagctcggcatcgccaacgcctgggcaggggagaccaacttctggggctcggcgatcgtcggtattgaacgtctggcggcggtgaaaaatgcgcgggcaatctatttcgatcacggcaatcagcggatgctggcgcaggtgagcgcgacgccgctgtggcagtcgctgccgtttgtgcgtcagcagcagctgcgtcgggtgccggcggtctggctgtacggcgccacgctgtctgcgatgcgcttttgccggctgctggaacaggcacaggaggcgcgcgcatga

SEQ ID NO: 443739 - DNA, 798 bp, Serratia marcescens
atgcaggataaacatcttctccaagaggcgacgttcacgctggataacgtgagcttcgccgtccccggccgcatactgctgcaaccgctgtcattgacctttccgcacggcaaggtctgcgggctgatcggccataacggctctggtaaatccacgctattgaaaattctcggccgtcaccaggcggcgaccggcgggcaggccttgctgaacgatacgccgctggcgcagtgggacagcaaggcgttcgcccgcgaagtggcctatctgccgcagcaactgccggccgccgaaggcatgacggtgcgcgaactggtggccatcggccgttacccgtggcacggcgcgctgggacgcttttccgccgccgatcgtcagcacgttgaagaggcgatcgcgctggtgggcttaaaaccgctggccggcaggctggtggacagcctgtccggcggcgaacgtcagcgcgcctggctggcgatgctggtggcgcaggacagccgctgcctgctgctggacgagccgacctcggcgctggatatcgcccatcaggtggaagtgctggcgttgattcagcgtctgagccgcgagcgcggcctgacggtgatcgcggtgctgcacgatatcaatatggccgcccgctactgtgaccatctggtggcgctgcgcggcggagaaatgatcgctcagggcgcgccgctggaactgatgcaggggccggtgctggagcagatctacggcattccgatgggcacgctgccgcatccgagcggcggttcaccggtgagctttgtctactga

SEQ ID NO: 443740 - DNA, 2199 bp, Serratia marcescens
atggctaccaagcgtccatcaccatcaccaacggcgttcaaccgtttccccgtgcgcggcagcgcgatagccatcgccgccgccctgagcgccctcagcctgtcggtgcaggccgccgagaataaagcggccggagcaaaagaagataccctgaccgtggtcggcagcagtaaccggcagcaggaaagcgcctggggcccggtcggcacctatgccgccaagcacagcgccaccggcaccaaaaccgataccccgctggtgaaaacgccgcagtcggtctcggtggtaacgcgcgaagagatggagatgcgtcagtcggagacggtgaaaagcgcgctgggttacacgccgggcgtgatggtcggcaaccgcggcgcgtccaccgcctatgactcggtcaatatccgcggcttcagctcggtcggcaccaatctctatctggacggcctgaaactgcaggacgacaactactcgatctatcaggttgatccctatttcctggagcgcgccgaagtgctgcgcgggccggtttccgtcctgtacggtaaaagtaacccgggcggtctggtgtcgctggtcagcaaacggccgaccggcgaagagctgcgtgaagtgcagttcaagatgggcaccgataacctgttccagaccggctttgacttcggcggcacgctggacgacgacggcgtttactcctaccgcctgaccgggctggcgcgcagcgaagaccagcagcaggtgggggaacaatccaagcgttatgccatcgcgccttccttcagctggcggccggacgatcgcaccacctttaccctgctgagcagtttccaggacgatcctgacgtcggctactacggctggctgccgaaagagggcacggtggaaaacggcgtcaacggcaagctgccgaccagctttaacgacggcgagccgggctacaacaacatctcgcgcaagcagcagatgatcggctacagcttcgagcatgcctttaacgacacatggagcgtgcggcagaacctgcgctactccaagatggacgtcgactaccgctccatctacggcctcggtatcagcccgaccaacccgagcgagctgacgcgcggcgtgatgaactccaaagagcatctgtccagctttgcggttgatagccaggcgcaggccaaattcgccaccggcgatgtggatcacaccctgctgatgggcgtcgactatatgcgtatgcgcaacgatatcgtgtatgaatacggcacggcgtccaacctcaacgtggtggcgccgaactacggcaacgacagctacaccatcaacggcagcgccaaccaggtgaaccgtcaggaacagaccggcctctacctgcaggatcaggcggaatggaacaactgggtgctgacgctgggcggccgctacgactggagccagacctccaccaccaaccgcgcggcgcagaatacgcgcagcgagcagaacgacagtgagtttaccggccgcgccgggctgaactatgtgttcgacaacggcattgcgccgtacttcagctacagcgagtcgtttgaaccgactgccggcaccgacgccttcggcaaaccgttctcgccgtcgaagggcaaacagtatgaagccggggtgaaatatgcgccggagaaccggccgatcaccgccagcgtggcgctgtaccagctgaccaagaccaacaacaaggtggcctacccggacaacccggtgttcagcatccagggtggtgaaatccgttcccgcggcgtagaagtcgaagccaaggcggcgctgtcggccaacgtcaacgtgttgggctcgtacacctataccgacgccgagtacaccaaagacaccaccaatcagggccatacgccggcggcgattccgaaacatatggcgtcgctgtgggcggattacaccttccatgaaaccgcgctgagcggtctgacgctcggctccggcgtgcgctatgtcggctccagctacggcgacgaagcgaacacctttaaagtgaaagactacacggtggtcgatgcggcggtgaaatacgatctggcacgattcaacctgccgggttcatccgttggcattaatatcaacaacctgtttgataaagagtacgtctccagctgcttcaatacctacggttgctactggggcgcggaacgtcaggtggttgcgaccgcaactttccgtttctaa

SEQ ID NO: 443741 - DNA, 2439 bp, Serratia marcescens
gtgtctttattgcccgtcagccaggtgttggatgaattgcttgccgcgctgcgcagcgcgccgcaggtgttgctgcatgcgccgaccggcgccggtaaatccacctggctgccgctgcagatcctgcggcaggctggcctgccggggcgaatcatcatgctggagccgcggcgtctggcggcgaaaaacgtcgcttatcgtctggcgcagcagctgggtgaggagccgggccagacggtgggttaccgcatgcgcgcagaaagtaaaagcgggccgcagacgcgtctggaggtggtcaccgaaggcattctgacccgcatgctgcagcaggacgcggagctgcagggcgtctcgctggtgattctggatgagtttcatgaacgcagcctgcaggccgatttggcgctggcgctgctgctggacgtgcagcaggggctgcgcgacgatctgaagctgctgattatgtcggcgacgctggataacgcccgtctgtcgcagctgctgccggacgcgccggtggtggtgtcgcaggggcgcagtttcccggtggcgcgccactatcagccgctggccagtcatcagcggctggaggacggcgtcgcctcggcggtgaaacgcctgctggcggagcagtctggctcgctgctgctgtttttgccgggcgtggcggaaattcagcgggtgatggagcgtctgcagggtgaagtcgccggcgatgtcgacctgtgcccgctgtacggcgcgttgccgctggcgcagcagcagcgggcgattcagccggccgtcgccgggcggcgtaaggtggtgctggcgaccaatattgccgaaaccagcctgacgattgaggggatccggctggtggtggacagcggtctggaacgcacggcgcgctacgatgtgcgtaacggcctgacgcgcctgatgacgcagcgcatcagtcaggcatcgatggtgcagcgcgcagggcgcgccggtcgtctggaggagggggtctgctggcatctgtgtgccaaagagcaggccgagcgcgccgccgagtacgccgagccggaaatcatgcacagcgatctcggcgctttctggctggagctgctgcagtggggctgcgttgacgccggccagctgaactggctggatctgccgccgactgcggcgctggcggcggctcagcggctgttgcagacgctgggcgctaccgatgaacagggcaggctgacggcagacggacgccggatggcgacgctcggctgtgaaccccggctggcggcgatgctgtgcgccggcgcggcgctgggggaggacggcctggcgaccgccgcgctgctggccgccctgctggaagagccgccgcgcagcggacagctggatatggattactggctcagccgaccgcagccgaactggcagcggcgcgcctgccaactgacgcagcgcctgaaggggcgcggcggccatgtggacgccacgctggcgccgcagctgctggcgcacgcctttgccgaccgcattgcccagcggcgtgggcaggacggccgctacctgctggcaaacggcatgggggcggcgatgaaccaggacgaggcgctgtcgcgcgtgccgtggctgatcgcgccggcgctgctgcagggggcgaacagcccggacgcgcgtattttgctggcgctgccggtggacgttgaacggctggcggcgcagcggccggagattgcccaccagcgcaccgcggtggagtgggatgaggaaaaaggcacattgcgtgcctggcagcgtctgcagattggccgtttgacgctgcgcgcccggccgttggcgaaaccggcggatgaggagctgcagcaggcgctggtcgactgggtgcgtggccagggcttatcggtgctgaactgggagggcgccgccggccagctgcgcgcgcgtctgcagtgcgcccgggagtggttgccggaggccaactggccggcggtggacgacgaggcgctgttggcggggctggagcagtggctgctgccggcgctcggcggggtgcgcgatctgcgtggtttgcggcaggtcaatctcgccgaggcgctgggcaacctgctggagtggcaacaaaaacagcggctggataatgcgctgcccactcattacactgtgccgaccggcagccgcctgccgatccgctatgaggccggcaagccgccgctgctgccggtgcgtttacaggagatgttcggcgagcggcacagcccgatgctggcggagggtcgcatcgcggtggtgcttgagttactctctccggcgcaccggccgctgcagattactgccgatctggcggcgttctggcagggcgcctaccgggaagtacaaaaagagatgaaagggcgctacccgaagcacgtctggcccgatgacccagccaatgcgctgccgacgcggcgcaccaagaagtatcagtag

SEQ ID NO: 443742 - DNA, 528 bp, Serratia marcescens
atgtccagttcgcgccgtctgttttttgccctgcccttgccggacagcctgcagcagcaggtcatccgctggcgcgccgacgcctttgcgccgcaggacggccgaccggttgccgccgctaatctgcacctgacgctggcgtttctcggtgaggtcagcagccagaaagaggcggcgctaaaaaggctggcgggacgcatcagccagcccggcttcagcctacagcttgacgatcttggccactggccgcgccccggcgtggtctggctcggctgcaaacgcgcgccgcgcgggctgctgcagctggcggagatgctgcgctcgcaggcggcgcgcagcggctgttatcagagcccgctgccgtttcacccgcatatcaccctgctgcgcgccgccgtgcgcccggtggcgctgccgccggccacgccgggctggagcctgccggtcacgcatttttccttataccagtcgtcgtttgacaacggccgcacccgttaccacccgctggaacagtgggcgctcagttag

SEQ ID NO: 443743 - DNA, 912 bp, Serratia marcescens
atgccagaaagtcattatgtggggcgttttgccccctctccttccggggatctgcacttcggttcgctgatcgccgccctgggaagttttctgcaggcccgcgcccgccacgggcagtggctgcttcgcattgaagatatcgatccgccgcgcgaagtcgccggcgccgccgaccgtattctgaccacgctcgaccactatggcctccactgggacggccaggttctctatcaatcccaacgtcacgatgcctaccgcgccgcgctggactggctgcaacgccaggggctcagctattactgcacctgcacccgcagccgtattcagcaggcgggcggcctgtacgacggccactgccgcgcgctgcggctcggcccgcagaacgccgccatccgcctgcggcagagcgcgccggtctacggcttccacgacggcctgcagggcgagctgcacgccgacccggcgctggcgcaggaagattttatcatccgccggcgcgacggcctgttcgcctataacctggcggtggtggtcgacgaccattttcagggcgtgacggaaatcgtgcgcggcgccgacctgattgaaccgacggtgcgccagatagcgctgtaccgtcaactgcaggcgccggtgccggattatatccacctgccgctggcgctggggaatcagggaatgaagctgtcgaagcaaaatcacgcgccgccgctgccagacggcgatccgcgaccggtgctgatcgccgcgctgcattttttgcagcaaccgctgccggaaagctggcaagatcttgatctgccattattattgagctgggcaatagaaaactggacgctggcaaaggtgccgcgtcagaccgctctcgccctgccgcaaaacataacggcattctcaaagacgccatggtga

SEQ ID NO: 443744 - DNA, 489 bp, Serratia marcescens
atgatccgcgtttatatcgcgctgggcagcaacctggcgcagccgctgcaacaggttcacgccgcgctggaggcgctggagcatctcccgcgcagccggctgatcgcctgttcatcgttctaccgcaccaaaccgctggggccgcagaaccagccggactttctcaacgccgtggcggcgctggatacgctgctgcccgccgaacagctgctcgatcacacgcaggagattgagcgcaaccaggggcgggtgcgcaaggatgagcgctgggggccgcgtacgctcgacctcgatatgctgctgtacggcgacagcgtgattgacagcgagcgcctgacggtgccgcattatggcctgaaagagcgcgagtttatgctctacccgctggcggaaatcgcccccgacctgattctgccggacggcgaaccgctggccgcctgcctgcagcgtgtgccgatgaacggcatgacgctgtggcactcggcctga

SEQ ID NO: 443745 - DNA, 1350 bp, Serratia marcescens
gtgaaacgtctgagcctgcggctgcgtctgattatcctgttcagcctgctggcgctgctgacctggtgcgtcgccagcgcggtggcgtggaacatcacgcgcgataacctgaatgaagtgttcgacacccagcagatgctgttcgccaaacggctggcgacggccaacctcggcgatatcccgcgtaccaccagcctgccgaaaaccaaaaagctggtgcgccacggcaagcgcggccagcaggatgacgatgcgctggcgttcgcgattttcgaccgtcaggggcgcatgctgctgaacgacggtgagaacggcaaggacatcgaatttgacggccggacggcagggttcgtcgatggccggctgaaaggtgatgacgaccgctggcggctggtctggctgaccagcccggacggccgccaacgcatcgccgtcggccaggagatggagtatcggcaggatatggcctgggcgctggtgaccgggcaactgacgccgtggctggcgacgctgccgctgctgatgctgctgatcgccattgtggtcgggcgcgagctgcgtccgctgcgcagcgtggcgcaggaactgcaccgccgtgcgccggatgatgacgcgccgctcagggcgcaccgggtgccgagcgaagtacgcccgctggtggacgcgcttaacgcgctgttcgcccgcatcagcgcgatgctgcagcgcgagcggcgctttacctcagacgcggcgcatgagctgcgcagcccgctggcggcgctgcgggtgcagaccgaggtggtgcaactggccggcgataacgccgaggtgcgcgcgcacgcgctggagaacctgaccatcagcatcgatcgcgccacgcggctggtggaccagctgctgacgctgtcgcggctggatgcgctgccggatctgcatcagcaggagcgggttgactggcatcagctggtgacggcgacgctggccgaacaggagcacgacgctcatcgcgcggggattacgctgcgttatgaggcgcagggagcgccggcgccgcggccggggcagtcgctgctgctgtcgctgctggtgcgtaacctggtggataatgcgctgcgctatacgccatccggcggcacggtgaccgtgacgttagaacagcgcgttctgacggtggaggataacgggccgggggtgacggatgaacatctggcgcggctgggggaacgtttctatcgtccgccggggcaggaacagaccggcagcgggctggggctgtcgattgtacagcggattgcggcgctgcatggtttgcgggtcagctttgccaaccggcaagacgggggctttaaggtgcgggtgatgctgtag

SEQ ID NO: 443746 - DNA, 663 bp, Serratia marcescens
atgagaattctgctgattgaagacgacaagattatcggcgacggcatcaaggtcgggctgagccagctgggtttcaccctcgactggtttaccgacggcaagctcggcagacaggcgctgggcagcgcgccctatgatgcggtgatcctcgatctcagcctgccgggcatcgacggcctcgatctgctgcgcgaatggcgtcaggccggcgaggacgtgccggtgctgatcctgaccgcgcgcgatgcgctgtcgcagcgggtggacggtctgcagagcggcgccgatgactacctgtgcaagccgtttgcgctggcggaggtggcggcgcgcctgcaggcgctgattcgccggcgtcacggccagctgagcgcgcagctgacgcacggccggctggtgttcgacaccgccgcgcgcagcgtcacgctggacggcgaggtggtgacgttgacgccgcgcgaactggcggtgctggagctgttcttgcacaacaaggggcgggtgctggcgcggccgctgattcaggaaaagctgtacagctgggacgatgaggtgagcagcaacgcggttgaggtgcatattcaccacctgcgccgcaagctgggcaacggctttatccgcacggtgcacggcgtgggctacacgctgggggatgccgggtga

SEQ ID NO: 443747 - DNA, 855 bp, Serratia marcescens
atgttaattattcaaaccctgccgctgctgcgccagcatattcgccgctatcgtcaggaaggaaaacgcatcgcgctggtgccgaccatgggcaatctgcacgacggtcatatgacgctgatcgacgaggcccgcgcccgcggcgatatcgtggtggtcagcatcttcgtcaatccgatgcagttcgaccggccggaagatctgaccaactacccgcgcaccctgcaggaagactgcgagaaactgacccgcaacaatgtcgatctggtgtttgcgccggcaccggcggaggtctatccgcaagggttgggcgagcagaccttcgtcgaagtccccggcatttccgcaatgctggagggcgccagccgtcccggccatttccgcggcgtgtcgaccatcgtcagcaaactgttcaacctggtgcagccggatctggcctgcttcggcgagaaagactaccagcagctggcgctgattcgcaaaatggtggccgacatgggttacgacattgagatcgtcggcgtgccgaccgtgcgcgccaaagacggcctggcgctcagctcgcgcaacggttatctgactgcggacgaacgcaagaaggcgccgcagctcagccgcatcatgcaggcgctggccgaacggctgagcaacggtgagcggcagattgatgaactgctggcgcagaccgccgagcagttgcgcaacgccggcttcaccccggacgagctgtttatccgcgacgccgacagcctgcagccgctcggcaccgacagccggcgcgcggtggtgctgatggccgcctggctgggcaaggcccggctgattgataatcagcaggtcgacctgaccgagtaa

SEQ ID NO: 443748 - DNA, 666 bp, Serratia marcescens
atgaaagagatcgaaaggctaattgccaacaaccaagcgtggtcctccaacatcaaccaggaagaccccgaattctttgaacgtctggcgcaggcgcaaaaaccgcgttttctgtggattggctgttccgacagccgcgtgcctgccgaacgtctgaccggaatggagccgggagaactgttcgtgcaccgcaatgtggccaacctggtgatacacaccgatctgaactgtctgtctgtggtgcagtacgccgttgacgtcctgcaggtcgaacatatcatcatctgcggccacctgggctgcggcggcgtgcaggcggcggtcgaaaacccggagctggggctgatcaacaactggctgctgcatatccgcgatctgtggtacaagcatagcccgcaactggaaaaactcgaaaaggaagagtgtctcaacgccctgtgcgaaatcaacgtgatcgagcaggtgcataacctgggccactccaccatcatgcagtccgcctggcagcgcggccagaaagtgatgattcacggctgggtatatggcattcaggacgggcgtctgcgcgatctggacgttacggcgaccagccgcgaaagcctggagctgggctataacaaaggcatttcgacgctgttgcagagtaaaggcttacagcagccgtaa

SEQ ID NO: 443749 - DNA, 1626 bp, Serratia marcescens
atgttacgtcgtgattttattaagtttaccgctgcgctgggcgcggccagcgcattaccgctctggagccgggccgcctgggcggccgatctgcccgcgctgccgataccgccgctgctgatgccggatgcgcaaggaaagctggcgctggcgctgcagaccggcgagatgaactggctgccgcaggcggcgaccaaaacctggggcgtcaacggcgctctgctggggccggcggtgcgtttgcagcgcggcaagccagtgacggtcgatatcaacaaccaactgccggaagccagcaccgtacactggcacgggctggaaattcccggcgacgtcgacggcggcccacaggcgctgatcgcgccgggcactacccgcaccgtacatttcaccattgaccagccggcggccacctgctggttccacccgcatacgcacggcaaaaccggccatcaggtgatgatggggctgggggggctggtgctgctggaagatgaagagagcggcaagctgccgctgccgaaaacctggggtaaggacgatatcccggtgattttgcaggataaacgcctgggcaaagatgcgcagattgagtatcagctcgatatcatgagcgcggcggtgggctggtttggcgaccgcatgtttaccaacggcgcgcagtatccgcagcacatcgcgccgcgcggctggctgcgcctgcgttttcttaacgggtgtaacgcgcgctcactgcagctggcgaccagcgatcggcgcccgctgtatgtgatcgccagcgacggcggcttcctcggtgagccggtgaagctgacggaactgccgatgctgatgggcgaacggtttgaggtgctggttgacgccagcgacggtaaaccgtttgatatcgtcacgctgccggtacagcagatgggcatgacgctggcgccgttcgatcggccgctgccggtgctgcacattcagccatcgctggcgcaggggattaaatccatgccggacagcctggtgaaactgccggcgctgcctgccgccgccggcgtacagcagcgtgagttccgtctgatgatggatccaaagctggatatgctggggatgaaagcgctgatggaccgctacggccatcaggcgatggccggcatgagcatggatcacggcagcatgggccacggcgcaccggagagcggcgacaagatggccggtatggatcacggcaagatggatcatggcaagatggaccacagcaagatggcggggatgaagcacggcgagcagtcgtatgatttcagccacggtaataccatcaacggcaaggcgtttgatatgagcaagccgatgttcgccgccaagcgcgggcagtatgagaagtgggtcatctccggtgaaggcgacatgatgctgcatcctttccacattcacggcacccagttccgtattttgagtgaaaacggcaagccgccggcggcgcatcgcgctggctggaaggacacggttcgggtggaaggcgcgcgcagtgaagtgctggtgcagttcaatcatgaagccagcgcagagcacgcctatatggcgcactgccacctgttggagcatgaagataccggcatgatgatgggctttaccgtcgcctga

SEQ ID NO: 443750 - DNA, 471 bp, Serratia marcescens
atgaaggtgaaatgtaaggtaaagctttttgctttggttatcgttatattgcttggtttattgatatggatattggttcgcccggtgaaaattattgccgtacataaaaaaggagagtttgcttctgttttagttgaaaactttccgcttagcgatcggggtaaaatgaattggtggctcaaaaaccaaaaaacattcacagcacaatatggaattcctgccccggcaaaagatggctacttttttgtcacattctggaggtttggggatggttacaaagaagaaggtaaatacgatcgactgtgttttgacgatatgacatcgccaaagaactgtattgaaaaggatgcggttttctctgtcagccacagccgtaatctgggcaccgtgtttaccacctatgaagggcgctacaaactgcaagaaaacggtgagattgtggcagaccagagcacgtttgaagcccgatga

SEQ ID NO: 443751 - DNA, 759 bp, Serratia marcescens
atgcgcagcggcgacctgacggctggccagttaaagacgcagtttcgtttaacggacatctctaccaaggtagatccgtacacgctgaggcggctcgccgcttttggcggccggtcgtcaatgttcaggccgccggctgcgggtgggccggtagggcgtcaggaatgcgcccggatactgtttgatgagttccgggaactgtcagcgacctttgcgctatacggcccgtatcggcatttgattggcaagatgatcaaccatatgcaatacggcaacggcacgccgtttcgggatgcgttgttagaccaggcgctgaaggcgcatattattaatgataggacggacaatagttcgttattaaaaataaaaaatgctttagatgaaaatatcgatagggttaacggttattttcccaatgaaaagttttacaggataagggaaattattcttgatgggagactgcccaagttcgatcggtttcaggataattttaacggtatggggataaccgtttatgacacatgggcaacgcatatcaccataaagtcactccacatagagagtagtggctatcgtgcggcagtgaactacaaagtacaagatcacttcggtttggatgcagaggatattttgaaactaaaatttaatcagtttcgtttttttcgcatctggtttgtgctgcagcgctatagccaatttgggtttaagccgtttatgacaaatatggacgcggatatagagttgcggggggcgtggtga

SEQ ID NO: 443752 - DNA, 1371 bp, Serratia marcescens
atggattgggtgatagcggggttgtcggccgttaatggcgtggtatggggtgtcccgatgctgatcggcattctgggcattggtatttttctgcagattaggctctcttttttgccgattcgccggttaggcaccggatttaagctgttgttcgagcgtaatcacgaccgtggcgacgggcagatctcaccgttcaatgcgctgatgaccgcgctgtccgccaccattggcaccggcaatattgccggcgttgccacggcggtggtgctcggcggccccggagcgctgttctggatgtggatcaccgcgctggtgggcatggcgaccaagtattccgaggcggtgttggcggtgcgctttcgtgaagttgacgatcgcgggcactatgtcggcgggccgatgtactacatcaagcacgggttaggcaaaaaatggatgtggctggggacgctgtttgcctttttcggcagtatcgccggcttcggcatcggcaataccgtgcaggccaattcgattgccgaggcgctgaacagtaacttcggcatttcccacgggatgaccgccggcgttctggtggtgctggtgggggcggtgctgatcggcggtattaaacgcatcgccgacgtggcggggaaactggtgccgctgatgacggtgggctatttcgccgccggcatcattgtgctggggctgaacgtgagcgagatccctgcggccttctcgctgattattacctccgcctttacgccggtggcggcgcagggcggcttcgccggcgcggcggtctgggcagcgattcgctttggcgtggcgcgtggggtgttctccaacgaggccggtctgggcagcgcgccgatcgcccacgcggcagcaaaaacgcagaacccgattcgtcaggggctgatcgccatgctgggcacctttatcgacaccatcatcgtctgctccatcaccggcctgaccatcattatcagcggcaaatggatcagcggtgagacgggtgcggcgctgacctcgacggccttctcgtcgtctctgccgggcggtaactacattgtggcggtggcactggcaatttttgcctttaccaccattctgggctggagtttttacggcgagaagtgcattcagtatctgttcgggccgaagatgatcgtaccgttccgcatcgcttggatcatcgcgctgccgattggcgccacccagtcgttggagtttgtctggctgctggctgatacgctgaatgcaatgatggcgatcccgaacctgatcgccctggcgctgttaagcccggtggtgtaccgcctgacgcgcgcgcatattaatgacgtgaatgcgccatcggtgcaggccgacagcactaatccgtag

SEQ ID NO: 443753 - DNA, 759 bp, Serratia marcescens
atgaagccacaacatcgtctggaccagattctggactatttaaagggccataatctggtcacggttgaacaactggttgcggcgatcgacgcatcgccggccaccattcgccgcgacctgatcaaactggatgaacagggcgttatcaaccgcagccatggcggcgtggcgctcaatcgttttattcccgcccagcccaccaccaatgaaaaacagctgcgtcatctgcaggaaaagcgcgccattgcccggcaggcgctggcgctgattaagcctggcgatgcggtggtgctggacgccggcaccaccatgctggagctggcgcgtaatctgacccatctgccgttacgggtgatcaccgccgatctgcgcattgccctgctgctgtcggagttcaaacagatagaggtcaccattatcggcggacgcattgatgacagcagccagtcctgcatcggcgaccatggccgccggctgctgcgcggcgtctatccggacattgcctttatcagctgtaactcctggagcctggagaagggcgttaccacgccgacggaagagaaggccgggctgaagcaggatctggcggccaacgcgcgccggcgcgtgttgctggcggacagcagcaaatacggcgcctattcgctgttttgcgtgacgccgctggccgagctgaccgacattgtgaccgacggcgccctgccggcggagatacagcagcaattaacggcgttgcctgcacagttgcatctggcgtag

SEQ ID NO: 443754 - DNA, 984 bp, Serratia marcescens
gtggcaaataacatcatagcgattaccatgggcgacccggcgggcatcgggccggaaattatcatcaaggcgctggccgagggagagctgtccggcgcccgcgccgtggtggtgggctgcttgcagacgctgcagcgtattcaggcgctgggcattacgccggcggcagaactgcggccgatagcaacggtggcccaggcgcgttttgcgccgggggtgatcaacgtgatcgatgagccgctggcggatcccgcggcgctggaggcgggcaaagtacaggcgcaggcgggggatctggcctaccgctgtgtaaaacgcgctaccgagctggcaatggcgggtgacgtgcaggctatcgccaccgcgccattgaacaaagaagcgctgcatctggcgggacatatgtatccgggccataccgagctgctggcgacgctgacccacagccgtgattacgccatggtgttgtataccgataaactgaaagtgatccacgtttccacccacattgccctgcgtacgttcctggatacgttgagcgccgagcggatcgaaacggtagtgtcgatggcggataccttcctcaagcgggtgggcttcagccagccgcgcatcgccgtcgccggcgttaacccgcacgccggggaaaacggcctgtttggtgatgaagagatcaagattgtcagcccggcgattgcggcggcgaaggcgcggggcattgatgtctacgggccttgcccgccggacacggtcttcctgcaggcctatgaagggcagtacgatatggtggtggcgatgtaccacgatcagggacatattccgctgaagctgctgggtttttatgacggggtgaatattaccgccgggctgccgtttatccgcacctccgccgaccacggtacggcctttgatattgcctggacaggtaaagccaagtctgagagcatggcgatctcgatacaattagccacgcagcttgcctaa

SEQ ID NO: 443755 - DNA, 1269 bp, Serratia marcescens
atgaaaatgattgtgattgccgatgattttaccggcgccaatgataccggcgtgcagctggcgaaaaagggcgcgcgcaccaatgtgctgttgaatgaccggcagcaggcgccgcgcggcggcgatgtactggtgatcaataccgaaagccgtgcgctgccggctgcggaggcggcgcgcaaagtcagcgatgcgctgcgtccgtactgcgacgatgaacggccgccgcgggtgtacaaaaagattgattccaccttccgcggcaacgtcggagcggaaattgccgcatcgatgcaggccagcggcgcacggctggcgattgtcgcggcggcgatcccggctgccggacgggttacgcgggatggggcgtgctgggtgcacggcgtgccgctgctggaaaccgaattcgccagcgatccgaaaacaccgattgcctcgtcacagattagcaccctgattggcctgcaaaccgatattgccatccatgaactggatctggcgacggtgcgcggtgcgcagttggatgagcaactggagctgctggcgcagcagggcggcattgtggtggcggacgccgaactggatggcgatctggcgctgctggcgcagagtatcggccggcttgccacgcccgttctgctggtgggtgccgccggcctggcgaatgcgctgccgtcggactggtatctcagcgatcggcagcggctgccggtgctggtggtggccggttcgatgagtgaggccacccgtcggcagattgccttcgccgagcaggagaagtcgctgggcatcgtcgatatcgatgtgcaggcattgctgtcggcacatggcgcgcaggtgtgcagcgacatcgtcgcgcaggcggtggcgatactgcaggcgcgtcagcactgcgtattgcgtacctgccgtgacgacgatgcgcgtcagcaggtcgagcagctgtgcgccgaattgtgcatcagccgccagcagttgggcgatcgcatcagccagtcgctgggggagatgacgctcgggattatcaaccacgcgcgtatcggcggcctgttcctgaccggcggggatatcgcgattgccgtcgcccgggcgctgggggcggaaggctaccgcattaacggcgaagtggcgccctgcgtaccgtgcggcgcctttatcaacagtgaaattgacgatctgccggtgatcaccaaggccggcggctttggcggcgaaaccacgctgcgcgatgcgctttattttattgaggagatgtacagtggcaaataa

SEQ ID NO: 443756 - DNA, 948 bp, Serratia marcescens
atgaaactgaaagcggcaatagagaagatccccggcgggatgatggttgttccgctggtgcttggcgcgctgttgaacacgtttacaccagaggctttagacattggcggcttcaccaccgcgttattcaaaaatggcgccgcgccgctgatcggcgctttcctgctgtgcatgggggccggcatcagttttaaagcggcaccgcaggcgctgctgcagggcggcaccattacgctgaccaaactgctggtggcgatggcgctggggctgggcgtggaacggctgtttggcgccgacggcgtcttcggcctgaccggcgtggcgattatcgcggcgatgagcaactccaacggcggcttgtatgcggcgctggtcggcgagttcggcaatgagcgcgatgtcggcgctatttccattttatcgctcaacgacggccccttcttcaccatgatcgcgctcggcgccgccggcatggccaacattccgctgatggcgctggtcgcggtgctggtgccgctgttggtgggtatgttgctgggcaacctcgatccgaacatgcgcgagtttctgaccaaaggcggcccggtgctgatcccgttcttcgcctttgcgctcggtgccggcattaatctggaaatgctgctgcagggcgggctggcgggcattctgctgggggcattgaccacctttgtcggcggtttctttaacatccgcgccgatcggctggtcggcggcagcggtatcgccggggcggcggcttccagcaccgcgggcaatgcggtggcgacgccgctggcgattgcgcaggcggacccctcgctggcatcggtcgctgtggcggctgcgccgctgattgccgcctcggtgattaccacggcgatcctgacgccggttctcagttcctgggtggcgaagcgtaatgcagcagcgaaggagaaggcggcatga

SEQ ID NO: 443757 - DNA, 921 bp, Serratia marcescens
atgatcgacagtgaaataaccctgaaaaaactggaaatctttctggcctttatggagacggaaaacatcgcccgcgccgccgaacggctggggctgagcggcgtcagcgtccaccgcgcgctgcatacgctggaagccggcatacgctgcccgctgtttatccatcaggggcgcaacctgcagccgctgcccgccgcccatacgctggcggactacgcccgcgatatcgtcgggctgacccataaaggtattgaagagacgcggctgaaggccggcttcgggcagcagcgcctgcggctcggcacgctctattcgctgacgctggaaacggtgccgcgcctgattatgggccttaagctgcgccgcccggagctggaaatcaatctgacgatgggttctaacgccgcgctgctggcgcaattgcagacgcagcaactggacgcgattctgatttccgtctccgacagccagatagatccgcagcgctttgagatccaaccgctgtttaaagacgatatttttcttgccgcccccgccagctccgcgctgatcgtcgacggcccggcggatctgcaggatttccgcagccagaaatttgtctcgctgaccgaagggttcgccacctaccacggctttaccgaagcttttcagatcgccggttttgagccggagatcgtcacccgggtcaacgatatcttctcgatgctcagtctggtgcaggccggcgttggctataccctgctgcccggccgcatgaaaaaggtttacgagcacacggtgcgtctgatgccgctgtgcgaacgctaccaaatgcgccagaccatcgcgctggtgttcaaccgcaatcagcagcaggatccgaacctgctggcgcttacggcggagagccgcatgtacgcccgtggggagcggccccgttaa

SEQ ID NO: 443758 - DNA, 933 bp, Serratia marcescens
atgaagattctgtttacctttcccggccaggggccgcagacgccgcagatgctgcatcaactgccggataacgccgtcagccgcgagctgctggcgcaggcgcgccaggtgctgggggaggatccgctgttgctggacagcgcgcaggcgctgcgaaaaacgcgcgcggtgcagctctgtctgctgattgccggcgtagcctatgcccgcgaactggagcagaacggcgtgacggccgatttcgtcagcggcctgtcgatcggcgcatttccggcggcggtggtggccggtgcgctgagtttcgaggatgcgctgcagctggtggcgctgcgcggcgagctgatggagcaggcttatccgcagggctatggcctggcggcgctggttggtctgtcgcaaggccgggtggaggcgttaatcgcgcagctgcatggcgggcagtcgccgctgtatctggccaatatcaacgccgaagatcagatggtggtggccggcagcgacgacgcgctgcagcaaattatggcgctggcaaaacaggccggtgcggcgaaggccagccggctggcggtcagcgtgccgtcccactgcccactgctggcgcagccggcggacaggctggcggcagctatgcgggcggtgacgctgcggcgtccgcgcattgcctatctgagcggcagcagcgggcgggtgctgtggcagcctgaacgtatcgccgacgatctggcctataacatggcgcgcaccgtgcgctggcatgaggcgatgacggcggcgtatgaacgggaagtacgtctggcgattgaaatgccgccgggggcggtgctcaccgggctgacgcgtaaggtgatgatgcagggagaagcgctgtcccgctgccagctggggctggcggcggtcgtcggcatcgtcgagcgctatcgccgcgaggtttaa

SEQ ID NO: 443759 - DNA, 615 bp, Serratia marcescens
atgatacgtccgcatgacctgctatggacggaaagcgtcgaggcgctgatatttcccggcgtttcaccggcatgggtggcgcggcagcagctgcgcgacttgccgctggtggtgcggcgcgatatgccgcgcgacggcgccgttccggtggggatccgcggcgaaacgcgcgcgcagcgggcggcggcctggttgccccctgcggcggtgcgccggcgggtgacgccggagtcgctggtggccgggctgtcggcggcgtcgcctttcgccgccctgccgccggtgcgggcgctgcgcgaactggcggcgcaaccgtggcgctgggcgtggggcgtgaccggcagctgcggctatgcgctggccaccggcctgccggtgatgcatccggacagcgatctggaccttaccgtacgctgcccgcagcccgtcgggcgtgcggcgctacatgcgctggcgcagcggctgcgcacgctgccgtgccgggtcgatctgcaggttgaaaccccatacggcggttttgcgctgaacgagtggctgcgcgacggacgggtgctgttaaaaaccaacggcggcccttatctgaccgatgcgccatggtcggcgccgcaggagtga

SEQ ID NO: 443760 - DNA, 960 bp, Serratia marcescens
atgacatacatcattattcatgcgttggcaccgatttttgtcatcatgctgctgggtttttacgccggcaagacaaaaatggtcgataaccagaatgtttctttgcttaatatttttgtgatggattttgctttgcccgcggcgctgttcagcgccaccgtacaaaccccgtggttgggcatcgtgcagcagtcgccgttgattgtggtgctggtgttggcgatgtggctgacctacgcggcgatttatgccgtcagcacccggttgtttcacaaatcgccgcaggatgcggcggtgctgacgctgaccgtggcgctgcctaactatgcggcgcttggcctgccgatcctcggcagcgtgttgggcgagtcgccgggcacctcgctgtcggtggcggtttccattgcctgcggctcggtgctgatgacgccgttttgcctgctgatcctggagcgagaaaaagcccgcgccggcggcggtgcacagcaggcggggttgcgtatgctgccgctgctgatgtggcgctcggtgattaaaccgattgtctgggggccgctgttgggcgtggtgctgtcggccatcggcgtgcggatgccggagatggtgctggcggcgatcaaaccgctcgggctggcggccaccgcggcggcgctgttcctgaccggggtgatcttgtcggcgcgccgcctgcaaatcaatgcctcggtgctgctggccagcgtcaccaaactgctgatccagccgtttatcgcctggggcatcgtgctggcgttagggctgcacggcagcgtggcgatcaccgcgatcctgatgattgcgctgtcggcgggctttttcggcatcgtgttcggcaaccgcttcggcgtccggtcgccggatgcggaagccacactattgataagctcggtgctgtgtatcctgacgctgccgctgtttatcactctgactgccggtctgtaa

SEQ ID NO: 443761 - DNA, 807 bp, Serratia marcescens
atgagcacgcagacaagaagccgcggtgactattggttttcgctgctgacgcaggggagcgaggaacggcgcggacagtgcgcctcggtcagggtcgccgacggcgatctcgacggacaggcggcgcgctttatcgccgtggtgccggacgccgacaaccattacccgcgtgccgcgcgcggcgaggtaggactgctggagggctggacgctggcgcaggtggtgagtgaagcggtggcggcagaccagaatcaaacgcagaaacgcgccatcgtggcgattatcgacgtaccgagccaggcctacggccgccgcgaagaggcgttcggcattcatcaggcactggcgggcgcggcgggtgcctacgcggcggcgcggctggccgggcatccggtgattgggctgatcgtcggcaaggcgatgtcgggggcgtttttggcgcacggctatcaggctaaccggctgatcgcctttaacgatgacggcgtgatgatccacgccatgggcaaggcatccgccgcgcgcattacgctgcgttcggtcgaggcgctggagaaactggccgcctctatcccgccgatggcctacgacatcggccactaccgctcgctggggctgctggaccagttgctggatatctgcgatccgttgcaggcgacgcagcaggagctggcgctggtgcgccagacgctcgccacggcgatcgcagacagccggcagcagggctgcgggctggaaaatcgcctgggggcggacaatcgccgcagttccgcgctggtgcgcgagcgcatgcgcgccgaatggtaa

SEQ ID NO: 443762 - DNA, 837 bp, Serratia marcescens
atgcgtgaagatctcagctttattgaactcagcgcccgtgagcgggcgcggcatttactcgacgacggcagcttccgcgaactgctggggccgtttgaacgtattacctcaccgtggctggagccgcagggcatcgtcacccaggcggatgacggcatggtggtggccaaaggcaccctgaacggccagccggcggtggtggcggcggttgagggggcgttccagggcggcagcatgggcgaggtttccggcgccaaaatggcggcggcgctggagctggcggcagaggataaccgcaacggcattccgacgcaggcggtgctgctgctggaaaccggcggcgtgcgtttgcaggaggccaatctggggctggcggcgatcgccgatattcatgccgctatcgccgacctgcggcgctataccccggtggtgggcattatcgccggtaccgtcggctgcttcggcggcatgtcgatcgccgccggcctgtgcagctacctgatcgtcacccgcgaggcgcgcctggggcttaacggcccgcaggtgattgagcaggaggcgggaattgacgagtacgactcccgcgaccggccgtttatctggagcatgaccggcggcgaggtgcgttaccgcagcggtttcgccgacgttgaggtggaggacgcgctgcatcaggtgcgcgctgcgatgctggattgcctggcgcgcggcgtgccggcgcagcaccgcagtgaacgctatgactattacctgccgaaactgacgcagtttgacagccgtcagcaggcggacgtcgccgtggtggcgcaacttttcactcgggaggatcgcgcatga

SEQ ID NO: 443763 - DNA, 300 bp, Serratia marcescens
atggaacgtattgaattgagctatccggctgtggagcgcgtggtcggccaacggttggccggcgtggttggctccggcgatatggaggcgttgtttgaacctgcagaggacgatgtgctgcgggtagtgattaaaacctcggtcgacggcagccagcagcgttggcggcatctgttcgagcgtttggctgcgctgcgcagcctgccggcggggcaactggagatcaacgatttcggcgcgacgccgggggtggcgcgtctgcggattgagcaggtatttgaggaggccggccatgcgtga

SEQ ID NO: 443764 - DNA, 855 bp, Serratia marcescens
atgacactttccccctgcagcagtgcgtcgcgggtcgatgccgtcgcgctgagtctggcggacgccgccactcgggcgctgattgacgaggcgcgcctcagcccgaagccggggctggtggacgcgcgcggcagcggtgcgcatcaggatctgacgctggcgctgatggagcgttctgctctcagtctgcatgacaccttctatgcgttggcgatcgccggctggcagcgcccggcggacggcgcgctgcgtcaggagattggccgcatcggtcgtgagggcgaacggcagatgatggcggcgaccggcggggtgaacacccatcgcggcgccatctgggcgctggggctgctggtgacggcgctggcgatgcgggaggggcgcgccgacgcgcggcaaacctgcctgcgggcggcgcagctggcgcagttgacagacccggccagtccgaaatcgttcagcaacgggctgtgcgcttcccggcgctatcgggtgcccggcgcgcgggaagaggcgcagcaagggtttccgcacgtgctgcgtctggcgctgccgcagctatggcgcagccgcgcagccggcgccgacgagcaggcggcccggctcgacgcgctgatggcgatcatgaccagcctgagcgacacctgcgtactgtcgcgcggcggctggccggcgctgcaggcgatgcggcagggcgcgcaggcggtactgtgcgccggcggttatcagcggccggaagggcgggtgcagctggcgcggctggaacagcggctgctggcctgcaacgcttcgccgggcggggcggcggacttattggcggcggcgctgttgctcgatcgggcggcgggccgctga

SEQ ID NO: 443765 - DNA, 1662 bp, Serratia marcescens
atgtcgctttatcaacagcccgcccgcgtctgggatacccgacgtcaggagaaacaacgccggctggccagcgtacaggggcaggtgcaagggaaggtgatccctaccgcagatttaaccgcggcgctggaacggctgctggtgccgggggaccgcgtggtgctggaagggaacaaccaaaaacaggcagatttcctttcccgcatgctggcgcaggtcgacccgtcgaccgtgcacgatctgcatatgattatgccgagcgtcggccgcgccgaacatctggatattttcgaaaaaggcattgcccgcaagctggacttcgccttttccggcacccagagcctgcgtatttctcagctgctggaagatggccagctggaaatcggcgccatccacacctatatcgaactctattcgcgtctgtatgttgacctggtgccgaacgtggcgctggtggccggtttcaaggccgaccggcagggcaatctgtataccggccccagcaccgaggataccccggcgctggtggaggccgcggcgtttaaagacgggatcgtgattgctcaggttaacgagctggtggacgacgaaactgacctgccgcgggtcgatattcccggttcgtggatcgactttgtggtggtggcggatcggccgttctttatcgaaccgctgtttacccgcgatccacggctgatcaaacccgtccacgtactgatgggcatgatggccatcaaaggtatctacgccgagcatcaggtgcagtcccttaaccacggtatcggcttcaacaccgccgccatcgaactgctgctgccgacctacggcgagcggctggggctgaaaggcaaaatctgcaaacactggactctgaacccgcacccgaccctgatcccggcgattgaaagtggctgggtggaaaccgtgcactgttttggcggcgaactgggcatggaggattacatcgccgcgcgtccggatattttcttcaccggccgcgatggttcgatgcgttccaaccgcgccttctgccagatggcgggtcagtacgcggtggatatgtttatcggctccacgctgcagattgacgccatggcgcactcgtccaccgtaacgcgcggacgcctctccggcttcggcggcgcgccgaatatgggccacgatccgcatggccgccgtcatgccactcccgcatggctggatatgatcgaggagccggatccgctggcgcgcggccgcaagctggtggtgcagatggtggaaaccttccaggccggcgcgaagccgacctttgtcgagaagctcgatgcaatcgacgtcgccaaagacgccggcatgccgctggcgccggtgatgatttatggcgatgacgtcacccacgtactgaccgaagagggcatcgcctatctgtaccgcgcccgttcgctggaggagcgccgcgcgatggtcgccgccgtggccggcattaccgatatcggcctgggcgtggacgccgcgcgggtggcgcagctgcgccgcgaaggcaaagtggcgtacccggaagatatgggcatccgtcgcaccgaggccgaccgttcgctgctggcggcgggcagcgtggccgatctggtggactggtctggcggtctgtataacccgccggctaaattccggagctggtga

SEQ ID NO: 443766 - DNA, 618 bp, Serratia marcescens
atggcgcaaatgggacgtccccgcagctttgaccgccagcaggccatcgaacaagcgatgcacctgttctgggagcagggctatgaatcaacctcgctcagccagctaaaggcgagcattggaggtggtatttccgccccgagtttctatgcggctttcgggtcgaaagaggcgctgttcaacgaggcggtgcagtgttatctggaaagctatgcgcgtgtgacggattgtctttgggaggacgcgctggcgccgagagaggccgttgaactggcgctgcgtcagtcgacgaccatgcagtgtgagccggggcatccgaaggggtgtatggttgctttcggcgtcatgagtgcgccgacgcccgcgcatgccgacgtggccaaaccgctggcggaatcgcgtgcgcgaacgtatgccggatttatccgctgcgtcgaacgtgccattgccgccggcgagctgacggcgagcaccgacgcccgggcgctggcgaccgtattcaacagttttttgctgggcatctcaacgtcagctcgggatggtgttgacgtagcgacctttcagggagctattgccgaagtgatgaaagtctgggacgcgctgcgtaagcaggcgtag

SEQ ID NO: 443767 - DNA, 1221 bp, Serratia marcescens
gtgaatcactcatccactcaggcgacatcggccaccgccgcccgcctgcccgtcgccgccctgctggctttggccatgacgggatttatctgtatcgtgaccgaaacgctgcctgcaggcctgctaccgcaaatcagtcagggactcggcgtcaatccggcgctgaccgggcaaatggtgacggcatatgcgctgggctcactgctggccgccatcccgctgacgattgcaacacgcagttggcggcggcgtaacgtcctgctgctgactatcatcggcttccttctcttcaactcagccaccgcgctatctacccactatgccgtcacgctggtcgcccgcttctttgccggcgtcgccgcagggctggcctggagcctgctggccggctacgcccggcggatggtcgcgccttatcagcaaggacgcgccctggccatcgccatggtgggaaccccaatcgctctctctctgggggtgcctatggggaccttcatgggatcgacaatcggctggcgcagcgcattctggatcatgtcggccctgacgctgctgctgatcgtctgggtatacgccaaagtccccgattaccccggtcagtccgcccatcaacacatgccgctgcgccgggtcttcaccacgcccggcgtacgcccggtattggcagtggtaatcacctggatgcttgcgcacaacattctctatacctatatcgctccgtttatcgcgccggcgggaatggctgaccgaaccgatctggtgctgttcgccttcggcgcagcggcgctcgccggcatctggatcaccggccggctggtggagcgccacctgcgcgccacggtactggccagtctcgccgccttcgcgctcaccgcgttcgccttcggcgtcggtgcgcaagatcccgccgtgatttatctgggggtgatcgtatggggcatcacgttcggcggtgcggcaaccctgttgcaaaccgcgctggccgatgcggcgggagacggcgctgacgtggcgctctccatgaatgtggtggcctggaactcggcgatcgccggcggcggcgtgatcggcggcatgctgcttgatacctgggaggccagcgttttcccctgggcattgctgatcctgctggccgttgcgttcgccatcgcctggtcgtcccgtgaatacgctttcaaaccgggacatcgtctcggcagttcccatatcgtgagccactga

SEQ ID NO: 443768 - DNA, 1401 bp, Serratia marcescens
atgaagagcaatgccctttcgataaaagaaaagatcggttacggcatgggggacgccgggtgcaatatgattggcggcgccatcatgctgttcctcaactatttttacaccgacatctttggcctgacgccggcgctggtaggcattctgctgctgtcggtgagggtgctggacgcggtcaccgatccgattatgggcgccatcgccgaccgcacccaaagccgctgggggcgcttccgcccctggctgctgtggatctccctgccctatgtgctgttcagcgtgctgatgttcaccacccccgagtggagctataacagcaaggtggtctatgccttcgccacctattttctgatgtcgctgacctataccgccatcaacattccttactgctcgctgggcggcgtcatcaccgccgacccgcacgagcgggtctcctgccagtcgtaccgctttatcatggtcggaatcgccaccctgctgctgtcgctgacgctgctgccgctggccgactggttcggcggcgacaacaaggcgcgcggttatcagatggcaatgggcgtgctggctttggtggcgctgtttatgtttctgttctgcttcgcgacggtcaaagagcgtatccgcccggcggtgccgaccaacgacgcgctgaaagccgacctgcgagacgtctggaaaaacgatcagtgggtgcgcattctgctgctgaccttctgcaacgtctgccccggctttatccgcatggcggccaccatgtactacgtcacctatgtgatgcaacagtcatcgtctttcgccagcctgttcatcgcgctcggcgtggtcgggatgatgatcggcagcgcgctggccaaaccgctcaccgaccgcttttgcaaacttcaggtattcttctggactaatatcgcgctggcgctgttctcctgcgccttctatttcctcaacccgcagctgacctggaccatcgtggtggcctatttcctgctgaatatcctgcaccaaatcccgtcgccgctgcactggtctctgatggccgacgttgatgactacggcgaatggaaaaccggcaaacgcatcaccggcatcagcttttccggtaatctgttcttcctgaaggtggggctggcggtggccggcgcgatggtcggcttcctgatgtcgctgtccggctaccaggcggacgccgccagccagagcgccggcgcgcttaactgcatcgtcctgctgtttaccgtcattcccggtatcggctacctgatcaccgccggcgtggtgcggctgctgaaagtggaccgcgacctgatgcggcaaatccaaagcgatctggccaagcgccgcgccaactaccaggaattggccgactaccgtgagcgccagcttgaaacccggcacagctaa

SEQ ID NO: 443769 - DNA, 951 bp, Serratia marcescens
atgaaaatctatcccaacccgctgattacgcaacgcgccgatccctttatcctgcgccacagcgacggcaactactactttatcgcatcggtgccggagtacgaccggttggagctgcgccgcgccaccagcctgacaggtctggcgcaggccacgccgcacgtcgtctggcgcaaaccggccagcgggccgatgagcgccctgatctgggcgccggagctgcatgtgatcgacggcgtctggtatatctacttcgccgccgcccacagcccggagattaaggacggtctgtttcagcaccgcatgttcgcactggcttgcagcgacgccgatccgctcaccggcgaatggcaggagaaaggacgcattcacagccatctcgacagcttctcccttgacgccacctactttaaccaccgcggcaggcattactatctgtgggcgcaaaaagatccggccatacgcggtaactccaacctgtatctggcggaaatgaccaacccgtggacgctgcaagggaagccggtgatgctcagcaagccggaactgccctgggagacgcggggtttttgggtgaacgaagggccggcggtgatccgccacgggcagcggattttcatcagctactccgccagcgccaccgacgagaattactgtctcgggctgctgtgggcggatatcgacgccgacctgaccgacccggcacaatggcataagtcgccgcagccggtgtttcgcaccagttacgacaaccgccagtacggccccggccacaacagctttacccaggatgaagacggcaacgacgtgctggtgtaccacgcacgcaactacaccgaaattgacggcgatccgctgtacgaccctaaccggcatacgcgcatcaaaaccctgtcctgggatgaacagggcatgccgctgtttggcgaaccaccggcggataatcagtga

SEQ ID NO: 443770 - DNA, 570 bp, Serratia marcescens
atgacgacaggtattgtgattgccgccgccggacgcagtgaacgctttatccgggccggcggcagcggaaacaaactgaatgcgcccctgggcgaacgcaccctgttcgcccagacgctgcagcaggcgcaggccagcggcctgccgctggtcgtggtgacccggccggacaatcagcccgtacgccggcactgcgccgcacatcacgtcgagacggtattgctggacagccgcgggctgggggaatccatcgccgccggcgtggcggcccgtccgcagtgggacggctggctgatccatctggcggatatgccctttgtgcctgctgaaatattcaggcaaaccgcagcggcgctacaaaaatatgcgatcgcccgcccctgcgttaacgggcgcccggggcatcccgtcggcttttccgctacgctgcgcaacgcgctgtgcgccctgcgcggcgatgacggtggacgttctgtgctgtttgaccaggaagtgcacctgatttcggttgataacccgggcatcgtacaggatattgatcttccctctcagttagcggacagcgagtag

SEQ ID NO: 443771 - DNA, 975 bp, Serratia marcescens
atgcaacatctcgatatcaccgtcgtcggtcaggccatgtcctggctgcaacagcagccggtctggctgtgcaccgtgctggccacctacggctcttcgccgcgatcgcccggcgcgctgatggcggccggcgccgatggccgctactgcggctcgctctccggcggctgcgtggaggaggattttctgcagcgcatcgccgccggcgactatcaggcggccagccaggtggtgcgctacggcgaaggcggcctgacgccgaacgtggcgctgccctgcggcggcgtgctggaggtgctgattgagtacctgccggccggtgaacatagcattcgctatctggcgcagatggccgcggcgctggacggccaccacgcgctggtcaaacgcctgacgctgccgcacgcctgcaccgtgctggaagaaacgccctttgccagcgccacgcagattgaacgccgcggtgaggagatcgccctgcatatcgccgccgcgccgcgcctgctgatcgccggcctgtccagcgtggcgctgtactgcgccgacttcgccgccgcgctgggttttgaagtgctggtgtgtgaaaaccgtcccgaggcgctggagaacttcgccgcccagttgacgccgtcggtcacgctggtgcggcaatttccggccaaatttattgaggaaggcggctgccacggcaacacggcggtagtcgcgctgacccacgacccgcgtatggacgacctgacgctgatggaagccattcataccccggcgttttatatcggcgcgatgggctcccagcagaacagcgcccgccgccgccagcggctgcaaaacattgccgaatttaatccgcagcagctaagccgcattcacgcgccgattggcctgccgctcggcagcaagaccccggcggaaatcgccctggcggtcatggctgatattgtgaaacaaaaaaatatccgtccttcctcggactga

SEQ ID NO: 443772 - DNA, 1398 bp, Serratia marcescens
atgagtaccgtaacaaccacaggcaaaagccggtcaaatgcccaaatgactttctttgtctgtttcctcgccgcactggcgggtctgctgttcggcctggatatcggcgttattgccggtgcgctgccgtttattaccaatgagttccagatcaccgcgcaccagcaggagtgggtagtcagctccatgatgttcggcgcggcggtcggcgcagtcggcagcggctggctctcctaccgactgggacgtaaatacagcctgatgatcggcgccgtgctgtttgtcatcggatcgctgtgttccgccttcgcccctaacgtcgaagtgctggtggtttcccgcgtgctactggggctggccgtcggcatcgcctcgttcaccgcgccgttgtacctgtcggaaatcgcgccggagcgcatccgcggcagtatgatttccatgtaccaactgatgatcaccatcggcattctggcggcctacctgtcggataccgcgttcagctacagcggcgcctggcgctggatgctgggcgtcatcaccatcccggcgctgctgctgctgatcggcgtgttcttcctgccgcgcagcccgcgctggctggcgtcacgcggacggcatgaagaggcgcgccaagtgctggacatgctgcgtgacaccaccgaacaggctaaggccgaactggatgaaatccgcgaaagcttgaagatcaaacagggcggctggtcgctgtttaaagacaacaagaatttccgccgcgcggtatatctcggcattctgctgcaagttatgcaacagttcaccggcatgaacgtcatcatgtattacgcgccgaaaatcttcgatctggccggtttcgccagcacctcacagcaaatgtggggtacggtgatcgtcggtctggtcaacgtgctggcgacctttatcgccatcgggttggttgaccgctggggccgcaagccgacgctgaaactgggcttcctggtgatggcggtcggtatgggcgtactcggcaccatgatgaacatcggcatcgccagcaccgccgcacagtacttcgccgtcctgatgctgctgatgtttatcgtcggcttcgccatgagcgccggcccgctgatttgggtactgtgctcggaaattcagccgctgaagggccgcgatttcggcatcacctgctccacggcggtgaactggatcgccaatatgattgtcggcgccaccttcctgaccatgctgaacagcctgggcagtgcacacaccttctgggtatacgccgcactgaacctgctgtttatcgtgctgaccatcgtgctgattccggaaaccaaaaacatttctctggaacagatcgagcgtaatctgatgtccggcaaagcgctgcgcgatatcggctcacgctaa

SEQ ID NO: 443773 - DNA, 540 bp, Serratia marcescens
atgctagcggcgatgaacaaaatcagaatccctatcgcactgcaacaagcagtgatgcgctgcctgcgggaaaaactgcagctggcccggcaacattttgccgaagaatttccggaacccaaggtcgtttaccagcagcgcggcaccagcgccggcaccgcctggctgcaagactgggagatccgccttaacccggtgctgctgatggaaaacaagcagtcgtttattgatgaagtcgtgccgcacgaactggcgcacctgctggtattccgccgtttcggtcaggcggcagcgccgcacggccgcgaatggcgctggatgatggaagaagtgctgcagacgccggccagccgcacccatcaattcggcatcgcctcggtgcagagcaaaaccttcccttaccagtgccgctgccagctgcatcagctgacggtgcgtcgccataaccgcatccagcgcggcgaaagcgagtaccgctgccgccgttgcggcgaaaaactggtcttctccgccggcgaaacgcgcgaactgcgcgattga

SEQ ID NO: 443774 - DNA, 696 bp, Serratia marcescens
atgcttcgcaaaattttgttcgcaatggttttcatttctggcgcggttaacgcgcatggcatcaacaacttctcccaggccaaagcggcagcggtcaaaatcaatcaggacgcccccggcagcttctactgcggctgccaaattcagtggcacggcaagaaaggcatccccgacctccacggctgcggctttcagccgcgtaaaaatgcccagcgcgccggccgaatcgaatgggaacacgtggtgccagcctggcagttcggccaccagctgcagtgctggcgcgacggcgggcgtaaaaactgcaacaaggatccggcataccgcaaaatcgaaaccgatctgcacaacctgcagccggcgatcggcgaagtgaacggcgaccgtagtaactttatgtacagccagtggcgcggcggtgaaggccaatacggccagtgtccgatgaaggtcgacttcaaacacaaacaggcggaaccgccggcccgcgcccgcggcgccatcgcccgcacctatttctatatgcgcgatcgctaccggctgcgtctgtcacgccagcagacccggctgtttgaggtgtggaaccgtcagtacccggtcagcgactgggaatgtcgccgcgaggcacgcatcgctaaggtacagggaaaccataacccgtatattcagcaggcttgccagcagcgcaaaagctaa

SEQ ID NO: 443775 - DNA, 732 bp, Serratia marcescens
atgcgcatacctcgcatctatcacccggaaccgctgagttcccattcagaagtcgccctgagcgaagacgcggccaaccatgtcgggcgcgtgttgcgcatgggcccgggccaggcgctgcagctgtttgacggcagcaaccaggtgttcgacgctgaaatcacccaggcggataaaaaaagcgtacgggtgcgcaccggcgacggccggctggaagatcgcgaatcgccgctgaacctgcatctcggccaggtcatctcacgcggcgacaaaatggagttcaccatccagaagtccatcgagctgggagcgaataccattacgccgctgttttccgaacgctgcggcgtctcgctgtccggcgaacgcctggcaaagaaactccagcagtggcaaaaaatcgccatcgccgcctgcgaacagtgcggccgcaaccgtattccgctagtccgcccggccatggcgctggaagcctggtgcgccgagcaggacgacagcctgaaactgaatctgcatccgcgcgccagccacagtatcaatacgctgccgctgccggttaaccacgtccgcctgctgatcgggccggaaggcggcctgtccgccgatgaaatagcaatgacctccgggcatggatttaccgatatcctgctggggccacgcgttctgcgtaccgaaactaccgcgctcaccgcaattaccgccctccaggtgcgtttcggcgatctgggttaa

SEQ ID NO: 443776 - DNA, 564 bp, Serratia marcescens
atgaatttacagcaccactttcttatcgccatgccaaccatgcaggatccccgtttcaaacgctcggtgatttacatctgcgagcataacgaagaaggcgccatggggttggtgatcaacaaacccgtggaacagtttacggtagaaagcgtgctggataagctgaagattgcgccggccgatcgcgacccggccatcagcctggataaaccggtgtatgccggcggcccgctggcggacgaccgcggttttattctgcatacgccgcagccgggctttgacgccagcattcagatttcgccggagaccatgatcaccacctcacgagacgtgctggagacgctgggcaccccggagcagccgcaggaagtgctggtcgccctcggctatgccggctgggaaaaaggccagttggagcaggaggtgttggaaaacgcctggctgaccgcagaagccgacagcgaaatcctgttccacacgccgatcgccaaccgctggcgtgaagcggccaaccgtctcggcgtagatatccgcagcatcgccaaccatgcaggacatgcctga

SEQ ID NO: 443777 - DNA, 426 bp, Serratia marcescens
atgagcaaccgcaccctcatcgcctttgacttcggcaccaaaagcatcggcgcggccatcggtcaggaaattaccggcaccgcacgcgcgctggcggcgtttaaagcacaggacggcacgccggactggcagaaaatcgaaaaaatgctgcaggagtggcagccggatctggtcatcgtcggcctgccgctcaatatggacggcacggaacagccgctgaccgcccgggcgcgcaagttcgccaaccgcctgcatggccgcttcggcgttcaggtggagctgcatgacgagcggctgagcaccgtggaagcgcgttcgcatctgtttgaccgcggcggtttccgcgcgctggataaaggcagcgtggattccgcctcggcggtggttattctggagagctggttcgagcagcatctgggagcgtaa

SEQ ID NO: 443778 - DNA, 2166 bp, Serratia marcescens
atgaaacccgccctgcgctttaccctgcttcctctggcgcttgccaccacttgcgcgcaggcggaagtgaacaaaatttaccttatctttaacgatacctataaaggccgcgctgcagttacgctggatgcggcgggtatgccgtgcgtgactcctaccttgctcagcgagtggggcgtacggggaaaactcgccgcagggctggcgacctcggccgatggctgcgtgtcggccgacgaacccggcgtgcagttcttttatgaaccggtatcacaactgctgacggtggacgtttcaccgcggatggtcggcggcggcgatatcagccatcgttgggacgacggcgttaacgccggttttatcgactaccagcttaactacggccactatgccgccgagcgttatcgggacgccgaacggcgctatagcctgtttgcggaattgaacaccggcctgaacctgggggcatggcgtttgcgttaccagccggtctatcagaaagacgcctggggccagccaagctggcatacggaaaaagcgctggcctatcgcgatctgaaagcctggcgcgcattgttgagcatcggtgataacaacacgccgtcgaccctgtttgataacgttaagtaccgtggcatccagctggcgtcggacgatcggatgctgccggagagcctgcggcagttttcgccgtggatccgtggtatggcgcgcagcaacgccgaggttaaagtgcggcaaaacggcgaggtgatttaccagacttttgtatcccccggcgcgtttattctgaaggacgtgtatcccccggatcccgatggcgacattagtgtgaccgtgcgtgaaagcgacggaacggaaaccgagcgcaaactgccttactccgcgatgccgaatctggtgcacggcggcaggctcaagtacgatctgacgctgggtaaataccagccctattttggcatagaacagcagcagccacagtttggcctgctgtccgccagttacggcctgccggcgaaaaccacgctgtatggcggcatattgctgtccgggctgtatcgcagcgccgccgtgggcgtggggaaaagcttcaaccagtggggggcgctgtcggtggattacaactatgccgcggcgcgtcagccgcgtcgttctgccgacgatcgcggcggcatgtggcgcctgcgttacgccaaggtaatcccgtcctgggagtcatccgtcagcctgctggcgcaatattatccgcggcagcgttaccggacgtttggcgacggggtagagcagcagacgctttactggtgggattgggatgacgatatgtttatcggcgatttcgacgccgagaaaaagtaccgtctggaggcgcgttacaatcagtacttctccgagtcggacagcctgtatctgacgctggcgcgtgaggcaatgcgcggccaggataaaggtgaaaccagcgtagagttggggtacagcgccacctggggcgcggttgacgtcaatctgtatgcggaatacagccgcaggaattacggcaaagagcaggggcaggtcgggctgtcgctttcagtaccgctgggcaaactggcgctgccgcgtatgaagttgaattacgaccaccggctggcgaaaaacggcgccggcagccggcgggtcggcgtcagcggtacgctgctgtcggattacagcctgagttacgatctcagcaccagccagagccagagctatggcagcagtcaggatgccagcgccagttatcagtacaacgccggttcgctgcgtctcggctatgcacgcggtcggaactatcgccagcagaatgtcgagctggccggcagcctgatggcccatgccggcggcgtgacgctggggcaaacgctgggggaaaccatggcgatcgtacaggtgcccggctcatcgggtatcggcgtcgacaaccagtacggcgtcactaccgactggcgcggctatgcggtggtcagcacgctgaccccttatcggattaaccggctgtcgttggatacctttgagctgcccgacgacgaagaattaccgcagccggaaatcgaggtggtgccgacggcgggggcgatcatgttcagccgcttcgcgccggcgcagaaacttacgctcccagatgctgctcgaaccagctctccagaataa
